(19) United States
(12) Patent Application Publication
(10) Pub. No.: US 2023/0272435 A1
(43) Pub. Date: Aug. 31, 2023

(54) DISCOVERY AND ENGINEERING OF INTEGRASES FOR HIGH-EFFICIENCY GENE INTEGRATION

(71) Applicant: Massachusetts Institute of Technology, Cambridge, MA (US)

(72) Inventors: Omar Abudayyeh, Cambridge, MA (US); Jonathan Gootenberg, Cambridge, MA (US); Lukas Villiger, Cambridge, MA (US); Justin Lim, Boston, MA (US)

(21) Appl. No.: 18/048,238

(22) Filed: Oct. 20, 2022

Related U.S. Application Data
(60) Provisional application No. 63/262,829, filed on Oct. 21, 2021.
(60) Provisional application No. 63/265,002, filed on Dec. 6, 2021.

(51) Int. Cl. C12N 15/90; C12N 9/22; C12N 15/11; C12N 9/12

(52) U.S. Cl. CPC C12N 15/907; C12N 9/22; C12N 15/111; C12N 9/1276; C12N 2310/20; C12N 2800/30; C07K 2319/80

(57) ABSTRACT

This disclosure provides novel integrases for site-specific genetic engineering. Also provided are systems, methods, and compositions for site-specific genetic engineering using Programmable Addition via Site-Specific Targeting Elements (PASTE) with the novel integrases.

### RELATED APPLICATIONS

[0001] This application claims the benefit of U.S. Provisional Patent Application Ser. Nos. 63/262,829 and 63/265,002 respectively filed on Oct. 21, 2021, and Dec. 6, 2021, the entire disclosures of which are incorporated herein by reference.

### SEQUENCE LISTING

[0002] The instant application contains a Sequence Listing which has been submitted electronically in XML file format and is hereby incorporated by reference in its entirety. Said XML copy, created on Oct. 20, 2022, is named 733335_083474-027 SL.xml and is 73,894,000 bytes in size.

### STATEMENT REGARDING FEDERALLY SPONSORED RESEARCH OR DEVELOPMENT

[0003] This invention was made with Government support under Grant No. R21 A1149694 awarded by the National Institutes of Health. The Government has certain rights in the invention.

### BACKGROUND

[0004] Integrases provide efficient modes for non-programmable genome integration. Site-specific integrases, such as large serine phage integrases, efficiently integrate their DNA cargo into sequence-defined landing sites that are about 30-50 nucleotides long and can be used to insert therapeutic transgenes at naturally occurring pseudo-sites in the human genome in pre-clinical models (Brown et al. Methods. 2011. 53: 372-379; Calos. Curr. Gene Ther. 2006. 6: 633-645). Targeted integration can also be achieved by a two-step approach involving prior insertion of integrase landing sites at a desired location using homology-directed repair (HDR) (Mulholland et al. Nucleic Acids Res. 2015. 43: e112). However, the inefficiency of two-step integration with HDR and the risks associated with double-strand breaks (DSBs) have limited this approach in mammalian cells. Furthermore, a major issue limiting clinical application of certain integrases, such as phiC31, is that chromosomal rearrangements between pseudo-sites can occur, leading to a significant DNA damage response (Ehrhardt et al. Hum. Gene Ther. 2006. 17: 1077-1094; Liu et al. Gene Ther. 2006. 13: 1188-1190).

[0005] Accordingly, there exists a need for novel integrases that are compatible as fusions with programmable DNA binding proteins.

### SUMMARY

[0006] In one aspect, the disclosure provides an integrase or fragment thereof comprising an amino acid sequence that is at least 80% (i.e., 80%, 81%, 82%, 83%, 84%, 85%, 86%, 87%, 88%, 89%, 90%, 91%, 92%, 93%, 94%, 95%, 96%, 97%, 99%, or 100%) identical to an amino acid sequence set forth in any one of SEQ ID NOs: 1-16.

[0007] In certain embodiments, the integrase fragment comprises integrase, recombinase, or transposase activity.

[0008] In certain embodiments, the integrase or fragment thereof comprises one or more mutations.

[0009] In certain embodiments, the integrase or fragment thereof is encoded by a codon optimized nucleic acid sequence. In certain embodiments, the nucleic acid sequence is codon optimized for expression in humans.

[0010] In certain embodiments, the integrase binds to nucleic acid attachment sites attB and attP, other recognition site pairs, or any pseudosites in a human genome.

[0011] In certain embodiments, the attB and/or attP nucleic acid sequence is between 12 and 60 nucleotides in length or between 18 and 50 nucleotides in length.

[0012] In certain embodiments, the attB and/or attP nucleic acid sequence comprises one or more truncations.

[0013] In certain embodiments, the attB and/or attP nucleic acid sequence is truncated by 1 to 32 nucleotides from one or both of the 5′ end and 3′ end.

[0014] In certain embodiments, the integrase binds to any one of the attB nucleic acid sequences selected from the group consisting of SEQ ID NOs: 17, 19, 21, 23, 25, 27, 29, 31, 33, 35, 37, 39, 41, 43, 45, and 47.

[0015] In certain embodiments, the integrase binds to any one of the attP nucleic acid sequences selected from the group consisting of SEQ ID NOs: 18, 20, 22, 24, 26, 28, 30, 32, 34, 36, 38, 40, 42, 44, 46, and 48.

[0016] In certain embodiments: a) the integrase or fragment thereof comprises an amino acid sequence that is at least 80% (i.e., 80%, 81%, 82%, 83%, 84%, 85%, 86%, 87%, 88%, 89%, 90%, 91%, 92%, 93%, 94%, 95%, 96%, 97%, 99%, or 100%) identical to an amino acid sequence set forth in SEQ ID NO: 1, wherein the integrase binds to the attB nucleic acid set forth in SEQ ID NO: 17 and the attP nucleic acid set forth in SEQ ID NO: 18; b) the integrase or fragment thereof comprises an amino acid sequence that is at least 80% (i.e., 80%, 81%, 82%, 83%, 84%, 85%, 86%, 87%, 88%, 89%, 90%, 91%, 92%, 93%, 94%, 95%, 96%, 97%, 99%, or 100%) identical to an amino acid sequence set forth in SEQ ID NO: 2, wherein the integrase binds to the attB nucleic acid set forth in SEQ ID NO: 19 and the attP nucleic acid set forth in SEQ ID NO: 20; c) the integrase or fragment thereof comprises an amino acid sequence that is at least 80% (i.e., 80%, 81%, 82%, 83%, 84%, 85%, 86%, 87%, 88%, 89%, 90%, 91%, 92%, 93%, 94%, 95%, 96%, 97%, 99%, or 100%) identical to an amino acid sequence set forth in SEQ ID NO: 3, wherein the integrase binds to the attB nucleic acid set forth in SEQ ID NO: 21 and the attP nucleic acid set forth in SEQ ID NO: 22; d) the integrase or fragment thereof comprises an amino acid sequence that is at least 80% (i.e., 80%, 81%, 82%, 83%, 84%, 85%, 86%, 87%, 88%, 89%, 90%, 91%, 92%, 93%, 94%, 95%, 96%, 97%, 99%, or 100%) identical to an amino acid sequence set forth in SEQ ID NO: 4, wherein the integrase binds to the attB nucleic acid set forth in SEQ ID NO: 23 and the attP nucleic acid set forth in SEQ ID NO: 24; e) the integrase or fragment thereof comprises an amino acid sequence that is at least 80% (i.e., 80%, 81%, 82%, 83%, 84%, 85%, 86%, 87%, 88%, 89%, 90%, 91%, 92%, 93%, 94%, 95%, 96%, 97%, 99%, or 100%) identical to an amino acid sequence set forth in SEQ ID NO: 5, wherein the integrase binds to the attB nucleic acid set forth in SEQ ID NO: 25 and the attP nucleic acid set forth in SEQ ID NO: 26; f) the integrase or fragment thereof comprises an amino acid sequence that is at least 80% (i.e., 80%, 81%, 82%, 83%, 84%, 85%, 86%, 87%, 88%, 89%, 90%, 91%, 92%, 93%, 94%, 95%, 96%, 97%, 99%, or 100%) identical to an amino acid sequence set forth in SEQ ID NO: 6, wherein the integrase binds to the attB nucleic acid set forth in SEQ ID NO: 27 and the attP nucleic acid set forth in SEQ ID NO: 28; g) the integrase or fragment thereof comprises an amino acid sequence that is at least 80% (i.e., 80%, 81%, 82%, 83%, 84%, 85%, 86%, 87%, 88%, 89%, 90%, 91%, 92%, 93%, 94%, 95%, 96%, 97%, 99%, or 100%) identical to an amino acid sequence set forth in SEQ ID NO: 7, wherein the integrase binds to the attB nucleic acid set forth in SEQ ID NO: 29 and the attP nucleic acid set forth in SEQ ID NO: 30; h) the integrase or fragment thereof comprises an amino acid sequence that is at least 80% (i.e., 80%, 81%, 82%, 83%, 84%, 85%, 86%, 87%, 88%, 89%, 90%, 91%, 92%, 93%, 94%, 95%, 96%, 97%, 99%, or 100%) identical to an amino acid sequence set forth in SEQ ID NO: 8, wherein the integrase binds to the attB nucleic acid set forth in SEQ ID NO: 31 and the attP nucleic acid set forth in SEQ ID NO: 32; i) the integrase or fragment thereof comprises an amino acid sequence that is at least 80% (i.e., 80%, 81%, 82%, 83%, 84%, 85%, 86%, 87%, 88%, 89%, 90%, 91%, 92%, 93%, 94%, 95%, 96%, 97%, 99%, or 100%) identical to an amino acid sequence set forth in SEQ ID NO: 9, wherein the integrase binds to the attB nucleic acid set forth in SEQ ID NO: 33 and the attP nucleic acid set forth in SEQ ID NO: 34; j) the integrase or fragment thereof comprises an amino acid sequence that is at least 80% (i.e., 80%, 81%, 82%, 83%, 84%, 85%, 86%, 87%, 88%, 89%, 90%, 91%, 92%, 93%, 94%, 95%, 96%, 97%, 99%, or 100%) identical to an amino acid sequence set forth in SEQ ID NO: 10, wherein the integrase binds to the attB nucleic acid set forth in SEQ ID NO: 35 and the attP nucleic acid set forth in SEQ ID NO: 36; k) the integrase or fragment thereof comprises an amino acid sequence that is at least 80% (i.e., 80%, 81%, 82%, 83%, 84%, 85%, 86%, 87%, 88%, 89%, 90%, 91%, 92%, 93%, 94%, 95%, 96%, 97%, 99%, or 100%) identical to an amino acid sequence set forth in SEQ ID NO: 11, wherein the integrase binds to the attB nucleic acid set forth in SEQ ID NO: 37 and the attP nucleic acid set forth in SEQ ID NO: 38; 1) the integrase or fragment thereof comprises an amino acid sequence that is at least 80% (i.e., 80%, 81%, 82%, 83%, 84%, 85%, 86%, 87%, 88%, 89%, 90%, 91%, 92%, 93%, 94%, 95%, 96%, 97%, 99%, or 100%) identical to an amino acid sequence set forth in SEQ ID NO: 12, wherein the integrase binds to the attB nucleic acid set forth in SEQ ID NO: 39 and the attP nucleic acid set forth in SEQ ID NO: 40; m) the integrase or fragment thereof comprises an amino acid sequence that is at least 80% (i.e., 80%, 81%, 82%, 83%, 84%, 85%, 86%, 87%, 88%, 89%, 90%, 91%, 92%, 93%, 94%, 95%, 96%, 97%, 99%, or 100%) identical to an amino acid sequence set forth in SEQ ID NO: 13, wherein the integrase binds to the attB nucleic acid set forth in SEQ ID NO: 41 and the attP nucleic acid set forth in SEQ ID NO: 42; n) the integrase or fragment thereof comprises an amino acid sequence that is at least 80% (i.e., 80%, 81%, 82%, 83%, 84%, 85%, 86%, 87%, 88%, 89%, 90%, 91%, 92%, 93%, 94%, 95%, 96%, 97%, 99%, or 100%) identical to an amino acid sequence set forth in SEQ ID NO: 14, wherein the integrase binds to the attB nucleic acid set forth in SEQ ID NO: 43 and the attP nucleic acid set forth in SEQ ID NO: 44; o) the integrase or fragment thereof comprises an amino acid sequence that is at least 80% (i.e., 80%, 81%, 82%, 83%, 84%, 85%, 86%, 87%, 88%, 89%, 90%, 91%, 92%, 93%, 94%, 95%, 96%, 97%, 99%, or 100%) identical to an amino acid sequence set forth in SEQ ID NO: 15, wherein the integrase binds to the attB nucleic acid set forth in SEQ ID NO: 45 and the attP nucleic acid set forth in SEQ ID NO: 46; or p) the integrase or fragment thereof comprises an amino acid sequence that is at least 80% (i.e., 80%, 81%, 82%, 83%, 84%, 85%, 86%, 87%, 88%, 89%, 90%, 91%, 92%, 93%, 94%, 95%, 96%, 97%, 99%, or 100%) identical to an amino acid sequence set forth in SEQ ID NO: 16, wherein the integrase binds to the attB nucleic acid set forth in SEQ ID NO: 47 and the attP nucleic acid set forth in SEQ ID NO: 48.

[0017] In certain embodiment, any one of the attB nucleic acid sequences selected from the group consisting of SEQ ID NOs: 17, 19, 21, 23, 25, 27, 29, 31, 33, 35, 37, 39, 41, 43, 45, and 47 is truncated by 1 to 32 nucleotides (i.e., 1, 2, 3, 4, 5, 6, 7, 8, 9, 10, 11, 12, 13, 14, 15, 16, 17, 18, 19, 20, 21, 22, 23, 24, 25, 26, 27, 28, 29, 30, 31, or 32 nucleotides) from one or both of the 5′ end and 3′ end.

[0018] In certain embodiment, any one of the attP nucleic acid sequences selected from the group consisting of SEQ ID NOs: 18, 20, 22, 24, 26, 28, 30, 32, 34, 36, 38, 40, 42, 44, 46, and 48 is truncated by 1 to 32 nucleotides (i.e., 1, 2, 3, 4, 5, 6, 7, 8, 9, 10, 11, 12, 13, 14, 15, 16, 17, 18, 19, 20, 21, 22, 23, 24, 25, 26, 27, 28, 29, 30, 31, or 32 nucleotides) from one or both of the 5′ end and 3′ end.

[0019] In certain embodiment, the integrase is linked to a DNA binding domain via a linker. In certain embodiment, the DNA binding domain is a DNA binding nuclease.

[0020] In certain embodiment, the DNA binding nuclease is selected from the group consisting of a zinc finger nuclease (ZFN), a transcription-activator like effector nuclease (TALEN), an argonaute, and an RNA-guided nuclease.

[0021] In certain embodiment, the RNA-guided nuclease comprises a CRISPR nuclease.

[0022] In certain embodiment, the CRISPR nuclease is Cas9 or Cas12.

[0023] In certain embodiment, the CRISPR nuclease comprises nickase activity.

[0024] In certain embodiment, the CRISPR nuclease is selected from Cas9-D10A, Cas9-H840A, and Cas12a/b nickase.

[0025] In certain embodiment, the DNA binding nuclease and/or the integrase are linked to a reverse transcriptase domain, via a linker.

[0026] In certain embodiment, the reverse transcriptase domain is selected from the group consisting of Moloney Murine Leukemia Virus (M-MLV) reverse transcriptase domain, transcription xenopolymerase (RTX), avian myeloblastosis virus reverse transcriptase (AMV-RT), and Eubacterium rectale maturase RT (MarathonRT).

[0027] In certain embodiment, the reverse transcriptase domain comprises a mutation relative to the wild-type sequence or contains a stabilization domain like the DNA-binding Sto7d protein from Sulfolobus tokodaii.

[0028] In certain embodiment, the M-MLV reverse transcriptase domain comprises one or more mutations selected from the group consisting of D200N, T306K, W313F, T330P, L603W, and L139P.

[0029] In certain embodiment, the linker is cleavable.

[0030] In certain embodiment, the linker is non-cleavable.

[0031] In certain embodiment, the linker can be replaced by two associating binding domains of the DNA binding nuclease linked to a reverse transcriptase.

[0032] In certain embodiment, the DNA binding nuclease interacts with a guide RNA (gRNA) comprising a primer binding sequence linked to an integration sequence.

[0033] In certain embodiment, the gRNA interacts with the DNA binding nuclease and targets a desired location in a cell genome.

[0034] In certain embodiment, the DNA binding nuclease nicks a strand of the cell genome and the reverse transcriptase domain incorporates the integration sequence of the gRNA into the nicked site, thereby providing the integration site at the desired location of the cell genome.

[0035] In certain embodiment, the integrase is capable of binding the integration sequence.

[0036] In one aspect, the disclosure provides a polynucleotide comprising a nucleic acid sequence encoding the integrase described above.

[0037] In one aspect, the disclosure provides a vector comprising the nucleic acid sequence described above.

[0038] In one aspect, the disclosure provides a host cell comprising the vector described above.

[0039] In one aspect, the disclosure provides a fusion protein comprising DNA binding nuclease, a reverse transcriptase domain, and an integrase or fragment thereof, wherein the DNA binding nuclease is linked to the reverse transcriptase domain and/or the integrase or fragment thereof via a linker, wherein the integrase or fragment thereof comprises an amino acid sequence that is at least 80% (i.e., 80%, 81%, 82%, 83%, 84%, 85%, 86%, 87%, 88%, 89%, 90%, 91%, 92%, 93%, 94%, 95%, 96%, 97%, 99%, or 100%) identical to an amino acid sequence set forth in any one of SEQ ID NOs: 1-16.

[0040] In one aspect, the disclosure provides a fusion protein comprising DNA binding nuclease, a reverse transcriptase domain, and an integrase or fragment thereof, wherein the DNA binding nuclease is linked to the reverse transcriptase domain and/or the integrase or fragment thereof via a linker, wherein the integrase or fragment thereof comprises an amino acid sequence that is at least 80% (i.e., 80%, 81%, 82%, 83%, 84%, 85%, 86%, 87%, 88%, 89%, 90%, 91%, 92%, 93%, 94%, 95%, 96%, 97%, 99%, or 100%) identical to an amino acid sequence set forth in SEQ ID NO: 14.

[0041] In certain embodiments of the fusion protein, the integrase fragment comprises integrase activity.

[0042] In certain embodiments of the fusion protein, the fusion protein is encoded by a codon optimized nucleic acid sequence. In certain embodiments of the fusion protein, the nucleic acid sequence is codon optimized for expression in humans.

[0043] In certain embodiments of the fusion protein, the integrase further comprises one or more mutations.

[0044] In certain embodiments of the fusion protein, the integrase binds to nucleic acid attachment sites attB and attP, other recognition site pairs, or any pseudosites in the human genome.

[0045] In certain embodiments of the fusion protein, the attB and/or attP nucleic acid sequence is between 12 and 60 nucleotides in length or between 18 and 50 nucleotides in length.

[0046] In certain embodiments of the fusion protein, the attB and/or attP nucleic acid sequence comprises one or more truncations.

[0047] In certain embodiments of the fusion protein, the attB and/or attP nucleic acid sequence is truncated by 1 to 32 nucleotides from one or both of the 5′ end and 3′ end.

[0048] In certain embodiments of the fusion protein, the integrase binds to any one of the attB nucleic acid sequences selected from the group consisting of SEQ ID NOs: 17, 19, 21, 23, 25, 27, 29, 31, 33, 35, 37, 39, 41, 43, 45, and 47.

[0049] In certain embodiments of the fusion protein, the integrase binds to any one of the attP nucleic acid sequences selected from the group consisting of SEQ ID NOs: 18, 20, 22, 24, 26, 28, 30, 32, 34, 36, 38, 40, 42, 44, 46, and 48.

[0050] In certain embodiments of the fusion protein: a) the integrase or fragment thereof comprises an amino acid sequence that is at least 80% identical to an amino acid sequence set forth in SEQ ID NO: 1, wherein the integrase binds to the attB nucleic acid set forth in SEQ ID NO: 17 and the attP nucleic acid set forth in SEQ ID NO: 18; b) the integrase or fragment thereof comprises an amino acid sequence that is at least 80% identical to an amino acid sequence set forth in SEQ ID NO: 2, wherein the integrase binds to the attB nucleic acid set forth in SEQ ID NO: 19 and the attP nucleic acid set forth in SEQ ID NO: 20; c) the integrase or fragment thereof comprises an amino acid sequence that is at least 80% identical to an amino acid sequence set forth in SEQ ID NO: 3, wherein the integrase binds to the attB nucleic acid set forth in SEQ ID NO: 21 and the attP nucleic acid set forth in SEQ ID NO: 22; d) the integrase or fragment thereof comprises an amino acid sequence that is at least 80% identical to an amino acid sequence set forth in SEQ ID NO: 4, wherein the integrase binds to the attB nucleic acid set forth in SEQ ID NO: 23 and the attP nucleic acid set forth in SEQ ID NO: 24; e) the integrase or fragment thereof comprises an amino acid sequence that is at least 80% identical to an amino acid sequence set forth in SEQ ID NO: 5, wherein the integrase binds to the attB nucleic acid set forth in SEQ ID NO: 25 and the attP nucleic acid set forth in SEQ ID NO: 26; f) the integrase or fragment thereof comprises an amino acid sequence that is at least 80% identical to an amino acid sequence set forth in SEQ ID NO: 6, wherein the integrase binds to the attB nucleic acid set forth in SEQ ID NO: 27 and the attP nucleic acid set forth in SEQ ID NO: 28; g) the integrase or fragment thereof comprises an amino acid sequence that is at least 80% identical to an amino acid sequence set forth in SEQ ID NO: 7, wherein the integrase binds to the attB nucleic acid set forth in SEQ ID NO: 29 and the attP nucleic acid set forth in SEQ ID NO: 30; h) the integrase or fragment thereof comprises an amino acid sequence that is at least 80% identical to an amino acid sequence set forth in SEQ ID NO: 8, wherein the integrase binds to the attB nucleic acid set forth in SEQ ID NO: 31 and the attP nucleic acid set forth in SEQ ID NO: 32; i) the integrase or fragment thereof comprises an amino acid sequence that is at least 80% identical to an amino acid sequence set forth in SEQ ID NO: 9, wherein the integrase binds to the attB nucleic acid set forth in SEQ ID NO: 33 and the attP nucleic acid set forth in SEQ ID NO: 34; j) the integrase or fragment thereof comprises an amino acid sequence that is at least 80% identical to an amino acid sequence set forth in SEQ ID NO: 10, wherein the integrase binds to the attB nucleic acid set forth in SEQ ID NO: 35 and the attP nucleic acid set forth in SEQ ID NO: 36; k) the integrase or fragment thereof comprises an amino acid sequence that is at least 80% identical to an amino acid sequence set forth in SEQ ID NO: 11, wherein the integrase binds to the attB nucleic acid set forth in SEQ ID NO: 37 and the attP nucleic acid set forth in SEQ ID NO: 38; 1) the integrase or fragment thereof comprises an amino acid sequence that is at least 80% identical to an amino acid sequence set forth in SEQ ID NO: 12, wherein the integrase binds to the attB nucleic acid set forth in SEQ ID NO: 39 and the attP nucleic acid set forth in SEQ ID NO: 40; m) the integrase or fragment thereof comprises an amino acid sequence that is at least 80% identical to an amino acid sequence set forth in SEQ ID NO: 13, wherein the integrase binds to the attB nucleic acid set forth in SEQ ID NO: 41 and the attP nucleic acid set forth in SEQ ID NO: 42; n) the integrase or fragment thereof comprises an amino acid sequence that is at least 80% identical to an amino acid sequence set forth in SEQ ID NO: 14, wherein the integrase binds to the attB nucleic acid set forth in SEQ ID NO: 43 and the attP nucleic acid set forth in SEQ ID NO: 44; o) the integrase or fragment thereof comprises an amino acid sequence that is at least 80% identical to an amino acid sequence set forth in SEQ ID NO: 15, wherein the integrase binds to the attB nucleic acid set forth in SEQ ID NO: 45 and the attP nucleic acid set forth in SEQ ID NO: 46; or p) the integrase or fragment thereof comprises an amino acid sequence that is at least 80% identical to an amino acid sequence set forth in SEQ ID NO: 16, wherein the integrase binds to the attB nucleic acid set forth in SEQ ID NO: 47 and the attP nucleic acid set forth in SEQ ID NO: 48.

[0051] In certain embodiments of the fusion protein, the integrase or fragment thereof comprises an amino acid sequence that is at least 80% identical to an amino acid sequence set forth in SEQ ID NO: 14, wherein the integrase binds to the attB nucleic acid set forth in SEQ ID NO: 43 and the attP nucleic acid set forth in SEQ ID NO: 44.

[0052] In certain embodiments of the fusion protein, any one of the attB nucleic acid sequences selected from the group consisting of SEQ ID NOs: 17, 19, 21, 23, 25, 27, 29, 31, 33, 35, 37, 39, 41, 43, 45, and 47 is truncated by 1 to 32 nucleotides from one or both of the 5′ end and 3′ end.

[0053] In certain embodiments of the fusion protein, any one of the attP nucleic acid sequences selected from the group consisting of SEQ ID NOs: 18, 20, 22, 24, 26, 28, 30, 32, 34, 36, 38, 40, 42, 44, 46, and 48 is truncated by 1 to 32 nucleotides from one or both of the 5′ end and 3′ end.

[0054] In certain embodiments of the fusion protein, the integrase is linked to a DNA binding domain via a linker.

[0055] In certain embodiments of the fusion protein, the DNA binding domain is a DNA binding nuclease.

[0056] In certain embodiments of the fusion protein, the DNA binding nuclease is selected from the group consisting of a zinc finger nuclease (ZFN), a transcription-activator like effector nuclease (TALEN), and an RNA-guided nuclease.

[0057] In certain embodiments of the fusion protein, the RNA-guided nuclease comprises a CRISPR nuclease.

[0058] In certain embodiments of the fusion protein, the CRISPR nuclease is Cas9 or Cas12.

[0059] In certain embodiments of the fusion protein, the CRISPR nuclease comprises nickase activity.

[0060] In certain embodiments of the fusion protein, the CRISPR nuclease is selected from Cas9-D10A, Cas9-H840A, and Cas12a/b nickase.

[0061] In certain embodiments of the fusion protein, the reverse transcriptase domain is selected from the group consisting of Moloney Murine Leukemia Virus (M-MLV) reverse transcriptase domain, transcription xenopolymerase (RTX), avian myeloblastosis virus reverse transcriptase (AMV-RT), and Eubacterium rectale maturase RT (MarathonRT).

[0062] In certain embodiments of the fusion protein, the reverse transcriptase domain comprises a mutation relative to the wild-type sequence or contains a stabilization domain like the DNA-binding Sto7d protein from Sulfolobus tokodaii.

[0063] In certain embodiments of the fusion protein, the M-MLV reverse transcriptase domain comprises one or more mutations selected from the group consisting of D200N, T306K, W313F, T330P, L603W, and L139P.

[0064] In certain embodiments of the fusion protein, the linker is cleavable. In certain embodiments of the fusion protein, the linker is non-cleavable.

[0065] In certain embodiments of the fusion protein, the linker can be replaced by two associating binding domains of the DNA binding nuclease linked to a reverse transcriptase.

[0066] In certain embodiments of the fusion protein, the DNA binding nuclease interacts with a guide RNA (gRNA) comprising a primer binding sequence linked to an integration sequence.

[0067] In certain embodiments of the fusion protein, the gRNA interacts with the DNA binding nuclease and targets a desired location in a cell genome.

[0068] In certain embodiments of the fusion protein, the DNA binding nuclease nicks a strand of the cell genome and the reverse transcriptase domain incorporates the integration sequence of the gRNA into the nicked site, thereby providing the integration site at the desired location of the cell genome.

[0069] In certain embodiments of the fusion protein, the integrase is capable of binding the integration sequence.

[0070] In one aspect, the disclosure provides a polynucleotide comprising a nucleic acid sequence encoding the fusion protein described above.

[0071] In one aspect, the disclosure provides a vector comprising the nucleic acid sequence described above.

[0072] In one aspect, the disclosure provides a host cell comprising the vector described above.

[0073] In one aspect, the disclosure provides a method of site-specific integration of a nucleic acid into a cell genome, the method comprising:
[0074] (a) incorporating an integration site at a desired location in the cell genome by introducing into the cell:
   [0075] i. a DNA binding nuclease linked to a reverse transcriptase domain, wherein the DNA binding nuclease comprises a nickase activity; and
   [0076] ii. a guide RNA (gRNA) comprising a primer binding sequence linked to an integration sequence, wherein the gRNA interacts with the DNA binding nuclease and targets the desired location in the cell genome, wherein the DNA binding nuclease nicks a strand of the cell genome and the reverse transcriptase domain incorporates the integration sequence of the gRNA into the nicked site, thereby providing the integration site at the desired location of the cell genome; and
[0077] (b) integrating the nucleic acid into the cell genome by introducing into the cell:
   [0078] i. a DNA or RNA strand comprising the nucleic acid linked to a sequence that is complementary or associated to the integration site; and
   [0079] ii. an integrase or fragment thereof comprising an amino acid sequence that is at least 80% identical to an amino acid sequence set forth in any one of SEQ ID NOs: 1-16, wherein the integrase or fragment thereof incorporates the nucleic acid into the cell genome at the integration site by integration, recombination, or reverse transcription of the sequence that is complementary or associated to the integration site, thereby introducing the nucleic acid into the desired location of the cell genome of the cell.

[0080] In one aspect, the disclosure provides a method of site-specific integration of a nucleic acid into a cell genome, the method comprising:
[0081] (a) incorporating an integration site at a desired location in the cell genome by introducing into the cell:
   [0082] i. a DNA binding nuclease linked to a reverse transcriptase domain, wherein the DNA binding nuclease comprises a nickase activity; and
   [0083] ii. a guide RNA (gRNA) comprising a primer binding sequence linked to an integration sequence, wherein the gRNA interacts with the DNA binding nuclease and targets the desired location in the cell genome, wherein the DNA binding nuclease nicks a strand of the cell genome and the reverse transcriptase domain incorporates the integration sequence of the gRNA into the nicked site, thereby providing the integration site at the desired location of the cell genome; and
[0084] (b) integrating the nucleic acid into the cell genome by introducing into the cell:
   [0085] i. a DNA or RNA strand comprising the nucleic acid linked to a sequence that is complementary or associated to the integration site; and
   [0086] ii. an integrase or fragment thereof comprising an amino acid sequence that is at least 80% identical to an amino acid sequence set forth in 14, wherein the integrase or fragment thereof incorporates the nucleic acid into the cell genome at the integration site by integration, recombination, or reverse transcription of the sequence that is complementary or associated to the integration site, thereby introducing the nucleic acid into the desired location of the cell genome of the cell.

[0087] In certain embodiments, the gRNA hybridizes to a complementary strand of the cell genome to the genomic strand that is nicked by the DNA binding nuclease.

[0088] In certain embodiments, the integrase is introduced as a polypeptide or a nucleic acid encoding the same.

[0089] In certain embodiments, the DNA binding nuclease is introduced as a polypeptide or a nucleic acid encoding the same.

[0090] In certain embodiments, the DNA or RNA strand comprising the nucleic acid is introduced into the cell as a minicircle, a plasmid, mRNA or a linear DNA.

[0091] In certain embodiments, the DNA or RNA strand comprising the nucleic acid is between 1000 bp and 10,000 bp.

[0092] In certain embodiments, the DNA or RNA strand comprising the nucleic acid is more than 10,000 bp.

[0093] In certain embodiments, the DNA or RNA strand comprising the nucleic acid is less than 1000 bp.

[0094] In certain embodiments, the DNA or RNA strand comprising the nucleic acid is introduced into the cell with a viral vector.

[0095] In certain embodiments, the viral vector is an AAV vector, an adenoviral vector, or a lentiviral vector.

[0096] In certain embodiments, the DNA comprising the nucleic acid is introduced into the cell as a minicircle.

[0097] In certain embodiments, the minicircle does not comprise sequences of a bacterial origin.

[0098] In certain embodiments, the DNA binding nuclease linked to a reverse transcriptase domain and the integrase are linked via a linker.

[0099] In certain embodiments, the linker is cleavable. In certain embodiments, the linker is non-cleavable.

[0100] In certain embodiments, the linker can be replaced by two associating binding domains of the DNA binding nuclease linked to a reverse transcriptase.

[0101] In certain embodiments, the integration site is selected from an attB site, an attP site, an attL site, or an attR site.

[0102] In certain embodiments, the DNA binding nuclease comprising a nickase activity is selected from Cas9-D10A, Cas9-H840A, and Cas12a/b nickase.

[0103] In certain embodiments, the reverse transcriptase domain is selected from the group consisting of Moloney Murine Leukemia Virus (M-MLV) reverse transcriptase domain, transcription xenopolymerase (RTX), avian myeloblastosis virus reverse transcriptase (AMV-RT), and Eubacterium rectale maturase RT (MarathonRT).

[0104] In certain embodiments, the reverse transcriptase domain comprises a mutation relative to the wild-type sequence or contains a stabilization domain like the DNA-binding Sto7d protein from Sulfolobus tokodaii.

[0105] In certain embodiments, the M-MLV reverse transcriptase domain comprises one or more mutations selected from the group consisting of D200N, T306K, W313F, T330P L603W, and L139P.

[0106] In certain embodiments, the method of further comprises introducing a second nicking guide RNA (ngRNA).

[0107] In certain embodiments, the gRNA, the nucleic acid encoding the DNA binding nuclease, the reverse transcriptase, the DNA comprising nucleic acid linked to a complementary or associated integration site, the integrase, and optionally the ngRNA are introduced into a cell in a single reaction.

[0108] In certain embodiments, the gRNA, the nucleic acid encoding the DNA binding nuclease, the reverse transcriptase, the DNA comprising nucleic acid linked to a complementary integration site, the integration enzyme, and optionally the ngRNA are introduced using a virus, a RNP, an mRNA, a lipid, or a polymeric nanoparticle.

[0109] In certain embodiments, the nucleic acid is a reporter gene.

[0110] In certain embodiments, the reporter gene is a fluorescent protein.

[0111] In certain embodiments, the cell is a dividing cell.

[0112] In certain embodiments, the cell is a non-dividing cell.

[0113] In certain embodiments, the desired location in the cell genome is the locus of a mutated gene.

[0114] In certain embodiments, the nucleic acid is a degradation tag for programmable knockdown of proteins in the presence of small molecules.

[0115] In certain embodiments, the cell is a mammalian cell, a bacterial cell or a plant cell.

[0116] In certain embodiments, the nucleic acid is a T-cell receptor (TCR), a chimeric antigen receptor (CAR), an interleukin, a cytokine, or an immune checkpoint gene for integration into a T-cell or natural killer (NK) cell.

[0117] In certain embodiments, the TCR, the CAR, the interleukin, the cytokine, or the immune checkpoint gene is incorporated into the target site of the T-cell or NK cell genome using a minicircle DNA.

[0118] In certain embodiments, the nucleic acid is a beta hemoglobin (HBB) gene and the cell is a hematopoietic stem cell (HSC).

[0119] In certain embodiments, the HBB gene is incorporated into the target site in the HSC genome using a minicircle DNA.

[0120] In certain embodiments, the nucleic acid is a gene responsible for beta thalassemia or sickle cell anemia.

[0121] In certain embodiments, the nucleic acid is a metabolic gene.

[0122] In certain embodiments, the metabolic gene is involved in alpha-1 antitrypsin deficiency or ornithine transcarbamylase (OTC) deficiency.

[0123] In certain embodiments, the metabolic gene is a gene involved in inherited diseases.

[0124] In certain embodiments, the nucleic acid is a gene involved in an inherited disease or an inherited syndrome.

[0125] In certain embodiments, the inherited disease is cystic fibrosis, familial hypercholesterolemia, adenosine deaminase (ADA) deficiency, X-linked SCID (X-SCID), Wiskott-Aldrich syndrome (WAS), hemochromatosis, Tay-Sachs, fragile X syndrome, Huntington's disease, Marfan syndrome, phenylketonuria, muscular dystrophy, 3-methylcrotonyl-CoA carboxylase deficiency, Achromatopsia, Acute intermittent porphyria, Age related macular degeneration, Alpers-Huttenlocher syndrome, Alpha-1-antitrypsin deficiency, Alternating hemiplegia of childhood, Autosomal dominant Charcot-Marie-Tooth disease type 21, Autosomal dominant non-syndromic sensorineural deafness type DFNA, Autosomal dominant optic atrophy, classic form, Autosomal dominant progressive external ophthalmoplegia, Autosomal recessive limb-girdle muscular dystrophy type 2A, Autosomal recessive limb-girdle muscular dystrophy type 21, Bardet-Biedl syndrome, Becker muscular dystrophy, Bietti crystalline dystrophy, Bifunctional enzyme deficiency, Biotinidase deficiency, Blue cone monochromatism, Canavan disease, Charcot-Marie-Tooth disease type 1A, Charcot-Marie-Tooth disease type 1B, Charcot-Marie-Tooth disease type 2A, Choroideremia, Chronic hepatic porphyria, Citrullinemia type I, CLN1 disease, CLN4A disease, CLN4B disease, Cone rod dystrophy, Congenital glaucoma, Dentin dysplasia, Dravet syndrome, Duchenne muscular dystrophy, Ehlers-Danlos syndrome, classic type, Ehlers-Danlos syndrome, vascular type, Facioscapulohumeral dystrophy, Friedreich ataxia, Fuchs endothelial corneal dystrophy, Gaucher disease, Glutaryl-CoA dehydrogenase deficiency, Glycogen storage disease due to acid maltase deficiency, Glycogen storage disease due to liver phosphorylase kinase deficiency, Glycogen storage disease due to muscle glycogen phosphorylase deficiency, Hemolytic anemia due to red cell pyruvate kinase deficiency, Hemophilia A, Hemophilia B, Hereditary ATTR amyloidosis, Hereditary elliptocytosis, Hereditary fructose intolerance, Hereditary hemochromatosis, Hereditary hemorrhagic telangiectasia, Hereditary sensory and autonomic neuropathy type 1, Hereditary spherocytosis, Hereditary thrombophilia due to congenital antithrombin deficiency, Histidinemia, Huntington disease, Hypocalcemic vitamin D-dependent rickets, Hypokalemic periodic paralysis, Immune thrombocytopenic purpura, Infantile epileptic-dyskinetic encephalopathy, Isolated complex I deficiency, Juvenile glaucoma, Juvenile myoclonic epilepsy, Kallmann syndrome, Kennedy disease, Krabbe disease, Lattice corneal dystrophy type I, Leber congenital amaurosis, Leber hereditary optic neuropathy, Lissencephaly due to LIS1 mutation, Marfan syndrome, Medium chain acyl-CoA dehydrogenase deficiency, MERRF, Mucopolysaccharidosis type 2, Neurofibromatosis type 1, Neurofibromatosis type 2, Niemann-Pick disease type C, Oculocutaneous albinism type 1, Oculocutaneous albinism type 2, Oculocutaneous albinism type 4, Ornithine transcarbamylase deficiency, Osteogenesis imperfecta, Paramyotonia congenita of Von Eulenburg, Porphyria, Progressive familial intrahepatic cholestasis, Progressive supranuclear palsy, Proximal spinal muscular atrophy, Pseudoxanthoma elasticum, Retinitis pigmentosa, Retinitis punctata albescens, Rett syndrome, Rhizomelic chondrodysplasia punctata, Semantic dementia, Short chain acyl-CoA dehydrogenase deficiency, Sickle cell anemia, Spastic paraplegia type 7, Stargardt disease, Stickler syndrome, Thrombotic thrombocytopenic purpura, Tritanopia, Typical nemaline myopathy, Tyrosinemia type 1, Usher syndrome, Very long chain acyl-CoA dehydrogenase deficiency, Vitelliform macular dystrophy, von Gierke's disease, Von Hippel-Lindau disease, Von Willebrand disease, Waardenburg syndrome, Wilson disease, Wiskott-Aldrich syndrome, X-linked adrenoleukodystrophy.

[0126] In one aspect, the disclosure provides an integrase or fragment thereof comprising an amino acid sequence that is at least 80% identical to any one of the integrase amino acid sequences set forth in Table 8.

[0127] In certain embodiments, the integrase fragment comprises integrase, recombinase, or transposase activity.

[0128] In certain embodiments, the integrase comprises one or more mutations.

[0129] In certain embodiments, the integrase binds to nucleic acid attachment sites attB and attP, other recognition site pairs, or any pseudosites in a human genome.

[0130] In certain embodiments, the attB and/or attP nucleic acid sequence is between 12 and 60 nucleotides in length or between 18 and 50 nucleotides in length.

[0131] In certain embodiments, the attB and/or attP nucleic acid sequence comprises one or more truncations.

[0132] In certain embodiments, the attB and/or attP nucleic acid sequence is truncated by 1 to 32 nucleotides from one or both of the 5′ end and 3′ end.

[0133] In certain embodiments, the integrase binds to the corresponding attB nucleic acid sequence set forth in Table 8.

[0134] In certain embodiments, the integrase binds to the corresponding attP nucleic acid sequences set forth in Table 8.

[0135] In certain embodiments, any one of the attB nucleic acid sequences selected from the group set forth in Table 8 is truncated by 1 to 32 nucleotides from one or both of the 5′ end and 3′ end.

[0136] In certain embodiments, any one of the attP nucleic acid sequences selected from the group set forth in Table 8 is truncated by 1 to 32 nucleotides from one or both of the 5′ end and 3′ end.

[0137] In one aspect, the disclosure provides a fusion protein comprising DNA binding nuclease, a reverse transcriptase domain, and an integrase or fragment thereof, wherein the DNA binding nuclease is linked to the reverse transcriptase domain and/or the integrase or fragment thereof via a linker, wherein the integrase or fragment thereof comprises an amino acid sequence that is at least 80% identical to any one of the integrase amino acid sequences set forth in Table 8.

### BRIEF DESCRIPTION OF THE DRAWINGS

[0138] Aspects, features, benefits and advantages of the embodiments described herein will be apparent with regard to the following description, appended claims, and accompanying drawings.

[0139] FIG. 1 shows a schematic diagram of a concept of Programmable Addition via Site-Specific Targeting Elements (PASTE) according to embodiments of the present teachings.

[0140] FIG. 2 shows a schematic representation of using Bxb1 to integrate a nucleic acid into the genome according to embodiments of the present teachings.

[0141] FIG. 3 shows the percent integration of GFP or Gluc into the attB locus using Bxb1 Programmable Addition via Site-Specific Targeting Elements (PASTE) according to embodiments of the present teachings.

[0142] FIG. 4 shows the percent editing of various HEK3 targeting pegRNA Programmable Addition via Site-Specific Targeting Elements (PASTE) according to embodiments of the present teachings.

[0143] FIG. 5A-FIG. 5C shows a schematic of the integrase discovery pipeline from bacterial and metagenomic sequences (FIG. 5A) and the phylogenetic tree of discovered integrases showing distinct subfamilies (FIG. 5B and FIG. 5C).

[0144] FIG. 6A-FIG. 6I show the activity of several integrases. FIG. 6A shows an Integrase integration activity screen using reporters in HEK293FT cells compared to BxbINT and phiC31a. FIG. 6B shows PASTE integration activity with the most active integrases compared to BxbINT. FIG. 6C shows a characterization of integrase integration activity with truncated attachment sites using reporters in HEK293FT cells. FIG. 6D shows PASTE integration activity with BceINT and BcyINT with truncated attachment sites compared to BxbINT. FIG. 6E shows PASTE integration activity with SscINT and SacINT with truncated attachment sites compared to BxbINT. FIG. 6F shows optimization BceINT and SacINT PASTE constructs via protein fusions for different sized attachment sites compared to BxbINT-based PASTE for EGFP integration at the ACTB locus. FIG. 6G shows BceINT and INT2 PASTE protein constructs compared to BxbINT for EGFP integration at the ACTB locus. FIG. 6H shows integration of EGFP at different endogenous genes for PASTE with either BceINT or BxbINT. FIG. 6I shows PASTE integration activity with various integrases of EGFP at the ACTB locus.

[0145] FIG. 7A-FIG. 7B show the activity of several integrases. FIG. 7A shows an Integrase integration activity screen using reporters in HEK293FT cells compared to BxbINT, SacINTd, and BceINT. FIG. 7B shows PASTE integration activity with the integrase N352807_16_14 compared to BxbINT. N352807_16_14 was tested with various truncations of the attB sequence.

### DETAILED DESCRIPTION

[0146] It will be appreciated that for clarity, the following discussion will describe various aspects of embodiments of the applicant's teachings. It should be noted that the specific embodiments are not intended as an exhaustive description or as a limitation to the broader aspects discussed herein. One aspect described in conjunction with a particular embodiment is not necessarily limited to that embodiment and can be practiced with any other embodiment(s). Reference throughout this specification to “one embodiment”, “an embodiment,” “an example embodiment,” means that a particular feature, structure or characteristic described in connection with the embodiment is included in at least one embodiment of the present disclosure. Thus, appearances of the phrases “in one embodiment,” “in an embodiment,” or “an example embodiment” in various places throughout this specification are not necessarily all referring to the same embodiment. Furthermore, the particular feature, structures or characteristics may be combined in any suitable manner, as would be apparent to a person skilled in the art from this disclosure, in one or more embodiments. Furthermore, while some embodiments described herein include some but not other features included in other embodiments, combinations of features of different embodiments are meant to be within the scope of the disclosure. For example, in the appended claims, any of the claimed embodiments can be used in any combination.

### General Definitions

[0147] Unless defined otherwise, technical and scientific terms used herein have the same meaning as commonly understood by one of ordinary skill in the art to which this disclosure pertains. Definitions of common terms and techniques in molecular biology may be found in Molecular Cloning: A Laboratory Manual, 2nd edition (1989) (Sambrook, Fritsch, and Maniatis); Molecular Cloning: A Laboratory Manual, 4th edition (2012) (Green and Sambrook); Current Protocols in Molecular Biology (1987) (F. M. Ausubel et al. eds.); the series Methods in Enzymology (Academic Press, Inc.): PCR 2: A Practical Approach (1995) (M. J. MacPherson, B. D. Hames, and G. R. Taylor eds.): Antibodies, A Laboratory Manual (1988) (Harlow and Lane, eds.): Antibodies A Laboratory Manual, 2nd edition 2013 (E. A. Greenfield ed.); Animal Cell Culture (1987) (R. I. Freshney, ed.); Benjamin Lewin, Genes IX, published by Jones and Bartlet, 2008 (ISBN 0763752223); Kendrew et al. (eds.), The Encyclopedia of Molecular Biology, published by Blackwell Science Ltd., 1994 (ISBN 0632021829); Robert A. Meyers (ed.), Molecular Biology and Biotechnology: a Comprehensive Desk Reference, published by VCH Publishers, Inc., 1995 (ISBN 9780471185710); Singleton et al., Dictionary of Microbiology and Molecular Biology 2nd ed., J. Wiley & Sons (New York, N.Y. 1994), March, Advanced Organic Chemistry Reactions, Mechanisms and Structure 4th ed., John Wiley & Sons (New York, N.Y. 1992); and Marten H. Hofker and Jan van Deursen, Transgenic Mouse Methods and Protocols, 2nd edition (2011).

[0148] As used herein, the singular forms “a”, “an,” and “the” include both singular and plural forms unless the context clearly dictates otherwise. Thus, for example, reference to “a cell” includes a plurality of such cells.

[0149] As used herein, the term “optional” or “optionally” means that the subsequent described event, circumstance or substituent may or may not occur, and that the description includes instances where the event or circumstance occurs and instances where it does not.

[0150] The recitation of numerical ranges by endpoints includes all numbers and fractions subsumed within the respective ranges, as well as the recited endpoints.

[0151] As used herein, the term “about” or “approximately” refers to a measurable value such as a parameter, an amount, a temporal duration, and the like, are meant to encompass variations of and from the specified value, such as variations of +/−10% or less, +/−5% or less, +/−1% or less, +/−0.5% or less, and +/−0.1% or less of and from the specified value, insofar such variations are appropriate to perform in the disclosure. It is to be understood that the value to which the modifier “about” or “approximately” refers is itself also specifically disclosed.

[0152] It is noted that all publications and references cited herein are expressly incorporated herein by reference in their entirety. The publications discussed herein are provided solely for their disclosure prior to the filing date of the present application. Nothing herein is to be construed as an admission that the present disclosure is not entitled to antedate such publication. Further, the dates of publication provided may be different from the actual publication dates, which may need to be independently confirmed.

### Overview

[0153] The embodiments disclosed herein provide non-naturally occurring or engineered systems, methods, and compositions for site-specific genetic engineering using Programmable Addition via Site-Specific Targeting Elements (PASTE). A schematic diagram illustrating the concept of PASTE is shown in FIG. 1. As discussed in more details below, the PASTE comprises the addition of an integration site into a target genome followed by the insertion of one or more genes of interest or one or more nucleic acid sequences of interest at the site. This process can be done as one or more reactions into a cell. The addition of the integration site into the target genome is done using gene editing technologies that include for example, without limitation, prime editing, recombinant adeno-associated virus (rAAV)-mediated nucleic acid integration, transcription activator-like effector nucleases (TALENS), and zinc finger nucleases (ZFNs). The integration of the transgene at the integration site is done using integrase technologies that include for example, without limitation, integrases, recombinases and reverse transcriptases. The necessary components for the site-specific genetic engineering disclosed herein comprise at least one or more nucleases, one or more guide RNA (gRNA), one or more integration enzymes, and one or more sequences that are complementary or associated to the integration site and linked to the one or more genes of interest or one or more nucleic acid sequences of interest to be inserted into the cell genome.

[0154] An advantage of the non-naturally occurring or engineered systems, methods, and compositions for site-specific genetic engineering disclosed herein is programmable insertion of large elements without reliance on DNA damage responses.

[0155] Another advantage of the non-naturally occurring or engineered systems, methods, and compositions for site-specific genetic engineering disclosed herein is facile multiplexing, enabling programmable insertion at multiple sites.

[0156] Yet another advantage of the non-naturally occurring or engineered systems, methods, and compositions for site-specific genetic engineering disclosed herein is scalable production and delivery through minicircle templates.

### Prime Editing

[0157] The present disclosure provides non-naturally occurring or engineered systems, methods, and compositions for site-specific genetic engineering using gene editing technologies such as prime editing to add an integration site into a target genome. Prime editing will be discussed in more detail below.

[0158] Prime editing is a versatile and precise genome editing method that directly writes new genetic information into a specified DNA site. Such method is explained fully in the literature. See, e.g., Anzalone, A. V., et al. “Search-and-replace genome editing without double-strand breaks or donor DNA,” Nature 576, 149-157 (2019). Prime editing uses a catalytically-impaired Cas9 endonuclease that is fused to an engineered reverse transcriptase (RT) and programmed with a prime-editing guide RNA (pegRNA). The skilled person in the art would appreciate that the pegRNA both specifies the target site and encodes the desired edit. The catalytically-impaired Cas9 endonuclease also comprises a Cas9 nickase that is fused to the reverse transcriptase. During genetic editing, the Cas9 nickase part of the protein is guided to the DNA target site by the pegRNA. The reverse transcriptase domain then uses the pegRNA to template reverse transcription of the desired edit, directly polymerizing DNA onto the nicked target DNA strand. The edited DNA strand replaces the original DNA strand, creating a heteroduplex containing one edited strand and one unedited strand. Afterward, the prime editor (PE) guides resolution of the heteroduplex to favor copying the edit onto the unedited strand, completing the process.

[0159] The prime editors refer to a Moloney Murine Leukemia Virus (M-MLV) reverse transcriptase (RT) fused to a Cas9 H840A nickase. Fusing the RT to the C-terminus of the Cas9 nickase may result in higher editing efficiency. Such a complex is called PE1. The Cas9(H840A) can also be linked to a non-M-MLV reverse transcriptase such as a AMV-RT or XRT (Cas9(H840A)-AMV-RT or XRT). In some embodiments, Cas 9(H840A) can be replaced with Cas12a/b or Cas9(D10A). A Cas9 (wild type), Cas9(H840A), Cas9(D10A) or Cas 12a/b nickase fused to a pentamutant of M-MLV RT (D200N/L603W/T330P/T306K/W313F), having up to about 45-fold higher efficiency is called PE2. In some embodiments, the M-MLV RT comprise one or more of the mutations Y8H, P51L, S56A, S67R, E69K, V129P, L139P, T197A, H204R, V223H, T246E, N249D, E286R, Q291I, E302K, E302R, F309N, M320L, P330E, L435G, L435R, N454K, D524A, D524G, D524N, E562Q, D583N, H594Q, E607K, D653N, and L671P. In some embodiments, the reverse transcriptase can also be a wild-type or modified transcription xenopolymerase (RTX), avian myeloblastosis virus reverse transcriptase (AMV-RT), Feline Immunodeficiency Virus reverse transcriptase (FIV-RT), FeLV-RT (Feline leukemia virus reverse transcriptase), HIV-RT (Human Immunodeficiency Virus reverse transcriptase), or Eubacterium rectale maturase RT (MarathonRT). PE3 involves nicking the non-edited strand, potentially causing the cell to remake that strand using the edited strand as the template to induce HR. The nicking of the non-edited strand can involve the use of a nicking guide RNA (ngRNA).

[0160] In certain embodiments, the reverse transcriptase contains a stabilization domain. In certain embodiments, the stabilization domain comprises the DNA-binding Sto7d protein from Sulfolobus tokodaii or the DNA-binding Sso7d protein. The DNA-binding proteins improves processivity and resistance to inhibitors of M-MuLV reverse transcriptase. The DNA-binding Sto7d protein from Sulfolobus tokodaii or the DNA-binding Sso7d protein are described in further detail in Oscorbin et al. (FEBS Letters. 594(24): 4338-4356. 2020), incorporated herein by reference.

[0161] Nicking the non-edited strand can increase editing efficiency. For example, nicking the non-edited strand can increase editing efficiency by about 1.1 fold, about 1.3 fold, about 1.5 fold, about 1.7 fold, about 1.9 fold, about 2.1 fold, about 2.3 fold, about 2.5 fold, about 2.7 fold, about 2.9 fold, about 3.1 fold, about 3.3 fold, about 3.5 fold, about 3.7 fold, about 3.9 fold, 4.1 fold, about 4.3 fold, about 4.5 fold, about 4.7 fold, about 4.9 fold, or any range that is formed from any two of those values as endpoints.

[0162] Although the optimal nicking position varies depending on the genomic site, nicks positioned 3′ of the edit about 40-90 bp from the pegRNA-induced nick can generally increase editing efficiency without excess indel formation. The prime editing practice allows starting with non-edited strand nicks about 50 bp from the pegRNA-mediated nick, and testing alternative nick locations if indel frequencies exceed acceptable levels.

[0163] As used herein, the term “guide RNA” (gRNA) and the like refer to an RNA that guides the insertion or deletion of one or more genes of interest or one or more nucleic acid sequences of interest into a target genome. The gRNA can also refer to a prime editing guide RNA (pegRNA), a nicking guide RNA (ngRNA), and a single guide RNA (sgRNA). In some embodiments, the term “gRNA molecule” refers to a nucleic acid encoding a gRNA. In some embodiments, the gRNA molecule is naturally occurring. In some embodiments, a gRNA molecule is non-naturally occurring. In some embodiments, a gRNA molecule is a synthetic gRNA molecule. A gRNA can target a nuclease or a nickase such as Cas9, Cas 12a/b Cas9(H840A) or Cas9 (D10A) molecule to a target nucleic acid or sequence in a genome. In some embodiments, the gRNA can bind to a DNA nickase bound to a reverse transcriptase domain. A “modified gRNA,” as used herein, refers to a gRNA molecule that has an improved half-life after being introduced into a cell as compared to a non-modified gRNA molecule after being introduced into a cell. In some embodiments, the guide RNA can facilitate the addition of the insertion site sequence for recognition by integrases, transposases, or recombinases.

[0164] As used herein, the term “prime-editing guide RNA” (pegRNA) and the like refer to an extended single guide RNA (sgRNA) comprising a primer binding site (PBS), a reverse transcriptase (RT) template sequence, and an integration site sequence that can be recognized by recombinases, integrases, or transposases. For example, the PBS can have a length of at least about 4 nt, 5 nt, 6 nt, 7 nt, 8 nt, 9 nt, 10 nt, 11 nt, 12 nt, 13 nt, 14 nt, 15 nt, 16 nt, 17 nt, 18 nt, 19 nt, 20 nt, 21 nt, 22 nt, 23 nt, 24 nt, 25 nt, 26 nt, 27 nt, 28 nt, 29 nt, 30 nt, or more nt. For example, the PBS can have a length of about 4 nt, 5 nt, 6 nt, 7 nt, 8 nt, 9 nt, 10 nt, 11 nt, 12 nt, 13 nt, 14 nt, 15 nt, 16 nt, 17 nt, 18 nt, 19 nt, 20 nt, 21 nt, 22 nt, 23 nt, 24 nt, 25 nt, 26 nt, 27 nt, 28 nt, 29 nt, 30 nt, or any range that is formed from any two of those values as endpoints. For example, the RT template sequence can have a length of at least about 4 nt, 5 nt, 6 nt, 7 nt, 8 nt, 9 nt, 10 nt, 11 nt, 12 nt, 13 nt, 14 nt, 15 nt, 16 nt, 17 nt, 18 nt, 19 nt, 20 nt, 21 nt, 22 nt, 23 nt, 24 nt, 25 nt, 26 nt, 27 nt, 28 nt, 29 nt, 30 nt, 31 nt, 32 nt, 33 nt, 34 nt, 35 nt, 36 nt, 37 nt, 38 nt, 39 nt, 40 nt, 41 nt, 42 nt, 43 nt, 44 nt, 45 nt, 46 nt, 47 nt, 48 nt, 49 nt, 50 nt, or more nt. For example, the RT template sequence can have a length of about 4 nt, 5 nt, 6 nt, 7 nt, 8 nt, 9 nt, 10 nt, 11 nt, 12 nt, 13 nt, 14 nt, 15 nt, 16 nt, 17 nt, 18 nt, 19 nt, 20 nt, 21 nt, 22 nt, 23 nt, 24 nt, 25 nt, 26 nt, 27 nt, 28 nt, 29 nt, 30 nt, 31 nt, 32 nt, 33 nt, 34 nt, 35 nt, 36 nt, 37 nt, 38 nt, 39 nt, 40 nt, 41 nt, 42 nt, 43 nt, 44 nt, 45 nt, 46 nt, 47 nt, 48 nt, 49 nt, 50 nt, or any range that is formed from any two of those values as endpoints.

[0165] During genome editing, the primer binding site allows the 3′ end of the nicked DNA strand to hybridize to the pegRNA, while the RT template serves as a template for the synthesis of edited genetic information. The pegRNA is capable for instance, without limitation, of (i) identifying the target nucleotide sequence to be edited and (ii) encoding new genetic information that replaces the targeted sequence. In some embodiments, the pegRNA is capable of (i) identifying the target nucleotide sequence to be edited and (ii) encoding an integration site that replaces the targeted sequence.

[0166] As used herein, the term “nicking guide RNA” (ngRNA) and the like refer to an RNA sequence that can nick a strand such as an edited strand and a non-edited strand. The ngRNA can induce nicks at about 1 or more nt away from the site of the gRNA-induced nick. For example, the ngRNA can nick at least at about 1, 2, 3, 4, 5, 6, 7, 8, 9, 10, 11, 12, 13, 14, 15, 16, 17, 18, 19, 20, 21, 22, 23, 24, 25, 26, 27, 28, 29, 30, 31, 32, 33, 34, 35, 36, 37, 38, 39, 40, 41, 42, 43, 44, 45, 46, 47, 48, 49, 50, 51, 52, 53, 54, 55, 56, 57, 58, 59, 60, 61, 62, 63, 64, 65, 66, 67, 68, 69, 70, 71, 72, 73, 74, 75, 76, 77, 78, 79, 80, 81, 82, 83, 84, 85, 86, 87, 88, 89, 90, 91, 92, 93, 94, 95, 96, 97, 98, 99, 100, 101, 102, 103, 104, 105, 106, 107, 108, 109, 110, 111, 112, 113, 114, 115, 116, 117, 118, 119, 120, or more nt away from the site of the gRNA induced nick. As used herein, the terms “reverse transcriptase” and “reverse transcriptase domain” refer to an enzyme or an enzymatically active domain that can reverse a RNA transcribe into a complementary DNA. The reverse transcriptase or reverse transcriptase domain is a RNA dependent DNA polymerase. Such reverse transcriptase domains encompass, but are not limited, to a M-MLV reverse transcriptase, or a modified reverse transcriptase such as, without limitation, Superscript® reverse transcriptase (Invitrogen; Carlsbad, Calif.), Superscript® VILO™ cDNA synthesis (Invitrogen; Carlsbad, Calif.), RTX, AMV-RT, and Quantiscript Reverse Transcriptase (Qiagen, Hilden, Germany).

[0167] The pegRNA-PE complex disclosed herein recognizes the target site in the genome and the Cas9 for example nicks a protospacer adjacent motif (PAM) strand. The primer binding site (PBS) in the pegRNA hybridizes to the PAM strand. The RT template operably linked to the PBS, containing the edit sequence, directs the reverse transcription of the RT template to DNA into the target site. Equilibration between the edited 3′ flap and the unedited 5′ flap, cellular 5′ flap cleavage and ligation, and DNA repair results in stably edited DNA. To optimize base editing, a Cas9 nickase can be used to nick the non-edited strand, thereby directing DNA repair to that strand, using the edited strand as a template.

### Integrase Technologies

[0168] The present disclosure provides non-naturally occurring or engineered systems, methods, and compositions for site-specific genetic engineering using integrase technologies. Integrase technologies will be discussed in more detail below.

[0169] The integrase technologies used herein comprise proteins or nucleic acids encoding the proteins that direct integration of a gene of interest or nucleic acid sequence of interest into an integration site via a nuclease such as a prime editing nuclease. In certain embodiments, the protein directing the integration can be an enzyme such as an integration enzyme. In certain embodiments, the integration enzyme can be an integrase that incorporates the genome or nucleic acid of interest into the cell genome at the integration site by integration.

[0170] As used herein, the term “integration enzyme” refers to an enzyme or protein used to integrate a gene of interest or nucleic acid sequence of interest into a desired location or at the integration site, in the genome of a cell, in a single reaction or multiple reactions. In certain embodiments, the integrase or fragment thereof comprises an amino acid sequence that is at least 80% identical to an amino acid sequence set forth in any one of SEQ ID NOs: 1-16. In certain embodiments, the integrase or fragment thereof comprises an amino acid sequence that is about 90% identical, about 91% identical, about 92% identical, about 93% identical, about 94% identical, about 95% identical, about 96% identical, about 97% identical, about 98% identical, about 99% identical, or 100% identical to an amino acid sequence set forth in any one of SEQ ID NOs: 1-16.

[0171] In certain embodiments, the integrase fragment comprises (e.g., retains) integrase activity.

[0172] In certain embodiments, the integrase further comprises one or more mutations. Mutations include, but are not limited to, amino acid substitutions, amino acid deletions, and amino acid insertions.

[0173] In some embodiments, the term “integration enzyme” refers to a nucleic acid (DNA or RNA) encoding the above-mentioned enzymes.

[0174] In some embodiments, the serine integrase φC31 from φC31 phage is used as an integration enzyme. The integrase φC31 in combination with a pegRNA can be used to insert the pseudo attP integration site (CCCCAACTGGGGTAACCTTTGAGTTCTCTCAGTTGGGG (SEQ ID NO: 54)). A DNA minicircle containing a gene or nucleic acid of interest and attB (GGCCGGCTTGTCGACGACGGCGGTCTCCGTCGTCAGGATCATCCGG (SEQ ID NO: 55)) site can be used to integrate the gene or nucleic acid of interest into the genome of a cell. This integration can be aided by a co-transfection of an expression vector having the φC31 integrase.

[0175] As used herein, the term “integrase” refers to a bacteriophage derived integrase, including wild-type integrase and any of a variety of mutant or modified integrases. As used herein, the term “integrase complex” may refer to a complex comprising integrase and integration host factor (IF). As used herein, the term “integrase complex” and the like may also refer to a complex comprising an integrase, an integration host factor, and a bacteriophage X-derived excisionase.

### Integration Site

[0176] The present disclosure provides non-naturally occurring or engineered systems, methods, and compositions for site-specific genetic engineering via the addition of an integration site into a target genome. The integration site will be discussed in more details below.

[0177] As used herein, the term “integration site” refers to the site within the target genome where one or more genes of interest or one or more nucleic acid sequences of interest are inserted.

[0178] The integration site can be inserted into the genome or a fragment thereof of a cell using a nuclease, a gRNA, and/or an integration enzyme. The integration site can be inserted into the genome of a cell using a prime editor such as, without limitation, PE1, PE2, and PE3, wherein the integration site is carried on a pegRNA. The pegRNA can target any site that is known in the art. Examples of cites targeted by the pegRNA include, without limitation, ACTB, SUPT16H, SRRM2, NOLC1, DEPDC4, NES, LMNB1, AAVS1 locus, CC10, CFTR, SERPINAL ABCA4, and any derivatives thereof. The complementary integration site may be operably linked to a gene of interest or nucleic acid sequence of interest in an exogenous DNA or RNA. In some embodiments, one integration site is added to a target genome. In some embodiments, more than one integration sites are added to a target genome.

[0179] To insert multiple genes or nucleic acids of interest, two or more integration sites are added to a desired location. Multiple DNA comprising nucleic acid sequences of interest are flanked orthogonal to the integration sequences such as, without limitation, attB, attP, other recognition site pairs, or any pseudosites in the human genome. As used herein, a “pseudosite” is a nucleic acid sequence in the target genome (e.g., a human genome) that is similar to a wild type attB or attP sequences. The sequence similarity is sufficient to allow integration of a nucleic acid sequence with an integrase enzyme. An integration site is “orthogonal” when it does not significantly recognize the recognition site or nucleotide sequence of a recombinase. Thus, one attB site of a recombinase can be orthogonal to an attB site of a different recombinase. In addition, one pair of attB and attP sites of a recombinase can be orthogonal to another pair of attB and attP sites recognized by the same recombinase. A pair of recombinases are considered orthogonal to each other, as defined herein, when there is recognition of each other's attB or attP site sequences. In certain embodiments, the attB nucleic acid sequences selected from the group consisting of SEQ ID NOs: 17, 19, 21, 23, 25, 27, 29, 31, 33, 35, 37, 39, 41, 43, 45, and 47. In certain embodiments, the attP nucleic acid sequences selected from the group consisting of SEQ ID NOs: 18, 20, 22, 24, 26, 28, 30, 32, 34, 36, 38, 40, 42, 44, 46, and 48. In certain embodiments, the attB/attP nucleic acid pair is selected from the group consisting of: SEQ ID NO: 17/SEQ ID NO: 18, SEQ ID NO: 19/SEQ ID NO: 20, SEQ ID NO: 21/SEQ ID NO: 22, SEQ ID NO: 23/SEQ ID NO: 24, SEQ ID NO: 25/SEQ ID NO: 26, SEQ ID NO: 27/SEQ ID NO: 28, SEQ ID NO: 29/SEQ ID NO: 30, SEQ ID NO: 31/SEQ ID NO: 32, SEQ ID NO: 33/SEQ ID NO: 34, SEQ ID NO: 35/SEQ ID NO: 36, SEQ ID NO: 37/SEQ ID NO: 38, SEQ ID NO: 39/SEQ ID NO: 40, SEQ ID NO: 41/SEQ ID NO: 42, SEQ ID NO: 43/SEQ ID NO: 44, SEQ ID NO: 45/SEQ ID NO: 46, and SEQ ID NO: 47/SEQ ID NO: 48.

[0180] In certain embodiments, the attB nucleic acid sequence is between 12 and 60 nucleotides in length or between 18 and 50 nucleotides in length. In certain embodiments, the attB nucleic acid sequence is 12, 13, 14, 15, 16, 17, 18, 19, 20, 21, 22, 23, 24, 25, 26, 27, 28, 29, 30, 31, 32, 33, 34, 35, 36, 37, 38, 39, 40, 41, 42, 43, 44, 45, 46, 47, 48, 49, 50, 51, 52, 53, 54, 55, 56, 57, 58, 59, or 60 nucleotides in length.

[0181] In certain embodiments, the attP nucleic acid sequence is between 12 and 60 nucleotides in length or between 18 and 50 nucleotides in length. In certain embodiments, the attP nucleic acid sequence is 12, 13, 14, 15, 16, 17, 18, 19, 20, 21, 22, 23, 24, 25, 26, 27, 28, 29, 30, 31, 32, 33, 34, 35, 36, 37, 38, 39, 40, 41, 42, 43, 44, 45, 46, 47, 48, 49, 50, 51, 52, 53, 54, 55, 56, 57, 58, 59, or 60 nucleotides in length.

[0182] In certain embodiments, the attB and/or attP nucleic acid sequence comprises one or more truncations. The truncation may be at the 5′ end, 3′end, or both. The truncations to the attB and/or attP nucleic acids sequences may be made while still retaining the ability to bind an integrase.

[0183] In certain embodiments, the attB and/or attP nucleic acid sequence is truncated by 1 to 32 nucleotides from one or both of the 5′ end and 3′ end. In certain embodiments, the attB nucleic acid sequence is truncated by 1, 2, 3, 4, 5, 6, 7, 8, 9, 10, 11, 12, 13, 14, 15, 16, 17, 18, 19, 20, 21, 22, 23, 24, 25, 26, 27, 28, 29, 30, 31, or 32 nucleotides from one or both of the 5′ end and 3′ end. In certain embodiments, the attP nucleic acid sequence is truncated by 1, 2, 3, 4, 5, 6, 7, 8, 9, 10, 11, 12, 13, 14, 15, 16, 17, 18, 19, 20, 21, 22, 23, 24, 25, 26, 27, 28, 29, 30, 31, or 32 nucleotides from one or both of the 5′ end and 3′ end.

[0184] In certain embodiments, any one of the attB nucleic acid sequences selected from the group consisting of SEQ ID NOs: 17, 19, 21, 23, 25, 27, 29, 31, 33, 35, 37, 39, 41, 43, 45, and 47 is truncated by 1 to 32 nucleotides from one or both of the 5′ end and 3′ end. In certain embodiments, any one of the attP nucleic acid sequences selected from the group consisting of SEQ ID NOs: 18, 20, 22, 24, 26, 28, 30, 32, 34, 36, 38, 40, 42, 44, 46, and 48 is truncated by 1 to 32 nucleotides from one or both of the 5′ end and 3′ end.

[0185] The lack of recognition of integration sites can be less than about 30%. In some embodiments, the lack of recognition of integration sites or pairs of sites can be less than about 30%, less than about 28%, less than about 26%, less than about 24%, less than about 22%, less than about 20%, less than about 18%, less than about 16%, less than about 14%, less than about 12%, less than about 10%, less than about 8%, less than about 6%, less than about 4%, less than about 2%, about 1%, or any range that is formed from any two of those values as endpoints. The crosstalk can be less than about 30%. In some embodiments, the crosstalk is less than about 30%, less than about 28%, less than about 26%, less than about 24%, less than about 22%, less than about 20%, less than about 18%, less than about 16%, less than about 14%, less than about 12%, less than about 10%, less than about 8%, less than about 6%, less than about 4%, less than about 2%, less than about 1%, or any range that is formed from any two of those values as endpoints.

[0186] In some embodiments, the attB and/or attP site sequences comprise a central dinucleotide sequence. It has been shown that, for example, the central dinucleotide can be changed to GA from GT and that only GA containing attB/attP sites interact and will not cross react with GT containing sequences. In some embodiments, the central dinucleotide is selected from the group consisting of AG, AC, TG, TC, CA, CT, GA, AA, TT, CC, GG, AT, TA, GC, CG and GT.

[0187] As used herein, the term “pair of an attB and attP site sequences” and the like refer to attB and attP site sequences that share the same central dinucleotide and can recombine. This means that in the presence of one serine integrase as many as six pairs of these orthogonal att sites can recombine (attPTT will specifically recombine with attBTT, attPTC will specifically recombine with attBTC, and so on).

[0188] In some embodiments, the central dinucleotide is nonpalindromic. In some embodiments, the central dinucleotide is palindromic. In some embodiments, a pair of an attB site sequence and an attP site sequence are used in different DNA encoding genes of interest or nucleic acid sequences of interest for inducing directional integration of two or more different nucleic acids. In some embodiments, two integrases can be used for orthogonal insertion.

[0189] The Table 1 below shows examples of pairs of attB site sequence and attP site sequence with different central dinucleotide (CD).

TABLE 1

| Pair | attB | attP | CD |
|---|---|---|---|
| 1 | GGCTTGTCGACGACGGCGTTCTC | GTGGTTTGTCTGGTCAA | TT |
| | CGTCGTCAGGATCAT | CCACCGCGTTCTCAGTG | |
| | (SEQ ID NO: 56) | GTGTACGGTACAAACCC | |
| | | A (SEQ ID NO: 72) | |
| 2 | GGCTTGTCGACGACGGCGAACTC | GTGGTTTGTCTGGTCAA | AA |
| | CGTCGTCAGGATCAT | CCACCGCGAACTCAGTG | |
| | (SEQ ID NO: 57) | GTGTACGGTACAAACCC | |
| | | A (SEQ ID NO: 73) | |
| 3 | GGCTTGTCGACGACGGCGCCCTC | GTGGTTTGTCTGGTCAA | CC |
| | CGTCGTCAGGATCAT | CCACCGCGCCCTCAGTG | |
| | (SEQ ID NO: 58) | GTGTACGGTACAAACCC | |
| | | A (SEQ ID NO: 74) | |
| 4 | GGCTTGTCGACGACGGCGGGCTC | GTGGTTTGTCTGGTCAA | GG |
| | CGTCGTCAGGATCAT | CCACCGCGGGCTCAGTG | |
| | (SEQ ID NO: 59) | GTGTACGGTACAAACCC | |
| | | A (SEQ ID NO: 75) | |
| 5 | GGCTTGTCGACGACGGCGTGCTC | GTGGTTTGTCTGGTCAA | TG |
| | CGTCGTCAGGATCAT | CCACCGCGTGCTCAGTG | |
| | (SEQ ID NO: 60) | GTGTACGGTACAAACCC | |
| | | A (SEQ ID NO: 76) | |
| 6 | GGCTTGTCGACGACGGCGGTCTC | GTGGTTTGTCTGGTCAA | GT |
| | CGTCGTCAGGATCAT | CCACCGCGGTCTCAGTG | |
| | (SEQ ID NO: 61) | GTGTACGGTACAAACCC | |
| | | A (SEQ ID NO: 77) | |
| 7 | GGCTTGTCGACGACGGCGCTCTC | GTGGTTTGTCTGGTCAA | CT |
| | CGTCGTCAGGATCAT | CCACCGCGCTCTCAGTG | |
| | (SEQ ID NO: 62) | GTGTACGGTACAAACCC | |
| | | A (SEQ ID NO: 78) | |
| 8 | GGCTTGTCGACGACGGCGCACTC | GTGGTTTGTCTGGTCAA | CA |
| | CGTCGTCAGGATCAT | CCACCGCGCACTCAGTG | |
| | (SEQ ID NO: 63) | GTGTACGGTACAAACCC | |
| | | A (SEQ ID NO: 79) | |
| 9 | GGCTTGTCGACGACGGCGTCCTC | GTGGTTTGTCTGGTCAA | TC |
| | CGTCGTCAGGATCAT | CCACCGCGTCCTCAGTG | |
| | (SEQ ID NO: 64) | GTGTACGGTACAAACCC | |
| | | A (SEQ ID NO: 80) | |
| 10 | GGCTTGTCGACGACGGCGGACTC | GTGGTTTGTCTGGTCAA | GA |
| | CGTCGTCAGGATCAT | CCACCGCGGACTCAGTG | |
| | (SEQ ID NO: 65) | GTGTACGGTACAAACCC | |
| | | A (SEQ ID NO: 81) | |
| 11 | GGCTTGTCGACGACGGCGAGCTC | GTGGTTTGTCTGGTCAA | AG |
| | CGTCGTCAGGATCAT | CCACCGCGAGCTCAGTG | |
| | (SEQ ID NO: 66) | GTGTACGGTACAAACCC | |
| | | A (SEQ ID NO: 82) | |
| 12 | GGCTTGTCGACGACGGCGACCTC | GTGGTTTGTCTGGTCAA | AC |
| | CGTCGTCAGGATCAT | CCACCGCGACCTCAGTG | |
| | (SEQ ID NO: 67) | GTGTACGGTACAAACCC | |
| | | A (SEQ ID NO: 83) | |
| 13 | GGCTTGTCGACGACGGCGATCTC | GTGGTTTGTCTGGTCAA | AT |
| | CGTCGTCAGGATCAT | CCACCGCGATCTCAGTG | |
| | (SEQ ID NO: 68) | GTGTACGGTACAAACCC | |
| | | A (SEQ ID NO: 84) | |
| 14 | GGCTTGTCGACGACGGCGGCCTC | GTGGTTTGTCTGGTCAA | GC |
| | CGTCGTCAGGATCAT | CCACCGCGGCCTCAGTG | |
| | (SEQ ID NO: 69) | GTGTACGGTACAAACCC | |
| | | A (SEQ ID NO: 85) | |
| 15 | GGCTTGTCGACGACGGCGCGCTC | GTGGTTTGTCTGGTCAA | CG |
| | CGTCGTCAGGATCAT | CCACCGCGCGCTCAGTG | |
| | (SEQ ID NO: 70) | GTGTACGGTACAAACCC | |
| | | A (SEQ ID NO: 86) | |
| 16 | GGCTTGTCGACGACGGCGTACTC | GTGGTTTGTCTGGTCAA | TA |
| | CGTCGTCAGGATCAT | CCACCGCGTACTCAGTG | |
| | (SEQ ID NO: 71) | GTGTACGGTACAAACCC | |
| | | A (SEQ ID NO: 87) | |

[0190] In one aspect, the disclosure provides an integrase or fragment thereof, wherein:
[0191] a) the integrase or fragment thereof comprises an amino acid sequence that is at least 80% identical to an amino acid sequence set forth in SEQ ID NO: 1, wherein the integrase binds to the attB nucleic acid set forth in SEQ ID NO: 17 and the attP nucleic acid set forth in SEQ ID NO: 18;
[0192] b) the integrase or fragment thereof comprises an amino acid sequence that is at least 80% identical to an amino acid sequence set forth in SEQ ID NO: 2, wherein the integrase binds to the attB nucleic acid set forth in SEQ ID NO: 19 and the attP nucleic acid set forth in SEQ ID NO: 20;
[0193] c) the integrase or fragment thereof comprises an amino acid sequence that is at least 80% identical to an amino acid sequence set forth in SEQ ID NO: 3, wherein the integrase binds to the attB nucleic acid set forth in SEQ ID NO: 21 and the attP nucleic acid set forth in SEQ ID NO: 22;
[0194] d) the integrase or fragment thereof comprises an amino acid sequence that is at least 80% identical to an amino acid sequence set forth in SEQ ID NO: 4, wherein the integrase binds to the attB nucleic acid set forth in SEQ ID NO: 23 and the attP nucleic acid set forth in SEQ ID NO: 24;
[0195] e) the integrase or fragment thereof comprises an amino acid sequence that is at least 80% identical to an amino acid sequence set forth in SEQ ID NO: 5, wherein the integrase binds to the attB nucleic acid set forth in SEQ ID NO: 25 and the attP nucleic acid set forth in SEQ ID NO: 26;
[0196] f) the integrase or fragment thereof comprises an amino acid sequence that is at least 80% identical to an amino acid sequence set forth in SEQ ID NO: 6, wherein the integrase binds to the attB nucleic acid set forth in SEQ ID NO: 27 and the attP nucleic acid set forth in SEQ ID NO: 28;
[0197] g) the integrase or fragment thereof comprises an amino acid sequence that is at least 80% identical to an amino acid sequence set forth in SEQ ID NO: 7, wherein the integrase binds to the attB nucleic acid set forth in SEQ ID NO: 29 and the attP nucleic acid set forth in SEQ ID NO: 30;
[0198] h) the integrase or fragment thereof comprises an amino acid sequence that is at least 80% identical to an amino acid sequence set forth in SEQ ID NO: 8, wherein the integrase binds to the attB nucleic acid set forth in SEQ ID NO: 31 and the attP nucleic acid set forth in SEQ ID NO: 32;
[0199] i) the integrase or fragment thereof comprises an amino acid sequence that is at least 80% identical to an amino acid sequence set forth in SEQ ID NO: 9, wherein the integrase binds to the attB nucleic acid set forth in SEQ ID NO: 33 and the attP nucleic acid set forth in SEQ ID NO: 34;
[0200] j) the integrase or fragment thereof comprises an amino acid sequence that is at least 80% identical to an amino acid sequence set forth in SEQ ID NO: 10, wherein the integrase binds to the attB nucleic acid set forth in SEQ ID NO: 35 and the attP nucleic acid set forth in SEQ ID NO: 36;
[0201] k) the integrase or fragment thereof comprises an amino acid sequence that is at least 80% identical to an amino acid sequence set forth in SEQ ID NO: 11, wherein the integrase binds to the attB nucleic acid set forth in SEQ ID NO: 37 and the attP nucleic acid set forth in SEQ ID NO: 38;
[0202] l) the integrase or fragment thereof comprises an amino acid sequence that is at least 80% identical to an amino acid sequence set forth in SEQ ID NO: 12, wherein the integrase binds to the attB nucleic acid set forth in SEQ ID NO: 39 and the attP nucleic acid set forth in SEQ ID NO: 40;
[0203] m) the integrase or fragment thereof comprises an amino acid sequence that is at least 80% identical to an amino acid sequence set forth in SEQ ID NO: 13, wherein the integrase binds to the attB nucleic acid set forth in SEQ ID NO: 41 and the attP nucleic acid set forth in SEQ ID NO: 42;
[0204] n) the integrase or fragment thereof comprises an amino acid sequence that is at least 80% identical to an amino acid sequence set forth in SEQ ID NO: 14, wherein the integrase binds to the attB nucleic acid set forth in SEQ ID NO: 43 and the attP nucleic acid set forth in SEQ ID NO: 44;
[0205] o) the integrase or fragment thereof comprises an amino acid sequence that is at least 80% identical to an amino acid sequence set forth in SEQ ID NO: 15, wherein the integrase binds to the attB nucleic acid set forth in SEQ ID NO: 45 and the attP nucleic acid set forth in SEQ ID NO: 46; or
[0206] p) the integrase or fragment thereof comprises an amino acid sequence that is at least 80% identical to an amino acid sequence set forth in SEQ ID NO: 16, wherein the integrase binds to the attB nucleic acid set forth in SEQ ID NO: 47 and the attP nucleic acid set forth in SEQ ID NO: 48.

### Paste

[0207] The present disclosure provides non-naturally occurring or engineered systems, methods, and compositions for site-specific genetic engineering using PASTE. PASTE will be discussed in more details below. The PASTE system is described in greater detail in U.S. Provisional Patent Application Ser. No. 63/094,803, filed Oct. 21, 2020, and U.S. Provisional Patent Application Ser. No. 63/222,550, filed Jul. 16, 2021, each of which is incorporated herein by reference.

[0208] The site-specific genetic engineering disclosed herein is for the insertion of one or more genes of interest or one or more nucleic acid sequences of interest into a genome of a cell. In some embodiments, the gene of interest is a mutated gene implicated in a genetic disease such as, without limitation, a metabolic disease, cystic fibrosis, muscular dystrophy, hemochromatosis, Tay-Sachs, Huntington disease, Congenital Deafness, Sickle cell anemia, Familial hypercholesterolemia, adenosine deaminase (ADA) deficiency, X-linked SCID (X-SCID), and Wiskott-Aldrich syndrome (WAS). In some embodiments, the gene of interest or nucleic acid sequence of interest can be a reporter gene upstream or downstream of a gene for genetic analyses such as, without limitation, for determining the expression of a gene. In some embodiments, the reporter gene is a GFP template or a Gaussia Luciferase (G-Luciferase) template. In some embodiments, the gene of interest or nucleic acid sequence of interest can be used in plant genetics to insert genes to enhance drought tolerance, weather hardiness, and increased yield and herbicide resistance in plants. In some embodiments, the gene of interest or nucleic acid sequence of interest can be used for site-specific insertion of a protein (e.g., a lysosomal enzyme), a blood factor (e.g., Factor I, II, V, VII, X, XI, XII or XIII), a membrane protein, an exon, an intracellular protein (e.g., a cytoplasmic protein, a nuclear protein, an organellar protein such as a mitochondrial protein or lysosomal protein), an extracellular protein, a structural protein, a signaling protein, a regulatory protein, a transport protein, a sensory protein, a motor protein, a defense protein, or a storage protein, an anti-inflammatory signaling molecules into cells for treatment of immune diseases, including but not limited to arthritis, psoriasis, lupus, coeliac disease, glomerulonephritis, hepatitis, and inflammatory bowel disease.

[0209] The size of the inserted gene or nucleic acid can vary from about 1 bp to about 50,000 bp. In some embodiments, the size of the inserted gene or nucleic acid can be about 1 bp, 10 bp, 50 bp, 100 bp, 150 bp, 200 bp, 250 bp, 300 bp, 350 bp, 400 bp, 600 bp, 800 bp, 1000 bp, 1200 bp, 1400 bp, 1600 bp, 1800 bp, 2000 bp, 2200 bp, 2400 bp, 2600 bp, 2800 bp, 3000 bp, 3200 bp, 3400 bp, 3600 bp, 3800 bp, 4000 bp, 4200 bp, 4400 bp, 4600 bp, 4800 bp, 5000 bp, 5200 bp, 5400 bp, 5600 bp, 5800 bp, 6000 bp, 6200, 6400 bp, 6600 bp, 6800 bp, 7000 bp, 7200 bp, 7400 bp, 7600 bp, 7800 bp, 8000 bp, 8200 bp, 8400 bp, 8600 bp, 8800 bp, 9000 bp, 9200 bp, 9400 bp, 9600 bp, 9800 bp, 10,000 bp, 10,200 bp, 10,400 bp, 10,600 bp, 10,800 bp, 11,000 bp, 11,200 bp, 11,400 bp, 11,600 bp, 11,800 bp, 12,000 bp, 14,000 bp, 16,000 bp, 18,000 bp, 20,000 bp, 30,000 bp, 40,000 bp, 50,000 bp, or any range that is formed from any two of those values as endpoints.

[0210] In some embodiments, the site-specific engineering using the gene of interest or nucleic acid sequence of interest disclosed herein is for the engineering of T cells and NKs for tumor targeting or allogeneic generation. These can involve the use of receptor or CAR for tumor specificity, anti-PD1 antibody, cytokines like IFN-gamma, TNF-alpha, IL-15, IL-12, IL-18, IL-21, and IL-10, and immune escape genes.

[0211] In the present disclosure, the site-specific insertion of the gene of interest or nucleic acid of interest is performed through Programmable Addition via Site-Specific Targeting Elements (PASTE). Components for inserting a gene of interest or a nucleic acid of interest using PASTE are for example, without limitation, a nuclease, a gRNA adding the integration site, a DNA or RNA strand comprising the gene or nucleic acid linked to a sequence that is complementary or associated to the integration site, and an integration enzyme. Components for inserting a gene of interest or a nucleic acid of interest using PASTE are for example, without limitation, a prime editor expression, pegRNA adding the integration site, nicking guide RNA, integration enzyme (an integrase, such as an integrase of any one of SEQ ID NOs: 1-16), transgene vector comprising the gene of interest or nucleic acid sequence of interest with gene and integration signal. The nuclease and prime editor integrate the integration site into the genome. The integration enzyme integrates the gene of interest into the integration site. In some embodiments, the transgene vector comprising the gene or nucleic acid sequence of interest with gene and integration signal is a DNA minicircle devoid of bacterial DNA sequences. In some embodiments, the transgenic vector is a eukaryotic or prokaryotic vector.

[0212] As used herein, the term “vector” or “transgene vector” refers to a recombinant DNA molecule containing a desired coding sequence and appropriate nucleic acid sequences necessary for the expression of the operably linked coding sequence in a host organism. Nucleic acid sequences necessary for expression in prokaryotes usually include for example, without limitation, a promoter, an operator (optional), a ribosome binding site, and/or other sequences. Eukaryotic cells are generally known to utilize promoters (constitutive, inducible or tissue specific), enhancers, and termination and polyadenylation signals, although some elements may be deleted and other elements added without sacrificing the necessary expression. The transgenic vector may encode the PE and the integration enzyme, linked to each other via a linker. The linker can be a cleavable linker. In some embodiments, the linker can be a non-cleavable linker. In some embodiments the nuclease, prime editor, and/or integration enzyme can be encoded in different vectors.

[0213] In one aspect, the disclosure provides a method of inserting multiple genes or nucleic acid sequences of interest into a single site. In some embodiments, multiplexing involves inserting multiple genes of interest in multiple loci using unique pegRNA (Merrick, C. A. et al., ACS Synth. Biol. 2018, 7, 299-310). The insertion of multiple genes of interest or nucleic acids of interest into a cell genome, referred herein as “multiplexing,” is facilitated by incorporation of the complementary 5′ integration site to the 5′ end of the DNA or RNA comprising the first nucleic acid and 3′ integration site to the 3′ end of the DNA or RNA comprising the last nucleic acid. In some embodiments, the number of genome of interest or amino acid sequences of interest that are inserted into a cell genome using multiplexing can be about 1, 2, 3, 4, 5, 6, 7, 8, 9 10, 11, 12, 13, 14, 15, 16, 17, 18, 19, 20, 21, 22, 23, 24, 25, or any range that is formed from any two of those values as endpoints.

[0214] In some embodiments, multiplexing allows integration of for example, signaling cascade, over-expression of a protein of interest with its cofactor, insertion of multiple genes mutated in a neoplastic condition, or insertion of multiple CARs for treatment of cancer.

[0215] In some embodiments, the integration sites may be inserted into the genome using non-prime editing methods such as rAAV mediated nucleic acid integration, TALENS and ZFNs. A number of unique properties make AAV a promising vector for human gene therapy (Muzyczka, CURRENT TOPICS IN MICROBIOLOGY AND IMMUNOLOGY, 158:97-129 (1992)). Unlike other viral vectors, AAVs have not been shown to be associated with any known human disease and are generally not considered pathogenic. Wild type AAV is capable of integrating into host chromosomes in a site-specific manner M. Kotin et al., PROC. NATL. ACAD. SCI, USA, 87:2211-2215 (1990); R. J. Samulski, EMBO 10(12):3941-3950 (1991)). Instead of creating a double-stranded DNA break, AAV stimulates endogenous homologous recombination to achieve the DNA modification. Further, transcription activator-like effector nucleases (TALENs) and Zinc-finger nucleases (ZFNs) for genome editing and introducing targeted DSBs. The specificity of TALENs arises from two polymorphic amino acids, the so-called repeat variable diresidues (RVDs) located at positions 12 and 13 of a repeated unit. TALENS are linked to FokI nucleases, which cleaves the DNA at the desired locations. ZFNs are artificial restriction enzymes for custom site-specific genome editing. Zinc fingers themselves are transcription factors, where each finger recognizes 3-4 bases. By mixing and matching these finger modules, researchers can customize which sequence to target.

[0216] As used herein, the terms “administration,” “introducing,” or “delivery” into a cell, a tissue, or an organ of a plasmid, nucleic acids, or proteins for modification of the host genome refers to the transport for such administration, introduction, or delivery that can occur in vivo, in vitro, or ex vivo. Plasmids, DNA, or RNA for genetic modification can be introduced into cells by transfection, which is typically accomplished by chemical means (e.g., calcium phosphate transfection, polyethyleneimine (PEI) Or lipofection), physical means (electroporation or microinjection), infection (this typically means the introduction of an infectious agent such as a virus (e.g., a baculovirus expressing the AAV Rep gene)), transduction (in microbiology, this refers to the stable infection of cells by viruses, or the transfer of genetic material from one microorganism to another by viral factors (e.g., bacteriophages)). Vectors for the expression of a recombinant polypeptide, protein or oligonucleotide may be obtained by physical means (e.g., calcium phosphate transfection, electroporation, microinjection, or lipofection) in a cell, a tissue, an organ or a subject. The vector can be delivered by preparing the vector in a pharmaceutically acceptable carrier for the in vitro, ex vivo, or in vivo delivery to the carrier.

[0217] As used herein, the term “transfection” refers to the uptake of an exogenous nucleic acid molecule by a cell. A cell is “transfected” when an exogenous nucleic acid has been introduced into the cell membrane. The transfection can be a single transfection, co-transfection, or multiple transfection. Numerous transfection techniques are generally known in the art. See, for example, Graham et al. (1973) Virology, 52: 456. Such techniques can be used to introduce one or more exogenous nucleic acid molecules into a suitable host cell.

[0218] In some embodiments, the exogenous nucleic acid molecule and/or other components for gene editing are combined and delivered in a single transfection. In other embodiments, the exogenous nucleic acid molecule and/or other components for gene editing are not combined and delivered in a single transfection. In some embodiments, exogenous nucleic acid molecule and/or other components for gene editing are combined and delivered in a single transfection to comprise for example, without limitation, a prime editing vector, a landing site such as a landing site containing pegRNA, a nicking guide such as a nicking guide for stimulating prime editing, an expression vector such as an expression vector for a corresponding integrase or recombinase, a minicircle DNA cargo such as a minicircle DNA cargo encoding for green fluorescent protein (GFP), any derivatives thereof, and any combinations thereof. In some embodiments, the gene of interest or amino acid sequence of interest can be introduced using liposomes. In some embodiments, the gene of interest or amino acid sequence of interest can be delivered using suitable vectors for instance, without limitation, plasmids and viral vectors. Examples of viral vectors include, without limitation, adeno-associated viruses (AAV), lentiviruses, adenoviruses, other viral vectors, derivatives thereof, or combinations thereof. The proteins and one or more guide RNAs can be packaged into one or more vectors, e.g., plasmids or viral vectors. In some embodiments, the delivery is via nanoparticles or exosomes. For example, exosomes can be particularly useful in delivery RNA.

[0219] In some embodiments, the prime editing inserts the landing site with efficiencies of at least about 1%, at least about 5%, at least about 10%, at least about 15%, at least about, at least about 20%, at least about 25%, at least about 30%, at least about 35%, at least about 40%, at least about 45%, or at least about 50%. In some embodiments, the prime editing inserts the landing site(s) with efficiencies of about 1%, about 2%, about 3%, about 4%, about 5%, about 6%, about 7%, about 8%, about 9%, about 10%, about 11%, about 12%, about 13%, about 14%, about 15%, about 16%, about 17%, about 18%, about 19%, about 20%, about 21%, about 22%, about 23%, about 24%, about 25%, about 26%, about 27%, about 28%, about 29%, about 30%, about 31%, about 32%, about 33%, about 34%, about 35%, about 36%, about 37%, about 38%, about 39%, about 40%, about 41%, about 42%, about 43%, about 44%, about 45%, about 46%, about 47%, about 48%, about 49%, about 50%, or any range that is formed from any two of those values as endpoints.

### Sequences

[0220] Sequences of enzymes, guides, integration sites, and plasmids can be found in the Tables below.

Lengthy table referenced here
US20230272435A1-20230831-T00001
Please refer to the end of the specification for access instructions.

Lengthy table referenced here
US20230272435A1-20230831-T00002
Please refer to the end of the specification for access instructions.

Lengthy table referenced here
US20230272435A1-20230831-T00003
Please refer to the end of the specification for access instructions.

Lengthy table referenced here
US20230272435A1-20230831-T00004
Please refer to the end of the specification for access instructions.

Lengthy table referenced here
US20230272435A1-20230831-T00005
Please refer to the end of the specification for access instructions.

Lengthy table referenced here
US20230272435A1-20230831-T00006
Please refer to the end of the specification for access instructions.

Lengthy table referenced here
US20230272435A1-20230831-T00007
Please refer to the end of the specification for access instructions.

### EXAMPLES

[0221] While several experimental Examples are contemplated, these Examples are intended to be non-limiting.

### Example 1

### Bxb1 Integration Data Lenti Reporter

[0222] The PASTE system, including the description in Example 1 and Example 2, are described in greater detail in U.S. Provisional Patent Application Ser. No. 63/094,803, filed Oct. 21, 2020, and U.S. Provisional Patent Application Ser. No. 63/222,550, filed Jul. 16, 2021, each of which is incorporated herein by reference.

[0223] Serine integrase Bxb1 has been shown to be more active than Cre recombinase and highly efficient in bacteria and mammalian cells for irreversible integration of target genes. FIG. 1 and FIG. 2 show schematics of PASTE methodology using Bxb1 (Merrick, C. A. et al., ACS Synth. Biol. 2018, 7, 299-310).

[0224] To probe the efficiency of the Bxb1 integration system, a clonal HEK293FT cell line with attB Bxb1 site (GGCCGGCTTGTCGACGACGGCGGTCTCCGTCGTCAGGATCATCCGG (SEQ ID NO: 3163)) integrated using lentivirus was developed. The modified HEK293FT cell line was then transferred with the following plasmids: (1) plus/minus Bxb1 expression plasmid and (2) plus/minus GFP or G-Luc minicircle template with attP Bxb1 site. After 72 hours, the integration of GFP or Gluc into the attB site in the HEK293FT genome was probed. The percent integrations of GFP or Gluc into the attB locus are shown in FIG. 3. It was observed that GFP and Gluc showed efficient integration into the attB site in HEK293FT cells.

### Example 2

### Addition of Bxb1 Site to Human Genome Using PRIME

[0225] The maximum length of attB that can be integrated into a HEK293FT cell line with the best efficiency was probed. To probe the best length of attB (GGCCGGCTTGTCGACGACGGCGGTCTCCGTCGTCAGGATCATCCGG (SEQ ID NO: 3164)) or its reverse complement attP (CCGGATGATCCTGACGACGGAGACCGCCGTCGTCGACAAGCCGGCC (SEQ ID NO: 3165)) for prime editing, pegRNAs having PBS length of 13 nt with varying RT homology length were used. The following plasmids were transfected in HEK293FT: (1) prime expression plasmid; (2) HEK3 targeting pegRNA design; and (3) HEK3+90 nicking guide. After 72 hours, the percent integration of each of the attB construct was probed. FIG. 4 shows the percent editing in each HEK3 targeting pegRNA. It was observed that attB with 44, 34 and 26 base pairs and attB reverse complement with 34 and 26 base pairs showed the highest percent editing.

### Example 3

### Integrase Discovery Platform & Use in PASTE System

[0226] Integrase choice can have implications for integration activity. To identify novel integrases with improved activity in the PASTE system, bacterial and metagenomic sequences were mined for new phage associated serine integrases (FIG. 5A). Exploring over 10 TB worth of data from NCBI, JGI, and other sources, 27,399 novel integrases were found (FIG. 5B, FIG. 5C) and their associated attachment sites were annotated using a novel repeat finding algorithm that could predict potential 50 bp attachment sites with high confidence near phage boundaries. Table 8 above recites top scoring integrase enzyme amino acid sequences and the attB/attP nucleic acid sequences recognized by said integrase enzymes. Accordingly, for each row of Table 8, an integrase amino acid sequence is recited, followed by the corresponding attB and attP nucleic acid sequence to which said integrase binds. Analysis of the integrases sequences revealed that they fell into four distinct clusters: INTa, INTb, INTc, and INTd. About half of integrases (14,771) derive from metagenomic sequences, presumably from pro-phages, and 13,693 of the integrases specifically derive from human microbiome metagenomic samples. An initial screen of integrase activity using a reporter system revealed that a number of the integrases were highly active in HEK293FT cells with more activity than BxbINT, a member of the INTa family (FIG. 6A). Using the predicted 50 bp sequences encoded in attachment site-containing guide RNAs (atgRNAs) along with minicircles containing the complementary AttP sites, it was found that these integrases were compatible with PASTE but with lower efficiency than BxbINTa-based PASTE (FIG. 6B). It was hypothesized that this was because of their longer 50 bp AttB sequences and so truncations of these AttBs were explored in the hopes of finding more minimal attachment sites. Truncation screening on integrase reporters revealed that AttB truncations of all the integrases, including as short as 34 bp, were still active and many had more activity than BxbINTa (FIG. 6C). Upon porting these new shorter AttBs to atgRNAs for PASTE, it was found that a number of integrases had more activity in the PASTE system than BxbINT-based PASTE at the ACTB locus, including the integrase from B. cereues (BceINTc), N191352_143_72 stool sample from China (SscINTd), and N684346_90_69 stool sample from adult in China (SacINTd), while others like the integrase from B. cytotoxicus (BcytINTd) and S. lugdunensis (SluINTd) did not (FIG. 6A and FIG. 6D-FIG. 6E). Because of its superior efficiency when used with PASTE, BceINTc when used as PASTE is referred to as PASTEv4.1. Moreover, upon optimization of these integrases with different linkers and RT domains, it was found that BceINTc fused to SpCas9-RTSto7d or SpCas9-MLV-RT^{L139P} variant had the most activity, even higher than BxbINTa-based PASTE (FIG. 6G-FIG. 6I). The construct SpCas9-MLV-RT^{L139P}-BceINTc construct is referred to as PASTEv4.1. We then evaluated this optimized PASTEv4.1 and found that across a number of endogenous gene loci that it performed better than BxbINTa-based PASTE (FIG. 6H and FIG. 6J).

### Example 4

### Screening of Additional Integrases

[0227] Ten additional integrases were tested for activity that were identified from the original discovery platform described above. The integrase amino acid sequences, nucleic acid sequences, and their corresponding attB and attP sites are recited in Table 9 below. As shown in FIG. 7A, several of the integrase displayed integrase activity in the HEK293 reporter assay described above. Integrases N352807_16_14, N362476_2_132, and N391614_1_4134 displayed measurable activity. The integrase N352807_16_14 was next tested in the PASTE system with integration at the ACTB gene locus, along with truncations of the attB site. The truncations tested were 2, 4, 6, 8, 10, 12, 14, or 16 base pair truncations from either the left or right of the attB sequence. As shown in FIG. 7B, the integrase N352807_16_14 achieved higher integration levels at the ACTB gene locus with all attB truncations compared to the BxbINT PASTE system.

TABLE 9
Integrase Amino Acid Sequences with Corresponding
attB/attP Nucleic Acid Sequences

| Integrase | Protein sequence | AttB | AttP |
|---|---|---|---|
| N124497_75_2 | MRAAIYARYSTEMQREASIEDQFRICRRLIEQNGW | GCATCTGCTGAT | CGCGGGTCTCA |
| | TTAQTYADAGLSGASHLRPGYQQMLQDARDGRF | AGCCTGGCCGTA | GCGGGGCATCG |
| | DVAVAEGLDRISRDQEHIAAFFKQLRFQGISIVTVA | GGGTCGGCGGC | CACCGAATTGCC |
| | EGEISELHIGLKGTMSSLFLKDLALKTHRGLEGRVQ | CTCATCAGGCTC | CCTGCTCAGAAC |
| | NGKSAGGVTYGYDVLRSIGSDGNVSTGDRTINEEQ | ATA (SEQ ID NO: | CGCA (SEQ ID |
| | ADIVRRIFQEYVDGHSPRAIAGRLNDEGIDGPRGR | 3176) | NO: 3186) |
| | GWGMSTIYGNWRRGTGILNNELYVGRLVWNRQ | | |
| | RFLKDPATGRRQARMNPPEQWVKKDVPDLRIVP | | |
| | NKLWEKVKARQKATRSTVISEGVVRSERAKRPAYL | | |
| | FSGLVKCGCCGGGFTLVGKTYYGCANARNKGTCD | | |
| | NKMTVRRDRLEDTVLGGLKDQLLHPDLIAAFVTEY | | |
| | QAEYNRLAGEITKDKSKAERKLAGVKRRIDQLVDRI | | |
| | CDGMFHESMKDKLTALEQEKAALETELATFDADV | | |
| | PVRLHPGLSDVYRAKVAKLTESLNNPDLRTAASEHI | | |
| | RSLISEIRMVPEGDSLQIELVGELAGLMALSQKSKA | | |
| | RGDATGCSITMVAGVGFEPTTFRL | | |
| | (SEQ ID NO: 3166) | | |
| N321537_3_247 | MSQKISAEHLCRGAVVYVRQSTMSQVVEHTESQN | ATCTCCTGGGTC | TTCTGCTGGAAG |
| | RQYALAESARAMGFASVTTIDDDLGRSGSGSVERP | GTTTGTGTTCAC | CGCTGGGCAGA |
| | GFQKLVASVCAGSVGAVFCLEASRLARNGRDWHH | CGGTGAACACA | CCGGTCTGCCCA |
| | LIDLCALVGTVVVDHDGIYDPRLVNDRLLLGLKGT | AACGACCCAGG | GCGCTTCCAGCA |
| | MSEYELSLLRQRGIAARDSKARRGELRFALPPGYC | AGAT (SEQ ID | GAA (SEQ ID |
| | WNELGQIEMDADERVAEAIRVLFRKFRELGSARQ | NO: 3177) | NO: 3187) |
| | VLLWAIQSDVKLPVTRHGPAGIRIEWSRPAYHTVV | | |
| | QILEHPVYAGAYVFGRTTHRTAVIDGRARKTEGHS | | |
| | KPMRDWSVLLRDHHPGYITWDQFEEHQRMIAEN | | |
| | THMKKRASRRSARGGRALLTGLARCGRCGRMMR | | |
| | VNYGTRAGHAHRYYCRGDEAHVGAFRCIGIGGIRI | | |
| | DKAVAAAILEAVSEHAVEAAVRAAQQTSRAGDDV | | |
| | RRALACELEEARYDASLAARRYEVVDPTKRLVAREL | | |
| | EGRWNTALERVAHLEERAALLDREVASRPAIDQTQ | | |
| | LMTLARDLPAAWNAPGTDMRTKQRLTRILIQEVVI | | |
| | DLDDITNEAVATVHWTGGRHTELRVARVNVGRYP | | |
| | SSQHFSAVEVMRKLGGQWPDRELAVTMNRMRC | | |
| | KSPDSRTWTTVRVTEMRERLGIAPFDPTASHAETIS | | |
| | VEEASRRLGIYGSSIHRLIREGILPATQLMPSAPWQ | | |
| | VPVAALDSDAVRAGVQAIKDRRPPHFKARQEADK | | |
| | SLKLPGF (SEQ ID NO: 3167) | | |
| N337281_45_252 | MTAVIYARYSSDSQREASIEGQLRDCKDYAEKNGIT | GCGTAGATCAC | AAGTCGAATAC |
| | VVGTYIDRAYSAKTDDRPDFQRMIKDSGKKIFDVV | GGCGGTCATGG | GCGCCAAGGAG |
| | LVWKLDRFARNRFDAVNYKYQLEKNGVHLVSVME | TTGCAACCATGA | GTGCACCTCCTT |
| | PISQGPEGIMVESMLIGMAEYYSAELALKVARGER | CCGCCGTGATCT | GGCGCGTATTC |
| | ENALQCKYNGGVVPLGFTIGKEDRLYHIDPETAPIV | ACGC (SEQ ID | GACTT (SEQ ID |
| | QEIFTRYADGEPAEKIAASLNERGLRTRTGKPFVKN | NO: 3178) | NO: 3188) |
| | SFFQIFRNRRYIGEYRYKDIVTPGGIPAIVDQDLFDR | | |
| | VQQRFEQNRIAHGRPAKEDVRYLLTTKLFCGKCGT | | |
| | LMGGESGTSHMGNTYYYYKCGNAKRHGKAHCDL | | |
| | KAIRKEPLERFVVETAIKVIFSDEIIEQLIDLIMEAQQ | | |
| | QENTRLPVLKDQLRDTEKRLANLLEAIEQGILTPTTK | | |
| | QRLDELEARKEALNTSILEEELKKPVLTREWMRFW | | |
| | FEKFRKGDMRDMEHQRQIIDTFVNSVYVFDDRVV | | |
| | LNFNFTDDSKTISREEVLGSSAVDNAPPHKNPQTF | | |
| | VWGFLFCVGGEAQDENRAREQSDTIVKGRIPPSW | | |
| | (SEQ ID NO: 3168) | | |
| N352807_16_14 | MKVIGYARLSRATEESTSIARQRQAIQDTARQRGW | GCTTACACTTTG | TCCCCGGACATG |
| | ELVRIETDNDVSATRTRLDRPGLNAVRDAIAAGDA | GTCACACTCGGC | CTCGTGTTCGCG |
| | DAVLVWKLDRIARSVVDFGLLLDDGLQIVSCMEPL | ACCGCGGATGA | GTGCTGCAGCC |
| | DTTTPMGRAMAEILQVFAAMEARTIGQRVSSSRK | GACTAAAGTGTA | GATCATGTTCGT |
| | HLATIGRFPGGQPPYGYRSVPMPGGTGRTLEVDP | CGT (SEQ ID NO: | GTT (SEQ ID |
| | DEAAIVRKAVDAVLGGESMYAVLKELDEAGVRTRR | 3179) | NO: 3189) |
| | GLSWTLTTFPRVLCSEAMLGRARFQGKTVRDDNG | | |
| | LPLTPFPPILTLEEHDQLVARFAPDAEHAERTRAGR | | |
| | RKASRLLSGLLYCESCNSRLVVRTNNHPSRPPVYFC | | |
| | PSRGTGVVCTARVSGLASKLEELVTDTFLDLYGSAP | | |
| | FTVEHTSVQERSDVALVEAAIRDTTDELREPDADV | | |
| | MALVDRLNSLRAERERLDKLPTAPVVERVPTGETV | | |
| | AQVWHRSDYRAQRDLLIRAGFYGVLRPAKRRGYW | | |
| | DDDRFDIQWDVDDVLSLDPNDVEAQSRGPITV | | |
| | (SEQ ID NO: 3169) | | |
| N362476_2_132 | MTSPLPAAIYLRVSGKHQAEGRFGLAAQEHECRAY | GTTTATACGCGT | TACTCATTCATC |
| | AARVGLRVARVYVDVISGARDERAQFTQLLADAA | GCACACCTAATC | TGGCAGCCGTA |
| | GYSVVILGVQDRLARDVPLSYAMLGALQRAGLRV | ACCTATAGGTGT | GGTGATTAGGT |
| | HSALEGPLDLEDDGHALNFGIRAVIADQERRRITAR | TCAGTCGTATAA | GTGCCTTCATCA |
| | MYGGKLAKVRDRGQPVAPIRAYGWKDGAPDPET | AG (SEQ ID NO: | TGTT (SEQ ID |
| | GARVAWIFEQVERRGLNQVLDELERLGVPSPTGRP | 3180) | NO: 3190) |
| | RWGKTALLNLIRNPLYRGEYGYGRKGERLTLAVPAL | | |
| | VTPEQWARTNAAVARRFKGSGRAGTLAHIYHLQG | | |
| | VARCGECGSTMSAHSPTPRDGAVRHRYYHCRGTL | | |
| | KIAGRRCEHRRSYPIDVLHQVVAEGLAVLLSEPKLLA | | |
| | EAVARGVHERPGSGPGRVATELARLDAEWERWK | | |
| | GALRAGAITPEELAAERRRIDAARAALSTVEAPTPL | | |
| | DVETWVARTTRAVADLPLGEALRVAGIGVRVHAG | | |
| | GAVEFVVTP (SEQ ID NO: 3170) | | |
| N391614_1_4134 | MTTRKRAVIYTRISKDRNGESLAVDRQEKACRKLAK | CTAGGCGTCACC | GCCAGGTCGGC |
| | LAEMEVVDIFTDNDISAYNGKRRDGFEDMLVAIES | TGTACATGCTGT | GGCCACCTGCTC |
| | GRADVVLCQHTDRLYRRLADLVRLCQAGPNLLIKTI | GGCGAGCATGT | GCCGTACGCGG |
| | QGGDLDLSTSTGKMLAQILGSVQEQESAHHSERR | ATAGGGGACGC | TGGCCGCCCGG |
| | KSAYVQRAELGVFHNQGNRSFGYTRDGQPIEPEAT | CTAA (SEQ ID | GTGCC (SEQ ID |
| | MYRDAVADLLEGTSLRAIARQWNASGVTTTVAGA | NO: 3181) | NO: 3191) |
| | TRKLKGKEYVVKGVWSSTRIRRLLLNPRYAGIKTHL | | |
| | GKEVETQANWTPLIDEETYRRVVAELSDPTRLKVTS | | |
| | FEKKHVGSGVYVCGVCGAPMQISFPGPGRSQGRK | | |
| | YVCSAHSCVIRGGDPVDDYVENLVVERLSRPDAGL | | |
| | LIAERGVDVGKLQDQRAGWVTKLDRLVDLLDDGT | | |
| | LDGPKARRRAAEYKAEINKIDSQLAQAARTSPTAAL | | |
| | LAAGKELRMRWPKLTAGVRGEIISEIATVTINRCGK | | |
| | GKRFDPHAVVDGKVVLDVQWKVDSP (SEQ ID | | |
| | NO: 3171) | | |
| N41352_5_87 | MRVLAVKRISRDTEQSSALARQEVQLSKAIREGHH | CGTTTGGAATCC | CCCCGGGTCAG |
| | TVAGWVEDATVSGAVNLDKRPSLGQWLTAPLIHE | CTAACATCCGAC | GGTGACGCCCG |
| | WDGMMVTEQDRITRDDLHWAAFVGWVLENGK | ACGTCGGACTTG | AGGTGTCGGAT |
| | TIVVLDDPSFDITTPNGRLIASVKAAQAANYRNSVR | CGATAGCCCAAA | GTTAGGGATTCC |
| | TKKLNQLEWYREERLWSGGSWPFGYRAIRVLHRE | CC (SEQ ID NO: | AAACG (SEQ ID |
| | ALRWRLGIDPVTGPLIREAYDRLVNKGHSIRMIVLD | 3182) | NO: 3192) |
| | WNARGILTARDYQRHVKALEGGEQAEAAVKGTQ | | |
| | WSNTVLRVVLTNPALMGYAVYKGEIQKKAGLPVQ | | |
| | WADPILTLEEFEKLQEVLARRGGANRNITPRTTDW | | |
| | AGIFYCACGSVYYSNSAPRKLKDGSVRRHDYYLCKT | | |
| | RQVGTRCAYVTSWPLEILRTHLEDAFLSNAGDLEI | | |
| | MTRTYIPGSDRSADIRQLQEALENLTGNLIHLKPGS | | |
| | AGATAVLKAMEEHEAALAELEALPVIPSRWQESGT | | |
| | GETFRQFWERNPSWEVRCDFLRKTGVRLYVAGNP | | |
| | KAPDLDLFLPDDLQQRIINAVSDTVEPGALEAAGR | | |
| | QADDAMAERRASDAALREAAMEATRGTRDLTR | | |
| | (SEQ ID NO: 3172) | | |
| N509609_2_6625 | MTRAALYARFSSDQQKDRSIADQISLCRDLCAREG | ACCCGAGACATA | GGAAAGTGTAA |
| | MTVISTFEDRAISGSAAVNRPGFQALMQAAESRLF | GGTGACAGTTC | CCCATGTGTCCG |
| | DVIVAEDMDRIFRDQADYHNVRKRLDFLGITLHTA | GTACGAACTGTC | GTACCGGACAC |
| | TGKIGTIDGALRALMSEQFIENLRVHTRRGLEGVLR | ACCTATGTCTCG | ATGGGTTACACT |
| | DGRHAGGRAYGYRAIKDKPGELEIVEDEAEIVRQIF | GGT (SEQ ID | TTCC (SEQ ID |
| | SDYVAGKTPRQIAHDLNNRSVRPPRGRLWNGSTI | NO: 3183) | NO: 3193) |
| | NGNVARGGGMILNDLYAGRIVWNKVRMVKDPA | | |
| | TGKRLSRPNPKEQYRIVEAPHLRIIDDATFKAAQGIK | | |
| | AERRRDATPASAQRARAPKRVFSGLIRCGSCGGG | | |
| | MSSIGSDRKGLRLQCSAHRESGSCDNGRRIYLSDIE | | |
| | ALAIKGLRQHLAHPEVIAEFVDAYNAERKRLKKEAS | | |
| | TERARLERRLGEIEREMRRIVDSIVVTGMPPEQFVA | | |
| | RMQELEAEKTKVMAGLERAKETDNVIALHPKALD | | |
| | RYKDAVVELADELKRGTPTEFATVRELVTAIIVHASP | | |
| | SRPGGAGTRANAEDDRNVRIDIKGRLAALCGNPAL | | |
| | FPNMAMSG (SEQ ID NO: 3173) | | |
| N619944_1_1773 | MQVRGVTPFVSAVGAEKLDTVRVGVYARQSKARP | CGAACGCGAGC | ACTGCCCATGAA |
| | DSSEASPEAQLAAGQMLAASRGWEVVHTFKDVG | AGGAACCAGGA | GCTCAGCCGTCG |
| | RSGWDPNAVRPEFEALMEAVRAGEVDVVIVNELS | AACGTCTCCTGG | CGCGACGGCTG |
| | RLTRKGAHDALEIDKEFKEYGVRFVSVLEPFLDTSN | TTCCTGCTCGCG | AGCTTCATGGTC |
| | PIGVAIFALIAALAKQDSDIKAERLRGAKDEIAAVGG | TTCG (SEQ ID | CCA (SEQ ID |
| | RHSSSPPFGMRAVREKIGSLVVSVLEPDEDNPDHV | NO: 3184) | NO: 3194) |
| | ALVKRMAAMSADGISDNKIATTFTEEEIPAPGEAE | | |
| | RRATPKRMESIKRRRVSDKERPIQWRAQTVKWILS | | |
| | HPAIGGFASERVKRGKAYENVIARNLVGKPLAPHR | | |
| | GIIPGAQWLDLQEKRKAGTQPGRKSGGNAVPTLLS | | |
| | GWRFATCGVCDGALGQTPGNGDGSYMCANPKG | | |
| | HGGLGIKRSELDDYVARRVWARLENSDMDDPEDR | | |
| | VWVEAAAQRFALQKDLSSAQEERRETELHLDHVR | | |
| | QSIAELQEDRKRGLYRGRDELNTWRATLEQYRAYE | | |
| | DQCVARLTELEEEASATIRIPVEWTEPGEDPIGKGS | | |
| | PWASWDIFERRAFLDLFLSGVSVGRGRDPETRKYI | | |
| | AVEDRVTLHWRPLPADDETDED | | |
| | (SEQ ID NO: 3174) | | |
| N621304_1_2552 | MKAVIYARVSTQDQALGFSLATQKELCEKKARALG | TTTCCGGTGGTA | AAAGGTGCCCC |
| | ALEVEVVEDAYTGTELNRPSLDYVRQLVATGKVDL | CCAGCCTGGGA | CGTCAATAAACA |
| | VVVYDPDRLSRNLTDLLILCREFDKAGVRLEFVNFD | GGAATCCTGCTC | CTCATGTTTATC |
| | WQKTPQGMLFLQMRGAFAEFEHALIKERTQRGK | TGGGGAAGAAG | TCCTTCAACATC |
| | DKKAASGKIRCYAKPFGYDWDAEGDTLVINPQEAE | AAAG (SEQ ID | TCT (SEQ ID |
| | IVKQMFEWLTDPLEPLTPWQITQKLGQVYPQGPR | NO: 3185) | NO: 3195) |
| | GKGWVHSSVVRMLKNPVYTGRLRRKDEQPDWKP | | |
| | VLVPAIIDQVTFMRAQEMLARSKHFNPKTTRRRFL | | |
| | LQRLLVCGECGRRLTVVTHNNPQKAKYSYYTCPGR | | |
| | YPTKFDDRGRVGRCGLPPWRTEEIDKTVWDTIASII | | |
| | KNPELFYQYITSEKLETASIPRRRLEEARKRLEQVQR | | |
| | VIERIDRAYFILEALPEEDYKRYRAEQEGELIRIEEDIK | | |
| | RLEAVINAQEQVQKGVEFLRQYAENLARSVDELNF | | |
| | FQKQNITRELVQRVKIYADGSLEIEGYFNLPFTGPG | | |
| | KNVPDHCEELTTLTTQKNLKEPLSSSVLTCTHRKKG | | |
| | HPKVTEGIIHLTILAV (SEQ ID NO: 3175) | | |

[0228] One skilled in the art will appreciate further features and advantages of the disclosure based on the above-described embodiments. Accordingly, the disclosure is not to be limited by what has been particularly shown and described, except as indicated by the appended claims.

LENGTHY TABLES
The patent application contains a lengthy table section. A copy of the table is available in electronic form from the USPTO web site (https://seqdata.uspto.gov/?pageRequest=docDetail&DocID=US20230272435A1). An electronic copy of the table will also be available from the USPTO upon request and payment of the fee set forth in 37 CFR 1.19(b)(3).

The application's sequence listing, which the Patent Office published only in electronic form, follows.

SEQUENCE LISTING (69199 sequences)

SEQ ID NO: 1 - protein, 527 aa, synthetic construct
MEKNRAVLYLRLSKEDVDKVNKGDDSSSIKSQRLLLTDFALERGFKIVGVYSDDDESGLYDDRPDFERMMTDAKLDEFDIIIAKTQSRFSRNMEHIEKYLHHDLPNLGIRFIGAVDGVDTESDENKKSRQINGLVNEWYCEDLSKNIRSAFKAKMKDGQFLGSSCPYGYKKDPQNHNHLVVDDYAAKVVQKIFNLYLEGYGKAKIGSILSSEGILIPTLYKKDILKQNYHNSKALDTTQNWSYQTIHTILNNEVYLGHLIQNKVNTMSYKDKNKRILPKEKWIIVRNTHEPIITEEMFQDVQKLQKNRTRSVENIEPNGLFSGLIFCADCKHAMSRKYARRGEKGFVGYVCKTYKTQGKNFCESHSIDYDELEEAVLFSIKNEARSILQQEEIDELRKVQAYDETKSYYEMQLENIKSRMEKIEKYKKKTYDNYMDDLISRDDYKKYVTEYDKEIGGLKQQQELINSKTDLEKEISTQYDEWVEAFINYVDIDKLTREIVIELIEKIEVNKDGSINIYYKFKNPYIS

SEQ ID NO: 2 - protein, 510 aa, synthetic construct
MNTVIYARYSAGPRQTDQSIDGQLRVCTEFCKQRGLTVVDTYCDRHISGRTDERPEFQRLIADAKAHKFEAVVVYKTDRFARNKYDSAIYKRELRRNGIQIFYAAEAIPEGPEGIILESLMEGLAEYYSAELAQKIKRGLNESALKCQSLGSGRPLGYTVDEQKHFQIDPESSQAVKTIFEMYIKGESNAAICDYLNARGLRTSQGNLFNKNSINRIIKNRKYIGEYRYNDIVVEGGMPAIISKETFCMAQAEMERRRTHRAPVSPKAEYLLAGKLFCGHCKGPMQGVSGTGKSGNKWYYYYCANTRGKERTCDKKQVSRDRLEKAVVDFTVRYILQENVLEELSKKVYAAQERQNNTASEIAFYEKKLAENKKAIANILRAIESGAMTQALPARLQELENEQTVIQGELSYLKGARLAFTEDQILFALLQHLDPRPGESERDYHRRIITDFVSEVYLYDDRMLIYFNISSADGKLKHADLSAIESGVFDAGLISSSSRASSFSTRCALI

SEQ ID NO: 3 - protein, 482 aa, synthetic construct
MNEKNLEIGAAYIRVSTDDQTELSPDAQLRVILEAAKKDGIIIPQEFVFMEDRGRSGRRADNRPEFQRMISTARQNPSPFRYLYLWKFSRFARNQEESAFYKGILRKKCGVTIKSVSEPIMEGMFGRLVEMIIEWSDEFYSVNLSGEVLRGMTQKALEHGYQLTPCLGYDAVGHGRPYVINEEQYQIVEFIHRSFFDGKDMTWIAREANRRGYHTRRGNPFDTRAVRIILTNSFYVGLVKWNDVTFQGTHECRESVTSVFSANQERLNRIHRPRGRRQASSCKHWLSGLLKCSICGASLGYNQTKDLTKRGHAFQCWKYTKGIHPGSCSVSSLKAEAAVLESLQMILETGEVEYTYEQREKHLDDNKLTLIQKSLERLDTKELRIREAYESGIDTLDEFKTNKARLQRERDQLMEELEELHSQEEPEDVPGKEILIERIQNVYDLLQSPDVDNDDKGNAVRSIIKKIVYIKESKTFCFYYYV

SEQ ID NO: 4 - protein, 406 aa, synthetic construct
MERTIKVIQPGTVKIPTKKRVAAYARVSSGKDAMLHSLSAQVSYYSNMIQQKNEWSYVGIYADEAITGTKDRRVEFNRLIQDCTDGKIDMIITKSISRFARNTLTMLEVVRKLKNINVDVYFEKENIHSISGDGELMLTILASFAQEESRSVSENCKWRIRKGFEQGELINLRFLYGYRINKGKIEIYEKEAEIVRMIFDDYLNGEGCTRIGNKLRKMKVNKLRGGMWNSERVVDIIKNEKYTGNALLQKKYVKDHLSKKLVRNKGILTQYYAEGTHPAIIDIKTFEIAQKIMEANRTKFQGKCGSNRYLFTSKIECGICGKNYRHKDREGKSTWVCANHLKYGNSRCIAKPLNEEKLKKLINEALELKYFDEEIFIRNIKRIKVTGNQTIEFILKDGKVIEEGMI

SEQ ID NO: 5 - protein, 401 aa, synthetic construct
MKKIKIDRAIQERPATRKQTRNEKIRQSLTEHVDVQVIPAITDREGYEKPKLRVCAYCRVSTDMDTQALSYELQVQNYTDYIRGNDEWRFAGIYADRGISGTSLKHRDEFNRMIEDCKAGKIDLIITKAVTRFARNVLDCISTIRMLKQLEHPVAVYFETERINTLDTTSETYLGLISLFAQGESESKSESLKWSYIRRWKRGTGIYPAWSLLGYEMGEDGKWQIVEAEAELVRIIYDMYLNGYSSPQIAEILTRSGVPTATNQTVWSSGGVLGILRNEKYCGNVLCQKTMTVDVFSHKAIKNTGQKTQYFIEGHHDPIILRSDWDRVQQMIDEKYYRKRRGRRTKPRIVLKGCLAGFTQIDLDWDEDDIARIFYSTTPAAEVATPAMADHIEIIKVKGEN

SEQ ID NO: 6 - protein, 476 aa, synthetic construct
MKTAAAYIRVSTDDQVEYSPDSQIKLIRDYAKRNDYILPDEFIFRDDGISGKSAKHRPEFTKMIALAKSPEHPFDAILVWKFSRFARNQEESIVFKNILRKIGVEVRSVSEPISEDPFGSLVERIIEWTDEYYIINLSGEVKRGMLEKISRGQPVVPPPVGYKMENGQYIPDENAHFIKEIFEAYAAGEGARHIAQRLAAQGCLTKRGNPIDNRFVDYVLHNPVYIGKLRWSVNSHAASSRHYDSADIIVFDGTHEPLISSELWESVQKRLHEVKTLYPKYQRREQPVSFMLKGLVRCSSCGSTLCYCRTSEPSLQCHSYARGSCRQSHSINIATANEAVIKGLQLAVDKLDFAIAPAKPHYSADAPGTNKLLAAEYKKMERIKAAYANGTDTLEEYAANKKKISAEIARLEAELQQESNVKPINKKAFAKRVSEIIKYISDPHNSEAAKNQALRTVISYIIFDRAATTFNIIFHF

SEQ ID NO: 7 - protein, 550 aa, synthetic construct
MKIAIYARKSKYSPTGESVENQIQLCKEYLQAKYKSETLEIDEYKDEGYSGGNTNRPDFKKLIAQIEDYDMLICYRLDRISRNVADFSSTLTLLQNNKCDFVSIKEQFDTTSPMGRAMIYISSVFAQLERETIAERIRDNMMELAKMGRWLGGTIPMGFDSEPITFIDENMKERSMTKLIPNVEELKVIELIYEKYLQLGSMGKVVTYLLQNNIKTKKGKDFTLGSIKVILTNPIYVKANQEVVNHLKTQGITICGDVDGKKALLTYNKTTGISNDVGTKTIVKDKSEWIAAVANHKGIIPADKWLQAQNIKDKNKDSFPALGRSNTTIASRVLRCDKCESTMGVTHGHINPVTGKKHYYYNCTLKKRSKGVRCDNKPAKAAEVDEAILITLENMFKAKSSIIDNLKAKNKARRIEMISSNRVDVINKIIEDKTKQIDNLVNKLSLDDDLTDILFKKIKGLKAEIKELEDELLTLTSDNIKLNEDEVVLDFTEKLLEKCSIIRTLDILEQQQIVDALIPLVTWNGDTEVLNIYPLGSPELELKEAESKKK

SEQ ID NO: 8 - protein, 493 aa, synthetic construct
MKEKVSERKTGAIYIRVSTDKQEELSPDAQLRLLLDYAKKDSIDVPKEYIFQDNGISGRKANKRPAFQNMIALAKSKEHPIDTIIVWKFSRFARNQEESIVYKSLLKKNNVDVVSVSEPLIDGPFGSLIERIIEWMDEYYSIRLSGEVMRGMTQNAMRGHYQSDAPIGYTSPGDKKPPVINPDTVQIPLMIKDMFLSGSTQLQIARKLNDSGYRTKRGNLWDARGVRYVLENPFYIGKSRWNYTERGRRLKPADEVIYADGNWEALWDEDTFKEIQKRLALNMRKSKSRDISAAKHWLSGLLICSSCGGTLAFGGAHNMRGFQCWKYSKGFCSESHYISTGPIEKMVLEYLEAVMHSPALSYTVISSSSVDASSKLSDLERQLQKIDAKEKRIKAAYLNEIDTLEEYKANKTALEEERRTVEKEIEELTLSDVKYSKEDLDKKMKQNISDLLRVLRDESADYIQKGNMMRNVVDHIVFNRKNTSLDVFLKLVV

SEQ ID NO: 9 - protein, 404 aa, synthetic construct
MKITKKQPLRPRGRSEDKRQSTKNVIRDAYINGPQKEVQIIPAKRDMEAETEKKKLRVCAYCRVSTDEDTQASSYELQVQNYTRMIRENPEWEFAGIFADEGISGTSVLHREHFLEMIEKCKAGEIDLIITKQVSRFARNVLDSLNYIFMLRKLDPPVGVYFETEKLNTLDKSSDMVITVLSLVAQSESEQKSNSLKWSFKRRRAQGLGIYPSWALLGYRLDDEKNWEIVEDEADIVRTIYSLYLDGYSSTQIAELLTKSGIPTVKGLSVWSSGSVLGILKNEKFCGDALCQKTVTIDFFTHKSVKNNGIEPQYFVEGHHIPIIEKNDWLLAQQIRKERRYRKRRSTHRKPRIVVKGALSGFMIVDTSWDEEYVDSLLISATQKPEPAPVIAEEDENFIVIEKE

SEQ ID NO: 10 - protein, 498 aa, synthetic construct
MADIQPVKNGALYIRVSTHLQEELSPDAQKRLLMEYAEAHNIIVLKEHIYIDSGISGRSARQRPQFNNMIAEAKSKEHPFDVILVWKYSRFARNQEESIVYKSMLKRENVDVISVSEPISDDPFGSLIERIIEWMDEYYSIRLSGEVSRGMAENAMRGNYQARPPLGYRIPGYRQTPVIVPEEAELIQLIFDLYTEKKMGIFEIVRYLNEHGYQTGHKKPFQRRSVTYILKNPTYIGKTIWNQHDQDHKLRDKSEWIIADGKHEPIISKEQFDKAQKRIESTYKPAYRKPTSVCHHWLSSLLKCSSCGRTLVVKRTASKKKDRMYVNFQCYGYQKGICNTNQSISAIKLEPVIMHALEDAMTSGKIHFDVLNPTTLDSSQKQQFLTRLNEIEKKEERIKRAYRDGIDTLEEYKENKSIIQTEKEMLLKKIEHIEEPALSPEEAKPIMMDRIKNVYEIITNPDIGMEEKNKAARSIIEKIVFDRATGSVNIFFYLAHCP

SEQ ID NO: 11 - protein, 500 aa, synthetic construct [sequence omitted]

SEQ ID NO: 12 - protein, 485 aa, synthetic construct
MTKKVAIYTRVSTTNQAEEGFSIDEQIDRLTKYAEAMGWQVSDTYTDAGFSGAKLERPAMQRLINDIENKAFDTVLVYKLDRLSRSVRDTLYLVKDVFTKNKIDFISLNESIDTSSAMGSLFLTILSAINEFERENIKERMTMGKLGRAKSGKSMMWTKTAFGYYHNRKTGILEIVPLQATIVEQIFTDYLSGISLTKLRDKLNESGHIGKDIPWSYRTLRQTLDNPVYCGYIKFKDSLFEGMHKPIIPYETYLKVQKELEERQQQTYERNNNPRPFQAKYMLSGMARCGYCGAPLKIVLGHKRKDGSRTMKYHCANRFPRKTKGITVYNDNKKCDSGTYDLSNLENTVIDNLIGFQENNDSLLKIINGNNQPILDTSSFKKQISQIDKKIQKNSDLYLNDFITMDELKDRTDSLQAEKKLLKAKISENKFNDSTDVFELVKTQLGSIPINELSYDNKKKIVNNLVSKVDVTADNVDIIFKFQLA

SEQ ID NO: 13 - protein, 594 aa, synthetic construct
MSPFIAPDVPEHLLDTVRVFLYARQSKGRSDGSDVSTEAQLAAGRALVASRNAQGGARWVVAGEFVDVGRSGWDPNVTRADFERMMGEVRAGEGDVVVVNELSRLTRKGAHDALEIDNELKKHGVRFMSVLEPFLDTSTPIGVAIFALIAALAKQDSDLKAERLKGAKDEIAALGGVHSSSAPFGMRAVRKKVDNLVISVLEPDEDNPDHVELVERMAKMSFEGVSDNAIATTFEKEKIPSPGMAERRATEKRLASIKARRLNGAEKPIMWRAQTVRWILNHPAIGGFAFERVKHGKAHINVIRRDPGGKPLTPHTGILSGSKWLELQEKRSGKNLSDRKPGAEVEPTLLSGWRFLGCRICGGSMGQSQGGRKRNGDLAEGNYMCANPKGHGGLSVKRSELDEFVASKVWARLRTADMEDEHDQAWIAAAAERFALQHDLAGVADERREQQAHLDNVRRSIKDLQADRKAGLYVGREELETWRSTVLQYRSYEAECTTRLAELDEKMNGSTRVPSEWFSGEDPTAEGGIWASWDVYERREFLSFFLDSVMVDRGRHPETKKYIPLKDRVTLKWAELLKEEDEASEATERELAAL

SEQ ID NO: 14 - protein, 528 aa, synthetic construct
MYPYDVPDYAGSYRPESLDVCIYLRKSRKDVEEERRAIEEGSSYNALERHRKRLFAIAKAENHNIIDIFEEVASGESIQERPQMQQLLRKLEGNEIDGVLVIDLDRLGRGDMLDAGMIDRAFRYSSTKIITPTDVYDPDDESWELVFGIKSLISRQELKSITKRLQNGRIDSVKEGKHIGKKPPYGYLKDENLRLYPDPEKAWIVKKIFELMCDGKGRQMIAAELDRLGIDPPVTKRGAWDSSTITSIIKNEVYTGVIVWGKFKHKKRNGKYTRHKNPQEKWIMYENAHEPIISKELFDAANEAHSSRHKPAVITSKKLTNPLAGILKCKLCGYTMLIQTRKDRPHNYLRCNNPACKGKQKQSVFNLVEEKLLYSLQQIVDEYQAQKVEEVEIDDSKLISFKEKAIISKEKELKELQAQKGNLHDLLEQGIYTVEIFLERQKNLVERITSIENDIEVLQKEIETEQIKEHNKTEFIPALKTVIESYHKTTNIELKNQLLKTILSTVTYYRHPDWKTNEFEIQVYFKIS

SEQ ID NO: 15 - protein, 486 aa, synthetic construct
MYPYDVPDYAGSAVGIYIRVSTQEQASEGHSIESQKKKLASYCEIQGWDDYRFYIEEGISGKNTNRPKLKLLMEHIEKGKINILLVYRLDRLTRSVIDLHKLLNFLQEHGCAFKSATETYDTTTANGRMSMGIVSLLAQWETENMSERIKLNLEHKVLVEGERVGAIPYGFDLSDDEKLVKNEKSAILLDMVERVENGWSVNRIVNYLNLTNNDRNWSPNGVLRLLRNPALYGATRWNDKIAENTHEGIISKERFNRLQQILADRSIHHRRDVKGTYIFQGVLRCPVCDQTLSVNRFIKKRKDGTEYCGVLYRCQPCIKQNKYNLAIGEARFLKALNEYMSTVEFQTVEDEVIPKKSEREMLESQLQQIARKREKYQKAWASDLMSDDEFEKLMVETRETYDECKQKLESCEDPIKIDETYLKEIVYMFHQTFNDLESEKQKEFISKFIRTIRYTVKEQQPIRPDKSKTGKGKQKVIITEVEFYQS

SEQ ID NO: 16 - protein, 472 aa, synthetic construct
MYPYDVPDYAGSKVAIYTRVSSAEQANEGYSIHEQKKKLISYCEIHDWNEYKVFTDAGISGGSMKRPALQKLMKHLSSFDLVLVYKLDRLTRNVRDLLDMLEEFEQYNVSFKSATEVFDTTSAIGKLFITMVGAMAEWERETIRERSLFGSRAAVREGNYIREAPFCYDNIEGKLHPNEYAKVIDLIVSMFKKGISANEIARRLNSSKVHVPNKKSWNRNSLIRLMRSPVLRGHTKYGDMLIENTHEPVLSEHDYNAINNAISSKTHKSKVKHHAIFRGALVCPQCNRRLHLYAGTVKDRKGYKYDVRRYKCETCSKNKDVKNVSFNESEVENKFVNLLKSYELNKFHIRKVEPVKKIEYDIDKINKQKINYTRSWSLGYIEDDEYFELMEEINATKKMIEEQTTENKQSVSKEQIQSINNFILKGWEELTIKDKEELILSTVDKIEFNFIPKDKKHKTNTLDINNIHFKFS

SEQ ID NO: 17 - DNA, 50 bp, synthetic construct
  source 1..50: mol_type = other DNA
tgtctactatgtctttatgccacatgtgtcgcatatacagatagtagaca

SEQ ID NO: 18 - DNA, 50 bp, synthetic construct
  source 1..50: mol_type = other DNA
tccattgcgagtgctaatgatgcttgtgtcgccatggcagagcacattgc

SEQ ID NO: 19 - DNA, 50 bp, synthetic construct
  source 1..50: mol_type = other DNA
ggccgcgaggtcgtgttcgtcgtcatgttgaggttcacgaccatcacgcc

SEQ ID NO: 20 - DNA, 50 bp, synthetic construct
  source 1..50: mol_type = other DNA
atggagccgttctccgcggacgtcatggactacggcgtgatcggtttgaa

SEQ ID NO: 21 - DNA, 50 bp, synthetic construct
  source 1..50: mol_type = other DNA
cattatatgtttttacaatccgggccgccatactgtaagaacatataatg

SEQ ID NO: 22 - DNA, 50 bp, synthetic construct
  source 1..50: mol_type = other DNA
gctgccgctgcctcaccatctgggccgccatactggcttataataaactg

SEQ ID NO: 23 - DNA, 50 bp, synthetic construct
  source 1..50: mol_type = other DNA
tataaactgatataattcaaagttataacttgatatattcaagatgtaga

SEQ ID NO: 24 - DNA, 50 bp, synthetic construct
  source 1..50: mol_type = other DNA
atttgaacctgtagttggtgctttataaatgcgtaactaataattcatat

SEQ ID NO: 25 - DNA, 50 bp, synthetic construct
  source 1..50: mol_type = other DNA
aatgaggtcagacgcatggagcgccgcctccgcatgcgtcagggtcgatg

SEQ ID NO: 26 - DNA, 50 bp, synthetic construct
  source 1..50: mol_type = other DNA
tacagcgctataataaagtagcgccgcgacgccattgccgcagagcttgc

SEQ ID NO: 27 - DNA, 50 bp, synthetic construct
  source 1..50: mol_type = other DNA
tattatatctaaaagcagtatggcggagcttagtgcttttagatataatt

SEQ ID NO: 28 - DNA, 50 bp, synthetic construct
  source 1..50: mol_type = other DNA
aagctcattataagtcagtacggcggccccgacggcgagctcggcgcttc

SEQ ID NO: 29 - DNA, 50 bp, synthetic construct
  source 1..50: mol_type = other DNA
tgtatcattttcatatagtgtgcaggtgctaactatatgaaaatgataca

SEQ ID NO: 30 - DNA, 50 bp, synthetic construct
  source 1..50: mol_type = other DNA
aactacgaagcattgcttgatgcaggtgctaattttgcatcttcccccag

SEQ ID NO: 31 - DNA, 50 bp, synthetic construct
  source 1..50: mol_type = other DNA
cgttatagggtattgcagtaccgaccgccatactgtaataccctataacg

SEQ ID NO: 32 - DNA, 50 bp, synthetic construct
  source 1..50: mol_type = other DNA
gatgcactgagctcaccgtccggaccgccatactgacttatgatataaga

SEQ ID NO: 33 - DNA, 50 bp, synthetic construct
  source 1..50: mol_type = other DNA
gtttataaaaccgatgccgctttgacagaagcggaacgggttttaataag

SEQ ID NO: 34 - DNA, 50 bp, synthetic construct
  source 1..50: mol_type = other DNA
acgatattgcctgcaaaagtgcagacagaaacgaggaacagaaaaatggt

SEQ ID NO: 35 - DNA, 50 bp, synthetic construct
  source 1..50: mol_type = other DNA
gttagtacccaaatgataaaaggatgaccttttgtcatttgggtactaac

SEQ ID NO: 36 - DNA, 50 bp, synthetic construct
  source 1..50: mol_type = other DNA
acagggtctcttgcccgaactggatgacacaatggggatcaaagtactta

SEQ ID NO: 37 - DNA, 46 bp, synthetic construct
  source 1..46: mol_type = other DNA
ggccggcttgtcgacgacggcggtctccgtcgtcaggatcatccgg

SEQ ID NO: 38 - DNA, 52 bp, synthetic construct
  source 1..52: mol_type = other DNA
gtggtttgtctggtcaaccaccgcggtctcagtggtgtacggtacaaaccca

SEQ ID NO: 39 - DNA, 31 bp, synthetic construct
  source 1..31: mol_type = other DNA
cacaattaacatctcaatcaaggtaaatgct

SEQ ID NO: 40 - DNA, 50 bp, synthetic construct
  source 1..50: mol_type = other DNA
gcgagtttttatttcgtttatttcaattaaggtaactaaaaaactccttt

SEQ ID NO: 41 - DNA, 34 bp, synthetic construct
  source 1..34: mol_type = other DNA
caggtttttgacgaaagtgatccagatgatccag

SEQ ID NO: 42 - DNA, 57 bp, synthetic construct
  source 1..57: mol_type = other DNA
ttcgggtgctgggttgttgtctctggacagtgatccatgggaaactactcagcacca

SEQ ID NO: 43 - DNA, 62 bp, synthetic construct
  source 1..62: mol_type = other DNA
gtaatatgtttggatatggggaagtgaatcagtacaaccgccacagtaccctcatgtcagcc

SEQ ID NO: 44 - DNA, 62 bp, synthetic construct
  source 1..62: mol_type = other DNA
ataatagtgtatatggtagagaattaaaccagtttaatactccaccatgtacacgcagtgag

SEQ ID NO: 45 - DNA, 65 bp, synthetic construct
  source 1..65: mol_type = other DNA
cgcatacattgttgttgtttttccagatccagttggtcctgtaaatataagcaatccatgtgagt

SEQ ID NO: 46 - DNA, 64 bp, synthetic construct
  source 1..64: mol_type = other DNA
caataacggttgtatttgtagaacttgaccagttgttttagtaacataaatacaactccgaata

SEQ ID NO: 47 - DNA, 66 bp, synthetic construct
  source 1..66: mol_type = other DNA
gttcgtggtaactatgggtggtacaggtgccacattagttgtaccatttatgtttatgtggttaac

SEQ ID NO: 48 - DNA, 65 bp, synthetic construct
  source 1..65: mol_type = other DNA
tttttgtatgttagttgtgtcactgggtagacctaaatagtgacacaactgctattaaaatttaa

SEQ ID NO: 49 - DNA, 1446 bp, synthetic construct
  source 1..1446: mol_type = other DNA
atgaatgagaagaaccttgagataggggctgcatacattcgggtcagcaccgacgaccagactgaactgtctcccgatgctcagctgcgggtaatccttgaggcggccaagaaagacgggattataattcctcaggagttcgtgttcatggaggacagaggccgttccggccgccgggctgataacagacctgagttccagaggatgatttccaccgctcgacagaatccttctccattcaggtatttatacctttggaagttcagtcggttcgcaagaaatcaggaggaatcagctttctacaagggaattctgcggaaaaagtgcggcgtgacgatcaaatctgttagtgagcccattatggagggcatgttcgggcgcttggtagaaatgatcatcgaatggtctgatgaattctacagcgttaacctcagcggtgaagtcctcaggggaatgacgcaaaaggcattagagcatggataccagttaaccccctgcctgggctacgatgctgtgggacatggaagaccgtacgtcatcaacgaggagcagtatcagattgttgaatttatccaccgcagctttttcgatggtaaggatatgacgtggattgctagggaagctaacagaaggggatatcacactcgcagggggaatccattcgataccagggcagtgagaatcatcctgaccaattctttctatgtgggactcgtgaaatggaacgacgtaacatttcaaggcacacatgagtgccgggaaagcgtgacttctgtattctccgcgaatcaggaaaggctgaatcgtattcaccgaccaagggggcggcgacaggcctcttcctgtaaacactggctgagcggcctcctgaagtgctcaatatgcggagctagtctgggctacaaccagaccaaagacctgacaaagcgaggtcatgctttccagtgctggaagtacaccaaaggaattcatcctggctcttgcagcgtatcctctctcaaagcagaggcggccgttctggagtccctgcaaatgatattggaaactggagaggtcgagtatacctacgaacagcgcgagaagcacctggatgataacaaactcaccctcatccagaagtccttggaacgacttgacaccaaagagctgcgaattcgagaggcttacgagtctggaatagataccttggatgagttcaagacaaataaggcacgactgcagcgagagcgtgatcaactcatggaagagcttgaagaattgcactctcaagaggagccagaggatgtccccggcaaggagatcttaatcgaacgtattcaaaatgtatacgatttgctgcaatccccagatgtcgataatgatgataaaggcaacgccgtgcggtcaattatcaagaagatagtgtatattaaggaatctaaaactttctgtttttattattatgtg

SEQ ID NO: 50 - DNA, 1479 bp, synthetic construct
  source 1..1479: mol_type = other DNA
atgaaggagaaggtgagtgagagaaaaacaggcgccatttacataagagtttctacggacaaacaggaagagctttcaccagacgcacagctgaggctcctcctggactacgctaagaaagattctatcgatgttcctaaggagtacatcttccaagataacggcattagtgggcgaaaagcgaacaagcgccccgcgttccagaatatgatcgcactcgcgaagtccaaagagcacccaatcgacacaatcattgtgtggaagttctctcgctttgcccggaatcaggaggaatcaattgtgtacaagagtttactcaaaaaaaacaacgtcgatgtggtgagtgtgtccgagcctctgattgatgggccatttggaagcctgattgagagaattattgagtggatggacgagtattattccattcgattgtctggcgaggtgatgcgtggtatgactcaaaatgccatgcgggggcattaccagagcgatgcaccgattgggtacacatccccaggggacaaaaagcccccggttataaacccggataccgttcagattcctctgatgatcaaagatatgttcttaagcggctcaacccagctgcaaattgccagaaagctcaacgacagtggctataggacaaagcgcggtaacctgtgggacgcgagaggcgtccggtacgtcctggagaacccgttttacatcgggaaaagccgctggaattacacggagagagggcgacggctgaagccggcagatgaggtgatatacgctgacgggaactgggaggcactgtgggatgaggacaccttcaaggagatccaaaaaagattggcactgaatatgcgcaagtccaagtctagggacatctcagctgcaaaacactggctgagcggtctcttaatctgttcttcctgcggcggaaccctggccttcgggggagcacacaatatgagggggtttcaatgctggaaatactcaaaggggttctgcagcgaatcccattatatcagcaccggtccaattgagaaaatggttctggagtacttagaggccgtcatgcactcccctgcgctgagttacacggttatcagtagttcatccgtcgatgccagctccaaactgtcagacctggagcgccaattgcagaaaatagacgccaaggagaaacgcatcaaggcagcatacctcaacgaaatagatacactggaggagtacaaagctaataaaacagccttggaggaagaacgccgtaccgtcgagaaggaaatcgaggagctcaccctcagcgacgtgaaatattctaaggaggaccttgacaagaaaatgaagcagaatatatcagacctgctgcgggtgctgagagacgaatctgccgattacatccagaaaggtaacatgatgagaaacgtggtcgatcatatcgtctttaacaggaagaatactagcctggacgtttttctgaaattagtagtg

SEQ ID NO: 51 - DNA, 1582 bp, synthetic construct
  source 1..1582: mol_type = other DNA
tacccttatgacgtacctgattacgccggtagctacaggccagaatccctcgacgtatgcatttaccttcgcaaatccaggaaggacgttgaagaagaacgccgcgcaatcgaagaaggcagctcctacaacgcactggaacggcatcggaagcgattgtttgccattgccaaggcagaaaatcacaacatcatcgatatttttgaagaagttgccagtggagagagcatacaggaaagaccccaaatgcagcagctgctcaggaagttggaaggcaatgaaattgatggcgtgctggtgattgatctcgatagactcgggcggggcgatatgctggatgcgggaatgatcgatcgtgcattcagatactcatctaccaaaattatcaccccaacagatgtctacgatcctgatgacgaaagttgggagctggtgttcgggattaagagtttaatcagccgacaggagctcaagtccatcaccaaacgactgcagaatggccggatcgattcagtgaaggaggggaagcacattggcaagaagccaccttatggctacttgaaggatgagaatctgaggctgtatccagatccagaaaaggcctggattgtgaagaagatttttgaactgatgtgtgacggaaagggacggcagatgattgcggctgagttggacagactgggtattgacccccctgtgacgaaaaggggagcatgggactctagtaccatcaccagtattataaagaacgaagtttatacaggcgtcattgtctgggggaaatttaagcataaaaagaggaatggtaagtatacgcggcataagaacccacaggagaagtggattatgtacgagaacgcccatgaacccattatatccaaagagcttttcgatgcggcaaacgaagcccatagctccagacacaagcccgctgtcataacgagtaaaaagctgactaacccactggctggcatcttgaagtgcaagttgtgtggctacacaatgctcatacagactcggaaggacaggcctcataactacttacgatgtaacaatccagcctgtaagggcaagcaaaaacagtcagttttcaatttagtggaggagaagttgctctattcactgcagcaaatcgtggacgagtaccaggcccagaaagttgaagaggtcgaaattgatgattctaaactcatctcttttaaggaaaaggcaataatctccaaagagaaggagcttaaggagttacaagctcagaaaggcaacctgcatgacctgctcgaacaaggtatttacacggtcgaaatcttcctggaacggcagaagaatttggtggaaagaataaccagcatcgagaacgacatcgaggtgctgcagaaggagattgaaactgagcagatcaaagaacacaataagaccgagttcatccccgccttaaaaacggtgatcgaatcatatcacaaaacaaccaatattgaactcaaaaaccagctgctgaagaccattctgagcaccgtgacatactataggcatcccgactggaaaaccaatgaatttgaaatccaggtgtacttcaaaatctcct

SEQ ID NO: 52 - protein, 1367 aa, synthetic construct
DKKYSIGLDIGTNSVGWAVITDEYKVPSKKFKVLGNTDRHSIKKNLIGALLFDSGETAEATRLKRTARRRYTRRKNRICYLQEIFSNEMAKVDDSFFHRLEESFLVEEDKKHERHPIFGNIVDEVAYHEKYPTIYHLRKKLVDSTDKADLRLIYLALAHMIKFRGHFLIEGDLNPDNSDVDKLFIQLVQTYNQLFEENPINASGVDAKAILSARLSKSRRLENLIAQLPGEKKNGLFGNLIALSLGLTPNFKSNFDLAEDAKLQLSKDTYDDDLDNLLAQIGDQYADLFLAAKNLSDAILLSDILRVNTEITKAPLSASMIKRYDEHHQDLTLLKALVRQQLPEKYKEIFFDQSKNGYAGYIDGGASQEEFYKFIKPILEKMDGTEELLVKLNREDLLRKQRTFDNGSIPHQIHLGELHAILRRQEDFYPFLKDNREKIEKILTFRIPYYVGPLARGNSRFAWMTRKSEETITPWNFEEVVDKGASAQSFIERMTNFDKNLPNEKVLPKHSLLYEYFTVYNELTKVKYVTEGMRKPAFLSGEQKKAIVDLLFKTNRKVTVKQLKEDYFKKIECFDSVEISGVEDRFNASLGTYHDLLKIIKDKDFLDNEENEDILEDIVLTLTLFEDREMIEERLKTYAHLFDDKVMKQLKRRRYTGWGRLSRKLINGIRDKQSGKTILDFLKSDGFANRNFMQLIHDDSLTFKEDIQKAQVSGQGDSLHEHIANLAGSPAIKKGILQTVKVVDELVKVMGRHKPENIVIEMARENQTTQKGQKNSRERMKRIEEGIKELGSQILKEHPVENTQLQNEKLYLYYLQNGRDMYVDQELDINRLSDYDVDAIVPQSFLKDDSIDNKVLTRSDKNRGKSDNVPSEEVVKKMKNYWRQLLNAKLITQRKFDNLTKAERGGLSELDKAGFIKRQLVETRQITKHVAQILDSRMNTKYDENDKLIREVKVITLKSKLVSDFRKDFQFYKVREINNYHHAHDAYLNAVVGTALIKKYPKLESEFVYGDYKVYDVRKMIAKSEQEIGKATAKYFFYSNIMNFFKTEITLANGEIRKRPLIETNGETGEIVWDKGRDFATVRKVLSMPQVNIVKKTEVQTGGFSKESILPKRNSDKLIARKKDWDPKKYGGFDSPTVAYSVLVVAKVEKGKSKKLKSVKELLGITIMERSSFEKNPIDFLEAKGYKEVKKDLIIKLPKYSLFELENGRKRMLASAGELQKGNELALPSKYVNFLYLASHYEKLKGSPEDNEQKQLFVEQHKHYLDEIIEQISEFSKRVILADANLDKVLSAYNKHRDKPIREQAENIIHLFTLTNLGAPAAFKYFDTTIDRKRYTSTKEVLDATLIHQSITGLYETRIDLSQLGGD

SEQ ID NO: 53 - protein, 576 aa, synthetic construct
LNIEDEYRLHETSKEPDVSLGSTWLSDFPQAWAETGGMGLAVRQAPLIIPLKATSTPVSIKQYPMSQEARLGIKPHIQRLLDQGILVPCQSPWNTPLLPVKKPGTNDYRPVQDLREVNKRVEDIHPTVPNPYNLLSGPPPSHQWYTVLDLKDAFFCLRLHPTSQPLFAFEWRDPEMGISGQLTWTRLPQGFKNSPTLFNEALHRDLADFRIQHPDLILLQYVDDLLLAATSELDCQQGTRALLQTLGNLGYRASAKKAQICQKQVKYLGYLLKEGQRWLTEARKETVMGQPTPKTPRQLREFLGKAGFCRLFIPGFAEMAAPLYPLTKPGTLFNWGPDQQKAYQEIKQALLTAPALGLPDLTKPFELFVDEKQGYAKGVLTQKLGPWRRPVAYLSKKLDPVAAGWPPCLRMVAAIAVLTKDAGKLTMGQPLVILAPHAVEALVKQPPDRWLSNARMTHYQALLLDTDRVQFGPVVALNPATLLPLPEEGLQHNCLDGTGGGGVTVKFKYKGEELEVDISKIKKVWRVGKMISFTYDDNGKTGRGAVSEKDAPKELLQMLEKSGKKSGGSKRTADGS

SEQ ID NO: 54 - DNA, 38 bp, synthetic construct
  source 1..38: mol_type = other DNA
ccccaactggggtaacctttgagttctctcagttgggg

SEQ ID NO: 55 - DNA, 46 bp, synthetic construct; identical to SEQ ID NO: 37
  source 1..46: mol_type = other DNA

SEQ ID NO: 56 - DNA, 38 bp, synthetic construct
  source 1..38: mol_type = other DNA
ggcttgtcgacgacggcgttctccgtcgtcaggatcat

SEQ ID NO: 57 - DNA, 38 bp, synthetic construct
  source 1..38: mol_type = other DNA
ggcttgtcgacgacggcgaactccgtcgtcaggatcat

SEQ ID NO: 58 - DNA, 38 bp, synthetic construct
  source 1..38: mol_type = other DNA
ggcttgtcgacgacggcgccctccgtcgtcaggatcat

SEQ ID NO: 59 - DNA, 38 bp, synthetic construct
  source 1..38: mol_type = other DNA
ggcttgtcgacgacggcgggctccgtcgtcaggatcat

SEQ ID NO: 60 - DNA, 38 bp, synthetic construct
  source 1..38: mol_type = other DNA
ggcttgtcgacgacggcgtgctccgtcgtcaggatcat

SEQ ID NO: 61 - DNA, 38 bp, synthetic construct
  source 1..38: mol_type = other DNA
ggcttgtcgacgacggcggtctccgtcgtcaggatcat

SEQ ID NO: 62 - DNA, 38 bp, synthetic construct
  source 1..38: mol_type = other DNA
ggcttgtcgacgacggcgctctccgtcgtcaggatcat

SEQ ID NO: 63 - DNA, 38 bp, synthetic construct
  source 1..38: mol_type = other DNA
ggcttgtcgacgacggcgcactccgtcgtcaggatcat

SEQ ID NO: 64 - DNA, 38 bp, synthetic construct
  source 1..38: mol_type = other DNA
ggcttgtcgacgacggcgtcctccgtcgtcaggatcat

SEQ ID NO: 65 - DNA, 38 bp, synthetic construct
  source 1..38: mol_type = other DNA
ggcttgtcgacgacggcggactccgtcgtcaggatcat

SEQ ID NO: 66 - DNA, 38 bp, synthetic construct
  source 1..38: mol_type = other DNA
ggcttgtcgacgacggcgagctccgtcgtcaggatcat

SEQ ID NO: 67 - DNA, 38 bp, synthetic construct
  source 1..38: mol_type = other DNA
ggcttgtcgacgacggcgacctccgtcgtcaggatcat

SEQ ID NO: 68 - DNA, 38 bp, synthetic construct
  source 1..38: mol_type = other DNA
ggcttgtcgacgacggcgatctccgtcgtcaggatcat

SEQ ID NO: 69 - DNA, 38 bp, synthetic construct
  source 1..38: mol_type = other DNA
ggcttgtcgacgacggcggcctccgtcgtcaggatcat

SEQ ID NO: 70 - DNA, 38 bp, synthetic construct
  source 1..38: mol_type = other DNA
ggcttgtcgacgacggcgcgctccgtcgtcaggatcat

SEQ ID NO: 71 - DNA, 38 bp, synthetic construct
  source 1..38: mol_type = other DNA
ggcttgtcgacgacggcgtactccgtcgtcaggatcat

SEQ ID NO: 72 - DNA, 52 bp, synthetic construct
  source 1..52: mol_type = other DNA
gtggtttgtctggtcaaccaccgcgttctcagtggtgtacggtacaaaccca

SEQ ID NO: 73 - DNA, 52 bp, synthetic construct
  source 1..52: mol_type = other DNA
gtggtttgtctggtcaaccaccgcgaactcagtggtgtacggtacaaaccca

SEQ ID NO: 74 - DNA, 52 bp, synthetic construct
  source 1..52: mol_type = other DNA
gtggtttgtctggtcaaccaccgcgccctcagtggtgtacggtacaaaccca

SEQ ID NO: 75 - DNA, 52 bp, synthetic construct
  source 1..52: mol_type = other DNA
gtggtttgtctggtcaaccaccgcgggctcagtggtgtacggtacaaaccca

SEQ ID NO: 76 - DNA, 52 bp, synthetic construct
  source 1..52: mol_type = other DNA
gtggtttgtctggtcaaccaccgcgtgctcagtggtgtacggtacaaaccca

SEQ ID NO: 77 - DNA, 52 bp, synthetic construct; identical to SEQ ID NO: 38
  source 1..52: mol_type = other DNA

SEQ ID NO: 78 - DNA, 52 bp, synthetic construct
  source 1..52: mol_type = other DNA
gtggtttgtctggtcaaccaccgcgctctcagtggtgtacggtacaaaccca

SEQ ID NO: 79 - DNA, 52 bp, synthetic construct
  source 1..52: mol_type = other DNA
gtggtttgtctggtcaaccaccgcgcactcagtggtgtacggtacaaaccca

SEQ ID NO: 80 - DNA, 52 bp, synthetic construct
  source 1..52: mol_type = other DNA
gtggtttgtctggtcaaccaccgcgtcctcagtggtgtacggtacaaaccca

SEQ ID NO: 81 - DNA, 52 bp, synthetic construct
  source 1..52: mol_type = other DNA
gtggtttgtctggtcaaccaccgcggactcagtggtgtacggtacaaaccca

SEQ ID NO: 82 - DNA, 52 bp, synthetic construct
  source 1..52: mol_type = other DNA
gtggtttgtctggtcaaccaccgcgagctcagtggtgtacggtacaaaccca

SEQ ID NO: 83 - DNA, 52 bp, synthetic construct
  source 1..52: mol_type = other DNA
gtggtttgtctggtcaaccaccgcgacctcagtggtgtacggtacaaaccca

SEQ ID NO: 84 - DNA, 52 bp, synthetic construct
  source 1..52: mol_type = other DNA
gtggtttgtctggtcaaccaccgcgatctcagtggtgtacggtacaaaccca

SEQ ID NO: 85 - DNA, 52 bp, synthetic construct
  source 1..52: mol_type = other DNA
gtggtttgtctggtcaaccaccgcggcctcagtggtgtacggtacaaaccca

SEQ ID NO: 86 - DNA, 52 bp, synthetic construct
  source 1..52: mol_type = other DNA
gtggtttgtctggtcaaccaccgcgcgctcagtggtgtacggtacaaaccca

SEQ ID NO: 87 - DNA, 52 bp, synthetic construct
  source 1..52: mol_type = other DNA
gtggtttgtctggtcaaccaccgcgtactcagtggtgtacggtacaaaccca

SEQ ID NO: 88 - DNA, 66 bp, synthetic construct
  source 1..66: mol_type = other DNA
ggaagcggagctactaacttcagcctgctgaagcaggctggcgacgtggaggagaaccctggacct

SEQ ID NO: 89 - DNA, 45 bp, synthetic construct
  source 1..45: mol_type = other DNA
gggggaggaggttctggaggcggaggctccggaggcggagggtca

SEQ ID NO: 90 - DNA, 15 bp, synthetic construct
  source 1..15: mol_type = other DNA
ggaggtggcgggagc

SEQ ID NO: 91 - DNA, 15 bp, synthetic construct
  source 1..15: mol_type = other DNA
cccgcaccagcgcct

SEQ ID NO: 92 - DNA, 45 bp, synthetic construct
  source 1..45: mol_type = other DNA
gaggcagctgccaaggaagccgctgccaaggaggcggccgcaaag

SEQ ID NO: 93 - DNA, 48 bp, synthetic construct
  source 1..48: mol_type = other DNA
agtgggagcgagacccctgggactagcgagtcagctacacccgaaagc

SEQ ID NO: 94 - DNA, 54 bp, synthetic construct
  source 1..54: mol_type = other DNA
ggggggtcaggtggatccggcggaagtggcggatccggtggatctggcggcagt

SEQ ID NO: 95 - DNA, 15 bp, synthetic construct
  source 1..15: mol_type = other DNA
gaagctgctgctaag

SEQ ID NO: 96 - protein, 22 aa, synthetic construct
GSGATNFSLLKQAGDVEENPGP

SEQ ID NO: 97 - protein, 15 aa, synthetic construct
GGGGSGGGGSGGGGS

SEQ ID NO: 98 - protein, 5 aa, synthetic construct
GGGGS

SEQ ID NO: 99 - protein, 5 aa, synthetic construct
PAPAP

SEQ ID NO: 100 - protein, 15 aa, synthetic construct
EAAAKEAAAKEAAAK

SEQ ID NO: 101 - protein, 16 aa, synthetic construct
SGSETPGTSESATPES

SEQ ID NO: 102 - protein, 18 aa, synthetic construct
GGSGGSGGSGGSGGSGGS

SEQ ID NO: 103 - protein, 5 aa, synthetic construct
EAAAK

SEQ ID NO: 104 - DNA, 96 bp, synthetic construct
  source 1..96: mol_type = other DNA
gcgtggtggggccgccagcggttttagagctagaaatagcaagttaaaataaggctagtccgttatcaacttgaaaaagtggcaccgagtcggtgc

SEQ ID NO: 105 - DNA, 97 bp, synthetic construct
  source 1..97: mol_type = other DNA
gagccgagcacgaggggatacgttttagagctagaaatagcaagttaaaataaggctagtccgttatcaacttgaaaaagtggcaccgagtcggtgc

SEQ ID NO: 106 - DNA, 97 bp, synthetic construct
  source 1..97: mol_type = other DNA
gcagccacccgctctcggcccgttttagagctagaaatagcaagttaaaataaggctagtccgttatcaacttgaaaaagtggcaccgagtcggtgc

SEQ ID NO: 107 - DNA, 97 bp, synthetic construct
  source 1..97: mol_type = other DNA
gtgtagtcaggccgctcacccgttttagagctagaaatagcaagttaaaataaggctagtccgttatcaacttgaaaaagtggcaccgagtcggtgc

SEQ ID NO: 108 - DNA, 97 bp, synthetic construct
  source 1..97: mol_type = other DNA
gctgacaagtctacggaacctgttttagagctagaaatagcaagttaaaataaggctagtccgttatcaacttgaaaaagtggcaccgagtcggtgc

SEQ ID NO: 109 - DNA, 96 bp, synthetic construct
  source 1..96: mol_type = other DNA
gctcctccagcgccttgaccgttttagagctagaaatagcaagttaaaataaggctagtccgttatcaacttgaaaaagtggcaccgagtcggtgc

SEQ ID NO: 110 - DNA, 96 bp, synthetic construct
  source 1..96: mol_type = other DNA
ccccacgatggaggggaagagttttagagctagaaatagcaagttaaaataaggctagtccgttatcaacttgaaaaagtggcaccgagtcggtgc

SEQ ID NO: 111 - DNA, 96 bp, synthetic construct
  source 1..96: mol_type = other DNA
ccttctcctggagccgcgacgttttagagctagaaatagcaagttaaaataaggctagtccgttatcaacttgaaaaagtggcaccgagtcggtgc

SEQ ID NO: 112 - DNA, 188 bp, synthetic construct
  source 1..188: mol_type = other DNA
gctattctcgcagctcaccagttttagagctagaaatagcaagttaaaataaggctagtccgttatcaacttgaaaaagtggcaccgagtcggtgcgacgagcgcggcgatatcatcatccatggcattatatgttcttacagtatggcggcccggattgtaaaaacatataatgtgagctgcgagaa

SEQ ID NO: 113 - DNA, 188 bp, synthetic construct
  source 1..188: mol_type = other DNA
gctattctcgcagctcaccagttttagagctagaaatagcaagttaaaataaggctagtccgttatcaacttgaaaaagtggcaccgagtcggtgcgacgagcgcggcgatatcatcatccatggcgttatagggtattacagtatggcggtcggtactgcaataccctataacgtgagctgcgagaa

SEQ ID NO: 114 - DNA, 188 bp, synthetic construct
  source 1..188: mol_type = other DNA
gctattctcgcagctcaccagttttagagctagaaatagcaagttaaaataaggctagtccgttatcaacttgaaaaagtggcaccgagtcggtgcgacgagcgcggcgatatcatcatccatggtgtatcattttcatatagttagcacctgcacactatatgaaaatgatacatgagctgcgagaa

SEQ ID NO: 115 - DNA, 188 bp, synthetic construct
  source 1..188: mol_type = other DNA
gctattctcgcagctcaccagttttagagctagaaatagcaagttaaaataaggctagtccgttatcaacttgaaaaagtggcaccgagtcggtgcgacgagcgcggcgatatcatcatccatggtgtctactatctgtatatgcgacacatgtggcataaagacatagtagacatgagctgcgagaa

SEQ ID NO: 116 - DNA, 188 bp, synthetic construct
  source 1..188: mol_type = other DNA
gctattctcgcagctcaccagttttagagctagaaatagcaagttaaaataaggctagtccgttatcaacttgaaaaagtggcaccgagtcggtgcgacgagcgcggcgatatcatcatccatggcatcgaccctgacgcatgcggaggcggcgctccatgcgtctgacctcatttgagctgcgagaa

SEQ ID NO: 117 - DNA, 188 bp, synthetic construct
  source 1..188: mol_type = other DNA
gctattctcgcagctcaccagttttagagctagaaatagcaagttaaaataaggctagtccgttatcaacttgaaaaagtggcaccgagtcggtgcgacgagcgcggcgatatcatcatccatgggttagtacccaaatgacaaaaggtcatccttttatcatttgggtactaactgagctgcgagaa

SEQ ID NO: 118 - DNA, 188 bp, synthetic construct
  source 1..188: mol_type = other DNA
gctattctcgcagctcaccagttttagagctagaaatagcaagttaaaataaggctagtccgttatcaacttgaaaaagtggcaccgagtcggtgcgacgagcgcggcgatatcatcatccatggcttattaaaacccgttccgcttctgtcaaagcggcatcggttttataaactgagctgcgagaa

SEQ ID NO: 119 - DNA, 188 bp, synthetic construct
  source 1..188: mol_type = other DNA
gctattctcgcagctcaccagttttagagctagaaatagcaagttaaaataaggctagtccgttatcaacttgaaaaagtggcaccgagtcggtgcgacgagcgcggcgatatcatcatccatggggcgtgatggtcgtgaacctcaacatgacgacgaacacgacctcgcggcctgagctgcgagaa

SEQ ID NO: 120 - DNA, 188 bp, synthetic construct
  source 1..188: mol_type = other DNA
gctattctcgcagctcaccagttttagagctagaaatagcaagttaaaataaggctagtccgttatcaacttgaaaaagtggcaccgagtcggtgcgacgagcgcggcgatatcatcatccatggtctacatcttgaatatatcaagttataactttgaattatatcagtttatatgagctgcgagaa

SEQ ID NO: 121 - DNA, 188 bp, synthetic construct
  source 1..188: mol_type = other DNA
gctattctcgcagctcaccagttttagagctagaaatagcaagttaaaataaggctagtccgttatcaacttgaaaaagtggcaccgagtcggtgcgacgagcgcggcgatatcatcatccatggaattatatctaaaagcactaagctccgccatactgcttttagatataatatgagctgcgagaa

SEQ ID NO: 122 - DNA, 176 bp, synthetic construct
  source 1..176: mol_type = other DNA
gctattctcgcagctcaccagttttagagctagaaatagcaagttaaaataaggctagtccgttatcaacttgaaaaagtggcaccgagtcggtgcgacgagcgcggcgatatcatcatccatgggatatggggaagtgaatcagtacaaccgccacagtacctgagctgcgagaa

SEQ ID NO: 123 - DNA, 176 bp, synthetic construct
  source 1..176: mol_type = other DNA
gctattctcgcagctcaccagttttagagctagaaatagcaagttaaaataaggctagtccgttatcaacttgaaaaagtggcaccgagtcggtgcgacgagcgcggcgatatcatcatccatggggtactgtggcggttgtactgattcacttccccatatctgagctgcgagaa

SEQ ID NO: 124 - DNA, 176 bp, synthetic construct
  source 1..176: mol_type = other DNA
gctattctcgcagctcaccagttttagagctagaaatagcaagttaaaataaggctagtccgttatcaacttgaaaaagtggcaccgagtcggtgcgacgagcgcggcgatatcatcatccatggtgggtggtacaggtgccacattagttgtaccatttatgtgagctgcgagaa

SEQ ID NO: 125 - DNA, 176 bp, synthetic construct
  source 1..176: mol_type = other DNA
gctattctcgcagctcaccagttttagagctagaaatagcaagttaaaataaggctagtccgttatcaacttgaaaaagtggcaccgagtcggtgcgacgagcgcggcgatatcatcatccatggcataaatggtacaactaatgtggcacctgtaccacccatgagctgcgagaa

SEQ ID NO: 126 - DNA, 176 bp, synthetic construct
  source 1..176: mol_type = other DNA
gctattctcgcagctcaccagttttagagctagaaatagcaagttaaaataaggctagtccgttatcaacttgaaaaagtggcaccgagtcggtgcgacgagcgcggcgatatcatcatccatgggttgtttttccagatccagttggtcctgtaaatataagtgagctgcgagaa

SEQ ID NO: 127 - DNA, 176 bp, synthetic construct
  source 1..176: mol_type = other DNA
gctattctcgcagctcaccagttttagagctagaaatagcaagttaaaataaggctagtccgttatcaacttgaaaaagtggcaccgagtcggtgcgacgagcgcggcgatatcatcatccatggcttatatttacaggaccaactggatctggaaaaacaactgagctgcgagaa

SEQ ID NO: 128 - DNA, 174 bp, synthetic construct
  source 1..174: mol_type = other DNA
gctattctcgcagctcaccagttttagagctagaaatagcaagttaaaataaggctagtccgttatcaacttgaaaaagtggcaccgagtcggtgcgacgagcgcggcgatatcatcatccatgggtactgtggcggttgtactgattcacttccccatattgagctgcgagaa

SEQ ID NO: 129 - DNA, 172 bp, synthetic construct
  source 1..172: mol_type = other DNA
gctattctcgcagctcaccagttttagagctagaaatagcaagttaaaataaggctagtccgttatcaacttgaaaaagtggcaccgagtcggtgcgacgagcgcggcgatatcatcatccatggtactgtggcggttgtactgattcacttccccatatgagctgcgagaa

SEQ ID NO: 130 - DNA, 170 bp, synthetic construct
  source 1..170: mol_type = other DNA
gctattctcgcagctcaccagttttagagctagaaatagcaagttaaaataaggctagtccgttatcaacttgaaaaagtggcaccgagtcggtgcgacgagcgcggcgatatcatcatccatggactgtggcggttgtactgattcacttccccattgagctgcgagaa

SEQ ID NO: 131 - DNA, 174 bp, synthetic construct
  source 1..174: mol_type = other DNA
gctattctcgcagctcaccagttttagagctagaaatagcaagttaaaataaggctagtccgttatcaacttgaaaaagtggcaccgagtcggtgcgacgagcgcggcgatatcatcatccatggatatggggaagtgaatcagtacaaccgccacagtactgagctgcgagaa

SEQ ID NO: 132 - DNA, 172 bp, synthetic construct
  source 1..172: mol_type = other DNA
gctattctcgcagctcaccagttttagagctagaaatagcaagttaaaataaggctagtccgttatcaacttgaaaaagtggcaccgagtcggtgcgacgagcgcggcgatatcatcatccatggtatggggaagtgaatcagtacaaccgccacagtatgagctgcgagaa

SEQ ID NO: 133 - DNA, 170 bp, synthetic construct
  source 1..170: mol_type = other DNA
gctattctcgcagctcaccagttttagagctagaaatagcaagttaaaataaggctagtccgttatcaacttgaaaaagtggcaccgagtcggtgcgacgagcgcggcgatatcatcatccatggatggggaagtgaatcagtacaaccgccacagttgagctgcgagaa

SEQ ID NO: 134 - DNA, 174 bp, synthetic construct
  source 1..174: mol_type = other DNA
gctattctcgcagctcaccagttttagagctagaaatagcaagttaaaataaggctagtccgttatcaacttgaaaaagtggcaccgagtcggtgcgacgagcgcggcgatatcatcatccatggataaatggtacaactaatgtggcacctgtaccaccctgagctgcgagaa

SEQ ID NO: 135 - DNA, 172 bp, synthetic construct
  source 1..172: mol_type = other DNA
gctattctcgcagctcaccagttttagagctagaaatagcaagttaaaataaggctagtccgttatcaacttgaaaaagtggcaccgagtcggtgcgacgagcgcggcgatatcatcatccatggtaaatggtacaactaatgtggcacctgtaccacctgagctgcgagaa

SEQ ID NO: 136 - DNA, 170 bp, synthetic construct
  source 1..170: mol_type = other DNA
gctattctcgcagctcaccagttttagagctagaaatagcaagttaaaataaggctagtccgttatcaacttgaaaaagtggcaccgagtcggtgcgacgagcgcggcgatatcatcatccatggaaatggtacaactaatgtggcacctgtaccactgagctgcgagaa

SEQ ID NO: 137 - DNA, 174 bp, synthetic construct
  source 1..174: mol_type = other DNA
gctattctcgcagctcaccagttttagagctagaaatagcaagttaaaataaggctagtccgttatcaacttgaaaaagtggcaccgagtcggtgcgacgagcgcggcgatatcatcatccatgggggtggtacaggtgccacattagttgtaccatttattgagctgcgagaa

SEQ ID NO: 138 - DNA, 172 bp, synthetic construct
  source 1..172: mol_type = other DNA
gctattctcgcagctcaccagttttagagctagaaatagcaagttaaaataaggctagtccgttatcaacttgaaaaagtggcaccgagtcggtgcgacgagcgcggcgatatcatcatccatggggtggtacaggtgccacattagttgtaccatttatgagctgcgagaa

SEQ ID NO: 139 - DNA, 170 bp, synthetic construct
  source 1..170: mol_type = other DNA
gctattctcgcagctcaccagttttagagctagaaatagcaagttaaaataaggctagtccgttatcaacttgaaaaagtggcaccgagtcggtgcgacgagcgcggcgatatcatcatccatgggtggtacaggtgccacattagttgtaccattttgagctgcgagaa

SEQ ID NO: 140 - DNA, 174 bp, synthetic construct
  source 1..174: mol_type = other DNA
gctattctcgcagctcaccagttttagagctagaaatagcaagttaaaataaggctagtccgttatcaacttgaaaaagtggcaccgagtcggtgcgacgagcgcggcgatatcatcatccatggttatatttacaggaccaactggatctggaaaaacaatgagctgcgagaa

SEQ ID NO: 141 - DNA, 172 bp, synthetic construct
  source 1..172: mol_type = other DNA
gctattctcgcagctcaccagttttagagctagaaatagcaagttaaaataaggctagtccgttatcaacttgaaaaagtggcaccgagtcggtgcgacgagcgcggcgatatcatcatccatggtatatttacaggaccaactggatctggaaaaacatgagctgcgagaa

SEQ ID NO: 142 - DNA, 170 bp, synthetic construct
  source 1..170: mol_type = other DNA
gctattctcgcagctcaccagttttagagctagaaatagcaagttaaaataaggctagtccgttatcaacttgaaaaagtggcaccgagtcggtgcgacgagcgcggcgatatcatcatccatggatatttacaggaccaactggatctggaaaaactgagctgcgagaa

SEQ ID NO: 143 - DNA, 174 bp, synthetic construct
  source 1..174: mol_type = other DNA
gctattctcgcagctcaccagttttagagctagaaatagcaagttaaaataaggctagtccgttatcaacttgaaaaagtggcaccgagtcggtgcgacgagcgcggcgatatcatcatccatggttgtttttccagatccagttggtcctgtaaatataatgagctgcgagaa

SEQ ID NO: 144 - DNA, 172 bp, synthetic construct
  source 1..172: mol_type = other DNA
gctattctcgcagctcaccagttttagagctagaaatagcaagttaaaataaggctagtccgttatcaacttgaaaaagtggcaccgagtcggtgcgacgagcgcggcgatatcatcatccatggtgtttttccagatccagttggtcctgtaaatatatgagctgcgagaa

SEQ ID NO: 145 - DNA, 170 bp, synthetic construct
  source 1..170: mol_type = other DNA
gctattctcgcagctcaccagttttagagctagaaatagcaagttaaaataaggctagtccgttatcaacttgaaaaagtggcaccgagtcggtgcgacgagcgcggcgatatcatcatccatgggtttttccagatccagttggtcctgtaaatattgagctgcgagaa

SEQ ID NO: 146 - DNA, 151 bp, synthetic construct
  source 1..151: mol_type = other DNA
gctgtctccgccgcccgccagttttagagctagaaatagcaagttaaaataaggctagtccgttatcaacttgaaaaagtggcaccgagtcggtgcagtcgccatgatatggggaagtgaatcagtacaaccgccacagtaccgggcggcg

SEQ ID NO: 147 - DNA, 179 bp, synthetic construct
  source 1..179: mol_type = other DNA
gcgtattgcctggaggatgggttttagagctagaaatagcaagttaaaataaggctagtccgttatcaacttgaaaaagtggcaccgagtcggtgcgaaccacgcggcgaatgccggcgtccgccatatggggaagtgaatcagtacaaccgccacagtactcctccaggcaatacgcg

SEQ ID NO: 148 - DNA, 170 bp, synthetic construct
  source 1..170: mol_type = other DNA
gagaagcggcgtccggggctagttttagagctagaaatagcaagttaaaataaggctagtccgttatcaacttgaaaaagtggcaccgagtcggtgctctttgtccagagtcacagccataatatggggaagtgaatcagtacaaccgccacagtacccccggacgccgc

SEQ ID NO: 149 - DNA, 169 bp, synthetic construct
  source 1..169: mol_type = other DNA
gggcacggggccatgtacaagttttagagctagaaatagcaagttaaaataaggctagtccgttatcaacttgaaaaagtggcaccgagtcggtgcggcgtcggcagcccgatcccgttgatatggggaagtgaatcagtacaaccgccacagtactacatggccccgt

SEQ ID NO: 150 - DNA, 175 bp, synthetic construct
  source 1..175: mol_type = other DNA
gtgtcaggtggggcggggctagttttagagctagaaatagcaagttaaaataaggctagtccgttatcaacttgaaaaagtggcaccgagtcggtgcgctggctcctcccctggcaccataatatggggaagtgaatcagtacaaccgccacagtacccccgccccacctgacac

SEQ ID NO: 151 - DNA, 174 bp, synthetic construct
  source 1..174: mol_type = other DNA
gagtgggtcagacgagcaggagttttagagctagaaatagcaagttaaaataaggctagtccgttatcaacttgaaaaagtggcaccgagtcggtgccgactcctcccccatgcagccctccatcatatggggaagtgaatcagtacaaccgccacagtactgctcgtctgacc

SEQ ID NO: 152 - DNA, 161 bp, synthetic construct
  source 1..161: mol_type = other DNA
gctgtctccgccgcccgccagttttagagctagaaatagcaagttaaaataaggctagtccgttatcaacttgaaaaagtggcaccgagtcggtgccgggggtcgcagtcgccatgatatggggaagtgaatcagtacaaccgccacagtaccgggcggcg

SEQ ID NO: 153 - DNA, 165 bp, synthetic construct
  source 1..165: mol_type = other DNA
gggcacggggccatgtacaagttttagagctagaaatagcaagttaaaataaggctagtccgttatcaacttgaaaaagtggcaccgagtcggtgccgggggtcgcagtcgccatgatatggggaagtgaatcagtacaaccgccacagtaccgggcggcggaga

SEQ ID NO: 154 - DNA, 174 bp, synthetic construct
  source 1..174: mol_type = other DNA
gggcacggggccatgtacaagttttagagctagaaatagcaagttaaaataaggctagtccgttatcaacttgaaaaagtggcaccgagtcggtgcgcggcggcacgggggtcgcagtcgccatgatatggggaagtgaatcagtacaaccgccacagtaccgggcggcggaga

SEQ ID NO: 155 - DNA, 174 bp, synthetic construct
  source 1..174: mol_type = other DNA
gcgtattgcctggaggatgggttttagagctagaaatagcaagttaaaataaggctagtccgttatcaacttgaaaaagtggcaccgagtcggtgcgaaccacgcggcgaatgccggcgtccgccatatggggaagtgaatcagtacaaccgccacagtactcctccaggcaat

SEQ ID NO: 156 - DNA, 165 bp, synthetic construct
  source 1..165: mol_type = other DNA
gggcacggggccatgtacaagttttagagctagaaatagcaagttaaaataaggctagtccgttatcaacttgaaaaagtggcaccgagtcggtgcggcgaatgccggcgtccgccatatggggaagtgaatcagtacaaccgccacagtactcctccaggcaat

SEQ ID NO: 157 - DNA, 170 bp, synthetic construct
  source 1..170: mol_type = other DNA
gggcacggggccatgtacaagttttagagctagaaatagcaagttaaaataaggctagtccgttatcaacttgaaaaagtggcaccgagtcggtgcggcgaatgccggcgtccgccatatggggaagtgaatcagtacaaccgccacagtactcctccaggcaatacgcg

SEQ ID NO: 158 - DNA, 165 bp, synthetic construct
  source 1..165: mol_type = other DNA
gggcacggggccatgtacaagttttagagctagaaatagcaagttaaaataaggctagtccgttatcaacttgaaaaagtggcaccgagtcggtgcggcgtcggcagcccgatcccgttgatatggggaagtgaatcagtacaaccgccacagtactacatggcc

SEQ ID NO: 159 - DNA, 151 bp, synthetic construct
  source 1..151: mol_type = other DNA
gggcacggggccatgtacaagttttagagctagaaatagcaagttaaaataaggctagtccgttatcaacttgaaaaagtggcaccgagtcggtgcgatcccgttgatatggggaagtgaatcagtacaaccgccacagtactacatggcc

SEQ ID NO: 160 - DNA, 155 bp, synthetic construct
  source 1..155: mol_type = other DNA
gggcacggggccatgtacaagttttagagctagaaatagcaagttaaaataaggctagtccgttatcaacttgaaaaagtggcaccgagtcggtgcgatcccgttgatatggggaagtgaatcagtacaaccgccacagtactacatggccccgt

SEQ ID NO: 161 - DNA, 8908 bp, synthetic construct
  source 1..8908: mol_type = other DNA
gacattgattattgactagttattaatagtaatcaattacggggtcattagttcatagcccatatatggagttccgcgttacataacttacggtaaatggcccgcctggctgaccgcccaacgacccccgcccattgacgtcaataatgacgtatgttcccatagtaacgccaatagggactttccattgacgtcaatgggtggagtatttacggtaaactgcccacttggcagtacatcaagtgtatcatatgccaagtacgccccctattgacgtcaatgacggtaaatggcccgcctggcattatgcccagtacatgaccttatgggactttcctacttggcagtacatctacgtattagtcatcgctattaccatggtgatgcggttttggcagtacatcaatgggcgtggatagcggtttgactcacggggatttccaagtctccaccccattgacgtcaatgggagtttgttttggcaccaaaatcaacgggactttccaaaatgtcgtaacaactccgccccattgacgcaaatgggcggtaggcgtgtacggtgggaggtctatataagcagagctggtttagtgaaccgtcagatccgctagagatccgcggccgctaatacgactcactatagggagagccgccaccatgaaacggacagccgacggaagcgagttcgagtcaccaaagaagaagcggaaagtcgacaagaagtacagcatcggcctggacatcggcaccaactctgtgggctgggccgtgatcaccgacgagtacaaggtgcccagcaagaaattcaaggtgctgggcaacaccgaccggcacagcatcaagaagaacctgatcggagccctgctgttcgacagcggcgaaacagccgaggccacccggctgaagagaaccgccagaagaagatacaccagacggaagaaccggatctgctatctgcaagagatcttcagcaacgagatggccaaggtggacgacagcttcttccacagactggaagagtccttcctggtggaagaggataagaagcacgagcggcaccccatcttcggcaacatcgtggacgaggtggcctaccacgagaagtaccccaccatctaccacctgagaaagaaactggtggacagcaccgacaaggccgacctgcggctgatctatctggccctggcccacatgatcaagttccggggccacttcctgatcgagggcgacctgaaccccgacaacagcgacgtggacaagctgttcatccagctggtgcagacctacaaccagctgttcgaggaaaaccccatcaacgccagcggcgtggacgccaaggccatcctgtctgccagactgagcaagagcagacggctggaaaatctgatcgcccagctgcccggcgagaagaagaatggcctgttcggaaacctgattgccctgagcctgggcctgacccccaacttcaagagcaacttcgacctggccgaggatgccaaactgcagctgagcaaggacacctacgacgacgacctggacaacctgctggcccagatcggcgaccagtacgccgacctgtttctggccgccaagaacctgtccgacgccatcctgctgagcgacatcctgagagtgaacaccgagatcaccaaggcccccctgagcgcctctatgatcaagagatacgacgagcaccaccaggacctgaccctgctgaaagctctcgtgcggcagcagctgcctgagaagtacaaagagattttcttcgaccagagcaagaacggctacgccggctacattgacggcggagccagccaggaagagttctacaagttcatcaagcccatcctggaaaagatggacggcaccgaggaactgctcgtgaagctgaacagagaggacctgctgcggaagcagcggaccttcgacaacggcagcatcccccaccagatccacctgggagagctgcacgccattctgcggcggcaggaagatttttacccattcctgaaggacaaccgggaaaagatcgagaagatcctgaccttccgcatcccctactacgtgggccctctggccaggggaaacagcagattcgcctggatgaccagaaagagcgaggaaaccatcaccccctggaacttcgaggaagtggtggacaagggcgcttccgcccagagcttcatcgagcggatgaccaacttcgataagaacctgcccaacgagaaggtgctgcccaagcacagcctgctgtacgagtacttcaccgtgtataacgagctgaccaaagtgaaatacgtgaccgagggaatgagaaagcccgccttcctgagcggcgagcagaaaaaggccatcgtggacctgctgttcaagaccaaccggaaagtgaccgtgaagcagctgaaagaggactacttcaagaaaatcgagtgcttcgactccgtggaaatctccggcgtggaagatcggttcaacgcctccctgggcacataccacgatctgctgaaaattatcaaggacaaggacttcctggacaatgaggaaaacgaggacattctggaagatatcgtgctgaccctgacactgtttgaggacagagagatgatcgaggaacggctgaaaacctatgcccacctgttcgacgacaaagtgatgaagcagctgaagcggcggagatacaccggctggggcaggctgagccggaagctgatcaacggcatccgggacaagcagtccggcaagacaatcctggatttcctgaagtccgacggcttcgccaacagaaacttcatgcagctgatccacgacgacagcctgacctttaaagaggacatccagaaagcccaggtgtccggccagggcgatagcctgcacgagcacattgccaatctggccggcagccccgccattaagaagggcatcctgcagacagtgaaggtggtggacgagctcgtgaaagtgatgggccggcacaagcccgagaacatcgtgatcgaaatggccagagagaaccagaccacccagaagggacagaagaacagccgcgagagaatgaagcggatcgaagagggcatcaaagagctgggcagccagatcctgaaagaacaccccgtggaaaacacccagctgcagaacgagaagctgtacctgtactacctgcagaatgggcgggatatgtacgtggaccaggaactggacatcaaccggctgtccgactacgatgtggacgctatcgtgcctcagagctttctgaaggacgactccatcgacaacaaggtgctgaccagaagcgacaagaaccggggcaagagcgacaacgtgccctccgaagaggtcgtgaagaagatgaagaactactggcggcagctgctgaacgccaagctgattacccagagaaagttcgacaatctgaccaaggccgagagaggcggcctgagcgaactggataaggccggcttcatcaagagacagctggtggaaacccggcagatcacaaagcacgtggcacagatcctggactcccggatgaacactaagtacgacgagaatgacaagctgatccgggaagtgaaagtgatcaccctgaagtccaagctggtgtccgatttccggaaggatttccagttttacaaagtgcgcgagatcaacaactaccaccacgcccacgacgcctacctgaacgccgtcgtgggaaccgccctgatcaaaaagtaccctaagctggaaagcgagttcgtgtacggcgactacaaggtgtacgacgtgcggaagatgatcgccaagagcgagcaggaaatcggcaaggctaccgccaagtacttcttctacagcaacatcatgaactttttcaagaccgagattaccctggccaacggcgagatccggaagcggcctctgatcgagacaaacggcgaaaccggggagatcgtgtgggataagggccgggattttgccaccgtgcggaaagtgctgagcatgccccaagtgaatatcgtgaaaaagaccgaggtgcagacaggcggcttcagcaaagagtctatcctgcccaagaggaacagcgataagctgatcgccagaaagaaggactgggaccctaagaagtacggcggcttcgacagccccaccgtggcctattctgtgctggtggtggccaaagtggaaaagggcaagtccaagaaactgaagagtgtgaaagagctgctggggatcaccatcatggaaagaagcagcttcgagaagaatcccatcgactttctggaagccaagggctacaaagaagtgaaaaaggacctgatcatcaagctgcctaagtactccctgttcgagctggaaaacggccggaagagaatgctggcctctgccggcgaactgcagaagggaaacgaactggccctgccctccaaatatgtgaacttcctgtacctggccagccactatgagaagctgaagggctcccccgaggataatgagcagaaacagctgtttgtggaacagcacaagcactacctggacgagatcatcgagcagatcagcgagttctccaagagagtgatcctggccgacgctaatctggacaaagtgctgtccgcctacaacaagcaccgggataagcccatcagagagcaggccgagaatatcatccacctgtttaccctgaccaatctgggagcccctgccgccttcaagtactttgacaccaccatcgaccggaagaggtacaccagcaccaaagaggtgctggacgccaccctgatccaccagagcatcaccggcctgtacgagacacggatcgacctgtctcagctgggaggtgactctggaggatctagcggaggatcctctggcagcgagacaccaggaacaagcgagtcagcaacaccagagagcagtggcggcagcagcggcggcagcagcaccctaaatatagaagatgagtatcggctacatgagacctcaaaagagccagatgtttctctagggtccacatggctgtctgattttcctcaggcctgggcggaaaccgggggcatgggactggcagttcgccaagctcctctgatcatacctctgaaagcaacctctacccccgtgtccataaaacaataccccatgtcacaagaagccagactggggatcaagccccacatacagagactgttggaccagggaatactggtaccctgccagtccccctggaacacgcccctgctacccgttaagaaaccagggactaatgattataggcctgtccaggatctgagagaagtcaacaagcgggtggaagacatccaccccaccgtgcccaacccttacaacctcttgagcgggctcccaccgtcccaccagtggtacactgtgcttgatttaaaggatgcctttttctgcctgagactccaccccaccagtcagcctctcttcgcctttgagtggagagatccagagatgggaatctcaggacaattgacctggaccagactcccacagggtttcaaaaacagtcccaccctgtttaatgaggcactgcacagagacctagcagacttccggatccagcacccagacttgatcctgctacagtacgtggatgacttactgctggccgccacttctgagctagactgccaacaaggtactcgggccctgttacaaaccctagggaacctcgggtatcgggcctcggccaagaaagcccaaatttgccagaaacaggtcaagtatctggggtatcttctaaaagagggtcagagatggctgactgaggccagaaaagagactgtgatggggcagcctactccgaagacccctcgacaactaagggagttcctagggaaggcaggcttctgtcgcctcttcatccctgggtttgcagaaatggcagcccccctgtaccctctcaccaaaccggggactctgtttaattggggcccagaccaacaaaaggcctatcaagaaatcaagcaagctcttctaactgccccagccctggggttgccagatttgactaagccctttgaactctttgtcgacgagaagcagggctacgccaaaggtgtcctaacgcaaaaactgggaccttggcgtcggccggtggcctacctgtccaaaaagctagacccagtagcagctgggtggcccccttgcctacggatggtagcagccattgccgtactgacaaaggatgcaggcaagctaaccatgggacagccactagtcattctggccccccatgcagtagaggcactagtcaaacaaccccccgaccgctggctttccaacgcccggatgactcactatcaggccttgcttttggacacggaccgggtccagttcggaccggtggtagccctgaacccggctacgctgctcccactgcctgaggaagggctgcaacacaactgccttgatatcctggccgaagcccacggaacccgacccgacctaacggaccagccgctcccagacgccgaccacacctggtacacggatggaagcagtctcttacaagagggacagcgtaaggcgggagctgcggtgaccaccgagaccgaggtaatctgggctaaagccctgccagccgggacatccgctcagcgggctgaactgatagcactcacccaggccctaaagatggcagaaggtaagaagctaaatgtttatactgatagccgttatgcttttgctactgcccatatccatggagaaatatacagaaggcgtgggtggctcacatcagaaggcaaagagatcaaaaataaagacgagatcttggccctactaaaagccctctttctgcccaaaagacttagcataatccattgtccaggacatcaaaagggacacagcgccgaggctagaggcaaccggatggctgaccaagcggcccgaaaggcagccatcacagagactccagacacctctaccctcctcatagaaaattcatcaccctctggcggctcaaaaagaaccgccgacggcagcgaattcgagcccaagaagaagaggaaagtcgggggaggaggttctggaggcggaggctccggaggcggagggtcacccaagaagaaacgcaaggtatacccttatgacgtacctgattacgccggtagctacaggccagaatccctcgacgtatgcatttaccttcgcaaatccaggaaggacgttgaagaagaacgccgcgcaatcgaagaaggcagctcctacaacgcactggaacggcatcggaagcgattgtttgccattgccaaggcagaaaatcacaacatcatcgatatttttgaagaagttgccagtggagagagcatacaggaaagaccccaaatgcagcagctgctcaggaagttggaaggcaatgaaattgatggcgtgctggtgattgatctcgatagactcgggcggggcgatatgctggatgcgggaatgatcgatcgtgcattcagatactcatctaccaaaattatcaccccaacagatgtctacgatcctgatgacgaaagttgggagctggtgttcgggattaagagtttaatcagccgacaggagctcaagtccatcaccaaacgactgcagaatggccggatcgattcagtgaaggaggggaagcacattggcaagaagccaccttatggctacttgaaggatgagaatctgaggctgtatccagatccagaaaaggcctggattgtgaagaagatttttgaactgatgtgtgacggaaagggacggcagatgattgcggctgagttggacagactgggtattgacccccctgtgacgaaaaggggagcatgggactctagtaccatcaccagtattataaagaacgaagtttatacaggcgtcattgtctgggggaaatttaagcataaaaagaggaatggtaagtatacgcggcataagaacccacaggagaagtggattatgtacgagaacgcccatgaacccattatatccaaagagcttttcgatgcggcaaacgaagcccatagctccagacacaagcccgctgtcataacgagtaaaaagctgactaacccactggctggcatcttgaagtgcaagttgtgtggctacacaatgctcatacagactcggaaggacaggcctcataactacttacgatgtaacaatccagcctgtaagggcaagcaaaaacagtcagttttcaatttagtggaggagaagttgctctattcactgcagcaaatcgtggacgagtaccaggcccagaaagttgaagaggtcgaaattgatgattctaaactcatctcttttaaggaaaaggcaataatctccaaagagaaggagcttaaggagttacaagctcagaaaggcaacctgcatgacctgctcgaacaaggtatttacacggtcgaaatcttcctggaacggcagaagaatttggtggaaagaataaccagcatcgagaacgacatcgaggtgctgcagaaggagattgaaactgagcagatcaaagaacacaataagaccgagttcatccccgccttaaaaacggtgatcgaatcatatcacaaaacaaccaatattgaactcaaaaaccagctgctgaagaccattctgagcaccgtgacatactataggcatcccgactggaaaaccaatgaatttgaaatccaggtgtacttcaaaatctcctaggtttaaacccgctgatcagcctcgactgtgccttctagttgccagccatctgttgtttgcccctcccccgtgccttccttgaccctggaaggtgccactcccactgtcctttcctaataaaatgagaaaattgcatcgcattgtctgagtaggtgtcattctattctggggggtggggtggggcaggacagcaagggggaggattgggaagacaatagcaggcatgctggggatgcggtgggctctatgg

SEQ ID NO: 162 - DNA, 9004 bp, synthetic construct
  source 1..9004: mol_type = other DNA
gacattgattattgactagttattaatagtaatcaattacggggtcattagttcatagcccatatatggagttccgcgttacataacttacggtaaatggcccgcctggctgaccgcccaacgacccccgcccattgacgtcaataatgacgtatgttcccatagtaacgccaatagggactttccattgacgtcaatgggtggagtatttacggtaaactgcccacttggcagtacatcaagtgtatcatatgccaagtacgccccctattgacgtcaatgacggtaaatggcccgcctggcattatgcccagtacatgaccttatgggactttcctacttggcagtacatctacgtattagtcatcgctattaccatggtgatgcggttttggcagtacatcaatgggcgtggatagcggtttgactcacggggatttccaagtctccaccccattgacgtcaatgggagtttgttttggcaccaaaatcaacgggactttccaaaatgtcgtaacaactccgccccattgacgcaaatgggcggtaggcgtgtacggtgggaggtctatataagcagagctggtttagtgaaccgtcagatccgctagagatccgcggccgctaatacgactcactatagggagagccgccaccatgaaacggacagccgacggaagcgagttcgagtcaccaaagaagaagcggaaagtcgacaagaagtacagcatcggcctggacatcggcaccaactctgtgggctgggccgtgatcaccgacgagtacaaggtgcccagcaagaaattcaaggtgctgggcaacaccgaccggcacagcatcaagaagaacctgatcggagccctgctgttcgacagcggcgaaacagccgaggccacccggctgaagagaaccgccagaagaagatacaccagacggaagaaccggatctgctatctgcaagagatcttcagcaacgagatggccaaggtggacgacagcttcttccacagactggaagagtccttcctggtggaagaggataagaagcacgagcggcaccccatcttcggcaacatcgtggacgaggtggcctaccacgagaagtaccccaccatctaccacctgagaaagaaactggtggacagcaccgacaaggccgacctgcggctgatctatctggccctggcccacatgatcaagttccggggccacttcctgatcgagggcgacctgaaccccgacaacagcgacgtggacaagctgttcatccagctggtgcagacctacaaccagctgttcgaggaaaaccccatcaacgccagcggcgtggacgccaaggccatcctgtctgccagactgagcaagagcagacggctggaaaatctgatcgcccagctgcccggcgagaagaagaatggcctgttcggaaacctgattgccctgagcctgggcctgacccccaacttcaagagcaacttcgacctggccgaggatgccaaactgcagctgagcaaggacacctacgacgacgacctggacaacctgctggcccagatcggcgaccagtacgccgacctgtttctggccgccaagaacctgtccgacgccatcctgctgagcgacatcctgagagtgaacaccgagatcaccaaggcccccctgagcgcctctatgatcaagagatacgacgagcaccaccaggacctgaccctgctgaaagctctcgtgcggcagcagctgcctgagaagtacaaagagattttcttcgaccagagcaagaacggctacgccggctacattgacggcggagccagccaggaagagttctacaagttcatcaagcccatcctggaaaagatggacggcaccgaggaactgctcgtgaagctgaacagagaggacctgctgcggaagcagcggaccttcgacaacggcagcatcccccaccagatccacctgggagagctgcacgccattctgcggcggcaggaagatttttacccattcctgaaggacaaccgggaaaagatcgagaagatcctgaccttccgcatcccctactacgtgggccctctggccaggggaaacagcagattcgcctggatgaccagaaagagcgaggaaaccatcaccccctggaacttcgaggaagtggtggacaagggcgcttccgcccagagcttcatcgagcggatgaccaacttcgataagaacctgcccaacgagaaggtgctgcccaagcacagcctgctgtacgagtacttcaccgtgtataacgagctgaccaaagtgaaatacgtgaccgagggaatgagaaagcccgccttcctgagcggcgagcagaaaaaggccatcgtggacctgctgttcaagaccaaccggaaagtgaccgtgaagcagctgaaagaggactacttcaagaaaatcgagtgcttcgactccgtggaaatctccggcgtggaagatcggttcaacgcctccctgggcacataccacgatctgctgaaaattatcaaggacaaggacttcctggacaatgaggaaaacgaggacattctggaagatatcgtgctgaccctgacactgtttgaggacagagagatgatcgaggaacggctgaaaacctatgcccacctgttcgacgacaaagtgatgaagcagctgaagcggcggagatacaccggctggggcaggctgagccggaagctgatcaacggcatccgggacaagcagtccggcaagacaatcctggatttcctgaagtccgacggcttcgccaacagaaacttcatgcagctgatccacgacgacagcctgacctttaaagaggacatccagaaagcccaggtgtccggccagggcgatagcctgcacgagcacattgccaatctggccggcagccccgccattaagaagggcatcctgcagacagtgaaggtggtggacgagctcgtgaaagtgatgggccggcacaagcccgagaacatcgtgatcgaaatggccagagagaaccagaccacccagaagggacagaagaacagccgcgagagaatgaagcggatcgaagagggcatcaaagagctgggcagccagatcctgaaagaacaccccgtggaaaacacccagctgcagaacgagaagctgtacctgtactacctgcagaatgggcgggatatgtacgtggaccaggaactggacatcaaccggctgtccgactacgatgtggacgctatcgtgcctcagagctttctgaaggacgactccatcgacaacaaggtgctgaccagaagcgacaagaaccggggcaagagcgacaacgtgccctccgaagaggtcgtgaagaagatgaagaactactggcggcagctgctgaacgccaagctgattacccagagaaagttcgacaatctgaccaaggccgagagaggcggcctgagcgaactggataaggccggcttcatcaagagacagctggtggaaacccggcagatcacaaagcacgtggcacagatcctggactcccggatgaacactaagtacgacgagaatgacaagctgatccgggaagtgaaagtgatcaccctgaagtccaagctggtgtccgatttccggaaggatttccagttttacaaagtgcgcgagatcaacaactaccaccacgcccacgacgcctacctgaacgccgtcgtgggaaccgccctgatcaaaaagtaccctaagctggaaagcgagttcgtgtacggcgactacaaggtgtacgacgtgcggaagatgatcgccaagagcgagcaggaaatcggcaaggctaccgccaagtacttcttctacagcaacatcatgaactttttcaagaccgagattaccctggccaacggcgagatccggaagcggcctctgatcgagacaaacggcgaaaccggggagatcgtgtgggataagggccgggattttgccaccgtgcggaaagtgctgagcatgccccaagtgaatatcgtgaaaaagaccgaggtgcagacaggcggcttcagcaaagagtctatcctgcccaagaggaacagcgataagctgatcgccagaaagaaggactgggaccctaagaagtacggcggcttcgacagccccaccgtggcctattctgtgctggtggtggccaaagtggaaaagggcaagtccaagaaactgaagagtgtgaaagagctgctggggatcaccatcatggaaagaagcagcttcgagaagaatcccatcgactttctggaagccaagggctacaaagaagtgaaaaaggacctgatcatcaagctgcctaagtactccctgttcgagctggaaaacggccggaagagaatgctggcctctgccggcgaactgcagaagggaaacgaactggccctgccctccaaatatgtgaacttcctgtacctggccagccactatgagaagctgaagggctcccccgaggataatgagcagaaacagctgtttgtggaacagcacaagcactacctggacgagatcatcgagcagatcagcgagttctccaagagagtgatcctggccgacgctaatctggacaaagtgctgtccgcctacaacaagcaccgggataagcccatcagagagcaggccgagaatatcatccacctgtttaccctgaccaatctgggagcccctgccgccttcaagtactttgacaccaccatcgaccggaagaggtacaccagcaccaaagaggtgctggacgccaccctgatccaccagagcatcaccggcctgtacgagacacggatcgacctgtctcagctgggaggtgactctggaggatctagcggaggatcctctggcagcgagacaccaggaacaagcgagtcagcaacaccagagagctctggtagcgagacacccggtaccagtgaaagcgccacgccagaaagcagtgggagtgagactccgggtacatctgaatcagcgacaccggaatcaagtggcggcagcagcggcggcagcagcaccctaaatatagaagatgagtatcggctacatgagacctcaaaagagccagatgtttctctagggtccacatggctgtctgattttcctcaggcctgggcggaaaccgggggcatgggactggcagttcgccaagctcctctgatcatacctctgaaagcaacctctacccccgtgtccataaaacaataccccatgtcacaagaagccagactggggatcaagccccacatacagagactgttggaccagggaatactggtaccctgccagtccccctggaacacgcccctgctacccgttaagaaaccagggactaatgattataggcctgtccaggatctgagagaagtcaacaagcgggtggaagacatccaccccaccgtgcccaacccttacaacctcttgagcgggcccccaccgtcccaccagtggtacactgtgcttgatttaaaggatgcctttttctgcctgagactccaccccaccagtcagcctctcttcgcctttgagtggagagatccagagatgggaatctcaggacaattgacctggaccagactcccacagggtttcaaaaacagtcccaccctgtttaatgaggcactgcacagagacctagcagacttccggatccagcacccagacttgatcctgctacagtacgtggatgacttactgctggccgccacttctgagctagactgccaacaaggtactcgggccctgttacaaaccctagggaacctcgggtatcgggcctcggccaagaaagcccaaatttgccagaaacaggtcaagtatctggggtatcttctaaaagagggtcagagatggctgactgaggccagaaaagagactgtgatggggcagcctactccgaagacccctcgacaactaagggagttcctagggaaggcaggcttctgtcgcctcttcatccctgggtttgcagaaatggcagcccccctgtaccctctcaccaaaccggggactctgtttaattggggcccagaccaacaaaaggcctatcaagaaatcaagcaagctcttctaactgccccagccctggggttgccagatttgactaagccctttgaactctttgtcgacgagaagcagggctacgccaaaggtgtcctaacgcaaaaactgggaccttggcgtcggccggtggcctacctgtccaaaaagctagacccagtagcagctgggtggcccccttgcctacggatggtagcagccattgccgtactgacaaaggatgcaggcaagctaaccatgggacagccactagtcattctggccccccatgcagtagaggcactagtcaaacaaccccccgaccgctggctttccaacgcccggatgactcactatcaggccttgcttttggacacggaccgggtccagttcggaccggtggtagccctgaacccggctacgctgctcccactgcctgaggaagggctgcaacacaactgccttgatatcctggccgaagcccacggaacccgacccgacctaacggaccagccgctcccagacgccgaccacacctggtacacggatggaagcagtctcttacaagagggacagcgtaaggcgggagctgcggtgaccaccgagaccgaggtaatctgggctaaagccctgccagccgggacatccgctcagcgggctgaactgatagcactcacccaggccctaaagatggcagaaggtaagaagctaaatgtttatactgatagccgttatgcttttgctactgcccatatccatggagaaatatacagaaggcgtgggtggctcacatcagaaggcaaagagatcaaaaataaagacgagatcttggccctactaaaagccctctttctgcccaaaagacttagcataatccattgtccaggacatcaaaagggacacagcgccgaggctagaggcaaccggatggctgaccaagcggcccgaaaggcagccatcacagagactccagacacctctaccctcctcatagaaaattcatcaccctctggcggctcaaaaagaaccgccgacggcagcgaattcgagcccaagaagaagaggaaagtcgggggaggaggttctggaggcggaggctccggaggcggagggtcacccaagaagaaacgcaaggtatacccttatgacgtacctgattacgccggtagctacaggccagaatccctcgacgtatgcatttaccttcgcaaatccaggaaggacgttgaagaagaacgccgcgcaatcgaagaaggcagctcctacaacgcactggaacggcatcggaagcgattgtttgccattgccaaggcagaaaatcacaacatcatcgatatttttgaagaagttgccagtggagagagcatacaggaaagaccccaaatgcagcagctgctcaggaagttggaaggcaatgaaattgatggcgtgctggtgattgatctcgatagactcgggcggggcgatatgctggatgcgggaatgatcgatcgtgcattcagatactcatctaccaaaattatcaccccaacagatgtctacgatcctgatgacgaaagttgggagctggtgttcgggattaagagtttaatcagccgacaggagctcaagtccatcaccaaacgactgcagaatggccggatcgattcagtgaaggaggggaagcacattggcaagaagccaccttatggctacttgaaggatgagaatctgaggctgtatccagatccagaaaaggcctggattgtgaagaagatttttgaactgatgtgtgacggaaagggacggcagatgattgcggctgagttggacagactgggtattgacccccctgtgacgaaaaggggagcatgggactctagtaccatcaccagtattataaagaacgaagtttatacaggcgtcattgtctgggggaaatttaagcataaaaagaggaatggtaagtatacgcggcataagaacccacaggagaagtggattatgtacgagaacgcccatgaacccattatatccaaagagcttttcgatgcggcaaacgaagcccatagctccagacacaagcccgctgtcataacgagtaaaaagctgactaacccactggctggcatcttgaagtgcaagttgtgtggctacacaatgctcatacagactcggaaggacaggcctcataactacttacgatgtaacaatccagcctgtaagggcaagcaaaaacagtcagttttcaatttagtggaggagaagttgctctattcactgcagcaaatcgtggacgagtaccaggcccagaaagttgaagaggtcgaaattgatgattctaaactcatctcttttaaggaaaaggcaataatctccaaagagaaggagcttaaggagttacaagctcagaaaggcaacctgcatgacctgctcgaacaaggtatttacacggtcgaaatcttcctggaacggcagaagaatttggtggaaagaataaccagcatcgagaacgacatcgaggtgctgcagaaggagattgaaactgagcagatcaaagaacacaataagaccgagttcatccccgccttaaaaacggtgatcgaatcatatcacaaaacaaccaatattgaactcaaaaaccagctgctgaagaccattctgagcaccgtgacatactataggcatcccgactggaaaaccaatgaatttgaaatccaggtgtacttcaaaatctcctaggtttaaacccgctgatcagcctcgactgtgccttctagttgccagccatctgttgtttgcccctcccccgtgccttccttgaccctggaaggtgccactcccactgtcctttcctaataaaatgagaaaattgcatcgcattgtctgagtaggtgtcattctattctggggggtggggtggggcaggacagcaagggggaggattgggaagacaatagcaggcatgctggggatgcggtgggctctatgg

SEQ ID NO: 163 - protein, 568 aa, synthetic construct
MESFSPIRCAIYTRKSTDEGLEKEFNTLEAQREAGENYIRSMKHQGWVILPEHYDDGGFSGGSLKRPALKQLLSDVEAGKVDMIVVYKIDRLTRSLLDFAQLVKIFEKHCCSFVSVTQHFNTCDSMGKLTLNILLSFAQFERELGAERVRDKIAASKKKGMWTGGPLPLGYDSKNKKLVINKEEAEIVRFIFEDYKRTGSQFQTVRDVNEKGYKPKERMTKTGKNISKGSFNHAMISNILNNPVYLGKVVYKGELYDGQHKAIISQELWDEAKSLRKANLGEAFRPSRVIKHSLLKGLIECECCGAMTPTRSKKGNKYYEYYTPLKTVKEGAKIAHCKVGSIPAGEIESFVIDKIKSIFQAPEFQQRLLKEFENQGHNCNAADIHKIISDIGDAIKYFEPRTIHDFISELVRKVIICHDHIEIKLQPFAATLYESSLVKPDPAFNNKILELKYPVRFGQKRGRTVIIEPAFVERTTPHRDEKLFNAVTLAFYWKQIMEEKHLTLTDMAKRENIDRGYMGQIIRLTTLAPDIIMAIINGTQPKLLSLRKLLRERFPYSWEEQKRELGFI

SEQ ID NO: 164 - protein, 547 aa, synthetic construct
MKKMNVVAYARFSSDNQRIESIDAQLRAIKEFCLKESYQLVDVYTDEVRSGLSDERPGFLRMIDDAEKNKFQAIIVHKLDRFSRDRYDSALYKRKLKKCGVRLFSVLERLDDSPESIILESVLEGMAEYYSENLARETFKGLKENALQCLHNGGTPPLGYDVNPQSKKYEINVYEAETVQIIYDMYLNDHGYFDIIRSLNAAGRKTKRGKPFGKNSIYELLRNEKYTGTYIYNRIENRRKKGNNSHNLKSADDVIKIKDGMPCIIEQKQFVKVKEKMEKNRRASGRYKNKYVYPLSGLIVCGHCGASYCGERRRAKGHDYFYYICSNKKNNGQCNAKDIRKDHLEEIVKKVIEARLYTSSGIAATAKIVRDYAISNSMQNSSKLSASKMQYEKVKDQIDRLIDSIMGGMFHESMKEKLTSLEEKKSCIEKEIYAYENTMDDKVPSLDEIKYYIACDNLRTMDELELKKCFQKHIKKITIRDGDHVQISLVVDINGTPRGARTPNLLVRSQALYPIELWAHISRLKKNDQSNTQVISNLLNFGAEDEI

SEQ ID NO: 165 - protein, 517 aa, synthetic construct
MSYCIYLRKSRKDLEAEQAGQGETLARHERTLLSLARQRNLIIGNIYREIVSGESIAARPVMQKLLKEVESGIWDGVLVMEIERLARGDTIDQGTVQRAFQYSNTYIITPQKTYDPSNEFDEEYFEFGLFMSRREYKTIKRRMQAGRYAAAKEGKWPFNAAPYGYKRVKLQNEKGWTLAFDDSEASVCRMIFSMFTGSGRKGITIIRRYLNQHGIKPRNGDLWTDSSIRCILSNPAYDGKVAIGRRKVVPTIENGLPTKTRPRSNDYAVYEGRHPALISHAIYAEAQSYLGHGTPKLPESYGVKNPLAGLIICKECGKRMQRRPATNPWVKNGAKYDMLICHTDSCPTVGSPLDLVERELIHALEDWVSGYELQETLPESRVPELEQMLESAKQEHDTSEKQKSRLYDLLEQGVYDSETFLLRSRALQDRLEESLAGVTRLEQELESERKIQANITNFLPACHDLLSCYWSLDAPDRNKALKILIDSVDYRKTSRNKKGEAEKASFELTIKPRIPRI

SEQ ID NO: 166 - protein, 524 aa, synthetic construct
MLSIPKVAQYARFSSDNQRSESIDAQIRAMNQFCKQNHWQVVSTYTDEARSATTDNRPQFQQMIADSGKGLFDIVLVHKLDRFSRDRYDSAIYKKKLKKNHVKLCSVLERMDDSPESIMMEAVLEGMSEYYSKNLAREVMKGMNETALQCKHTGGCPPLGYDLDENRHLVINESEAQAVRIIFQMFADGYGYTTIIDYLNAHGYKTKRGKMFGKNSLYEMLSNEKYTGVFVFNKAAARTDGKRNNHAQKESYIRIEGGCPTIIGKKLFAQVQRIKAKNRRNTGRYHSKEFYLLTGKLVCDVCGKRMIGNLRFSGRSKTRLATYRCNTHRAACNNKELNKDYLDAYIDVLIGERLKSKNLRRAVAKVNQQVQKFNHNFDANYEGISAQYTEVQDSLANITRAIEKGIFTDDLLQRAEQLENEKAKLETRLHELKLLEPIAYEDVAYLHTQWKELKRNTEEFRTFIQQFVKAIHVRPYDFDIVLDMGFGVVELTETIPMRRGELYEMFDSKVKEQRICLKNQKADT

SEQ ID NO: 167 - protein, 530 aa, synthetic construct
MKTCIYARRSTLKQGQAETIENQIKICERKAKELDLTIVDIKTDSASGTDDNNRPEVKELLKGAINKEYDCVIMKGISRIYRKTSKGLELIEKLDRHGVRVITVEEHFDSHARENRNGIGNLDTSRITMYLMFAEKESQKLAERIKFTQIEKAYAGEWNQASNAPIGYTYDSTTKKLSIDNSKSYVVRKIFKLYEQGMGMKAIAHYLNGDNPDKKTYPSSKGGRWSEYTVGYILKNRAYVGDVVYNKRSKKERPYKAPEALGKTSDDICIINDYNKEEDWIIAENAHEPLIERELFDKIQTMISTKSRRKGIRSNTSLFAGIAKCAKCGTGMTFKRGRKNSLGQVVTKDNYYCMNYIRYGKQYCDSHHVGARELQEAIFNDLEYILNSKDELQRVLDKNKSVMSLDEKKAKERTVGIQKEMDSLIKKMDKLLEKNLAGDISDTQYKTFNEKYSAELDNLTEELKKAKLIIANMSEQADNEMRFRQKLSNAIGIRNKTIEEQRHILLGLIDSIVINGNDIEDISYKFERVD

SEQ ID NO: 168 - protein, 474 aa, synthetic construct
MKVGIYSRVSTQEQAREGYSIGEQVERLKNYCAAKGWILYKTYTDAGFSGANTDRPGMQQLISDVADGKIDMVLVYKLDRLSRSQKDTLFLIEDVFIKNNVNFASITENFDTSTPFGRAMIGILSVFAQLEREQFRERSIMGKDARAKEGLHHGGGAPTGYDYIDGQLIINKEEAELIKEAYRLFLEDDMTMMGIAAKLSVFSEKFKYDHRIRKMLTNPLYAGWTHCRDELYKGQHEAIISQEVFDKVQTKLKIRAENNPHYRNAFNRTSLLAGILWCKKCGARYFKRVRRYEKGSKVYYYNKYQCYSRSSYKNMVRDKSCKNKIWTMDVLDKAVIDEIKALVANPAEVDNIIKLNQSNNNITEKKEFYKKRIKEIEKQMNKLTDLYSIDGIDIDFVAKKITALNTDKKRIESEMNAINEHKPLISAEDAKKRLSGISNILDNGEFTEKVKVITSLINRIEVDDDDIYIYWNFV

SEQ ID NO: 169 - protein, 518 aa, synthetic construct
MAAYCRVSTKQEEQLNSYEVQRKFYTEKINSEPKWKLAGIFADKGITGTSTKNRTEFNKMIRKCKAKKIDMIITKSISRFARNTVDCLKYIRILKELGIDVFFEEQGLHSIDPGAEFYITIYGSIAQSESENISANVRWGKEQSAREGKVVFHYKNFMGYKKGEDGTPVIVPEEAAIITRIFKMYLEGASEKHIADTLTKENILTPTKNNIWNHNTVRNILKNEKYKGDSIINKTYVTDCISKKTKVNNGERPKFYVENSHPAIIDKLTFDKVQEEMARRTSKRKVKQVGTKTEQGKYSSKYALTELLFCGECGTPYRRVTWTVKGKKKVVWRCISRLDYGKKYCKNSPNIEENALQSAIMRAISESATENIEVLDVLKQHIAMGLMVEEDNIDKSLEYQIRLNDLNKQYNELLGKIKFGDENTSNIEQMLEQVIKEKREIQNKLDQYKKKQESMKKAKTRLNEIYNVIDILKNHPMSYDDNVVRQVIYCIKVVDKNNIQITFKNGKQVMYDYLDLCL

SEQ ID NO: 170 - protein, 523 aa, synthetic construct
MEERSVTILPPRLNRKREEAKAEEKARLRVAAYCRVSTDSDEQATSYETQIEHYTLFIQNNPEWILAGIFADDGISGTNTKKRDEFNRMIEECKAGNIDMIITKSISRFARNTIDCLKYIRQLKALNIAVFFEKENINTMDSKGEVLLTIMASLAQQESESLSQNVKLGIQFRYQQGIVQVNHNRFLGYTKDADKHLVIVPEEAEIVKRIYREYLEGANYKEISSGIEADGILTAAGNPRWHSSTLKKILTNEKYMGDALLQKTYTVDCLTKKRVANDGTVPQYYVNNDHDAIIPRELFTRVQEEMKRRVNIRQGMDGKKRVYSSKYALSSIVFCGHCNDMFRRTHWNNHGKKQIVWRCITRLDAPGVECPARTLSEVQLQNLVLEAINKVLGGKQRAIKVLETNISEVLGNAHTEEMERIRKQIEKQQTLLVKMTAASEDYSKVVDKIYALQNEQKQAMADSVNYKVQVERTEEMIEYLKSQPKRVTAYDEQLVRKLIEKITVYDEHLDFLFKSGIQIEIKG

SEQ ID NO: 171 - protein, 500 aa, synthetic construct
MTGAVIYARYSSERQTEQSIEGQLHKCYEYAKVNNLTILETYIDRAMTGTNDKRTAFQQMLSDSEKKTTWDVVLVYAIDRFGRNSIEIAVNKQRLKKNGKILISATQRTSENIDGTKNLDGILLENVYIGLAEYYSAELSQKIVRGQYESLSKGNYIGGPLPFGYRVENKKIVIDEARAEIIREIFSEYVNGKTVPEIVDNLTAKGVLYKGKPFVLNTVYKMLKSARYAGIYYYKDKFYDNIYPPIISKDLLSKVQILTEENKKGTTGKEEKFLLRNKLVCGYCGKSIQGDSGTSKTGKIVYYYKCMERKRTHGCNKKINRKDALEDLVVNSTLRLLSKPETVSFIAEQVIRQHKEKAESDSLMKILSDQKADASKALNNILKAIEAGIINETTKKRMEELEKTIADLNEKILLEKAKADNFLTKEEICDFILKTIKKNPQAMIRILIKQVVVYDDKIEIFYYFTSKNPDDNGRDFTLIGSSDSSPMVGDKRLELPTSSM

SEQ ID NO: 172 - protein, 539 aa, synthetic construct
MSAERQNFYYLRLSKEDGDIEEGSAEESCSITSQRDCIKRYLWEHRFPEDEFEEIADDGYSGTSMNRPGMRRLLNLVEAGKVRTIIVRDLSRFARNYLEAGHYLEFVFPAYDVRFISINDQFDSEQLGESTGGLELAIKNLLNQMYSKDISRKIKSAVDLKKLSGEYVYGTAPYGYKKGEKKNTIVIDKEVSEIVKSIFEWAASGITITQIARKLNEAHVVTPSVYLAAVRGKYKTRAVWTFESVRNILANRIYTGDTVPFKSHVVRVGSDRVKQIPEELQQVIPNTHEGIISRELFYQARTVIKSTKKSKASSHPNPFKSLLVCSCCGNRLIKGKPQNKNWICATHRYNPGSDCEKVRFREDKLTEIVLHAINVRCKLLDAKVRRMKQESHSAKSSEQILQTECRTLRRQIEGLQAIKMQHYESYVSGRLSKESFLGKKQEASTKEEELKIRLSVTERKLKEVDEKIKASTMQMETGRKIIEYQEITELTPQLMKELVKKIIIRPDGSIRIEWNFCDEMNEPISFDFSGKATPEEKAM

SEQ ID NO: 173 - protein, 462 aa, synthetic construct
MSFFTPNPQLFGLRVVKYIRCSHDDQVLHGDTLEAQDLILEDFIKVNRMILVDTFIDEALTARKKFNKRKEFVRLLSGVKAHAFDLIIFTKLDRWFRNIGDYHKIQEILEANGVQWKAVTENYDTTTTNGRLHINIRLSVAQDECDRDSDRIKDVFAYKLKNKTYLSGSLPRGLKLDAEKHVIIDPEWNCFALDMFDHFEATCSKRDTQLFLQDKYNIRVCYDTVARYLKNPIFKGQYRNDPDFCPATISPERFDRIQNLAIRNVRIRHTQQFYIFSGLLICSSCNHIMTGTVTYRKMADGTEKAYKSYRCNFRAQSKLCDRGRSYREEYVEEYMLNHIRSALSDYVAKYEVTAASAVRKNPVEEISKIERKIKKLYDLFMDDLIDKNAYRSEYDKFKKQIEELQRCPAAPVRNLDSVRKLLNENWEAVYGTFSNQEKNVFWKSFVESVLVYEDGSMDIHFL

SEQ ID NO: 174 - protein, 478 aa, synthetic construct
MTNQAEKTSYIENVAAYIRVSTQEQKLHGISIEAQEEKLTEYADSHGMKIVKFYKDEGVSGRKLIRKRPALQAMIQDAEKGNFRRIIFIKLDRFFRSVAEYHECMKRLAAGGVIWTATEEKYDLSTPSGEAFVNMKLTMAQFEADQVGERIRMINEYKVKSGQPLYGSQALPFCYQVKQSDDGDRRKYIAKRDEIIMEDLIAHFCKNRSVRAALHYINAKYSRAFSYSTIKNALTSELICGTYRGNPAYCEGYMTPAAFETMQKYIQHNPRTSQREHTYIFGGLIRCPCCGNMLVGSPTVLNRIGKSGQKLSYKYYGYRCYRGNLEKKCDFRTMAFEHRLEAIMLSEVEAVMREKHMYLLRLQSAPQRVAQHDLAELQQELARLNYAWQKGRIKTAADYDRQYDDLMARIDAANAERQELTAKPDYHKISRILSDGWKQLYISLDNDHKRAFWRAFIEEIQLEWTKDVKRIRDITFFT

SEQ ID NO: 175 - protein, 451 aa, synthetic construct
MIRMCKKKKIDLIITKSISRFSRNTVDCLQYIRQLKELGIGVIFEKENINTLTMTSEFMIALYGSFAQAESESISKNILWGKEKAYREGKVNFQYKHLLGYKKGADGKPEIVPDEAETVKLIYKLFLDGYSMKGIKNVLESKKLLTSMGNKIWNESFIRSILKNEKYVGDALLQKTYTLDCITHKVVKNYGERPMYLVTDHHEPIIDRDTYNRVQQELARRSSKRKISDKTTTEQGKYSSKYALTELLICGKCGTPYRRTTWTSRGKKQIVWRCISRLEHGKRYCPDSPTIKEEQLHKAIIRAINNYYSCGNDVEKILKANIGNVLEFHGQEEITAIEKRLKEIDKARNDLISLIATGGCDEDKLDSEFEKLYEEEQSLSERLVLLKSKKQTSAETQAKLDKIIDMIEHEKFELETFDNVLIRKLIECVKVLSKTEILVIFKGGYEVRTEI

SEQ ID NO: 176 - protein, 484 aa, synthetic construct
MKTGALYVRVSTDDQVEYSPDAQIRLGLEYAKKNNIIIPKQFIFQDDGISGRKATNRPAFQELIAMAKSDEHPIDVILVWKFSRFARNQEEAIVYKNLLKKADVDVVSVSEPIPDGFIGELVQRIFEWMDEYYSINLSGEVMRGMTERASRGGYNAAPPLGYKMQDGIPVIVPEQAEIVKKIFTWYVDDKMSFFDIAVKLNTLGYRTKRNGKFQNRTVAYIIRNEFYNGKIIWNRLEHATRNVKDKSEWIVTDGGHDTFISNELFTAAQDRYKATKRPGKKVRPASTYKHWLSGLLVCSACGGRIVRAGKSKSGNTYFQCTAYNHASCNESHLTNENALKPAILEALQKVLDSGTVEYVVHSTNQEEKSESELIENKLNRIGMKEERIKEAYRDGIDTLEEYKANKEILQREREQLTAMLEQYSKKPEDENESILLNKIRSAYDIIKSDNSTDRQKHDALTSVVDKIVYDKKGGALLMYFYIND

SEQ ID NO: 177 - protein, 578 aa, synthetic construct
MKGAIYSRVSTEQQDYSKQTNELKDYAKRNGIEVVYVFEEKESGFNNNRPEFEKLRKLTKQDIDIILVWEISRISRRAIYLQQQVQEFTDKGICIYAKKDGFSTLNDDGSVNASTKMLIGFASIIAEQEAATLKERTISSKRNKILREGKSYTYYAPYGYDYSKETKMLSINEKQAQVVKRIFQLSIDGYSTERIAILLNAEKIPTKGKKENWTAGTVCNMLTNPVYKGEANYTLKKEKKAGSTYCKPMEVVTISTPAIIEKEQFELSLQKLAERTKRSNSFGTKYNPLLRGLIHCPHCDVKYVYNFGTNQYLCVNKYKKASNKNVHCTAKCISNKLDSIVWNVVKTFFYKELAAGKAQEQIEPLQAEIESYKRQILLLDGKQSELTARANIIVDAAIEIKIQFPNMPDLYANKMKEVEEINKEASKYQKEKERLEKLIHSNESRIKNINRASKESALVESITDETEKYDLVHKAIDKIMIFGEGKTSIIIVTFSTGQTIYLGYSSKSNSKYYTIFYPSSDIYFDIQTNKGYINHLKEKATINSDGSIYLGDLTGEVKEYSIIDFVNYLDIEENRRYY

SEQ ID NO: 178 - protein, 481 aa, synthetic construct
MKTAALYIRVSTDEQVEYSPDAQKKALFDYAKRNRILVPSEYIFVDEGISGRKAEKRPAFMEMVRLAKKKPKPFDIILVHKFDRFSRSREDSVIYKSLLRKDCGIKVVSITEQLEDDKFSIILESMLEAMAEYYSLNLADEVKKGMTEKAKRGGLQTSASYGYEVKEQGTLTVVEHEAKIVRYIFDQYLNHDESFYRITKRVNEMGALTKKNKSFDNRGIEYILRNPVYIGKLRWTPTGRFKRDFDSEEIMIADGKHEPIVSVDVFEAVQEKIRTRKKIYKPKQRPIDECKHWLSGLVRCSSCSSTLVYTATKAPSFQCRGYAGGRCKVSHSITVKKIERAILSEFSKFISGKETKSYNIRTTSSVDLEIEALVKQLDKIYTKLERAKEAFLAGIDTLMEYKSNKELLQQEESSLRARIDELKSKEDKCNMDAFRERINVVYDMLVNDNVPMIEKQKSIRSIVSEIRFNKTNDTLELDYYL

SEQ ID NO: 179 - protein, 523 aa, synthetic construct
MNNNYENITVDDLLKNLPIYKELIQHINTLDSTCKIRIAAAYLRVSTDMQTEYSPEAQLEDIIKYCIKENIMLPKENIYIEPGLSGTRADKRPKFQMMMLKAEEKEKPFDLILVHKYDRFARNREDSIVYKSKLRKKLGIDIIAVKEQLPEDKKLAMMMESQLETWGEYYSMNLSDEVKKGQRKKADRGESSAPAPFGYEKVIKEIRKEKNRDKIIRELIVKKDEADIVIKIFDKFINGESLRNITIWLNSLGIKTKRNGKFSDRAVLWILNNPIYIGYIRWTEDGMQRDFNNPDTIVKKSTHEHIITDEVWEKAQEKLKTMNEVYGHRKHQVKHEHWLRGLIRCDNCGEMLVKNGKAFQCTGYTHARCTISHSITVKSVEEAILEQLKINFKNKPINIEISRKSFDNTDEVAILQNQLSQIEIKEKRVKLAYENGIDSLEEYKENKERLNNDKQLILKEIAKKGKSKSEIEKREDVFKRCKDAYGILTDPTISDDDKAIVTHSLIDHIVFVKNERKLVITYK

SEQ ID NO: 180 - protein, 498 aa, synthetic construct
MDSARLRVACYVRVSTREQAEKGYSVSEQQERLKAYCLAKDWVVAQVITDPGFSGAKLERPGMQQLISLVQAKKCDAVLVWKLDRLSRSQKDTLYLIEDVFLKNGCAFVSMNENFDTSTAFGRAMIGILSVFAQLEREQIRERMAVGRVGRAKAGLFHGGGYAPIGYDYKTIAEGGDGLVVNEYEAMQVREVFSLYLQGWPVNRIRKYMAAHYTTKDGDWGSDTTVRDVLKNPLYTGKINWAKKVYDGQHEPLISQETFDAAAARLATSSWKRTCSDGMERNSPFKSTHLLGGIIWCARCGARYFASGNYSGRGENKRYWPYYVCYSRAKSAKHMIRDPNCQNDRWAVAKLDAIIEGEIRKLAFDPAALELAVSGPQQDEDVAQRRAALQQRLNDLRAQMGRVLDLYQMGGSLPASMVGDRVAKLQAEIDGVEAALAEAVEEPPTQRLDAARAALVGAEDVLDNGTLDERRELVHSLIRRIDLDGENIDIHWSFSPEA

SEQ ID NO: 181 - protein, 449 aa, synthetic construct
MKKAGLYCRVSTDIQMEGYSIDAQKDFLKSYCKMHEIDNYEFYIDGGYSGSNINRPDMQRLIEDVEDHKIDIVVVFKLDRLSRSQKDTLYLIEEVFNPNDCGFVSIKENFDTNTPFGKAMVGILSVFAQLERETILERTRIGRKKRAEEGLWYGTGNLPFAYDYDEKKGILVPNKEKVEIVNKMVELYLQGMPMTQVGALFGLQDQTVRSIFTSPVGLGKIPYKDEIFEGQHEPIMTQETYDKLQQKMKERAVTYKHANYLLAGKIVCGKCGAKYRYQKAGTSSIRLYCYSQQTSKKNLIKDANCDNRRYYDYEIEDYVIKDLISMSLDESKFRHNMNMNDINVSQARIDRIAQIDKQVVNLLDYISEGIAVEETKEKIRKLQEEKEKIQKELSDEKAKERKSENLKVVISDLNTAWKTMTFEEQRNIVLEVIDKVVVNDNEIQIYYNI

SEQ ID NO: 182 - protein, 513 aa, synthetic construct
MQENKQNLRFTALYCRLSSDDELKGDSNSIIHQKQILQDYALKHSLTPTEIYVDDGFTGTNFDRPDFKRLLSDVENDLVKTVIVKDLSRLGRNYLKVGYYTEVLFPEKGVRFISIADNLDTSVNDELNDFIPFKNIMNEWYAKDLSRKQRAVVKSKGNSGIRLATRPLYGYKKAENGDWLIDEPTAAVVQKIFDLYLKGYGPASIANYLFANKVKIPSTIGLPKLNPEQNPYRWSKDTVAKILTYQDYCGDMINFKRSDVDSLVIFPDRQEPIISREIFAEAQKLRLDRKPVRHDYSEPVLFSDLLLCADCKSRMYAQRRYHGTTSYSCSKARKTQGCTSHYINENKLIDCVKSDINKLIKNKGIVIKLAKEKMHIDTKTAQCANSQNLKNAKKRILQIDTILKNLYEDKVLGNINLATFKKLESDYLREQAELNKVIFEQSKIKVNLENRSKSICGFLKKLESYNNPVSELSKDLLIDLIDKIEICEATKNGNERSQQVHIYYKEIGKINLE

SEQ ID NO: 183 - protein, 668 aa, synthetic construct
MAYAKKKKILNFWTKKKAALYVRVSTRYQVDKDSLPFQRKKLKEYCKFLGLEDYVIFEDDGYSAKNTERPHFQEMMSRVRSGEFSHLIVWKVDRVSRNLLDFAAMYQELKDHKVTFISMNEQFDTSTAIGEAMLKIILIFAELERNMTSERVTGIMLDRAEQGLWNGARMPVGYRWNNETKFPEPDPEEVKIVQLIFDKYEEWKSSIKIARYLNNNNFKSKRGGQWTSKLIHDIIRNPFYIGTYRYNLRESGRGPLKPESEWIVRENNHPAIIDKAQFDRCNKIMDQNGSSRDTSDLRARKYVHTFSGHLVCGKCGANMIASKDRARANGWRPSMYRCAQRSRMLDCDNSRTINESYIGPFIFNYIANLARVQKNFKNITTVEKLERELLKGETFDGVAGILPEGLNLTFQALSFRQVGNGTYIPDVDFLGDSDGASDRDQIELLKSEIEKSKNAVTRLTDVYLFDPDSMTKEEFATKKKELAKKIEGMERQLADLLDDSGNDDLADMSFIKKASAFLVAQRIVSKSFVDYVGMAQELDNEILKDFIDQIVDQIVVLDGRVQSITFINGLKHEFRYATPAELPVCQKCGGRIGSTCGCRTRTFDFSGKRYQRIKVGDPRDTLHGKKNPVCPECLVREGRWHHWNCKIETCPICGGRLAECEHGPNGKK

SEQ ID NO: 184 - protein, 531 aa, synthetic construct
MPNLRRIEAAVPAIREKKKVAAYARVSMQSERMLHSLSAQVSYYSGLIQKNPDWEYAGVYADDFISGTNTVKRDEFKRMLADCEAGKIDIILTKSISRFARNTVDLLETVRHLKDLGVEVQFEKERIRSMDGDGELMLTILASFAQEESRSISDNVKWGIRKRMQNGIPNGHFRIYGYRWESDELVIVPEEAEIVKRIFQNFLDGKSRLETERELAAEGITTRDGCRWADSNIKVVLTNVTYTGNLLLQKEFVADPISKQKKKNRGELPQYYVEDTHPAIIDKATFDFVQEEMARRREMGPLANKSLNTSCFTGKIKCPYCGQSYMHNKRTDRGDMEFWNCGSKKKKKKGTGCPVGGTINHKNMVKVCTEVLGLDEFDEAIFLEKVDHIDVPERYTLEFHMADGNVVTKDCLNTGHRDCWTPERRAEVSMKRRKNGTNPIGASCFTGKIKCVSCGCNFRKATRNCKDGSKVSHWRCAEHNGCDSPSLREDLLEQMAAEVLGLDAFDAAAFREKIDRVEVLSSSELRLVYSF

SEQ ID NO: 185 - protein, 480 aa, synthetic construct
MKFAIYVRVSTLEQAEEGYSIDEQIDKLRKYCEVKNWDIFKIYKDGGFSGSTTDRPGLSSLITDSKRKKFQGVLVYKLDRLSRSQKDTLYLIEDIFTANDISFVSLNENFDTSSAFGKAMIGILAVFAQLEREQIKERMVMGKVGRAKSGKAMSWSRVPFGYIYDNDTYIVHPIQAPIVKQIFDDYMSGISITKLKEKLNNEGHIGKEIDWSYRTIRQTLGNPIYAGINRYYGELFAGNHEGIITKDYFDKVQEELKIRQVAAYKKSNNPRPFQSKYMLSGIIRCGLCGSSLSLGMRAKRKDGSRHCYYSCYSKSKKKNSTMVKNPNGCTSPNYSMHELEKHVLSQIEKIRLNPDLINSLSANDSVIDFSSYNKRIDELDLSLEKIVNLFIDDAIPKDILESRMEKIKQEKDALENKIDSMKIKKPTVEPIEAKEILSKVADNIWNLSYDHQKSIVRELISKIVVYPDKLEIHWKFAINQ

SEQ ID NO: 186 - protein, 524 aa, synthetic construct
MKVADLYIRVSTDEQADKGYSQRDQEERLRKHCSSLNITIDKIIYEDHSAKTFERPEWKKYLFNIRKGRGSKQNKFLFFTKWDRFSRNTSEAYQMISNLNKLCITPQAIEQPLDLRVPENKLLLAIYLSTPEVENDRRALNVTYGMRRAIKEGRMMGIAPYGYINRCTEDGRKYVAVKEPEATNMIWAFKQVAKGHLPTAVILKEMNRREGRKLTKNSFMEGLRNIAYCGKLFLKAYNDEAEKIVEGKHEALISEELFMKVQRVLHRKSNKDDFLPAGRIINEERYPLRGLLLCPKCNKTLTASGAKGRSKHYYYYHCTTSCGFRHNSEIVNDLFVAELSKFRFSIGAEKILKTILEQNFSIVSNGLNDERKVLQNKLNAIEGRIDKARDMYLEDKLDEEDFRRIKMKYKVEIEDINFKLNSLKNSGHTDDVEKKMTQALNAIVNISERYNNASTIDKRAIVGLIYPEKLTFDGEYFQTTKINSLAGNIALINKELGNKKNRQRSEKTSNVGLVTSTGFKPVTF

SEQ ID NO: 187 - protein, 484 aa, synthetic construct
MNMRIAGYIRVSTEEQAEKGFSLDEQRDRLISYCKAMGWPAPTIYEDDGYSAKDLRRPELARLLSDVKTEKYTLIITTKLDRLSRRLFDILSVIDYLEKHNCSYVSASEAFDTTTPAGRMTLQMLGMVAEFERERISERVRDNMRSIARKGEKVISRPCFGYEVKNGSLEINLEESLAIHQMARWALEGRGAWEIAKRLNERGITTKDGNQWQDRVVRELLKRETLVGDFVYNRTYRKGTRILTRPEEEWIRIENHHEPILDRDTFDAIQKIFQSRKQSASRYVDETNYLLTGLLVCTHCGGKMVGRKDSKHGKNIYFRYVCNTYMKKGGCYFHHLLRDDLEFTVIGEIKKIAIADPNDLEITVAKTNSEKRADKASIQDRLRKLDLKAQRQIEAYEDDLITAHDLKKAKERIEKDRQHLLEQLKEMEKSEQENAGVIVQQKVKRLLDDVLSLDRMKSKNAIRQLIHHVNISNASEVVITWYAD

SEQ ID NO: 188 - protein, 562 aa, synthetic construct
MARKVAIYARVSTEHEAQISALENQVQYYDDILSRHADWTLVDRYIDEGITGTSIHKRESFMRMLKDAKEKKFDLIVTREVSRFARNTVDTLQQTRTLKTYGVEVWFTEDNIWTMNDEDGELRLSIMATLAQNESKKISQRVKAGQMISFKNGVLYGNGNILGYDRVGDKLVVNKEQADTVKRIFELYLAGNGVRKIQDIMEQEGRKTATGLTRWQSGNINRVLRNPFYCGRIVYRKQYVPDYLVQKKINNHGAVDKVYVEGSHEKLVSPEDFDRAQELREKHKSVKTDKNGKAIGQSPCKHLWGNKLVCTCGHAMNRRIAHKANDGTLSYIYQCYGQLRTGTPAGRLKKGLDIEGICDNSSFMEWKLEVQADFVFKKLLGNKEAIYKEAMAMAQDVAEVKAPERNDKERLEANNRQIEKLNRQLANLVDMCADGDISREVFRSKKKKLEDQISNLEKLNDECRQRVLELEDNGAKDRRIDSLSEFIKMTAFDARAKIPDTVIDNFVDQIVFDHGAFIWYLNPVFGNEVYKQDASDWKKKQHLQSLSDKCTLQACPSTGCNR

SEQ ID NO: 189 - protein, 552 aa, synthetic construct
MKAILLVRVSTKVQDFDEQEKEIYRMAVKDGYKPEDIISICEKESGIKLPEEERAGLNRMKELIESDNTINCVYCWEVSRIARKKKINFSVLDYLVERKVQLIVKNPSIRLLKDDGTVDEAADMVFTLFSQMAESEMRTKLARWKRTKDANRKQSIYTGGWLLYGYKVDNGRIVEDEKEASVVRKIFNMYLTGNYSYNSLAKELTEQGIIRKGSRTYACKFVSLTLRNIAYAGEPSSSSGLNKLKTEGNVYPPIVTIEMINKCKEIAKGNILLPKKKYDNYYFGKGLLRCPYCGSIMVAKKNNNTYHCQNCDKGIWVQINIVDSILWRVASGLYLSKLITGNTKDRIAYQKKLKEYDNKIATSEKNLKDIENRITKVEDSAYLDGTMSIDRAKGIIKQLGGKLADERKMLSQYYMEREQIQGLLIKVDEPKELDVSNITDDKLRFEIIHETIEYAFIDRINTIKCNISIYIPYNNEPLRFELHTKANKVFSLIDGYSKGEEIKCYERRFITPRNVEKSSEYNKKYCREHKAENARRQREYRARKKALKERGL

SEQ ID NO: 190 - protein, 568 aa, synthetic construct
MQSKKKQDKAGITALYCRLSRDDGVEGDSNSVANQKKLLKRFAKENGLTNTRYYVDDGYTGTNFERPGFQKMIEDIDLGYISTVIVKDLSRLGRRYDMVGYYMDTYFPDRDVRFIAVNDNIDSDEGESEIAPFKNVLNEFYARDISKKCRSSYRIRGSTGEPLAPPPYGYIKSPDNPKKWVIDPEAAQVVRDIFKMALEGKSNETIARILQERKVLIPMAYWQEKGIRKGGKVTQPNKYKWCKTTVTKILTQQEYCGDIINFKTYSKSYKNKKRYDNPKENWVIFKDVHEPIISRDDFELVQMLVVKTKRRAPKQENGEKNMFCDFLYCADCGSKLWYHTNTTNKEIHYFSCSNYKKDTRGNCETRHYIRADAIEQIVMLELKRLAKYLESHEEEFAKLLAEKTNADMLAEQKTLETELNRATARNEMLTSLFAKTYEDNVSGKLSDEMYMELSHKYEVERLELKTKIFEYKERLAKISEMEQNKDDFLKAVRKFMEMESLTAPMLRELIDHIDVYEKEGGKKNYTQRIVIYYRFVGYLELPSSDDENYKANTRKGVDVEYIPTVKSA

SEQ ID NO: 191 - protein, 529 aa, synthetic construct
MAKVRVIPSTLNPLTQSPISETKKKKVAAYARVSTDSDEQYTSYEMQVKYYKKFIQEHDGWIYINVYADEGITGTNTKKRDSFNQMIKDALDGKIDLIITKSISRFARNTLDTISITRKLKASGVEVFFEKEGLWTFDSKSELILTIMASIAQEESRSISANVTMGKRWGMQEGKVSFAYKNFLGYKKENGKIVIDEEQAVIVRRIYSMFLKEGKTCSGIAVQLKKEGILTPSGSSSNWQKNTVLSILTNEKYKGDALLQKTFTANFLEHNVKRNNGQLPQYYVENSHQAIINRYEWEQVQTELARRQEIGRNYSGAGAFASKLVCEDCSGFYGMKVWHSNSKFKKMILQCNNKFKKGKSRCQTPHLTEDEVKGMFIRAYNETMKDKTKVIEDTEAVIAMLTNTEEIDKRIILLTGEIEIVSELVKKLIRENSNAAQSQDDYQTKYNELSARYDKTKKALEKAMQDKAHKQGQGIKLQSFLESLKQKESVLDEWNEELWMVMVEKATVHRDKSITFKFYNGKETTIAAA

SEQ ID NO: 192 - protein, 542 aa, synthetic construct
MVQEKLRAVFYARVSTEEERQLNALEKQVAECKDAVLQKGWKLVDQYVDEGKSGTQIKRRDEYRRLFEDLENDKFDIVVIKSQDRLQRNTLDWYIWIDRLTTHGKRLYMYLEDTFYSPDNALISGIKAILAEEYSRELSKKINNSYKRRIEAAKNGEKISIVNNSRSLGYDKVNGELVINEKEAEVVRMIFNMYASGEGLRAISNTLYDMGYRNRSGNEIDPTTISRMLSSEKYKGVYVINQRHYDFDTKKTVLNPKSEWVHIPGAVPAIVEPELWDRVQEIKGSKVQSIKNEKRGRNCGKSIFSGKIYCAKCGAKYWRSLENGYVKFKCSSYSKYGKIPGKGCDNKSFSENALYSILQSLSEQIVEVNTAEVRKSLLNWLESLRERLRASQGDDTIKEEIRKQTARKEKLTDAYMDGIISKEDYSKRYKELEKTLEDLKDKLLTLEVNEDLQSIEEVIQNIDKEMEEYLQTQSFNESRVEFLNQHLTKVTVNKDSFLLEFDLIGGAILTGKDFYLFVDNPRWYSIQTDKRNSVDVGIKIAA

SEQ ID NO: 193 - protein, 548 aa, synthetic construct
MTIAWAYCRFSSDHQREESIDAQIRAIRDYCGRNRITLEKIYRDEARSATTDDRPSFQQMFSDIKEYPCDLVIVHKLDRFSRDRYDSAFYKRKLKERGIRLVSVLENIDGSPESIILESVLEGMSEYYSRNLAREVQKGKKETAYKCLHNGGVPPIGYQVDESGKYHVDPIESKWIIKAYEMKASGRSYMEIAAYLNGIGARTRRRQGFTKNSFHDLFKNEKYKGVYVYNRAAPKTAGKRNNHLSKSDEDIIRIEGGIPRIVSDELWNEVNMQMKDRTMNARHKAKRTYLLSGIIYCGECVSPMSGNARRAGRNKTEYITYDCNRRHRERTCRAKGINKKYIEDLVISHLENEFFTQENVLQLSQRIFNLQAQRKMEVTPELAALKAELAAKQKEMNNIIDSIKKGGYKDWMGDLGDEIDARIKYLEGKVQYSESIQERQILSQEQIYDYIMKDANLMEKSLEDLKQIVQTYVEKVVIFTEKIEIHLIINNHNPGGKSHPDCGYDGGSDGNRTHVRKHFHRSFSERSFCFKVSPQTSPKSRLYHQLSR

SEQ ID NO: 194 - protein, 484 aa, synthetic construct
MEILKYAVYVRVSTDRDEQVSSVENQIDICRYWLEKNGYEWDPNAVYFDDGISGTAWLERHAMQLILEKARRNELDTVVFKSIHRLARDLRDALEIKEILIGHGIRLVTIEENYDSLYEGGNDIKFEMFAMFAAQLPKTISVSVSAAMQAKARRGEFIGKPGLGYDVIDKKLVINEKEAEVVREIFDLSYKGYGFKKIANILNDKGTYTKFGQLWSHTTVGKVLKNQTYKGNLVLNSYKTVKVDGKKKRVYTPKERLTIIEDHYPAIVSKELWNAVNRDRESKKKTKQDTRNEFRGMMFCKHCGEPITAKYSGRYAKGSKKEWVYMKCSNYIRFNRCVNFDPVHYDDVREAIIYGLKQQEKQLEIHFNPKMHQKRNDKSTEIKKQIKLLKVKKEKLIDLYVEGLIDKEMFSKRDLNFENEIKEQELALLKLTDQNKRNKEEKKIKEAFSMLDEEKDMHEVFKTLIKKITLSKDKYIDIEYTFSL

SEQ ID NO: 195 - protein, 542 aa, synthetic construct
MKPKKYIAGLYFRLSQEDERQGESASIDNQRTMLRKYAEEHSFEIHDEYIDDGISGTTFQRPGVQRLLDDAKTGVINTIIVKDLSRFGRNYIEVGQYIDYVFPAFGIRFIAIQDNVDTENRDSGSMEMMPIMNVFNEWHAANTSKKIRAVRRANAKEGIYTAKKASYGYKMGTDKKRAPVIDEETAPIVRRIFEMYASGLSPNKISEVLNLEGIPSPATYAYTHNGQKPKPNVMGLWTAVTIREMLNKIIYIGHMPQLRWTSTSYKNHKRFRKDENEWSVVYNNHEPIISQELWDRVQERKKSVATGRKTIIGFTHPLSGFLFCADCGGKMKLCTSIGRNSKRRFYFDCGYHLRYGKAYCFSHYIAASVLEEIVLDDIRTMAKRIVLDEKSIREEFVRRNAELADATVKKNQKELQSKQKRAEELTRLIQTAYEDRVKGKIPEDICIGFIEKYSLEQKSIATEIEDIQKRLIATETTRNSADDFIRDIKKYLNAPELSREMCYELIDRIIIGGSQSVTGKECEIEIVYKIDIVSVLRHKVKK

SEQ ID NO: 196 - protein, 504 aa, synthetic construct
MYLRKSRQDDPNETVEQVLAKHENILQEWCQREIGSQIPEKNIYREIVSGESIDARHEIKAVLARIEDPAVAGVVCMEPSRLSRGDLADCSRIIDSFRFSRSLVATPYMVYDLENKMERKFFKDELLRGNDFLEYTKEILFRGRVAAVKRGCYIGNTPPYGYNKVKIGKDHTLEINEAEAAAVRLVFKWYTQEQLTPLRIADRLNEMGVKPARIDKWKKDTIRVMLRNPHYAGYVAFNQKKETQVLENGRIVTKTLAQPEKDIIIAEGKHTGIISRDEWKAAQALVARNPRIDPSKELVNPLAGLLVCKKCGNRMIHHPYKHAADRIECRTRPRCYKSAKREDIVESLLVILEKEHLPQLLARIKNGDGDARKIQQRLLAKLEKQMEDYRAQEERQYDLLETNPNYPQEVFERRNKALREKMDECQAAIYKTKSALPQSVDYAERVAALRHAIRLLRDDTATPEAQNKALKMVIDHIDYSAQESDPTNRQRNGVDFDLAVFMRL

SEQ ID NO: 197 - protein, 509 aa, synthetic construct
MPFDDYRESVAIYLRKSRMDPDSENIDETLARHEDTLLKLANQMDLNIVEIYKEVVSGDGLFTRPEMCRLLQDVEQGNYSAVLCMEIDRLGRSSQKDGGIILETFKDNDVRIITTSKTYDLNDDVDEQVVEMHSFIARQELKAIRRRLHKGIEKTVEMGYHIGEPPYGYRRTYIDKRPTLKICEEEANVIRMVFDMYVNQHMGTQTIADNLNKMGYTPRKNDHFSRTTIQFYLQNQTYIGKIVWNRRKHIKKKFPTDKHRTVLNPEEKWIVSEGKHPAIISIELFEQAQEIHQLRTHPPTAHGIIRNPFAGLIYCKNCGELMQRQFSKISGNRLLCLHPGCIRSIRTMFVEQVILDAVKDILKNSSSAVKNSVQKTNNLQIEMLDRTIKDINTKIKQLNSQKSKLHDLLEQGVYDVDTFLERSNAIAEKIQNSKSVLEQHENKLNSIKSVPTVQEVLPTLRYLIDEYDNLSAGEKNVIFKKLIIRMVYNRTKEHKGNDFDLDIEWRFTM

SEQ ID NO: 198 - protein, 613 aa, synthetic construct
MYVMSTEEEKQKVRERQKGYRTDEIVVIKAAEPVSLRDTRTELRVCAYCRVSTDNIEQTSSFELQKNYYEEYIAKHDNWKMVDIFADEGISGTSMAKREGFKRMIRECLAGKIDLIVTKSVSRFSRNVVDCIDTIRKLKTMNPPVRVFFESEGIDTGDSSSDVMLNILAIFAQEESHTKSEIMQWSVDNRFARGNFLTPRLFGYNIDPDKPDRYIINEEEAKVVKLVYSMYVTGYSPNEIAVTMTKLNYVSNIKGDRKWTAGVVNNILNNERRCGMIIARKTYTPDFTTHKSRKNINQRNKYQMNDHHEGIVAVELYREALRIKEMRKHRNYDLIPSLSVIKEGALKGFVPVSVKYSGFTYNNYLFASEFAYTKDKNGNIIKDKIKPIYKNDLSNFDLSDFEKVDSQLFSTVSQPMCWFKYNQMYFNRACIDKMKNTQYIELLFEPTEKLLAIRSCNEYDDYAIKWGVEKNDKLSPITKTSSGISHVLFDCMEWNEDYRYKMIGVRRTKNNDSIVIFDLNNAEAICREELESENPDEVISKITSYYDEYLSDHFGNNFYDDIYTMRLYMMDILKKWNLGAELVPIEDPKEWLIEAKKCVEEHLSKLMEEQLDV

SEQ ID NO: 199 - protein, 517 aa, synthetic construct
MANVVVYARYSSDKQTEQSIEGQIRVCKEYAERNNLNIIDYYIDRAISGTIDNRPDFQRMIRDSKKKQFEYVLVYKLDRFARSRRDSANYKFKLRTNGVKVISAMEQIGDNPESIILEAVLEAQAEYYSLDLAQKVKRGMHESIYKKQFIGGTIPYGYKVENLKIYVNKKEAEVLKYVFTSYADGVPKKEIIRELNSKGIKNRKGNNFTSNSFQSVLQNRKYIGEYIFENEIINDYYPTIIDKITFEKVQKRLKRNKRIAASSKANIKFLLTGKAFCGHCGNTMVGTSGTSRNGNTHYYYACSTQYKKHQCNKKAEKKEFLEYYICEQTLKYVLNPEKAKLIAEKVVNEYNKLYNNDNIKELELKLSKIETEINKIVDSFIDAESQAIRKKLNVKIANLDLQASEIKNQIAKDKLSCINKLTTKEVISWIKIFTNGDINDGNFRERLIDTFINSIFIYDDKIVIYYNLNERDQLTHIEKKENEHATGRQTDACSNSIDNGSQHGVRTRECRLERAMC

SEQ ID NO: 200 - protein, 553 aa, synthetic construct
MNNSKRIYRAAIYVRLSKEDGDLDDVRKAESNSISNQKSLILNYLKDKEDIEIVSIREDDGYSGATFDRPAFKLMMQDVKDGIIDCIVVKDLSRFAREYIDAGRYIERMFPAMGIRFIAINDAYDSADTQAQGNEIIIPFKNLINDAYCRDISIKIRSHLETKRQNGEFVGNYCVYGYKKSEIDHNVIVPDEYAGPVVQDIFHWIKNGMSLDAISDKLNALGILSPMAYKLSKGENYKTAFQKKDELLWTPVAVRRIATNIIYTGTLVQGKITTPNHKVKTRILKPQEKWAVCHNNHEALVSLRTFQIVQRLLSVDMRMAPGKDSIYLLSGIAVCADCGALMTRKVSTVNGKKYVYYMCSNNKKNKKCSSHRIKEADLESRVFDTLREMTATLLDADEVIKEAGNNANFRIDQKKTKERISAKEKEITKYNQMLVSLYEDYKDGIVDKSDFAIIKESFEVKRSEAEKAIDRLQKEAENIAAGIERDTEWLEEHRKWKTMPSLTRNVVVSLIQSVKVYEGGDIEIVLDCDDEYRKIVARAGELEKQQDTERLVV

SEQ ID NO: 201 - protein, 522 aa, synthetic construct
MMNTSRVAIYCRLSEEDRNKQSETDDSNSIQNQKSMLLQYALEQGWEVYNIYSDDDYTGSDRRRPEFNKLLNDAKDHKFDIVLCKTQSRFTRELELVEKYIHGLFPIWGIRFISIVDNADTANKGNKKSRQINGLVNEWYLEDMSENIKSVLTDLRKNGRHIGAFALFGYKKDPNIKGHLIIDEEAAQVVREVFTLFSQGYGKTAIARMLNDRGIPNPTEYKRLHGLRCRTPKGKNSTLWKYYAISDMLVNEVYIGNMVQGKYGSVSYKTKQNKPRPKSEWYIVEGTHEPIIDRELWDKVQVLIAQKAKPFTAGTIGLFAKKARCMNCGYVMRSNKQSDGRRYLGCSSRHVSKNACVGSFISVPKLEQAVITEINKLSAAYLDKDELEQSVIFNSDVRGKQKALKEEIAAYQSKIGEYTKGIRELYLDKVKGILSEQDYLDLSKDFSTQKERLEKLVIDTQKQLDIMERKIQAGDNKRQLIEQYTNLEHLNREIVDKLIDYIEVGKKDPVTKEVPIEIHWNF

SEQ ID NO: 202 - protein, 596 aa, synthetic construct
MAVRKTKKQDPSEQVGVIYARYSSHAQRDCSIEQQVEAATAHAKRLGIEIRQIYSDRAVSGKTDKRPAFQKMLRDAEKGGFQYVIAWKSNRIGRNMLQAMVNEERLSEMGVRCLYVEEDFDDNAAGRFALRNMMNVNQFYIENMAEDIRRGLRDSAQQCRALGFPPLGYKKGPDGKFAIDEPNAEIVREIFRRVLTGEAQIDIINDLNRRGLKTSRGFSWSRNSLQNLLKNDKYIGYYRYMDIEIKGGIPRILSDELFYQVQEALKMKPNPVKNRRRSPYGEYLLTGKLFCGKCGAPMVGKSGTGKMGKLYFYYTCKNREDTKSCDKENVRRDEIEDYVARAIKDYALTDEVIDWIANGIAAWSEKTEREAGLDIIESQIEDNQKALNNVMRAIEMGIISETTQTRLKELEKDKRELNAKLITARAEIITVTKPEMIAGLRTFREGDFDNQDFRRSLFDTFLKAVYIYDDDIRIVFSFAGDSKNTVTVPLKDIAEDEPGSHSGPSDEADYYRGGVFAQSPVSSTAHFDTEKQIFLYQSKTDSRPPASADGRESVLYYLFRQVCTENLAAFSRLTLLPSQRESDPGTHPPRSAHRCS

SEQ ID NO: 203 - protein, 477 aa, synthetic construct
MKYAAAYIRVSDDRQDEYSPDSQLKLIREYAGRNGYCVPDEYVFYDDGISGRSVKKRKAFNDMIAFAKSKEHPFQAILVWKFSRFARNQEESIVYKSMLRRIGVSVISISETIDDSPFAPLIERIIEFMDEYYSTRLSQEVTRGMTEKASRGEAMSAGAFGYDLQNKVFTPNEDAPTVRYIFNAFLSGKGYRKIAMELNAMGVKTYRGNPPDNRFVEYILMNPVYAGKIRWSTDGRASRDRYKGDNSKVMYVDGKHQPIIDQDTFDQAQEKIMEQKRRYGKWQRKEQPVTFMLKGLLRCDTCCATLTYIAARDPAVQCHNYARGKCKVSHYLSIRKANAAVIAAIEKSLETLEFNVLPKEQLQNEVVDYSLLIRKEEDKIKRASDAYDAGYDTLEEYGRKKRAFQNKIEALKAEQAKVEKSQSGEIPPQFVQQASFVLDLIKSPETAESVKNEALRSIVDHITFKKPDNTLEIFYYI

SEQ ID NO: 204 - protein, 498 aa, synthetic construct
MTAIYARRSVYNADSISIETQIEACKNIVKGESIQIYKDNGFSGKDTDRPDFKRLMTDIKAGVINKVVVYKLDRISRSVLDVAELIQELEKLHVDFVSATENYETTTPMGKAMLNMSATFAQLERENIAARVKGAYISRSHKGFYMGGRVPYGFELTPTVICGVNTKKYIIEPIKAHTIQRMYEIYGQPNTSLGDVRRQLISEGIIRNDGSNWTTAKLSDLMRNPVYVKADSKVYEFFQNERANIVSPLDEFNGINGCYLYTGENTNRKTWDLTNQTLVVAPHEGFISSDLWLYCRKKLLGNHQIKWTKAKNSWLSGKVKCGHCGHAMVIRKANQKRTRYFVCSGRSDYNCKKPMPTIYADEFENLIKMYISRKLDDLNLKPNAKKSECDLQIHKLEAEIAGIDADIRKLVDMLMQVDEASMKYIQEKIKDLDRDKQNKLDEIQKLKSNSTNNLNLGELHNVMTLWDKLSFDDKRGVAELLIEKITVYPQSVEIIWKV

SEQ ID NO: 205 - protein, 562 aa, synthetic construct
MRNQSAINKIPFTEGDETALYTRLSRDDELTGESNSIKNQRELLLQYAKSKGYANVQVYVDDGYSGTNFNRPDFKRMMERVEAGLIKRVIVKDMSRFGRNYLEVGYYTEVIFPEYDVQFIAVNDNVDSEVQTDNDFTPFRNIMNEWYAKDISKKMKSAIKAKGNSGKHTNPLPPYGYIKDPNDKNKWLIDEEAATVVRRIFGLCMQGFGPSQISRILTDEGVDTPKIHAKKMGRKVTIRANEMPEAWADQTVGAILGYWEYLGWTVNFKTKKKSFKSKKVILLPSDEWQVFKDTQEPIIDEETFWAVQKIREGKRRLDSLGEPNALSGMLFCGDCGHRLYLRRQRNPHQKDYFVCSVYRKKRKYFCTSHFIRLEDIEKILLRDLRQVTAFAREHESEFLDLAKKRSLRETEKLRAENKASLDKAVRRIAEIDGIIQKLYENNVSGKISDERFAKMAATYEAEQDGLQQTAQRLKDEISAVREEGESVDRFMKLVNKYSDITELNAEIIRTFVEKIIVYEAEKNDGIKTQRVKIVYNCVGTVSVPNADNEPVKTDKTKIIEVA

SEQ ID NO: 206 - protein, 443 aa, synthetic construct
MTVAIYCRISMDRTGEGAGVERQLKDCRALAERLGLSVSEVYTDNDTSATSGVVRPRFEAMLSARPSAIIAWHQDRLLRLTSDLEKVIALDVPVYTVTAGTLDLSTPAGRAVARTVAAWSTYETEQKATRQRAANVQRAERGVYQFSRRPYGYERAGGKVAIVPAEAEIVREGFRRYLNGESYYVIANDWNDRGVPTFSGPWSMARVRSMLRNPAYVGERHYKGQFSAQGDWEPIIDRDTWDAYLRMRSRRKTPHDWSNQTKHLLSGIIACGICGEPMLARPDRGRRVYACTTSWCVSRGADDVEAVVEGVLIARLQDPAIVAQLKMEPNTGPVEEELAELRGRRDDLAAMLAEGLLAREAVTEQARTLKGRIASLERRLEAAREASPITDLALAESVPARWAELPLPTKRNVIQSLLHVRVMKVRPGRRPFDPESVQIDWLS

SEQ ID NO: 207 - protein, 497 aa, synthetic construct
MEVTKIPMQKAQKPKIGVYVRVSTKKEEQEDSFAFQSQYWNKRFENDSSIEYVGLFADEGISGKSMKNRKGLNSLLEKAKKGEIDKIYTKSISRFARNYTDLLTVVHELRDLGVPIIFEKENIDTLDPKCNLVLTIMSSLAEQELISMSQNQKWAARKRFAEGSIELSRILGYEYKKGQLIIIPEEAAIVRRIYELYLQGNGVEKISVILKNEGCLTVHGSTDWKKATLATILKNEKYTGNSLLQKNVYDLRVKKKNKGEAPQYYVENSHEAIISMEDFQKVQEMMREKAEKFHPNGLDYSIRKYPLSGKIKCGICGSRYKRKTAAKGTTYECIKWVCLEKEIKGKKTCDSHEIKNVVLEKLLTEAYNECLDKNFEYSGLAEEYKKLKSLLETERELKALHVKGYISDVKYKTESTKILDEIKIREQTIQTLQSNKMGEKQFTKSAVFTKDMADFLIQATVKDWKITFEFANGIKITKSYTNGRAGNVNGKLCKRKA

SEQ ID NO: 208 - protein, 426 aa, synthetic construct
MIAIYARQSVERPDSISIAMQVEHCRRICPAEAEVRVFTDRGFTGTNTHRPAFREMLEAVEQGEVKSVYVYKLDRISRSLCDFAAMMQTFRRRNVTLHSVRESFDTRTEIGGMLLNLLMMFAELEQKTIAGRVRDNYYARAAQQLALGGTPPYGYTGKNVRISNHTATILEVQPDEAAQVQAFYTGYGIAGQNVEQLVQAANRSGSRTRNGANWSNSAVLRILRSPVYVRGDLRSAVFLQEQGVELTHPLEQYCQGNGYLVYGSPAARHGAKLTRLQGEHMAAGLHPGIVDSDLWLSVQERLAARGGCTNRGTGHRSWLQGLAVCGLCGAHCYARNNGKGAAYTYFVCRGKRQGICPGIPGLRTQWVEDAVSPILAQQAEQLLPYAETTPRLDPAAVALEELEQRMRCLAAELSQPRRRQIFSGKS

SEQ ID NO: 209 - protein, 490 aa, synthetic construct
MEKAVAYIRVSTKSDFQLHSYEYQLEYWKNKIESEDNKILVSVYQDYGISGRSIHKRPQLLKLLEDAKKHEFSIVYTKSVSRFARNTTELLEMVRTLREENVKVIFEKENIDTFDPSAELYLTIAASVAENDLKIYSENQRWSYKERFKKGYIWANKMLGYRMNNETNTLEVVEDEAKIVKKIFELYISGYGITKICKILQSENLINTKGTMTWSKSAIRYIISNEKYKGCSLNQKSVYVNGIKQLNKGYEKQYYIEDSHKAIISKEVFDKVQKIIYERASKKQLGRGIIPPYPFTGKIYCGICGHKYHHKFNNTNKSWRVAIWSCKNKQDNGKTVCDSTDIKETVLKEKFIEAYNEFITTNRFTSEEQVLQDKVKILIEEETELKKLKINRMIENIDYDKEIKEIHQEIEEINNALLKYSLKNITKKDLQTISIFDEDKVDKFINKVIITRYKVKFIFINGIEIEKEYSNGQSGNKKGWNLNKQRKEQN

SEQ ID NO: 210 - protein, 548 aa, synthetic construct
MSKRVAIYCRVSTVEQAEEGYSVDEQRRRCIEYCEKEGHEVFKVYEDRGISGKNISGRPGLKDLLQDANAGKFDLVIVWKLNRISRKLIDILNIVDTLDKNKIAFRSLTESFETETPAGKLQLNIMGAIGEFERGTIAENVKMGMIARAREGKWNGGKVLGYDIVEIPSEGKKRKETKLVVNEKEAMTVRRIFELYSTGHGYKATVSRVNAEGHRSKRGNAFATATIKEILKNPVYIGKIRYNLRQDWNEKRRKNINPDPILVDGEHEAIIDTETWEKVQIILKDRSKTHNRVYDSELILSGLLKCPVCGASMTISRSTRKRKDGTKVVNEYYACGNWKNKGTSVCNSNSVRAEVADEVVINKLIETVNNELLLKKVINNINKNKSSKLKPKLDEMNLVNKEIDKLNGKKNSSIELFEDGILTKSELSERVKKLNEEIDTLKFRLDELKQDVMLAEGEPVPFELVSQVMKKFGQVFKESSTRQQKKQLLNLLVSKITIDKSKEIDTIELQINEDVIRYLMKEGSSEEDEDPSFFHVSMFNCTCLKFVI

SEQ ID NO: 211 - protein, 496 aa, synthetic construct
MKKTVAYYRSSSKKQEHSVRMQQYYAKAYCRDHYLKLDYEYEDPYVSARIIHMNQRPGLRKLLEAIQNDEIEHLILYKRDRLARNVIEYMEIYELLQEKRIKVHFTTVGEPMMEYTPMNRYLEVIMAGFAQHEGEQINKRFDAMRQSKFDAGKAVSRLPYGFQNNKKKKEIEIVKDEMDIVMFIFNEFLNDTCTSLQQIKDRLDGKGFKKRKGLPWELQDIRRTLENSFYMGVYSIRLKGVQQEHQLEGTMPIEPHQWEAAQEKLNQIVNKRGSIKMKKEIAKEDILYRMEGLLQCSYCKKQLEGVVKRRGDTFLIGYRCKEHRLYIDKEYIEEKAFEKMKYFFLNLQVKEFDGLFQRYYRQNVKEIERIIQGHSQRLDQKKKTVHTKVQRWLTEKKSERLHKELLGSYQHFQEQRHIKEELELKLNALKKVPCVVKDLEDNLHKQLVLDSLPDYKSMELFQDLIFTVIVDKHGYEIIFKHPFLHYQEVHTCEDNS

SEQ ID NO: 212 - protein, 550 aa, synthetic construct; identical to SEQ ID NO: 7

SEQ ID NO: 213 - protein, 553 aa, synthetic construct
MTLTMPMQDTDTSPLLTAVTYQRVSTKEQATKGGRDEGFSIPAQRQANARKAEDLGARIVAEFVDAGESARSADRPDLQRMLEYIATHQVIYCIVHKVDRLARNRLDDVEIHRRLVEAGVTLVSATENIDETPSGMLLHGIMSSIAEFYSKNLASEVTKGLNQKFETGGTPMRAPIGYLNVRKRDEQGREYRTVEIDTERAPLVRWVFEQYATGDHTVVSLLAEATARGLTTVPTPKRPSGPVGRSTFFSMLRNPYYIGIVRYKGAEQSGTHEPLVDVETWQQVQRLLDSRKIADERRRTHDHYLKGSLFCGQCGSRLQLDYPANKQGVRYAYYVCSGRASKRKNCTRRAVPVGIAEQLVADCYRDISITEEQYAALAAQVEAAFDERLASRSQELAELTENRKRLQNESDKLLAAHFADAIDLETLKRHQDRIRAGLADIDRRLASEHDQHEGSRKHLSTALSLLVDCATLYARTDDQGKRLANQALTNGIEISEDERATIRLAEPFAALAPTTASTDVRCSSTSEIVELRGLEPLTPCMPCRCATSCATAP

SEQ ID NO: 214 - protein, 568 aa, synthetic construct
MARKSRKQIAVEEPVIEPVSSEVFSTAIYARLSVENSGKSEKVDVIANQIEICKSYIAERPYLNLIDTYVDNGRTGTVFDRPEFNRLMNDIRTGRIKCLVVRDLSRFGRDYIEAGTYLERVFPQIGLRFIAIKENYDNFDTDGSGESLIIPLQNMINTLYSKDISRKVSTALKAQMESGEFKKRNLPYGYRWDEEHSNMVFDEETAPIVQKIFQWKIEGLSLPAIADRLDAMNAPNPEFQKYQVGVRTGNATAKKIWNKSSLTTILDNPHYVGDTVLGRTLNAIYKGVKNQHIDREEWIVFPNTHEAIISREDFQKVQELRDAAARTRIEKMERTEKIRATLINLFEDKIVCADCGRKLYFHRKRVDKRKDGAWYAFYECSSSVKRGNLCTPHYTRQDKLEADVLAAIQLQVKAALNYDKLLAKLRNSEGERSIRDQQNALITSLNLKLSGISKKRTRLYEDFTEGILDEEEYAFAKKAYDEQYVDLSRRLDEAVQRKVKFAEAMSEDNKWLTLMKSVSGATMLSHELVDESVELVKVHEDGSIELVMKYGDIYALTVQSIKEVQEAM

SEQ ID NO: 215 - protein, 608 aa, synthetic construct
MSTGTDFLANLQKKTVKNTVQQKQQKRVNASAVDVSALLEAALGKKKPVEAVADVRQSTDAATASFLPLADTHQGRSTQQKPKNASDKKQTPQKSKDIVDAGITALIQKALDAKKVMAEPDIAERLQSSMESEFMKLFTPEEPQDNKFVSTATFRATKKKAGTLNVAAYIRVSTDMSDQENSYETQEKYFNQLIENNPAWNAVGVYSDYGISGTSKEKRTGFRRLMRHCKDGKIDRIVCKSISRFARNTADFMSALDVLHDCGVTILFEKENLDTADPTSDFILTTLAAIAQEESRSISSNIRLGQKMRFPKGDVPNKIMYGYRYNGKMVTSESGYEYKDIEIVEEEARVVRRIFHEVVEGKAYTEIARGLNMDKIPAPVTDAVRVRKKKSKKGQLNSDLLDGWTGGNITRIVRAERYMGAVLIQKKFTSDYLTHEVRDNKGEVPQYFVRNHHPAIVDEDLFEKAQEVVKVNSDLYNRTRSGKKPRAFSQKLICGECGRFFHVTNGNGNYPIWRCPTSSRTTGNRICHAEKVYEEQVVRAFRKAVLERFRLTLKPIHDNVAVADIMSGRFKEQYDNFTPEADSFCKPDACTAGEHSEAGFYGTRPCFL

SEQ ID NO: 216 - protein, 528 aa, synthetic construct
MSNYRSALYARVSTQNEEQDTSYHNQQKIKVEGYDIVKTYADRGSGTQVYNRENFKKLLYDCGIDLEKIRNTKTYNFIASDREPLYEAIVVSHTSRFLRNQVMMKTCINALRKKNVEIYFADLGKSSLDKDIDFVMNILFLLDEQESLNTSQKVRRGLERARREKQYIQVASIFGYNYIKEENRLIINEPEAEVVRKIYSMYLEGNGYRKIYDYLQEYYPQYPKKLSHIAYILRNEKYAGYNAYGKWSVNKIEGYKKRNKEYEIFKSDRIEPIVSYEDWCKVQEIISGKKLHTRGLKANTYPLSRKIVCDVCGSTYYRQLEVKGNYSRVYWICREKKQYGAKNCHSAPISEKKLIELIMSEDYGIKSFIRTIELQVNCVLNNMEEVDTSEIEEKLKQVKVKQERMFDSYIEGVTPKDIYNRKQLQLNSEENILNEQLSSLKDKNRAIEDIKNISETYKEKLDNYYKLMQEGKYDEVYNDINKIVIGVWLKQINDDGEVKVIPMLKELKFKGFESLDKLFEGSILIKNF

SEQ ID NO: 217 - protein, 524 aa, synthetic construct
MGDKMKRVYCLYRVSTKGQVDKDDIPMQKTSCREFAERNGWTILKEFQEKGVSGFKVSASDRDAIQDLKAAAEKKEFDVLLVFMFDRIGRIDDETPFVVEWFIKHGIEVWSVNEGEQRMDNHVDKLMNYIRFWQANGESQKTSARVKTRLNQMTLDGKFTGGIAPFGYKLIKSGEINKKGKELMDIVIDDDEAPIVKKIFEMTVKEGYGSYRMADYLNSHGIRTHNNSKFQCNTVNRILKNRLYCGYLVSGGVESPYIERLHIIDENIFDQAQFILRQRSSKNEEKQQIARTTKGSTLLSGNIYCAHCGQKMVSTSYIDRYDRADGSQSRVRRQRYICTNKAMKRGACDGQSAYVAHKIDGAVLATLKDYLAKIKSTPKDIALEKRYKSEISEYRRKQTKLEKEIEKLKRQVVELSAEIGRSLLGESRFTPDILSASIDNTNDLLHKKEFELSDIKFKLANQQNAMGRLDFYYSQFRTWADEFDNSTMEQKKMIACQLIREVKVSRGYELEIIFDLNYEQFLSL

SEQ ID NO: 218 - protein, 507 aa, synthetic construct
MKEYKAAIYLRLSKEDIEKNNSIDMQREITTKYAKNHNYKIVNEYVDNGYSGILNSRPELDKMIRDITLGKINMLIVKDMSRLTRDKNLTSYFTDIFFPDNDVRLISVTEYVDTGERYEIDDAVALRGIVNQSYLEDISKKIKAVKTNLKKQGKFIESSVAYGYKKDSLDKRKIVIDEKVSSNIIEIFNLYLDGIGPVEIANKLNKRNIETPSQYLNLKHQAKYWTKSMIARILDNPIYCGRLVINKYYSDFKLKKIIANRKGNYEYISNTHQPIIAPKIFDKVQEMKKGTTKDNQKEYVFLLRDLVYCKNCGRKMMYKNSNPMRIDKNGKITGTKNELGYFICAEHYRHKDVCNEWIKIKENTLEEIVLKQISDRLKKLQLIKYANDVKAYKEIMNPEASECKKIKNEITRREADFKILYSKKVEEIISEDEFIREYNLYKQKTKELKDKLDRLEESKKSYNSKNDVEKLIIEFSETKKFDNKILKKLVEKIEIGKNEEVNIILKV

SEQ ID NO: 219 - protein, 458 aa, synthetic construct
MNKVIRCACYVRVSTDNQLENYSIKEQTERLTAFCKAKDYLIVKFYTDGAFSGGSINRPALQQMLGDIEKGLIDAVIVYKLDRLSREQKDTLMLIEDKFLANNVDFISLCENFDTSTPFGLAMIGILSAFSQLEKNQITERFTMGRIGRAKNGLFHGGSMAPTGYDYIDGQLIINEYEALQVRDLYTRFSKGYSLHNCWQYMQKQYHTKYGGWKSETLVRNVLKNEIYIGKVKFNGQSYPGIHEPIIPEELFQTVQDIFEHSRRDMPSFKRSPFKANTLLSGLIYCGKCGARCHGEHGNYTCYSRSKGDKRQIKDPNCKNKKWKIEELDVLVIKYVSELDFEETEPVEVPAQTKVDFGKRISEIEKQLSKLIDLYQISDISFETISEKIEKLSKEKNALIEESEKKPPEQTSNADRLKFQERFLALLDNGPLPEKRACLAQLIERITITDEDIEITLK

SEQ ID NO: 220 - protein, 620 aa, synthetic construct
MKFNSSKPQVYSYRRFSSPLQEKGTSLVRQSKLIKEVAEKFNLEVNDSLVMTDRGLSAFHAEHKSRGELGLFLSAIKEGLVKPGSVLIVESLDRLSREDAMTASSDLNNLINHGITIHTAMDGRTYSSETMANDPMNILWATIVMIKANEESMKKFERSVGFIQEQVSNFYENGLGDVAGAIPFWIKRKARENVKIKTGFEFNENEETIRLIVDMYLNQGRGLRPISRYLYEKRIKSPKGHDVWGVSTLSSVLENEALCGRKVFKLKVKKKYIDEYDNFELKDYYPAIMSEDDFDKMQAIKKRKAGGGKGDKSNRGGLVYLLTDYGKKSVCAKCGSGIGSQPQQQKNRIRRRLHCYKHKETANCCKSIIQDYLEDAFLVSVSRHIDYSLINKDIDATNVVLIEERLEAIDGELENAMDLIITVKDPKMKIILNKKYERLECEKMELEKQKNELKEFKVSEDDIKTFITTVGKARDYKDNESRKIIKNILSQCIKKLSVHLDKKRLSYYGYPNICNNALVNVIDVEFYSEKNLSIFVCSETNILLFTRIDNEFSNDAMGSYTEDELMIWNNEGKEALDNVIKNNIVDNHNTSSPENLWFGSDVASMIFEAMLDELDELDEE

SEQ ID NO: 221 - protein, 554 aa, synthetic construct
MMKDNKKIYRTAVYLRLSKGDSDVDGCTKSESNSITNQRMICENFLKKNPDLKFAGFYIDDGFTGTNFDRPEMKRMLDDVDAGLIDCIVVKDLSRFGRERIETGTYIARTFKEKGIRFIAINDHYDTLTADGSETHIVMPIKALTNDNFSRDISTKVRSSQEIKMEKGDFIGAFAMYGYRKSLENKNVLIPDEYAAGIVKEIFADRLKGLSASAIAQKLNDAGILSPAEYKKKQGQKYSTSFQGAGISRWSAQTVIRILKDEVYTGVMAQGKRVKVSYKVKKEIRRPKEEWVRVENTHQAIVDQRTFDSVQMLLQRDTIRVADRKEPYLYSGLIYCADCGMSMIRRSDTYGKGRKVVNYICSNYNRNRQCNRHTIRESELTESILETLRSWIEIVADADRLAQRLNDMTLDYDSALEHDREIAELRKELLKYDTLKSSLYQDLKDGLINETQFNRYREEYTNRGIKVRDSIAEQERIIRDIYDKGISCGMDLDMLREKLNIGQIDRVLLVTLVDRILIHKNGDIEVVLKMKDEIGKVKILAEMAGFEMTGEVVG

SEQ ID NO: 222 - protein, 477 aa, synthetic construct
MKIAAAYIRVSTDDQIEYSPDSQRKAILDYAKRNDYIVPQEYIFVDEGISGRSTKRPAFQQMIGTAKQKSHPFDAILVWKFSRFARNREDSVVYKSMLRKQCGVEVLSISEQIGEDKTSILIEALLEAMDEYYSINLSEEVVRGMSEKARRGGTLGRAPFGYTAKNGELLPNNDAKTVQWIFNAFLNGTGMRTIAAQLNSSGIRTTYGKPWENRTVEYVLRNIAYVGHQHWTPGGTKDMKHAEKIKGNTIVKNNAHTAIVSEEQFAAVQEKIAENKRKYKKHEQPGVGTPFLGKGLLRCSDCGGALCMLGRGDGIQCHNYAHGKCSVSHYIKLEYIDKMIVDKIKSDVEAQNFRTILIPESTAENQEIQDNKRALERARKKLARVKEAYENGIDTIEEYKQNKTRIQKEIEELEEKPALPKETQESAAEKLRQRILSNVALLESDAPAGLKNDILHTFVSRIVFDRKNTRVEVDYHG

SEQ ID NO: 223 - protein, 489 aa, synthetic construct
MAKDILNMKSACAYIRVSTDKQEELSPDAQKRLLIDFAKKNNMSLLASNIYLDNGISGKKADKRPEFMKMIGMAKSKEHPFDVILVWKFSRFARNQEESIVYKSLLKKNHVEVVSVSEPLVDGPFGTLIERIIEWMDEYYSIRLSGEVLRGMTEKALRGGYQSSLPLGYRMNKDTGIPYISDDEAIIVKRIYKDYIAGHSYLEIARELNSLGYRTKRGSTYEGRTVEYILSNPFYYGAVRWNRQKHDDHTIKSVSDWIIAEGKHESLIDKETWDEVQHLIALRSRPYKARAAGHMKHWLGGIVKCSDCGASLMAGLNATRYQCGNYSKGKCSHSHYIKTVALEQAVYEAFERALNGSVELHYELKKGSNEPDTDDRSVILSQLSKLEDKEARIKQAYRDGIDTLEEYKENKQLLKDERAALEKQLEAFNNTSSTDSNAAMLKSISTVYDIIKDTSNNTLTRANAIRSVVDHMVYDKENDKLEVYFFLQK

SEQ ID NO: 224 - protein, 500 aa, synthetic construct
MNEGFDIKYVALYLRKSRGEGEQDLENHRYMLVNMCKENNWRYLEYKEIASSETIEYRPEFKKLLKDVQEGLFDAVLVVDYQRLGRGEIEDQGLIKRVFKDSRTYIVTPEKIYNLVDDTDDLLVDVSGLLARQEFKSIKRNLQRGKKIGAKLGRWTNGTPPFPYRYEASIKNIVVDEEKNKIYQEMKNMILNEHPCYEVCWYLNNRGVKSPRGGIWHENTVRRIMLDETHLGKKITNKTEGSAHKNKKTKPLRQLPREEWDIVENSHEAVKTQEEHEQILTIFSKRKIVPHRSRSGTYILSGIVYCSKCGKSMQFTNKETKNGNVAYIRKCQKSDPYGNRCENRGIIANAIYDAINIEVQAYESQLLKHEEYENQEEIKRIQDVISFKQSQINKLNNALARIKELYEIGDYTREEYQDRKKVREREITSTQNEIEELKAKQNVQERVNNKERIIKIKEFKQIWSAEVENKVKNQALKKIISRINYERDENGNAKIDIVFN

SEQ ID NO: 225 - protein, 561 aa, synthetic construct
MNQTMNLFEPHDQSNQIGIQKSAALYARVSTVEQAEEGYSIDEQVNVLREWCEREGYTIYKEYVERGVSGKSIKGRPAIQQLLHDANHRCFDIVLVWKMNRLSRKSVDLLTIVDNLQHRGISFRSFTERHETETPSGQLQFQMMAAIAEFERANIAENVKMGMLARAKEGSWNGGQVLGYDVVSVPSDNRKRKLSNLEINEKEAYTVQKIFQWYIEGNGYKSIANRLNKEGHQTKKNKGFSINGVKTILSNPLYVGYIRYNVRRDWNTKGRRNINPNPILEKGNHKPIITREMWEKATSIMKGRSGKPNRIHGGEFPLTGIMKCPACGAGMVLGRTTNRNKDGTKRVLEYYVCGAWKNKGTAVCCSNGVRTHYADNYVLQKLFQLANNDVLIQHIIQNINQKNKEGSAPLQHEYATLKKSLDAIQMKKDKVLELYEEGVIIKNDLVSRLVSLNQEKEKLEERLFSIEQHIGKSGFQNIDFEMVKHVMQNFMVAYKESMTREQRKQLLHLLVHQITISETREIETIQIQLNKEVVRHFNIQEGENSSFYNEFSPSFSILINL

SEQ ID NO: 226 - protein, 516 aa, synthetic construct
MPKTEEKQAAKAVIYARYSSDRQREESIEGQLRVCEDYARRNNITILHTYADRAMTGRSDQRPEFQMMIRDAATMAFNVILVYKLNRFARNRYDSAKYKHKLKKYGVKVVSAMENIADDPSGILLESVIEGMAEYYSAELSENVLRGMTQNALEGKWPGGVIPLGYKLDKGGRLIINEEKAPIVRMIYQMFLDGMSVARIERELNDKKYTTDAGKVFSRSRVYYILHNERYIGTFQWKDIKKEGIIPPIISQESFHAVQERINAMKSSSYRTNNNYLLAGKAFCASCGAKVSGTSGKSQNGNKYCYYGCSHHHRSARYEYCETKNIRADVLEKLVCDKTHEILSSKKAIKEIARQAVKLRPRDESELEIRAIKNHISSCQKKIDNCIKAIENGVMSNALVESLNENERTLDVLKEKLAKASLMQGRGLLTEEKIQFFFETIREKAKETEKYNDILLTSLVRAVYICNEYVEIQYNYAEQLPILTNPVRIESCSYKCTNGGTIWIRTKDLFDVNEAL

SEQ ID NO: 227 - protein, 499 aa, synthetic construct
MQKQNGLAFSYIRFSSKKQEQGDSVRRQTELAEKYAQDNNLILSEKNFQDLGISAFKEGNRASLADMLQAIEQGSISPGSTIIIESLDRLSRRGIDVTQQIIKQILQHQVYIASLVDGLLLNRESVNDLVSVIRIALAADLAHKESEKKSQRLRETKGQQRQRALNGEVINKSLPFWLERKDNAYVFSDRLDAVKRIIELKKKGLGNNKIAKTLNDEEFAPLRSAGWNHTTVAKTIKSVALYGAYQTSETTKERKTILLDIVDNYYPAVISKDEFMQLQSDSKTSKSGYKSDKNAFSGLLKHECGGALVRKFHTAHGKVYEYHVCANARDGKCSVTQNFKNIETAMFKILRELKMEKKTSLDATLLQERSDVQEKIQDLNNMLLSMKKVPASVLQTIGSLEDKLQALDQAITEQNNRVMNEQSVDLNLLQEVQDPVELNMMLKRVIREITVFNLKKSWRIKVSYINGHSQSFRWNGKEISFKSDTEKLLDFMNSEREEE

SEQ ID NO: 228 - protein, 528 aa, synthetic construct
MTTATPQRTRRSAANGTAGEHGASTPGPRSIRCAIYTRKSTEEGLNQEFNSLDAQRESAIAYIASQKNEGWQCLPEKYDDGGFTGGNIERPALKRLMADIETGKVNCVVVYKVDRLSRSLMDFARLMELFDRKGVSFVSVTQQFNTTHSMGRLTLNILLSFAQFEREIISERTRDKIAAARRKGKYALGKPILGYDYVPYPPPFTGRRLVVNKAEAEQIRRIFELYLEVRSIMHVADECNARGWSTKTWTTTAGRVVGNRAFDKSIISRLLRNPLYVGKVPHNGAVYDGEHEAIVDDDLFGRVQSQLKLAAERGGASVKSSTGSLLGGLVRCKGCGCAMCPSSASKKKPDGSRVRYRYYVCSNAVKRGRKHCAAPSLPGPALETFVIEQVKAVLVNDLSMRAVVARALDLLREAAELRVAERTRLQGVLERLSGEEPTAATLREIERVRRTLTALTRQIGLDADRLIDEDEVVGAVEAFDGVWGAMTLAEQAEFLHVVIATVEYDGESQNVSITFHPGAESAPETALP

SEQ ID NO: 229 - protein, 551 aa, synthetic construct
MPAPRVCSYVRMSTADQADSPARQRDGIARYAANRGYVVSHEFSDLGISGWRDDRPGFRQLLAAAAAGQWDIILVDEPSRLSREDPLDMMALTIRPLREASVAVETVATGPMNWNDLGGMLITVVHADKSSAEVKALSRRVLGGMKQSAAAGAKVGSVPVGYVAVTDPDTKQPKLALGDPAVVAALRWAFETYAAGQMGLTTLAIKLAERGVVSRKTGKALAQTGLGYVMRNPVYCGDLTWNRMTRGRFHRLKDGQPEAKSRKTDRRNSREDWILIRDGAPAIVSRDVFEKVQERLSQNKTWTTPHRDGGEFRLSKLLVCGRCGARFYGTHLRRGIVYRCSGYAQRRQLVCDSNTVPEASLLRAIGRTLTAQFVNPDTIAMLRAEVARQEQQLSDPLTRETLAKRHADLDGKIGRGEARLLELPPDVLAGAVEAVRKLKVERDGVKAELAKIDAQTRPTLDLERAIDEITGRVQRLTELLDTGSPADVRAVLQSLVSRVVLYFDRQPPKREGGRVRNTFRGGDIHLIPLDEGSAQTADSSSHGRWCARRAP

SEQ ID NO: 230 - protein, 503 aa, synthetic construct
MKRFAIYARRSEEKETGESIQNQLNICKNYIQNNNKDIIIDEYFDDDYSGRNMNRPDFQKMMKLVKKNYYDSIVFWKLDRVARNALEFLELHKELEKIGVNIISVTEGFDPSTPAGKLMMTMLAAVAEMERKNISQRVISNMNEMAKKGKWTGGTVPFGYKVVGIQGKKYLEEDLNLIKITRSIFNKYIETESLFSTSKWLKDTHNINKTPTSIKRILCNLVYVKSDNDIFKYLDNKNIYLHGELNGNGLISYGKADKTKEDGVEFRDKDEWIVAVGKHKGIVSGLEYMKIQSILKSKNNSGRRGTGEVTFLNGLCKCYYCGSYMRTKQKKNSSGSHYKYFACGKKDSCLADCKNKMLNIGDVEETVLHKLCNYKPGDIKIPINTIDTTSLKADLEKKRKQIKNLVLKLSLDDDLEAILLEQIKELKKDSDTLQRKIEEKERQNLLNDVSNYNKEFIQKQLSNFENLFKKCKDIESKRKLVKSLVKEIRIDGVNKKVEVELNF

SEQ ID NO: 231 - protein, 594 aa, synthetic construct
MHDFDQRPTAYSYIRMSSKRQIKGDSLRRQLELSKKYAEDHNLRLDESSMDADKGVSAWTGANLTEGAFGQFLAAAKAGQIKPGSYLLVESLDRLSRQQVRTALLPFMELINADITIVTLADNQVYSKATVDANFTQLIISLTIMARAHEESETKSKRLRAVAKNRRENASKGVGRFSPMHVGWIDSERAGNDRWTFKLNDHANAVRRIFALADSGLGQVTITKRLNDEGVPTFRGKGLWYPANVGRIMRDETVVGTYQPTHVVEDVRQPFGQPIKDYYPAVVSEELFWRVQRGIKVGFAKGRHKGNRIANLFSGLITCAHCGSTLRLRTGTPHKYLYCDNLYRAGNCASGGGLYRYDRLEDIVFSKISELDPDQEAGGKADAQTRETLLQSVKSNEDQIQQQERAYKNYMASLALVDDDAMRREITAEMKSARTTIEQTKALVSEQKEELANIDTKRKEIASIAERMNLERLGWSTGSAEEVFDSRSRVAKMIKRFLTTMTINFDDKILMVALAGGLRAYKFNYAGDIVDRYDMSPLLNKPITPVIYNDGDGHARLITGGVLKPEHFTTDISVDDFDLKEDRLKIIRSMSQPK

SEQ ID NO: 232 - protein, 611 aa, synthetic construct
MAVNMHPKTKAYSYVRISSKGQIDGRGISRQVQAAQTYADANNLELDTNLSDIGKSGFHGHHVKFGALGNFLRLVKDGQIPVGSYLLVESLDRLSREDVLTAQSQFLDILSAGITIVTLIDGMVYHKDKDFTQLIISLTYMSRANNESKEKSDRIKDVIRNRKLEALQGKPRYNHHLVGWIDQERIGETKDYQFSLNEKAKTVQRIFELFDEGLGVFSIAKILNTDNTPVLRAKTNLDHRWKDATIRLLLQNETAVGTYTITETVNGKTVQMGEPVKNYYPAAISEELFWRVQRRFKSKSRAGAIGRRYANLFARNTSCAKCGRILKMSRGGHEGNRIVYLTCAQRQLVKGHQCDSETPLFPYAPLEDAVLTYVTDFYEAAAAEMNAPHKNKTKLAKQLVEANEYLESIEKKRRNLLKLAEEDLDAVDLADLTKRIREWRDKIEQQKAYISEIESDIRQTDEKRNELQSVLEQIEAERRKWKNAPDDEVMQSRARVAKMLREFITTVEVDFDGQFATIWVGGFTSAYRFDRKGNLIGHINILSMFNTNPSRTFVDRTPTGRVRSIRVLENAPEVPAMTDEMMRSMMMNMGWNEERVAMALDASKRIRESMM

SEQ ID NO: 233 - protein, 571 aa, synthetic construct
MITPGTKAYSYIRFSTPEQAKGDSYRRQRAAAENYCLQNGLELVKNEDYLFFDRGRSAFKGRHLDDTGQLARFLKYVQDGTIEPGSVLIIESLDRLSREHVSEALPRFLDILRCDIQIYSVADNKLYTKDYDAIDIMVGIFQMSRAHSESSLKGERVSKAWKQKQKAARETKTPLGRACPYWLKLEGGKYVEIPERVEVIKAIFKLAVSGHGHRAIAKILNADNVPIFGSNKRNASGAWGSSSTGKILSNRAVLGEYQPTGLIDGKRGTLGEPVPGFFPIVIHEDLFFEAQSARTTRSVSKATKSAANFNLWQGLAKCSLCGESMHLVNKGQPPKGGKYLRCYGSAKGRCTNKIVQLAGSERAYMEILAKVDSLSLVQDSQAKIRKEITKVDLRLDMIKKRQAEIESQLLDVSGDLPDFVMQAALRFEQELKELKHTRNELKRDSQREKIINKEDFFSKLDLLSFEGRARANYLLKALKVKVRIERQENTVFYAIEVDGVLTFLMKQVSDLIEYYPYTGELTEVLRSQGDDGAFATMHSGMVARAFELLELVREQSRIDSMLANKAVPKKI

SEQ ID NO: 234 - protein, 550 aa, synthetic construct
MARTSKRKVRLESQSLQENVSVKTYMAGIYARLSVDNHDGKEISIETQIEMAKEYLKSHTEITLYDCYSDLGATGTNFQRSDFERLMQDVRDGLINCIIVKDFSRFGRNYIETGNFVEKIFPFLGVRFIAITDQYDSIKQADCNEALSMHLKNIANELYARDIAEKVTASKQAKMKQGEYLGSIPPYGFQIEKIDGKRTLVSEPVTSEIVREIFNRYASGETFVSLVKWLYRQKIHRPSDYKKYKTVYQQEGQQLRQWERESIRFLLTNDAYIGNLVQSGKHMKEQITAEHTHEPLVSEEVFYRVWERIEGNIKIQNRRPLRKDTMEDIFRGVLYCGECGHKLSRMVTERKASYKEVKTFVFYSCPNSKRIDEEKCENEQITFLQIQKVILHLLKKEFLLSSTQMKKLMEFNKEAGEKRKEQIQKAQDELQKSVDGADRKISSYYLEYRNGSISQAQFLETKKKLEEKKEQDRQALRDLHTEYSSIDRMVDKQNQFLRTILKYKSCAELNAELVQNLIEKIYVYRGKRVEIIWKWNDEFAKVMGGTDDEK

SEQ ID NO: 235 - protein, 563 aa, synthetic construct
MLILKGDERLTTEQIMGLIGKINAIIYVRVSTTDQAEKGYSLESQIERCKERALTKFKYKESELIALVEPGGMGDDPNRPALNHALYLLEKGLGKKFIVLHPDRLTRDNTLQGIVSRKIWGMGVDIEFIEFEVDPTNPESMLMYNIQGSIAQYNKAKINANSKRGRVAKAKKGEFPSFKRLFGYKFNKETDLPEYDEEERQVLLEMKDMLLNRDMSSNEIAKELSKRGVPAPDGDTWYQATVSRILKNEDYTGDFYYGKSKVVQINGEAKQVPTPEEEWILIKIPPIWDHETRDQILNKLKENYKGRSRKTRDYLLKGKAKCGRCGSACGSGFTSKTKSGVYKYYSCRRKNAKAYQNGKKIIDCPGKNWRVDIVDDVFWKWFKKLLKNPTDFLEQFLSETSNEKKIEELQHKVNNLTKQIEEIDSEVSNYVILFGKGKINEDMFDKLTQPLEQKKEYIETELEIINSQINANKDVEDKNQKLKEYVSSFSEMVDKDLSMDEKRKFIDFFIEKVTLFDDDHMEIVWKGDGLNNNDDKVSLYNEGGAMKLNNSHKRLNYGQTYGG

SEQ ID NO: 236 - protein, 457 aa, synthetic construct
MTSTNARRAAIYTRISLDASGDGLGVTRQEEDARAIVSSRGWEVAGVWSDNSISASDARKVRPGYDALVKAYDAGAFDALVCYDLDRLTRQPRQLEDWIDAAEASGLALVTTNGEADLTTDAGRLFARIKAAVARAEVERKSARQKRAEIQRARSGKAPVKGHRLTGYELGGRVIESEAAIVRRIFAEFLAGGAVHGIATRLETEGVPTRSGRRWNPATVTTILKNPRYVGRVVYDGQVLEGVVGQWEPIIDSADFDLVQAKFNDPARKALKVSTARKHLGSGLYRCAECGGPMKLKGGRSYQCLGHVSRLQAVVDDYVLEVIAERLRQADASELLAPEEADLEPLVAEAERLRSRIAVVDEEYMADLIDARLRRDKVARLQAELTELDGKLASHRTGSALGGVLASPDPAAAFLSSGLMAQRAIIDSLAEVRLHRGVKGRNVFDPESVSVIWRGTD

SEQ ID NO: 237 - protein, 487 aa, synthetic construct
MRVLIAVRQSKRRELSESPDTQRRDIMAWADREGHEITGEAVDIGVSASVPPSRRPELGPWLTNPQKLAQWDIVAFWKIDRAVRSATHFYGDLVPMLTELGKSAVAVTEGVNTLTTSATELGFRVGMAQDELTKLRNRARASRRALRRTARYAGGPPPFGYYAVKTPEGYKLAIDPEAQEAIVSVISLLRQGYTLNYCTAYLNQEGVLTAWDRHAVRMGRRPKGRPWRRKTLHDTLRRRHLLGQYVYRGEVVRDDEGNPRMIGEPMLTRAEWDELQALINRPPKTYRVRGQSMLRGVAYCNGCGRPMVHHPGGEKDQRRYVCSVRTFPGVEDCWAAGYPAEALEDFVESAFLDDYGDLPVIEVDAVPVLDHSARLAEIAEAMDQLETDRYIRGRFTGDDGERRFHRLYSSLEAERDELTAQQSTTPGVRSTPTGKTYRDLWEAADNEERGEILRKFGVYVMAQWRKTRGDLPLAVYTHLYFPLADEL

SEQ ID NO: 238 - protein, 483 aa, synthetic construct
MKKAVIYARVSSKIQVEEGLSIDAQTSQLRDYASENGYEVVGEYVDRGESAKTADRPQFQQMIRDIKSNPEDYDAVLIHKTDRFARNREDSIVYKSLLRRDCGVDVIAIKEDFGEGPIGKMIEGILEVIAEFYSENLAREVEKGQREKAKLGQAVGKPPLGYIIGEDGKYQIQEEESKIVKYIFEEYINGKGTQSLAMDLQKNIKEFSLEKSTGEQMKWNNLTILRMLKNNAYIGTFEWQDIKIENNHPPIISKDNFELVQDLTQKRRTRRSYSKYDPYLLQGLLKCYECEGTMHRQFSRQKLASGKIATYVYARCTNHGKYKNCYGNYNNMGKIDDEVIQALESILNGHIDINRLNISKTNKSSTQQKHERLKVKLDNFDDQFERQMKAYEAGVITLEQLQNYKVRLNEEKEELIKELETISSKLIGNNIDKDKFLSALKNILKTLKDDNISMQKKKNAVSRIIKEVRVSSKNNLIEIVYKW

SEQ ID NO: 239 - protein, 527 aa, synthetic construct
MATTHPAPDWTADELAELADLQARNDALPEGAPRGLLSVRLSILTEDTTSPARQELDLRRHAANEGIRVVGVARDLGVSATKKAPWERKELGDWLNNRIPEFDSILFWKLDRFIRRISDLHEVIKWCGKFGKNLVSLNDTLDLTSPMAQAMVTFIAAVAEIEAANTRTRVVSLWEYNKGQDLWKIGKPIFGYKSQKDKEGKNRLVQNPDQVRVIRYMADAALRGVPANRIALVLNRAKAPTYSGRSWNNQTVIRILKNPALRGVRTEGGTKKEGYRSTPVLDKNGKELYVTKEPIFKQEQYDKIQDALASRSKSRRRSPTNKRPTRFLYVMKHKPCTNNIVETNAYQTLSTGEVKEYRYLRCPKCRKPSFGMADPPFLYRNLIESVISALGSYEVVQREYARGDENRRERKRLEDSISYYMTGLEPGGKFDKAGFIKDKAEETLESLMTDLAKFDPESTEDRWIYQSTGKTYAQHWNEGGIEAMEKDLLTAGITFEMEKDENGEVVGQLVIPHDVKERLVKVSNAWS

SEQ ID NO: 240 - protein, 503 aa, synthetic construct
MPRISVIGQILPELKKRKRVAAYARVSMETEMLLHSLSAQVSHYNGLIQKNPDWEFAGIYADEGISGRDTSHRDDFNRLLADCDAGKIDMVLVKSVSRFARDTVDTLTVTRHLKELGIDVYFERENIHSISDEGELLLTLLASFAQEESRSISENVKWSIRKRFEQGIPNGHKAPYGYEWDGEMYRVIPEQGEVIKEIFAKYLSGTSAYGIAKELSKRGITGQKGVPMDDSTIKFILTNPSYTGSMLLQKNFISEGHTRKRNKGELPMYMVEGMFEPLIPQADFEKAQLIREQRADAAANKNPTLTAFSGLVKCGECGRSVSRRTTKYGKKWNCNTRERKGKDMCGLRPVYETELEQAAAAALELAAFDGAAVRREVKQIVINADRIEFRMKSGKAREVMRAYQRGRSAFSQKITCGCCGRKLECDYWKMGPNGQKEKYKVWVCRGCSFRRLLDDEFRKAAAEVLGREDYEPRFVKEIAGVTAYGDRFEFHFTDGKVAEWQRK

SEQ ID NO: 241 - protein, 498 aa, synthetic construct
MLDHIIGAADYARISSDPGNDAKGVARQTEDSQGRIEREPSWRHVGSYIDNDLSATKGKERPEFERLMAAVRRDEVKVIVIYMTGRFVRTRRERMETYELLAKHGVRIVCTNGPDLDFSTPAGRMVAGIMGEVDAHEVEQLATRVSDSHLQAAKEGRPIGGRCYGYRPDPHALKHHKRRLIVPEEAAVIREMAPRALRGETLYSIVQDFNERGVPTLHPGRSRTGGLWSVSVLRDILTNPAIAGRSVLLGVDYGEAEWEPIISYADHLKLVGMFSGRTAPEGWTNRHVHLLSGIALCGKCLAQGREITVTCRPGAKPTPSGYQPWPKSRGYICPDKQRGGCRGLRHAADPVDAYVEETVVRLLGEPGVIDNLVAAEAPDAEEVLKVATEIEACQARAAAVGALMAKDDPTDEVTAIARRAALDQIRDDLTRHRQRQTALARSTVAEGLLDVEDIAHHWEHVMTLSQQRATISALVRITLLPIGRGKRGTTDHVVIDRR

SEQ ID NO: 242 - protein, 475 aa, synthetic construct
MNAIYARVSTEDQARTGYSLADQVRQCRKKLISMGLTNIEEYIDDGYSGEFLDRPHLDRLRNDLRNKLITHIAVYDPDRLSRNLTNQLLIADEIEKANAQLMFVTGDYDASPEGRLFFSIRGAISAFEKAKIRERTMRGKRSKALSGKLVQNDELFGYDYDSENSMYRINPDEAEIVKLMFHLYTTRMYGISSLRAELKAMGVLNRKDNPFDSSTLHKMLCNETYAGTKWTFKTYDKTIAQKKRQKTARDQSEWIAVTVPAIIDQDTFNKAVDCRRLNKVTAKRNTKNEYLLQNIIRCDACGYAMRGVRYPRKDKEYMYYVCTAYVNNIECKDSKSIPVKELDEAVWTEMQAAAKKKQGLNIFRPKDLQIVPGKGKMESQLAKLKKRQAAILKWVADGTIEIDAAEKDLQGINKEMNAIQNAIGKIVEPTKVKEIDNDLFINAQTFEQKRYALLQSGIRVFARRENGTTSYTIRL

SEQ ID NO: 243 - protein, 477 aa, synthetic construct
MMDRNKVAIYVRVSTQGQVDDGYSLDEQVDLLTNYCKLKEWTLYDVYVDPGISGKNMHRPEIERLTRDAKRKLFDIVLIYDLKRLGRSQKENIVLVEDVFNPNGIRLVSFTENFDASTPVGKMVFGMLSAYAELDRANIAERMMMGKIGRAKAGKAMSWGMPPFAYNYNKETGDLELDEVKAPIVEMIYSEFLKGASVNKIVQKLNSMSYHGKNHEWKHHAVTVIIDNPVYCGMMKYMGQTYQAKHTPIIDKKTFELAQLERKKRLSKYHDADWLGPFQRKYIGSKICYCGLCGAHLKSEKDKKNKLTGIRSISFFCPNTRSRGTGECTNPRFKQSVLEGYILNEVAKLQQNPEKLKDIKPAEDNELHNKIATYKKKIKQNSSKLSKLNDLYLNDLITLDDIKQQSKSLLNENEFMEEQIKLLSATTREDELRKKIDTFLAFPDILTADYDTQKQAVELVISRVEATKEGIDIFFNF

SEQ ID NO: 244 - protein, 575 aa, synthetic construct
MTSSNAKQVRCAIYTRKSSEEGLDQSFNSLDAQREACEAYVASQAHEGWKALSQPFDDGGFSGGNVTRPALTQLLELVRERKIDVIVVYKLDRLSRSLADFVRLVELFDEHDVSFVSITQHFNTSTSMGRLTLNVLLSFAQFEREVTGERIRDKIAASKKRGMWMGGRVPLGYDLAERQLHINENEAHTVRHIFNRYLAVGCVRRLKAELDADGYKSKPRPAHHKIDGDKPFSRGNLYALLKSPLYIGKLHHDGRLYEADHQAIVDPDVWRAVQARLTKNRAQHQQGHNAKHPSLLAGRVWDTEGNRLSPTYTQKKARRYSYYINQALLQFKDAGVDGVTRIPAGELDSAVERLLIDLLENDEQLLAHASPHINQAPDIERLLSRAGSIATEWPSYATTDKTKVLDAVSASVIVAEKHLTLTMNALGLCNLLLNKKPYPSDNSGKSEHESSDITLKTPVSLRRSGIGKRLIIGNNPKTPVKAHPRSVMALQRNVLDAMRWNEELITGRVSSIDALVKRDGLNRRQVYRIRQLAFLAPDIIDRIADGDIPETLTLEKLKQGFPMIWKEQRALFGIG

SEQ ID NO: 245 - protein, 555 aa, synthetic construct
MARTSKRYIRKNEEQVQKVFYKAGVYTRLSSERKEEWREKSSSIETQVLCCKEYALKENIKVVNIYKDYEYSGTNFERPQFQEMMQDIRERRINCIIIRDLSRLGREYLEMGRLIDKVFPFLGVRFISVNDKVDTVKDLDSKKSFEITLKNIINDMYAKDISVKIKTSKHNRARNGYFIGSVPPYGYKVVKLKEGQKLEVDENVRFIVEEMFRLTLEGKSQYEVAKHFNTKGYATGMVYYKTGRIYRQDGDPQWNKSTISKMLTNRAYTGTLVQGVKQQNLAKGMKQQYVDESQHIVYEDAHEPIISKEDFEKVLQGRANRLKNNAFGAEMHNFERDYENRYKGLIFNNATGKELYRRTRIYGTNHDKFYYSFQNDTCTGKIDNEVRVFIMERELDKAMSEKVAEFITKATSKAKLIERVSARFFESIDKLNEDISKHKIKTEKEEFLIQKAYEEYSLGKIDREVYSLKREIALSHIATINNEVIAIEKVVKDLERDKKTSIKWVKDVFSAKKVEKLPSDLIHSLVEKIIVYGNHNFEIIFKFNMDSLMGGVNIE

SEQ ID NO: 246 - protein, 511 aa, synthetic construct
MKIAIYSRKSVSTDKGESIKNQIEICKEYFLRRNTNIEFEIFEDEGFSGGNTNRPAFKFMMSKIKMFDVVACYKIDRIARNIVDFVNVYDELNKLGIKLISVTEGFDPSTPLGKLIMMILASFAEMERENIRQRVKDNMKELAKAGRWTGGNVPFGFISQRIEEGGKKATYLKLDENKKQLIKEIFDMYISANSMHKVQKQLYIIHNIKWSLSTIKNILTSPVYVKADKDVVKYLNNFGKVFGEPNGANGMITYNRRPYTNGKHRWNDKGMFYSISRHEGIIDSSTWLKVQSIQEKTKVAPRPKNSKVSYLTGILKCAKCGSPMTISYNHKNKDGSITYVYLCTGRKTYGKEYCTCKQVKQTIMDKEIENALNSYIQLNIEEFKKVIGSPNDTENFNKNILCIEKKIETNKVKINNLVDKISILSNTASAPLLSKIEELTKLNEDLKKELLFIQQEHINSTFVSPEEKYERLKQFSYTLNTNDIDLKRELLSFSVQEIKWDSDEKCIDIII

SEQ ID NO: 247 - protein, 519 aa, synthetic construct
MKTITEITRQKPTPPQIRLAAYCRVSSDSSDQLHSFAAQIKYYSEYCKRHPEYKFVDIYADEGITGTSMEKRDDFRRMLRDCKKGLIDRIIVKSMSRFARNTEEMLTALRALEQMEVSVYFEEQGLDTKSMNSEMFATFPGMVAQQESVSISQNMRWSYKKRMESGEFNCCAPAYGFDLINGKLVINETEAAVIRRIFDLYLQGIGMQTIANILNDEGVRRQYGRKKWHHTTVNYVLNNERYKGDALLQKQITTQTLPFKKQLNHGEQPMYYVENSNPAIVSRETYEAVQALIKSRQPSCKRKAKNYPLTRTLLCPDCGHTFRRQVVNGTAYWLCAAKATNKTDCAWRRVKEDEVYAAFNLMIRKVQANREYLLGTLIRQLEELQYRTTGSQQRVKEIDREIADLTAQNLVLSRLHGKGVLNAADYTAQSDVLENKITELRIERRTKITDSDENEMLEELKMLNDILKEVKIGIGFDAELFEQTVDSITVESSELLTFHLAGGISLPEKIREKGRCYQA

SEQ ID NO: 248 - protein, 503 aa, synthetic construct
MLRAALYARFSSENQREESILAQFRDSTEYCKKHNYAIVAKYADEAKSGTTTIGREQYKLMLKDAQKGKFDIVVFHKIDRNARNELDYYITKHKLEEAGVKYAYSRQDIDSTSPEGQMMESMLVGMAAYYSRNLSNEIKKGLRENAIQGKCTGGRPPYGFSVDADKKLIINEDEAPAVRMIFDLYAAGVHYGVIRKRLFNAGYRNRAGKEFTIASIYEILRNRKYVGDLYLGKTLFRKGKRNNHQTSDNVQYFENVIPATVSREIFEEVQVKLDQNKRRSGAGNAKAIYALSGLIHCGQCGSAMVAHSTKNSRGIKNYYYRCPKGRLLGEEKCPQKFINRDDIESTVYQLIRKLFTAPDAHDQIKRIIAKNNMTVKVPDYTELIKRLKKQESDASKRLDKLYDLYMTDRGDEFTSAKMAQLKEEILRLRAQIKEAEDRQAIVQSTTFDIDKIIDTFQKQLKQKQSPEFIKTLFELAVKNITVYPDKIKVALLVTQERFELPTP

SEQ ID NO: 249 - protein, 577 aa, synthetic construct
MRISIGGFVLSRRTRAKKVGAAAAELDLDTVRVGIYTRRSTDDENQPYTLEAQDTRLEAYVQSQPGWKIVKKFSDDASGKNTDRPGLKKAMQWARSNMIDVLLVYRVDRFSRNLRDTVTLLDELESVGVAFRSATEPFDTSTPVGRMMLQLLSMFAQFERDLIVDRVTAGMEKKAEAGQWKGGYAPPGYMMDPVTHKLVVVEAEATVIRLMFDLYTKDRLGSRAIANELNERGYRTRSGGLWAFKRILTILENRVYLGEIHYRDVIKLDSHPGIIAPEQFDEAERIMDSRGDSHSRRASNSSDYMVTGRLPCPKCGRAMIGTSATGKTKTYRYYTCMKRMKYGTDACDQDRINADALDQAVLDSVASFYGNQHQLIRDAVGAARKVYESSHDTVAAELKTVKTKLTAVTAKIDKYLDAFEADTFDADDDTVKERMRGHRTTQKQLQAREAELLEDLENEPTMPDAATLTQVNNNIRTIINAGNPNQRKAVVETFVVKIKITGPGRMVPVFRVPQAATQADVVNAEGAESGRPDSAPLSVRACSSLVELRGIEPLTFSMRTRRATNCATAPCGVTREL

SEQ ID NO: 250 - protein, 554 aa, synthetic construct
MNHVGTRSDTQTKALIYCRVSDKKQKTQGHGLESQEHRCRKYAQDRGYEVEMVFPDDITGGVDFMKRPGMRAMLAYLDAKNEDNYVVIFDDPKRFARHTEFHLKLRREFAQRGARVECLNFTFEDTPEGLFVETVIAAQGQLEREQNRRQVIQKMTARVEKGYYVFHPPIGYKYERVAAHGKILVPNEPIASIIREALEGFADGRFTSQVEVKRFLEGKPDFPKSGKSGYVHPTKVRDMLERSVYAGCVEAPNWGVTLRKGHHEALISFSTYERIQARLKGTLNAPARKDINQDFPLRGFVLCDDCGEPMTSCWSKGRNQLYPYYLCDTPSCDSKRKSIRRADIEEGAEALLRSLQPAAQLFKLAKAIFTDIWEMRRADALGAQKALEAQLNDTSKQIDNLLDRIMNSSSPSVIGAYEKRIEELEREKIRLAERAESAVPSEVRLSEFIEPAMTFLASPWNIYKNGNFALKRTVLKLAFAEPLRYSRNEGYRTAETTFPFKVLADFSSLKCGMVGDPGIEPGMGLPGGVTVRCRTLQLVARSWLADGPALIVRG

SEQ ID NO: 251 - protein, 500 aa, synthetic construct
MSNTETLKSGALYIRVSTHGKQEELSPAAQKRLLLKYAKEHNIVVSKEYIYEEKGISGRKADRRPEFMRMISAAKSNPSPFDVILVWKFSRFARNQEESIVYKSLLRRKCNVDVISVSEPLVDGPFGSLIERIIEWMDEYYSIRLSGEVFRGMSEKAMKGGYQARPPLGYKIITKGEPPVIVPEEAKIVEYIFDKYVNARSGIFDIARSLNTMGAKTSHGKAFERRSVEYILQNPTYCGKIRWNRTTNATNEIKPKEDWILADGTHPAIISEELFHAAQERFQSEYRPTGARPSSTYRHWLSGIVKCPECGRTMIAKSTTGKSNNKQYCYFTCYGYSKGKCLAKSSISSRKLEPVVLEGIKAATLNDNLSFSIKAPVPVEDKSELKILKGLLAKLENKEKRIKEAYMNEIDTLEEYKENKLLLAKERSDLEEKIKNSSTEPTNNTEDMKKDMQERIRNVYDIITSDNFTDQQKSDAIRSIVEKIVYKKEEEMVEIYYYYV

SEQ ID NO: 252 - protein, 454 aa, synthetic construct
MKSKKAVVYARFSLDNQRDESIDAQLRAINEYEDKNNIKIVNQFIDRAKSATSDKRPEFQNMIKFCEADTTGISMVIVHKLDRFSRDKYDSAMYKQKLKVKGIRVVSVLENLDNSPESLILESVIEGMAQYYSANLAREVAKGQKENALKALHNGGDAPLGYDVAHNKTYTVNEEEAQAVKIIFDRYIKGYSYSKIIDELNDLGYKTKRGNKFGKNSLHGILNNEKYTGVYVFNKTQRKGVDGKRNGHEQKSEDEIIKVEGGIPVIIDKEVFEQAQEMIQKRKKTPGAHKATTTYLLTGLIKCGECGHAFQGNKRKDSYGNEYVSYRCGCRKQKRDYLEEFILQELEKNILNDEAIPALSKALNEKLNYKNESNAELLKNLDQKLEKVNKEISNILNAIMNGIVSSMLKDKLDELEQVKLNLDLKMNELKIENKVVDGVGVTEEQIRSMFSRFK

SEQ ID NO: 253 - protein, 577 aa, synthetic construct
MSAETRPAVIYCRVSSKSQETDGHGLESQETRCREYAASKGYEVEAVFPDTFTGGGDFMKRPGMVALLSYLDAMPDQSYVVIFDDLKRFARDTRFHLDLRDAFRSRDALIECLNFKFDDTPEGEFIETIMAAQGALERKQNGRQVSQKMKARMQSGYWTHSAPIGFKYVTVKGRGKMLEPNEPLASVIQEAFEGFASGRYETHSEVKRLFESSLDFPRNSKGKIPFQRVTDILTHPIYAGYICSETYGIHWLKGQHEPLISLDTFEKVQERRKGPVTAPTRQNIGDDFSLRGFVACGDCSVPLRSCWTKGKYKRYPYYLCQNKGCDSYGKSIARDKLEGDVGQLIKTLQPSETLFAMVRVMFRQAWDMRSAQAQEASASIKAQLATGEKKVETLLARIMDAESTTVIRAYEGKIAEIERNKLKLHDQMIHRSQPKGKFDDVLELSLQFLANPWKLWESGHITLRRTVLRLAFTERLQYQRKTGARTPKTALVFKALGGQLSSEIESGAVGETRTLTGVTPQRPQRCASTIPPRPQAMVWAGCSGEFAGCEEEKVTKNPRCFLATGERAKAGLKQATR

SEQ ID NO: 254 - protein, 575 aa, synthetic construct
MSLETFAGTRDPHRPYAGLRGGLYARKSEYRGKKNSRKRSVAEQLTAGRGDADRLGVQIGEQGEYVDDGVSASRHAANRERGDFERLLDDIEHKRLDIVFAWASTRLQRDLAVYVRLRDACAAAGVLWCYGGKVYDLSNKDDRFRTGLDALVGEREVDELRDNVMRALRSNALAGRPQGRAPYGYRRVYDEKTGAYLRTELEPAKAEIVKEICERVAAGQAYVTIAGDLNARGVTPPTEFWSSKQVERVAWMPVGEHPEHAEIRAEVVRRFAESELPTTEIAKEIARDFNEREVPLIMARWYPATITQFASDPRYLGVRTHHGVATNTEAWPRITDPSTHAQCLAVIDKRRKGKTYNTRPGRAKYLLPGNAVCDDCSAPLFSGVNGSKKTATRQGTRKRRLNCMTPGVDGKKGYHVSFDMELADDHVKNELFDWLASPGFIEAYVKNDDERAGKVADAEGEIKVLTTRLESFKQSAINGAISAESFAAIEAGILPKIAEAEKTVRSLSVPSVVRGIAGATREEIEAAWEEIDLPQQRLIVETLLDVRIKPVGRGVKPESAAPYVSVRPRRLVAAS

SEQ ID NO: 255 - protein, 606 aa, synthetic construct
MALATFAPARPAGFAPHDLPQIEATAASYVRQSSAKADKTEASPMVQREANEAETVRREARFFRHFEDIGVSGWNPDAYREGFEAMLTAARNRLFNMLVVYDVSRFSRREVADAIPIVTELHRLGITIVSVMDGVFAPRDTMALIYLIMRLDAGHQESQKKSKKVRAVKVAQRSQRSWLGGQAPYGFESEKYLSPDSKYPLYRLVHVVKEAMNLRRIWATIKKYMHVPIRPRKFHPGSLSGICTDMNKRGVPTKGQNIGKERTRSQWSVRTLKGILMNPVIAGMSAEPIYRVKEDGTQTKTVVGYRIHRDEDGRPVMICEPIIPPAEWYELQDWLSGRGQGEGLARGESLLSGLRDVEKEPVSVCECNRPLKGLNSGPKPVYKCTRASQAVPVDGEHESGNSAMQSHVDDFVARKVFALIQDATRSDPAAETVLAVRAATTVFSQAKEDPKTAAERHELKAERDDAQRAINELYDALDAGLYEGPVGRERFLKRKTNIEGRLERAKTRLESLSAPETVELPLSAWLHNDGDSTDPLGEGSWWASVGLDERRKFIAMFVRRVTIKRATKVHAGRVKGGYKIDNRVAVEFVRPVKAEAQSAEAFELSA

SEQ ID NO: 256 - protein, 647 aa, synthetic construct
MGHLATPDAPLATFTGGVVGTQPRFRVLGYARVSTAEQRNGYGIPIQDRKIRAYSDAKGDWDLIDILSDEGVSGTLEIEDRPDGRKAMEMARRREFDILAVHKGDRIGRKGRAFWRWVWALEDMGIFVALVNKKIDNSTPEGRAQMRREADYAETEWETIRSRTQDGQQEKAEDGGWTGGQPPFGWLILDKGRKGLSRLGPDADEGEIANFVIPLLRAGKPWRQCAMAANSEGYFARSGVPWNGENLRGRMLSEPMLKGYVTFRDPSNKVTVLDRDGKPLHGPSVRIPAPQFLSDSDVAFLNKIAGRVQRSQAKASTYTLTGRLIGQCGKHYSGRLDAAGSRRGYRCTGRNEAYPGAPKCNDSEIDAELAESYIWDRICNTFSNEARLEEIAGDWLGLVGSNDDAHAERIADLDRQIGSMNASITAVILAAARSQQSPEAIVGATAALNAELSQLQQMRSEAAVWLEERDLAVQRAASLQELAQNSRLQLPQMSKEGQSTLLGLLDIKIAVEGVVPQLRSGRPCPARAWYRDREIGVPKISDDQWALVEPLMPRPGPRGDVRLLVVRTILDKATSGDSWKAASARNGVSWSTVADIWPRWLADGTWERLDTALAETERQPAWSLTMPPVSITGYADLRLGVVGESSC

SEQ ID NO: 257 - protein, 472 aa, synthetic construct
MAKVAIYARVSTLNQADEGYSIQGQVESLTKYCEAMSWTIHDTYIDAGFSGGKLERPEINRLINDVKLKKFDTVLVYKLDRLSRNVKDTLFLVKEIFTDNDIHFVSLKENIDTSSAMGSLFLTLLSAIAEFEREQIKERMMFGKLGRAKSGKTMSWTTSPYGYTYDKEQGKLIAIPSQAIVVKKLFDYYISGMSIANMLRKMNAEEQIGRTAEWSINAMKNILRNEVYYGMVKYRGQLFKGEHEPFISKKTFELAQIERERRKQYFSKKFKNTSPFKAKYMLSGLLRCGCCSQPLISNVQRKSANGRTNIFYQCKERYNKDLSKRCTESGRFRKEILEEFVINELSKIKINNKYVENFSKDEPKIDINNLKKEINSIEQKLEKVSELYIDGIVTRDILIKKSEKLIKQKEFVQKQIDEMDTVSEKDKMNIIKKTIDRWNPEKTSYEDTTLLVRKLVKYIVVDEERIDIFLNF

SEQ ID NO: 258 - protein, 457 aa, synthetic construct
MRVACYDRTSVYEEAKISNDAQYDAVKEYVLEEYEQIPQRFSDKGESGGQADRPAFRQLRAWVCASEEEGVIYVWRYDRLARQAKIALEFIELCQQHQVQVYSISEPLPASFSHASTNKLFVQLLFTFAEQQRNVIIENVRAGLAYKKQQRQYLSSAVPYGYRLVNGKIQQEAHEAKVVRHIFQLYLTKKYGYKKLCQRLTQQKFFFRERPFQPYHIYSILKNPLYYGEIKGGSLGKYLGTFEPILSKTIFLQAQEIRQSRCTAKKDTYPYLLRQKIRCPFCGRHLSSKYQWNTKKTKTLHYYHCTDRSCQGIFLRAERVESEVLEKIQAFFQYEGVYQALIAQLTQQLAEKRKDEKHKVIQQKKQEAQWLKAFEEGNCSLEELKQQLQALQKPMSTSSLLSLQQCEAKVKEWLQLKDLSSRQLLCDHVCRIEVTKEKTVCGIYFRQLTQNILEGNE

SEQ ID NO: 259 - protein, 492 aa, synthetic construct
MLSAIYLRLSRDEENRGVEEVLYSHRTALVKLAEKNNLHYELYEEVSSGMDTERPQLNKLLENLPDYDYVLVMDIDRLTRDNIHAEQIKRIFILNEIKILTPSGEIDFNNESNDLLFSFSSLLANYEWKQIRKRMGRGRLAAAAQGKWVMSNKVPLGYDKNEEKKLVVREDEARIIRFIFEKTLQGYSSNRIAKELDALKWRSRQGKILTTSHIAILRRNDVYYGCVSMKRRVNGKVVDEVFVENAHEGIITKQEFFEAQKVVGEKNREFRQTGIATRKLHGLIYCNCCGRKRYIQKDGNGTDFLKTCSYKIDNNKCEDRGHKYLPIEEAVMKAVQKLRPELEQTLERLKARDTSTLEKKLMEQKVDLQNSLNRVSKRSKNLAIMRSDGEITKQEFEELRNEVNEQIQNIQNQIELLNMQLENLSNTDQDLERLERNLFTLNNINDLENAETNAFLKKIIKKINFSSNMSSNHDTKVERVEPTITIEFHKRI

SEQ ID NO: 260 - protein, 474 aa, synthetic construct
MNTQSRRAAVYVRISKDRSAEGLGVARQEAECRELATRLGLEVGPVYVDNDLSASTGKPRPSYRAMLEAMSAGQLDAVLAWHPDRLYRRPDDLEELIGVADGAGVTFATVKAGELDLATASGRMVARFLGAAARYETERQAERQSSKARELAQAGRNSGGGYRPFGWADDRLALDPVEADALRHLIDMALAGQAVNAMCSWLTASGIKTTAGGTRWSSVAVKRMLTSPRLAGLSVYKGEVVGRGEWEPLIDETTHRRVVEALTYRGPARANRARVALLSSAMLRCGICGYGLLTFRRNESRDKQRAYGCREATIAGRPGYGLACGRVSIRAEALEEDIANRVLARILRNRRAIATSAEGVRRPDSAAGELGELEARLRDLGVDYADGLLGRVEFRAARDRLTELIEAARSRLEAAEAQDGLPVGSAEEVAAWWDAASLSQRQVIVRGQILRILIGAHSGGRAHYDAGRVTIEWR

SEQ ID NO: 261 - protein, 489 aa, synthetic construct
MTEAAVYLRQSLDRTGEALAVARQRVDCLGLCEERGWTPIEYVDNDTSASTNKRRPAYERMLTDIRDGRVGSVVCWHLDRLHRRPMELERFMELADKHSLQLATVTGDVDLSTDDGQFMARIMGAVARKEIDRKRARQLSAAKQKATQGRPQWKRAFGYLDDTREPDPFIAPLVAQAYASIIAGASLSDICRLWNDAGALTQRHVKRRDEKGNLIYDPATNQPIVDVERRLWTHSQVSNFLRKPRNAALRGYNGEIVLDDDHNPVKCTWAPIVDESTWRAAQSVLNAPGRAPGKKSVQRHLLTRVLGCGKCGGYLSGMQTRDKRIVYQCKTCHGCSVRADYVEPMLIEAVGQRLSRADAIDLVRAEQLDATEAEAMRTETNTLLTRLDEIADERADGLLTGAQAKRATDRIQAKLDAIEHKQRDQTTMRVLDDIRIGTDEAVDDVAELSPDRLRAVMELLGTVTVAPVGKGHRANGVRFDPDRVTFDWR

SEQ ID NO: 262 - protein, 648 aa, synthetic construct
MLRPICYERVSSLQQVSGGGGLDDQRSASDAYFAKNPDIFSTEVVYLQDAGTSAFRNDNISPGSVLGDFLEGIRKQEYGEGHALIVMSLDRISRRSSWSENTISFIVDSGIEIHSISDNLVLKRDDPHSKLIMELIQSRSHNESMMKSVRAKAAHERKVKEAISTGKIISKRMPVWLKDVDGKYAVNEEKAELIRSCFRLYANGMSTGEIVKHHKEHNLQMVTVSNWVRDRRLLGEYRQYNDVVYAGVYPAVIDEELFLTANRMMNRVGLEKKKPREDLLLDPELIRKIFRLYEEGTGTGAIVKELPEGWSTVNVLRVLREKKVVQDKIIDNLTFERVNQKLSLNGVANRIRKDLSIAQDDYITNLFPKILKCGCCGGNISIHYNHVRMKYVICRTREEKKECDAKSIQYLRIEKNILETVKKVDFQKLMLESTGQDSSPIDVLREELSELRAEEARYIQTIAERKKKRLIIRSQQSDALTSVQDRIDEVENELAQLMEVKEVPKLDFDMDAVLEPTNVELRAKVRKELRLVLKSIKYRVIAHVIFVHLEYFNDYLTHVLVINNKRGGGDLLTEFVIEQASNVRRYNTDSFSLTYTDGTDMPVFSTPDSRPISFVEYVLLRDYIREIEGEESLTLGWMNRNEQFIFQS

SEQ ID NO: 263 - protein, 574 aa, synthetic construct
MAKAYSYVRISSKAQIKGDGVRRQLDVSRAYADRAGLALDDELTDIGLSAYHGKHKAIGALGGFLDLVKAGKIEPGSVLIVESLDRLSRENPVTAQSQLLDILSADIDVVTLIDNQRYSKGNDYTQLIISLTVMYRAHEESKTKSLRLKAAAAKRKTDILAGQKRYVTNPPMWLTNVQTNGQWDCVINDFGLIVREMYELYDSGLGGHSIARLFNERSVPTFKSATSDFKTKGVWYSPTVINLLKHEAAIGTYRAGDQVAENYFPAVVDRDLFYRVQDRLRTQNNVRRGRKGGAYTNLFQGMAVCHHCGHAIRLNRGGVKNQVLYFSCHTRFIGSVCGGEGKKFIPYQGLEDAILRVVMDYYVDQSKGGNKSQDTIISDLNAYRQSRDEVAKRIANIRAVVETAENDDDRISFMARLNELRKDTASIDAKIKGLERQLRDFDEADKAEQTIHEEIRNEVSKWPSMSKEELFVSRSKIGHNLRRVITTVQVDVPAEQVIIAVGGFVRWWIVGVDGTVRTTGDWSALPFDILLARSKEFFGDRINVDSMRAVYDRIDVPRADPALWDNERAARGLM

SEQ ID NO: 264 - protein, 650 aa, synthetic construct
MAGPEQVRAWAGRRSVGRARSPYSAAAAGGEPIVAAQPTLLRFAWLGRVSTRDMQDPTLSLPRQLGSSQRALPEDGLIVAHFYDVESGRMDLDARGGGHAHEQFDIPITRDGGIQDLLAEAERPDRRFDYVICESIERTARHMYYGTTIEHRLERAGVRLLAADEPFQLATVDGRKPKVATSLLTRRVKQSISEFYVVDMLEKSWDGFAIHTEAGYNVGKPCYGYRARHVPHPVPAKRAKGVKKTFLDLDPAQAPAVRMAYHWRITERLGYQAIADRLNLDPATYPPPVPVDPKRSVGRWTYSNVRDILTNPKYTGHMVWNRKGRKSRGNRANPIEEWIWSAQPVHEPLVSLEDWLKAQDISGHRFGSRSTSNTNVKHPQTKRSYLLRTYLFHGDCGRRMNGKTRRGHAYYVCEPKKGYVPDGHPTAGSFWIREDAIVDKLNEFLSTHIFGTYRRNLLDSTVRDLGAAAQREREQRLAALRREIDDTTRMIKNLVRNFSRIDTPTEDFVRDINEERAELHQRKTQLEAQLAEAEEANQQAPNPDLLDTLPMGEVRIEELPEDTARRLFEALRLELRYHKDTNQIKCTVTLAGTTLPATRQAADEAVILPFDRERRLNQRKHDNENKEGAMASTSPVPILGVPPAGLEPAT

SEQ ID NO: 265 - protein, 455 aa, synthetic construct
MAGIYTRISADVQGDALGVQRQEADCRKLCEQRGWDVVEVFCDNDRSAYSRKPRPRYNDMLEAIRDRKINAVVAWHPDRLHRQLRELVGFIDVADEFGVHVETVTAGKYDLSTASGRMQAKMLGTVAEFESEHKSERIRRKLEQNAANGIHHGGSRPFGWLEDRVTLDPSEAEVVREACQLILAGETVKGIARVLNERGYRTATGRPWRDVTVRTTLLRPRNAGLRLHHGEVVGGGQWEPIIDAADFHQIEAILKNPARRTNPGRNGRVHLLSVLALCGVCDSPVVVAQGKKYKGVSKPIYRCRAAHVIRDQASVDHQVTQLVLARLAMPDAAGLLAEPDRADRAHAAAVKVQELQDRLTDAAEAYAAGTISLGQLTTINGAVRPKLEEAQLDAASPDRAKVLGDLVAAEDPATVWVTMSQEQRRAVIDLLVEVRIMRTTSGPHYKPEAVKIRWK

SEQ ID NO: 266 - protein, 486 aa, synthetic construct
MGELGAGFVRVSTGSQDETSQVKILTEESAQRGITIVKWFRLHGYSASHGAQEPALREVIADMARGDYSALLVTESSRLDRRDDLDAQAEILLGIRSAGGDVISVAEPQFGKTDFAGRIVTLVAQHANSEKSQTVRRTTYRGISMIIANGGHHGPLPAFWVTRGDRYAKQAYCANPDAVRDIYERVADRESLQSIARAYDLYPASVKNLVRFPANHTGVVECRYTHEGETEVWGHQVAPVVDSPLWWRANNVIAANMTDARGNKGGRPVAQPANWLSGVLGCPSCGAKLHVHGGRTPAGNPRAPKLRCGGHAKQRKACGVFTGCDARPVIDVIDAMLSGDATPVLAFQRVAGNSHELDEMRAELARIQSRLSVTDDDDELDKLVATRKALRVAIDGFVVVPDVYDYAETGQTVGQMWAAGDIEVKRGMVRAIRQSWGLALSEHGGQWGITVGTGFTGASGVADVVDLGNGLCFRREGAHATLQGPA

SEQ ID NO: 267 - protein, 533 aa, synthetic construct
MSYSNMNPQSQPPAKCYSYVRFSTVSQGKEGKDSYIRQTLAAKEYAQRMGLEYQDKSFSDLGISGFRTSKKRDGLSSMLEAIQSGAIEPNSTICIDGFDRLSRASFEHTYDTVRSIVGTGVKLHVVQDNLTLDKSSLNDLISIVKVALQSDLAHKESAKKSYLIKQSRLRAREAHKVTGKLPMWIKRVLNSKGEPTDQFVFNDFETCIRELVSLRVEGKSLQSIAKVLNTKGYKTSKGSPWSGAGVRSIIENRALYGAKSYHDTDSETGRMNLTPVDIVPNIFPALTTFDVWQSIQQKSRSASTETNKVSKRGAYSGLLRCACCGAAMIMRTSTYNKQVRMYRKCIRAAEGSCTQTEIVREPEKYIDIALKQLTYIVSEKRHVSKVPEIQEQIATLEKTEAILIQRGMAEKLADLYVKIDDLKTKLVDAQKEDSRHTTPTETSFAKVVGIEDLEHRNMVLRKLLNGVYFTLLWKYKTQSKWKVTIEQINGVKTTFILSQKHGFGNTEVEMLADPLRWTNLVQSDLEPWELEQD

SEQ ID NO: 268 - protein, 466 aa, synthetic construct
MVEKGRRERAALYLRQSTFREESISLELQETAGREYAARHGYEVVDVQSDPGLSGRTFNRPGVAAVMDAVESGAADVVILWKWSRLSRNRLDWYLAADRAQQAGGRIESATEPIDTSTSIGRLARGMMIEIAAFESERAGDQWKETQARRVRNGLPHDGKPRFGYVYDPEQKMFFPDPVTGPVFAGLYRRFIAGETMYSLCVWLNAQGIPTATGSNVWTAGNLRQIMDRQFAVGRVYHQGVWHPGAHEPLITEAEYAAYKQARKTRAAAPRREASDYLLAGLVRCGVCGRALTGAAARGRWFYYRCFASRFTGGHSHAQVPTRLVEDAVYDKLVETAADIETTAIPETRPVAVDSAALKRTIQQHKTSLGRLAVQLAEDVISADAYAAAAPAIEQKLAAARDALQAATAEHAIPAMHDAVVSLVKDWHILPTTHRRALLARAVESVEVDFNDERRVDVVMRGRPTP

SEQ ID NO: 269 - protein, 546 aa, synthetic construct
MDNTRKLRAVVGARVSHLDDDKANTRKVSHIAQTEEGVRWAGGRGFEIVGTFQDLGVSAGKTTPFERPELGEWLAVERLHEWDVLVFSKIDRAFRSTKDCVQFAQWIKDNRKILAFSGDGVVLDYLHPAGDSLDQMMSEFFIYVGSFFAAIELNRFKTRATDRLAVLKMTDRVSHGVPPLGYMTVPHPNGKGKALKRDPEGYKLLHQIQAKLVHENYSLTELVRWLNDSGHRTNRAKAAGKGSWSVTTLKRTLTSQRLQGLRVAGGKLVLDPEGQPIRMAEPTFTSEQWIQLQDAIAQRSASGKSRQMTPNPLGGIGICGSILHKPDCEYHGTSGPRGPEIGPRCDCPECGYSLSVHRRKSSSGTEHTYVRCGRSTTGCRGSLRLDYVEEFIQGRFLEDHGNREMTRRVFVPGEDRSEELAQTEQSLARLRWESDNGLVDDEEMYKARLLALSAKKAELSAETVVPARWDEVGTGQTYGELWGDPDTDRRQVLRDSGIRFVMYGSQRGATGSTKVSGLEIRVPDSWPQPVLSEEQQQIRDMLAART

SEQ ID NO: 270 - protein, 542 aa, synthetic construct
MTKKCFPYVRFSSTRQEDGSTRTRQNELIDAFVTKHGLEVDRHLEDAGTSAHRGKNASAEGVLGQFLRQVRMGEIDKGSYLLIENFDRLSRDKIVRSNKIFSDLLYAGIKIVILDKNKIYDADNLDFGDWISALVEFERANAESERKSDFSSKAWKFNREKMRNGEIVTKKVPTWLKVENNAFVIDQVKVERINTLFKLSLSKGLQEATREYNDLYSEKLAIHQTQYLLSNRKLIGEHSPQKIHYDEGGQLKRKDEGDAIPNYYPAVVDEKLFYQVQEVIKSRRPFAGRYSNQRYNVFRDLIYCKWCGGTIRYMNKGERDYFICTNSMTGKCDLNSHFGQLSIRGKKLFGMFFAFTDGLNVSALLEENTQAEELKTQIMKMEANRDQITSRLDDFKIDVKNMIMSGKTIPSTYNELIAELESNRTHIDREIESETKKLDLIYMSEKSFSGLKSNDISEIIYDRSDEAIEKRVRYNSELKKIIKHIRIDYLENALEIEFFNGVQRFIDQDGNTGDQIIGFEPPEFEPEDEERFDLKAGYQSQE

SEQ ID NO: 271 - protein, 561 aa, synthetic construct
MTDPQGLPAGVYARVSTKRQAGEKQTSIPDQVSKGRAVCAALGLPVHDVYIDPGVSGEELEQRPEMRRLLADVAAGRVRVAVAIDLNRIARDEFVFQQIFRTLDREEAFVHADGQLYDPENLSQLLTRGIKAVVASHDRRALIKQLANGQRARASAGGWPGGAPPYGYRLVWPTTAPGVKPKAQVEIDDAEVEMLLTAITLLVDERTEDGERLTTGLVADRLNAMGYTTRGGAVRPENRTPGPWSHSNLRRVLSSRSLLGEVYWGKPDSRPSGKHRTRVRRDGTPYYGETIKMQLEPLITPERFDEIQLALSLRAYGYKAESKPYPLSGATSACGGSLGGVYRKDRDLRQYRCNRRKSNATQKRLCDCPRINADWLDGRVWDEVSGLLTDPARLVAMAADYLGVEGDRARRGADRLPAIERKIAQLQRARVSRAADALKSGISPDLLRAAVGQIEEELAGLEEERDRLQAARRDRQSGQDRAVALARLAEQAATRLPQIRMEDRRDVLRLLGVNVTVLEQSSQPALRITGRLPASLPAQKAVTPATWDRGLRSPQRPQHRS

SEQ ID NO: 272 - protein, 481 aa, synthetic construct
MVARLRPVPDTPPRAVLYLRQSVARDDSISIELQEIAGRDYCAQHGYDVVAVEIDEGISGRTWTKRPAVQRVIDMIESREADVIVLWKWSRLSRSRKDWAVAADRVDVAGGRIESATEPIDTATASGRFARGVMTEYAAFQSEQIGEQWAEVRARRFSLGLPPAGKVPWGWVSRKTHIESIPEQVPIVRTMYRLYGEGRGAAYIAYWLNAQGIPAPRGGDWRPVTVTSCLDSPIHAGLVSYLGETRKGAHEGIISEAEYAKYRRMRDDRSTPKKPRRSTYLLSTLVVCHCGLKRAGSTLTERRQSGRTVSYYSYKCPAATEHTKSVAAWRVEIPVVEWLRSFKVSPAPAPPVSAQADADAIAREILDAERTMDRLTLQLAQDIIPKASYERTRDSLLTEINRLQAAQREAALQTMLPPSAYLDAHADALDSWDDLQVADKQAVLRGVVRSITIRDDGLIEVLPQWGGEPIVLEQAQGVNAG

SEQ ID NO: 273 - protein, 479 aa, synthetic construct
MRTALYIRVSTEDQAREGYSISAQKDKLQAYCLSQGWDIEDFYIDDGYSAKDLNRPGIKRMIDHIQKGLIDCVLVYRLDRLTRSVLDLYKLLEIFEKHNCKFKSATEIYDTTTAMGRMFITIVAALAQWERENIGERVKIGLQQKVKEGGWHGGIVPYGYRYTENGLEIDEEEAKVVRLIYDLYLSGKGDHKIAGILNRMGHRTRNGNEWTGKVIRDILQNPAYTGDIRYMGEVHQGFMTAIVSREVFEQAQKSRESRRGKHPRRNASTYIFSGVMRCGRCGALMNGKANYSRYKGKRLHYKLYVCINTRTGACDMPLLNEADIEATLIQFLSQYRDDVLSLEVANTMDKKDNIQEEMKSIENQLEQIKKRKRKWQVAYANEVITLDDLRELTQKDNELEKTLRQRYEDLKSQTTEEWKTPELIAAIISDFLNNWAFLTEEEKKECIRIYIKEFFVQASSDRPNQYKKREISISDVEFN

SEQ ID NO: 274 - protein, 526 aa, synthetic construct
MKVAIYSRKSKFTGKGESIGNQIELCKNYCKDNLKNITEFLVYEDEGFSGKDINRPKFKNMLKDAQSKKFKVLICYRLDRVSRNISDFYSFINELNKYNINFISIREQFDTSTPMGRAMMYIASVFAQLERETIAERIKDNMIELAKMGRWLGGQTPLGFKSKRILHSDNKAKKRSIYVLTPISDELEKVNLIYNRYIETSSVNSTLKYLLSNNLTGKNGGEFSAMSINDILRNPAYVMSDDSVFSYLKEKGINTYGIPNKNGILIYNKKKEQSKINDTIKWIAAVSNHKGIIESYRWLYVQRSLDKNSKKTTPRQGTSKKSLLSGILKCGICGSPMRVSYGRPRKDGSGRIYYYTCTMKANSGKARCNNPNVRGDKLEAIILTNLKKLDKKILLMELRTYAKTITPPLPKKELLQKRKQMNALLNNLSKVSNTNSSEFILSKINKLGEEITKLENKLNNLKNSKQCDFNSEILISSLDDFKTTFKLLDTINAKRCMLEAIIEKIEWNGFTKTAYINLWGSKNTAI

SEQ ID NO: 275 - protein, 532 aa, synthetic construct
MKQYNEMRLEDILQPGKRVAFYARYSTKDQGYEMQKHSVEVLLERYGCEIKKEYVDAGVSATKVPFEERPHLQKLICDAAEKKFDCIVVYKNDRIARHIEEHDKFRKQMCEMNMHVVVSSSHELYTVGEIVPQTVKDGLTRIEAALIQERTKDTFHSKAKRGAWLGGKAAYGYEYRVIEENNGGIKNRIEQFVDVEQEQQVVKEIYRLFELGFGFQQIADEIKNKKWDERIKWTKERIRYIITNPFYSGLITMNRYYKGVLNNKSEWIKGKVPNMNPIFSQEYWEYIIGLFEERKERKIHSKDYSTPFLLRNILYCEHCKEAMTTKNQEPGGTKSKNKKEKKIRRIYDCKNCNFKLQAEMVHEQFRRKYLPYVLEQVTQGKKDQVELSIEKRLKKELSDLRSANRKLETEAIELNQQIEELNREIKLHYEQEIIQEEVLEFMKILMSHRSNKMHELNVIKDNQDELKKRMNRIEQTIKEKNYLPSHDLLSEFAQENVNPQKLRAFLLQFFKCVYITSNGELLMTVNNSLIES

SEQ ID NO: 276 - protein, 464 aa, synthetic construct
MKTAVYLRQSVDKDNDELAVTRQREACLKLCKQRGLTPVEYVDNDTSASSRKPRPAYARMLADVSAGQVDVIVCWHPDRLYRQLRDLEDLIDLGVPIHTVSGDLDLTTDMGRTVARILGSVNRGEVERKSARQIAAFQQMAEMGKGWGPRQFGYDGNHDHPALIPREADALRQAYLDVMRGDSLLSICKRWDKAGLPTTLGKPWNSVTLKRLLLNPRNIGKRAYRGEIVGDGDWPAIIDVDTWKAVKLHLTAPGRHRGQSTVRIRLLGSLMRCGSCGQKLISGMNNKRPVYKCKNPLCYKVSRRIDEIDEYVVTLILAHLANVGNWVAENEADREEAKQLHGEAAVIRARIDALGIDYAEGNLTGPQMRVASERLEAKLNDVEDRMQRIARSHLFEGLAGVTDLKKVWDGLSLSRRRNIIHALCRNITIESVGKGGMQGRDEGFGVRINWREADQIPDVPQLSR

SEQ ID NO: 277 - protein, 490 aa, synthetic construct
MKGQAKRALVVTRLSRVTDATTSPERQRETCLELCGQRGYEVVGTAEDLDVSAGKTTPFDRPQLGDWLTNRHHEFDVLVVFRMDRIVRRLLDLADLIRWCQTHDVALVSATEAFLDLTAPFGDVVALLVAKVAEMELAAISERNRSAAQHNMREGKYRGGPPPWGYMPEKIDGEWRFVQDDQQVKVINEVVRRVLGGEPLRQVAADLTDRAVLTPRDRVNQLKGRETKGYSWHSAKLREMLASKSLLGHAVTANGSIRKDDGSPIIRATPILDREIFEQVQVELAGRENRKEPTKRSSSLLLRVIFCGVCGKPAYKLKGSKGRQDRYRCASVQSKATCGNRTMPVPDADEALTDAVMFELGDKYRMDRVWDAGSDHAAELAELEETLSDLTDQLGVGAFRKGTPQRQRLDARIEELSHRHLQIAAQATKPAGWIWVPTDEPFGDWWKSQTVEQLNVWLRSMEVRMTWDHQGTHVEMLHLEKMAEQWDNLN

SEQ ID NO: 278 - protein, 575 aa, synthetic construct
MNRRKPNNSRQSLGVALLRVSTDRQFQEGESIETQRRKTEFVARRDGIDIVRFFTEHYSGRKSDRRVLDDLFDFLEENDDIEVVIVGDIDRFTRGGTETYLALKRQLRSMDVALLDTTGIIQPERNRLEHLGVEYGWSVESPSHFAEVFMAEKAKTEASDILTRTIGQQIQLTREGYQCRGANFGFRNAKITTGDGKKKTIMVPHEIEAPWIIKMYELRADGSWADDAICEAINAMGYQSRPMNIYDKETRRVIGQTKPKHLTPKQLERFVSRTIYCGVKCESWNQGKPVKAPIEPLVSISLFNQANRGKVQIKEHRDGSLSIEENRLSYTKTRHNADFLLRHVVLCHECGKPVVASRSKGKSGNYFGYYHCNRGHKHWGVNKAEFEQTIANYLKSLQAKPGFLPLFREVVRDVWIQKNRSFEEDRKLIETHVNDLKDRQNSILDRIIACTTEIAQTRLEAELEQLEVTIKETRKKLNSKQLREDQIDAFFEIAKKRMEHPEETVFSSATKPQLEKNWSFIFAQSPSYQNLLDGTPQLTLLYRLNRDGGADKNLLAGQLSLGWNTFEQQVISFLE

SEQ ID NO: 279 - protein, 581 aa, synthetic construct
MSSMQIAPRRRRCAVYTRKSFEPPIGQEITSLESQRAICSAYIASQQHKGWVLAPGAYDDAGRTGANLNRPALRDLMADIEAGLIEIVVVYKLDRITRTLLDFVRLIDFFDRFGVAFVSITQNFDTSDSMGRLIRNVLLTFAQFEREIASDRMRDKKMVMRQHGLWTGGDPPLGYDVREGRLAINLDEAPAVRCIFETYAATGRVSLVHKRLLEEGHRRAVRRTRGGTQRGGGPISLTSLHHVLRNRAYIGEAVHRSESHPGAHEPIIGPELWGRVQAVLKEREQFKPRQPRHILTGLLHDAFGRRMHAREVHGGNASGRYYASASATWAARQRVRAVRLRADATERLVMEAVKRLMSERTRLRPLLLRAGTTGGRLDELCECGTAAALRLATLDERRLSSAVKLLLARVEVGEDMVSVVVRVDALALFLAWDGVGLFAMSDLDLAKATQVHVEEVAVAMTRERKRNWLPLETSTGAGRPCARLVALLDEATAARELVFKHRDVEVAALARSLGRKSASFSRLVRLSYLAPDIVAAIVDGTQPPELTRRVLLECDLPTDWGMQRRILGFPEQRENWRRHAR

SEQ ID NO: 280 - protein, 540 aa, synthetic construct
MRVALYARYSDDKQNPASIADQLAICTRHAEARGWTIAATFTDAAISGAHMANRPGVNMLMAAAEQRAFDLVLVEHQDRLFRNLADNARAFERLSYLGIGIATLRTDRVQLMDVAIEGLMSQLYLDNLSAKTKRGMHANAEKGLATGARIYGYRSAPGGEMSIVEDEAAVVRRIFQGYAQGLTAVEIAGVLNDDKIPSPSGGTWGATSVIGSRQRANGILRCELYVGVKVWNRFDLKKDPATGKRVQRIRPESEWKRVDVPRLRIVDQADWDAVQARFAITGPSRAPQLANRHKPGLFSGLLKCAECGGNYTIKGPGRLVCSVYVGKGVGSCHNRRSIKRAEVEDRVLEGLRAKMLSPAAVAAYVRAYHAEYEAAAAADRARRAPLEKRLAELNRSIARLVDAICEGTETPAMRARLVSAEAEKAELEAQLSAADDKAPTTLHPRAAEFYAEQVRALQERLAELKDGRPTADDRRVIELVRGLIDRIEIKPLDQARGAPIEITLVGRLADFMRPSWEENRNESGFRLVAGGGIEPPTCGL

SEQ ID NO: 281 - protein, 548 aa, synthetic construct
MELKNIVNSYNITNILGYLRRSRQDMEREKRTGEDTLTEQKELMNKILTAIEIPYELKMEIGSGESIEGRPVFKECLKDLEEGKYQAIAVKEITRLSRGSYSDAGQIVNLLQSKRLIIITPYKVYDPRNPVDMRQIRFELFMAREEFEMTRERMTGAKYTYAAQGKWISGLAPYGYQLNKKTSKLDPVEDEAKVVELIFDLFLNGLNGKDYSYNAIATHLTNLQIPSPAGKKKWNRFTVKAILENEAYIGTVKYKVREKEKDGKRTIRPENEQIIVPDAHTPIIDKDQFEEANKKIKNKIPLLPNRSDYKLNELAGVCICADCGGPLSKYEAKRKRQNKNGTESLYHVKVLRCLNNKCMNVRYNDVEEAILDYFRLFQSLNDKELTNLIEDMVHSHENKNNIKSQKQINEQFDQREKELQNKLNFIFDKYESGIYSDEIFLQRKATLDKEMKELKKAKDELNGLTDIKSGIDISKVRSQMKNLIQIYETSNDKEEKNNLLRIALEKVIVKMTAKRKGPVPAQFEITPILRFGLLTGDTLTDTKESSFS

SEQ ID NO: 282 - protein, 503 aa, synthetic construct
MTTRAAIYLRISLDAAMDGLAIDRQRQDCEALAEQRGWDVVHTYVDQSISASKKDVDRPDYDAMVASFERGEIDAIICWDLDRLTRQPWQLEEWIDRAEEQGLKLVTANGDADLATDGGRMYARIKAAVARGEIERKSMRQSRAQQQRAEQGRWYSGGVRPIGYTSTGEIIPSEAAAVLGMFRAVERGNSMRDIARALSGVDQPGLPDIPTTPRHMYTVVTERNARRRAEGQEEKPVPDAQPWAYTSLHSILRNPVYAGYSTYKKAKRKGVKNKYRRVTHIVRDPDTGEPVKGQWEPIVTPDLWWRVQNVLDDPDRLTNKERRNTRRHLGSGLYVCDECGNPVRTHADRYRCAACGLVRTHSVDDFVLAVIRARLGRDDLADLLPTVDDDEVNAIDDELAELRAKLARVQADYDEELIEARDLKRARNRYEPQIEKLETRRARLAGASALLDTTGYASPVDAFDNAELAVQRRVINTLCQVRLRRGVRGTKTFNPESVQIVWN

SEQ ID NO: 283 - protein, 555 aa, synthetic construct
MARISRRDLIKTEEAKIISSFRAGIYTRLSQERTEEWRNKSSSIETQIEICQEYANKENMNLVKVYTDYEYSGTNFDRPGYIEMMDDVRSGLINCIIIRDLSRLGREHLEMGRLVDKVFPFLGIRFISVVDKIDTEKGIDAKLSFEMLIKNLINDMYAKDIGQKIKTSKTVSAKQGFFIGSNPPFGYRVVEKDGGRKLEPDEVSMKVVERIFTRYVAGDNTFKIAKELNENNISTSSSYNKTGNILREPGEPQWRKGTIANMLRQRVYTGCLVQGTKENVPGRKSGHYRQKPKDEWIIIENSHEAIISNDLFLAAQEILDNNKKKDYFKITRHDMKRDTVNKYKGVIFDANTNLLLMRNGVRSNKKNAKFYHYKFTNKENNGILLETPYISIMESDLDNLVIKKLMDVLSIDASGKDCKDRIIDICKIKIEVVEKNRKSISLKISKLNSDLKRLYEDYSLGKIEKEDYLEKRILNRKNLTIYEKNLSDLDLQILSIEAQAEEEIGLFDSLFSNKDIKLDENIVQKYIERIDVYDNETMEISLKGFLGGREMRLSD

SEQ ID NO: 284 - protein, 505 aa, synthetic construct
MTNPSSIPCYIYSRVSLEVQVEKTGLDRQKSLALDWLSKHPEYHLQESISDDGRSAYKGHNLTSGALGDFITRCERGEIPENALLLVEAIDRISRRSVDEQRELWRKLKELKINIAVAKFGDKVFKWDDKFELGYDIQLTVMMDLAHQESKQKADRIRAAHQRNFGKTKSKMCPYWLKLTDDKTEYVVLEEKAQVVRKLFRMKLDGMGADSIVRELRKQGIKTSSGRLFNVATVRKYLKNERVMGWLRKSSVVYTDDGRQERHPTNQVIKDYYPAIVSEEDFNAVQMSFRKTTGGKRSKIANPLRGLMRCPKCERPMTLTNKWLRCRGRASFKDCDHTYLIAEDIFDAFNRYMHLVVAKGLKGGGVNLRDIDSKKHQIEQLETERLNVIGTLRYLPDEASREQAGREIESINNQIADCNLELQDLMNKKVSNDFDLDFDFESEEGKFKVNAILASILEKVVLDDDECTIHYKSGDKIKLSYAVMVGIKKSYDNMKPEPWDEYENK

SEQ ID NO: 285 - protein, 572 aa, synthetic construct
MARKSRKSFSQANSSYNMTSLAASEIIKKPRYYKVGIYARLSFESEMNKERDTVDTQISFIKDYIARQDDMEIYDVYADISLTGTNFNRPEFNRMIEDIKSGKINTIITKDLSRLGRNYIESGTYIERIFPMFNVRYIAITDDFDSIRPDADITMPLKNIVNEYYSKDLSDKVWTAFRSIWKSGLYVCGRPPYGYKKNREKKCLEIDEYAAQVVKRIFSMYLNGMKLAEIARTLKNEGILSPSQYRYFNIGDKEKFDKAKDWYYVQVKDILKDQQYVGDSVHGKSGGKLGEHRTKRRNDKADWIIIPDTHEAIVSREEFAIVQKMISDSTKQFNDAINRGRQKSPVPKNKFVGKCTCGQCGSRVFIKRKDTGKSEFYYYCAGEKSSVLCRDRHVKIPYEDLDRSVFSVIKKHMQICIEKISLIQKLNATDSANIQYKVLNRQLDKLRNERKRIISRGKGLYEDYKDKFITAEEYVQFQKEYKKQIEDIDRQITEYENHINKYRRDFHLDESWESIIAKFQGKRILTQEIVDAFVSEIKIYPDKNIEVKLYYDDMLDQLVSIADVREAECNGR

SEQ ID NO: 286 - protein, 470 aa, synthetic construct
MKGESELDKKAAIYIRVSTQEQATEGYSIQAQTDRLTKYVEAKDFILYKKYIDAGYSASKLERPAMQELIQDVQSKKVDVVIVYKLDRLSRSQKDTMYLIEDIFRPNDVELISMQESFDTSTAFGSATVGMLSVFAQLERKSISERMITGRVERAKKGFYHTGGQDRPPAGYQFNSDNQLVINEYEAAAIKDLFRLYNDGLGKSSISEYLKKNYPGKNKWLPSSIHRMLKNSLYIGKVKFSGAEYDGIHEPIIDEVTFYKTQKEIARRKQTNTKRYNYVALLGGLCECGICGAKMANRRSVGRKGKVYRYYRCYSKKGSPIHMMKIDGCPSKAQQQFIIDEAVINNLKNIDVEAELKKRSAPQTNTSLISSQIESIDKQINKLIDLFQVDSMPLDVISEKIDKLNKEKQSMEKLLERKNKLDKTELQHRFAILKSFDWDNSSIESKRAVIEMLVQKVIIHDNSIEIILVE

SEQ ID NO: 287 - protein, 628 aa, synthetic construct
MKMEKPRAYSYIRISSKGQLQGSGISRQIDQARAYATEHNLDLDETLQDIGKSGFHGEHVKSGALGSFLNLIRNGQIPESSYLLVESFDRLSRENVLTASSQFTDILKAGIYVVTLSDGAVYHRDKDYTQLIISLTYMSRANNESAEKSKRIKAAIKKRKTETAAGKPRYNHHLVGWIDQNPVPGSKEYKFKLNDKARSVQKIFELADQGIGAHTIARLLNDENYPVLRDSTNRTMRWKDASVWGVIKNEIVIGTHQVFDTVEGKKVPIGSPIENYYPAAVDAELFWRVQRKRLAKSTKETGAKGRRFSNLFARSTACTHCRQPLRFSRGGTSNKPLFYLSCSDKITNSKSTCPRQFYRYEVLESAVLACLPDFHHAALDLHSANRLSKTSIEREIDSRKAAIEKHETERKNTLSMAPMLESIEDRQAIADQANQLRGKIEENRSIISRLENESRELSSDGKHFSDLIENIFIERKNWETCSDDNKVFQSRARVSEMLSQYISLVQIDFSELEATVWIAGFTKAYRFDRKGKLIGSVNLVDAFRNLGRRPFAIKNSDGTVKMVKPNRDITPTFNRERFVSILREMGLSAQKIDLAIEANKKLVEAAERQDHRFYTSFTARRLQPVRSR

SEQ ID NO: 288 - protein, 504 aa, synthetic construct
MNTKTLPRRTIVFLYARISEDPRDRRRGVNRQMSDLRTFSEENGWEVGGEYIENDVSAHSGEERPEYDRLMADAIDAAKEPGARVIVAGYHPSRVWRRRVERAQAIEDLRHAGCWVAFESGGLFNMAKASDRSQLANLGESDTAESEVKSERVARAALERAQEGRANGAVAYGWRRQYEYDARGQVSGFHDVEDPVQAAVVRDIVTRLLAGASLIGITADLNERGVPSPGAGMRLKRRAVGQNEDGSLWNKTSVKKLALRPANVGLRVHQGVEYKAAWPALITDEQYAQLRNLFAERTVVRELPGARKHLLTWGEVATCGPCGAVFRVALRGNAKYGKKKPTYVCDANGCVGRNEEALDRHVGRVVVGLLSRPEAAEVFRGDDSAALAALERAEGLKARQEAAADDYADGIITREQLRRITAKLAKQITDAQNEARRLRPAFDLDAFDGLVGPRSAETWEALEVPQRRRVLDGLGLRLRVHPVARRGPGFDQSTIELQWARTDD

SEQ ID NO: 289 - protein, 491 aa, synthetic construct
MKRCVLYLRVSRTTEESVSLARQEAELRELAQREGWTIVAVIRDDGMTGTKERERAEAALAMIADGEADILVSWELSRWSRMGLTAVAKLVTVLDARPDALLVFHKEGLRSNMPAFGILAAVIAEVARMEAEGTRDRIRSMRAYVLGQTAPEDQRWLGGRVPVGYRAVPREDGAGKRLVLDEDAAAHLREAARRLLAGHTLTDVTAYLSASIPTPQSGGAWRITTVRKLMQSPTLLGRSTQKVEVGKRSDGSPIIEYRVVTDAQGLPITRWEPVLDAGTFAAVQELFRRRGPNQPRKAASWLSGYLYCGLCGSVMYANSRKDRTVDSFRCANKAIPGQVCPGVSISRKGVEDYMEGVVFGMVGSLKEYRVTERIEGPDPSRLDDVALAIEDLQRALAADGADYGKLLPQLDGLKAERRRLIEAPAKTVRTRTATGRTLGEAWEDGGIPEKRHIIEDMLDSVTVKKATVAGRGGHIEDRLDEVWMDLPSEDD

SEQ ID NO: 290 - protein, 501 aa, synthetic construct
MSRPVLRAVEAALPRIVAYIRVSRERDEMISPELQERAIRDYCDRMGYDLVSILTDLDLTGRFWKRRQVERAIAMIESGEADGLVVWKISRVARNRLDWNIALDRVESIGGRLESATEPIDATTSSGRFSRGVLAELAAFESERIGEGWHEAHAQRWRRGLPHSGRPRFGYTYERATGYTIDPTTGPLVRAMYERFLSGETLTAIARWLAPMNLGNMRTHRSVQDFLDSGFAAGWISHHDPDCTLPHPRDRRARCQNIVRSEAAHEPIISRETFDAYLAARAKRGEMPVRSRAPKHTASGIIICTACGWKYSHTLGRRSKNGRGGDSPAYRCNRTDCPNRGNVAESRIDAAILAWLPKVADIVNAAAAQAKLGAATDAVEKARLERVALDAAKALTQLTVDKARGLIDEASFIAARDMLSREHQEADAAAKRIETAADDARERGRVARDLLARWSDMTPIARNRVLRELCVIHVTRRELREVDILVYDAREAPVIPVLARP

SEQ ID NO: 291 - protein, 546 aa, synthetic construct
MMDCVIYMRWSSAEQSKGSSLERQREDCRRHATEAGWRVVDELVDDGISAFKGQHTTSGALGRFVQDVEDGRFPDGVVLLCEKLDRLSRQEPGRVFMWMMNLTEAGVMVATVDGGRRYSQGNFDMASIIEVVVKAQLSHEESEKKSQRLSSAWAVKRRRLNSGEKFVMTRRAPAWLQVVGNPATFIPIPERAAVVRRIFEETVAGYGKHHIARNLNLENVPTFGRADGWHASSIQKVLRNPAVIGELHPARKARGAKRTMTGDIVEDYYPAVVDADLHRRALTAIAERSRKFTGRGRKLVNLFSGLATCGSCGNKMTFRSKGRKQRADGTWVSEDYLICDGYQRGKGCTNGVHFNYAVWEEGILDPIIFEALSGDRSGSHSEVRDLEIEIATLERTWEIAKARSDSALRIAVDTGRPEAQAIWTDLVAESDVAMSALDEARGRLQLLAHAPSLEEQWARIHQLRSQLDHENETLRFDARSKVMSAVHALVNRLVFYGPSPMGVDMVIAYERSVSIYYHDLLGGTEWSMCRLNAEHYLNIEDEAAED

SEQ ID NO: 292 - protein, 478 aa, synthetic construct
MSKVALYLRLSVDEAGTDESNSIVNQRHLLHHFLDNSSDFQNFQREEFVDDGFSGTSVNRPAFQRLMTRVKSGEIRHIIVKDLSRFMRDYLELGNYLENIFPFLGVRFIALNDQYDSLTSENNGVEIDVSFKNLLNEFYAKDVSEKVKSAMNTMKRSGKNMSWLPPFGYLKDPTDRFKIIIDAAVAPIVRQIFRLSIEGLGDKKIALLLNEEKTITPAERKMQVSQAKYQKSIILTDEQQRNIWTSNTVRQILKNEAYKGTYLFNTRTYIKGKHITRPQSEWERIENNHEALVTPEEFEQAHRARQSRRTHQSQQKSRSTEDIVLRGFVFCEHCQHRLSLIRNHNQGHYFYCRYCKSQGHSMHSCKVDKIEKVIFEDLKNKSQEPRKLLRVNLLHDIEKLKEKKLAAFQDYKENRITRDDYIAKKQELDDKIVHLEENLQTTKVADKFSGQTLSREVIETHVEKVIVDCLGFFEVIYK

SEQ ID NO: 293 - protein, 502 aa, synthetic construct
MKKVAIYSRKSVLVEGSVSIETQINMCKDYINNKFPNAKFKVFEDEGFSGGNTNRPAFQKMLRMAQLNEIDIVVCYKVDRIARNTLDFLKILELFKENNVELISISEGFDPNTQMGKVMLTLLASFAEMERTNIQQRVKDNLLSIAKKGKWTGGSPPTGFKNGLNGGLEWNKQDMILDVFNMKYEKEKNSNIIKYIKEKYNHNFLGGTLATTLRKPIYVKSYPSVSLYLKTKGYIVQGDEDNIHSYLTYTDKETKYAIVSDIVGLIEPSVWISINKDMDKNISREGNRFSEKFWLTKTIRCKYCGQTFCGQTKTTKTKYYNKYGEEKIYISTYSYYSCRDAVRGKLKTCKNTKRVKQEILESKVSELIHLLKDKKTFNSLYFSNKIDNSSKIDTIKKQIKNIDKTINNLTDKIALLSNEASLIFISKLEELVKEKSILKANLLQLELQELNSNNKKDSSLVYNNILAFNDDLSVDDKRKIAMSLFKEIIYDPETDSLDVTFM

SEQ ID NO: 294 - protein, 633 aa, synthetic construct
MTVKEAAAKIILRVAIYVRVSTRNQEDKYSLAAQEHDLVEYANKQNWHIVEVFKDVESGAKFDKKGLTALMDCVDDGLVDIVLVADQDRLSRLDTLNWEELKLVLRENNVKIAEPGLVIDLENEDDEFRSDLYNIIARRERRLFRRRSQRGLRQYVREGGIYGRVPFEYVYDKETKEVSLNEEFSWVISFIDELFLQGYGPSSIASHLNKISRTPNGAKWHANTVYQRLLNPAYCGEYSVTFMNGEKITIKKKYPLLRTVETFERIQHIIKTNAKPFSTTRKHHHPLAKLHISCSECGRKISLQQGDKSQYGGYRWYLAHNHGLAEPCPYDPKYNAVRITRPLVLAIKNILLSEETAKRYLDIEFKDESQITHLEQQASNIQKMMSDNNGKIDKLLDLYLDNKLAKEKYEDKTKSIETENADLKASFEELNMKINLMKDEKYSYDALLDNLAVVEEHLSTIYRIDTEYSEKDKEDLISALFEYALLSPANNTITFKFTTINDFPIDLKINIDETNLEYEERLLQQQRERYEATQAILDAQPSPISFMELKRLSGLNAQTLRLDEERFGPYSNLKLGKGSPERKAEIIEGIKRLITVNPNMTSIEIAKELGSSQGTILKYIRENNLREGRQHKG

SEQ ID NO: 295 - protein, 465 aa, synthetic construct
MRKKIRVAQYERVSHEDQKKFGSSIAAQRQHLNKFLDEHPEMVLIDEYCDEGISADKLNKRTELQRMLKDIEEGKIDLVIFTKLDRWFRSVAKYYKIQEILEANNVAWQAVLEDYETVTANGKFKVNIMLSVAQQERDRDSERIKDVFAYKVSQGEAIVPSSSLHFPFIVKEIDGVKRVVHNPETEAMTYDWIEHLKTYNSQSRAAAYINEKYNKDFDYNSLVKTSKDTLLYGCYRGNENYCEPYMTKEEFMQLQENLKKNIRVKKNNHVYIFSSKMKCPRCGQSLVGGWTMYKTKESDKNYSYYYKCNFAHHKRKIKSAKACSYTRAIGENYLEQKMITNLKKYIIDFISEKEANVKKDVPKNTKNIKRKLQDEIERLNKMYQKGRINEEDYDAEYDRIEKKINALEEEKKESYDSTKLEELLKTDVIEQYYNSDRLTRQGFWNTLVKEIEIDENKEIVRVDFF

SEQ ID NO: 296 - protein, 413 aa, synthetic construct
MTVKLIKAKHTPEKQRVCAYVRVSTTNSSQLDSLENQIAYFTNLYGNRDDVTFVGVYHDKGISGSTDYRPSFQAMIEDCRKGQIDLIHTKSISRFARSTMTILEVSRELKVFGVGIYFEEQNINTLSSEGEVMLSVLASLAEEELESMSANQRWAFQKKFQRGEMVINTKRFMGYDVDDKGELVINEEEALVVRRIFHLYLDGMGLHRIAKQLNHEKVPTVTGAKWYDTTIRNILRNEKYKGSVLLQKYFHDGVNGKKRLNQGQVEQYLIEDNHEAIISKDDWQVVQEKLNQNSRNQGPNKIYRFTGLLKCQYCSSTLKRQVSYKGKIVWCCSKYIKEGKISCQGMRVPENDINDWQIQTAVTVIERIEDGQKHYSYSSKEGTGNNATPYQRENQSSRLLSGVHRPRRTAIKL

SEQ ID NO: 297 - protein, 601 aa, synthetic construct
MKDNNVEIIKADSIVRRRGMGVEKQYKKVAAYCRVSTDNEDQKNSYDSQVRHYRDYISQRPDWQLVDIYADEGISGTQADKRQDFQRLINDCKNGEIDYIVTKAIARFARNTLDTLKYVRMLKDMQVGVYFEEENIDTLTMDGELLLTILSSVAQQEVENTSAHVKKGLKMKMQRGELVGFQGCLGYDYDVETKSLSINEGEAKIVRYIFKRYLEGIGGKVIARELEELGYKSPRGLDHWNDTTVLGIIKNEKYKGDVLMGKTFTVDPISKRRLSNLGEEDKYYIKDDHAPIISPEDFDKAQEIRLRRAGNKKTVANVNGKRERYSKMYAFSSMLECGFCGSVLSRRSWHSRSDYRKVVWHCVTSIKKGKKYCKHSKGLEEFAIEGAFMEAYRQLYYSNESAIPNLLEVIEEELSDNSLNKELKKITKKLRNLLKKEENLVNLKLNNQISETLYNEKYNEILSEREMLSEEKINVETTLKSDVTVKNRLVEFQKLLTSNKLLTEFDRTFFESVVEKIIVGGINSEGEIDPAMLTIIFKTGDKQYKNGKQFKRRRKNAKQKLDKLCSQNRDEYEKMCLQETVDTRGVCCSAGKSLEIFERKG

SEQ ID NO: 298 - protein, 523 aa, synthetic construct
MVSFDSIIIYLRKSRSDDPAQTVEEVLAKHERILQDYCIKEYGKAIPERRIYREVVSGETIQDRPVMQQLLKELETDNISGVLIVEPQRLSRGDLQDCGQIINSFRYTNTAVITPTKTYNLSDEYDRKFFEMELTRGNDYLEYTKKILNRGRVASVKQGNYICSVRPYGYKKVVIGTGKDKCHTLEIIPEEAEAIKLMYHLYLDENMGFTNIARTLDSLHIKPLKSNNWSAATIRDMIDNPIYIGKVVWNSRKVVKKWENEQITKIRPRNKGDDVICVDGKHEAIIDERTFEAARNKRGLTPKVKKFKELRNPLAGLLFCGTCGHGMSLKKYVDKRSHTGKVTAIMLCNQQAICHTKSAQYDDILSKIKLSLANAISNFEIRLKEQENNNIDMHELRIASLEDELNKLYNKDVKQKDAYEDGIYTKEEYIKRNSKLQERIFSVKEEIADEKNNIPVKIDYEDKIITFKDCLASLDDSDISAADKNVLLKSCIDKIIYYNDMPSKLGIGRYIENSFRLEIFLKL

SEQ ID NO: 299 - protein, 547 aa, synthetic construct
MKIAHIYARYSTGIQAKGTSLHRQIENAEAYAKEQGWTIADIIADEGVSAYHGKNLAQGGLGRFFNEVTNGKVAPDSVLIVESLDRLSRNTVLEQMSLLLRIIKAGVKVVTLVDQKHFTVASVNANPLELIVSLAIMIRAQEESRKKGSRIAAAWSMKRSRLETHKLTKRCPPWLTLCQDRTRYLINESRASAVRAIFRLARVGYAPQMIVDDLNQAGLAAWGKDTTWTVTKVVDVLRNRAAIGEFQPHKMEEGKRVPAGEPHRNYFPAIVSLETFHAANRSSATLGGAMHGDTNLFIGLAWDGETKEKMVLRNNFLMNASCYYGGVRHRWAYRAFEESLLANLAHIDWDTLLAEPSDGSRASARLSLEANIREIELKLLMAANTILTQADASAQLATEIKSLEACRERLQKELTDLESGSSPSADGHTEPSKNRSSFVELVRNGDTASRLRLRQELHRLIKRIELWPEPSATTAVRRYYQLLHQAVETAGLKWEHGPSGWPCYKITFANGQECWVICEYACPPRCKRRKDWHPNTAGLLIWLRNNG

SEQ ID NO: 300 - protein, 488 aa, synthetic construct
MRVGIYIRVSTEEQAKEGYSIPAQRERLTAYVTSQGWEIADYYVDEGISAKDMNRPELQRLLRDVRGGHIDVVLVYKLDRLTRSVLDLYKLLQEFDEYQVKFKSATEVYDTTTAIGRLFITLVAALAQWERENLGERTKFGKEEKARQGKRPGGKAPFGYDKIGEELIVNEDEAYLVRKIFQLYMKYANLNTVAEELYNIGARTKYGAIFSVNTVQKILRNPLYIGTLRYNYTTQKGTTTTIKPKENWVLVENVLPPIIDKQDFDYVQKVMDGQAMKTPRGIVSDYIFSGLVICPNCGNVLNGTKYHSQNKKTLGQPIHYYRCSFTKPGACHKFQIREDKLEQFFLEQLKLRAENIKIGLSKEGKKPALSNEESLRKELESIRQKRKRLQQLFLSDLIEMDELREQINLFNARQVEIEQQLAAEQAAKENSFSDDQLILLLQHTRDSWEETLPSEKKQIVSILVKSICAERDPEKPRGYKLRSIVFHS

SEQ ID NO: 301 - protein, 564 aa, synthetic construct
MQKELKYFIYARKSTDREDKQVASIEDQIFEVQKIAKDKGLIVIDLISESKSAKEPGRGRFNEMLKRIHKGEAQGILCWKLNRLARNPVDGGQISWMLQQGILSHIQTYGREYRPSDNVIMMQVEFGMANQYVKDLSVDTKRGMRRKAERGWYPTPVLPIGYLHNKKKPLKIGIDEEIEIDEKSYLLVKRLWKFLLTKRYTLPEIHKKAEIIGLRNKKGKPYTINTIRNLFQNPFYAGIFYWNNEQDESVEFVGKHKTMITLNEFYRAQELLSGNSRPTRKNNINHKYKGIIKCGHCTSNVCPDHKHQIICTKCKHKFSVKNTHTCPNCALDIKKMKNPTVLNHTYYRCTRRRMNCMEKAVKENVVEQQIQIIFERLFLDEEYYKYLINLLKRENQKKTSETVIEKNLKQNIHKLNSNLDKYLEMRVEGELNAQEYLKLKKETQEKLKVLHVEYQNIKYDSNQWLTTLISASELMLKTQKIFKSNDDKKKNSVLSNFCSNLKLKGKKLYFIRPKALKVLDEGFKVYSAYFATLEPTKSIEKYSVFTCYEDLDARLLPVVCNART

SEQ ID NO: 302 - protein, 427 aa, synthetic construct
MPPLDAPLKYCLYARKSTESDERQIQSIDSQVKEMLQIAERENLEIVDIRRESKSAKDSGNRPIFKELLKDIAEEKFNAILTWAPDRLSRNAGDLGSLVDLMDEKKLMSIRTFGQTFSNSPNEKFLLMILCSQAKLENDNRGINVKRGLRARCERGLWPTCPPTGYFKEKRVDHKGQCLIDPDRGHVIRQMFEKVAYEKWSGRKLYNWLRFDLNFRTALGKKHLSLGNIYRLLENTFYYGPFEYPRGSGNWYQGKHEPLITKELFDLVQDQMKNSQLVRRENIEFAFTKIMTCGLCGSGISATEKFKKLKNGGYNRHIYYGCTKAKDKNCKSGYISEEDLIKQLQKQIDKLDFKKLPVQDKIEGEIKRFKKFQMMATGKNQNIDVSDVDVKNYIKFLLKEGDDQEKRELLTCLNGEILLKNKIINIV

SEQ ID NO: 303 - protein, 532 aa, synthetic construct
MAQKYFLYARKSTEDEGKQVQSVDDQVRVMMEYAERNQIPTEDITVVWENKSAKRCKKREKFTAMLETIEQDKSVTYSLLVWAADRLARNMTDGGRIIDLLEEGRIKEIRAHHRTYTTNDTLQLTLDFGMSKEETIKISRNVTRGMQSKVDKGHLPERAPVGYLNDTSKRKGERDIIPDPQRFETIKRCWWLLLHKQYSLHQIHTEATYTMDLRNQHGEKYARSYFYKMFLNPFYYGVLQYKGKMYPGAHQPMITKAEFDMAQLIVRNKQKPRPSKHKFSYVGLIRCGKCGSAITAYRKQKHQKNGKTHTWIYYTCAKSMDRHCRQRLVREDRLEDMFISLLSEIEIPDEFRNWALDILRRDSEQESNFIREQVESRQRAYQNCLVKIRRLLDMRLDGEIDVDTYTVKMAELNSDKERLNAMLLESDHQFKDWMKEAERLFDIAVMSKKRFILGDVDSKREAILNVCSNLVLDDGKLHLTTVPALQAIKNAAPGIQALHLKLEPSQDIATSGGYARLYEGKKDWCAIKDSNL

SEQ ID NO: 304 - protein, 510 aa, synthetic construct
MDTDIFAIYLRKSRKDLENKDYDVLKRHRKILLDFAKSKNIVIHEEDIYEEVVSGETIQDRPVIQNLLKKIEVGYYKAVLVMEIERLARGNTIDQGIIAQAFQLTNTLIITPQKTYDTRNEFDNEFLEFGLFMSRREYKAISRRIQTGRIQSCKEGNYIGSVTPYGYDKEKLKGEKGYKLTPNDEAENVKLIFDLFLDGLGTSTLAFKLNDLNIKSRTGKPWTPAMVRNILTNKIYIGILTWGKRASVKKLDNNLISKTRPVNHNCIESKGKHDPIIDELTFYKAQTLLKSNSSKKVPKDKALKNPLAGIIVCKKCGTNMIRRPLKNIPDTILCKNHYCDNISSYLYLIEKRLLDSLHTTLLEYYYYLDNYEKEDLKSKKNYDIQIKKIDKDINTLKKQHVRTCELLELEVYSLELFKERSTSINEQVDALIKQKDELIRLNKDNKTEKIIQAIPKIENCLKTYHTLSIEDKNKLLKSIIKKAYYLKTATGGRWNKEAQDNFSIELELNL

SEQ ID NO: 305 - protein, 434 aa, synthetic construct
MMIKIGGYLRCSTKKQSSHNGHVSIAMQKKTVFKYLLLIGLVEKMSDITWYIDEGISGESLDRPDMNRLINDIKCGKINIVATYDFARISRDVIESNLFTNLVNQYGVRVVCVYDTYNGKTADGRMTANVKFAVNQYEREKDVERTNDGLLSLVEVHHRYPSAIVPYGFKLEDKNIYLKEETAAYVKDAFNMIEDGFSLDDVREYLNTVQTEEHFTNDRISRTLRNIKYSGFLLYKDTLYCDIVPKVVEPSVQAHVIEILDKKRRSVHHESYLLTSLVYCKKCEKRMINVFGTSRNGNRYFYYKCTKCGKYFPQIKLEKLLFEMNLKDLQEKRSKINVSKNIQNLDKRMKTLNDELLGGFIDMDLYKELRDQYTKKKEILEKLLPKKQITTLTAEMSDFERLQFYHMNFDRIIVDCEEKEVVELIYLHKEKKEG

SEQ ID NO: 306 - protein, 543 aa, synthetic construct
MPVAVYCRVSSEEQAERGTIEIQKEFAAKYVDLYQLEVFDYYCDDGISGTIPVEARPEGSRLFRDAREKKFDTILFYKIDRLGRKVRVILNAVHDLEELGVSIRSMTEPLETETPTGRFMLTSLAGISELERDTILSRMWAGSQRAARLGNWLGGIVPFGYHVVDKQLQISDDIMPGCNLSEADVIQLIFDLSGNQKMSAIKISDYLNALNIPTRYDLNGINGKRKKNASSIWYPSRVLSIIKSTTYKGTHKYGKRATNKNSKIILRPVPAIVSDELWEKANEALKTNQITAMRNAVREYLLRGIIKCGNCGRTYMGTAYSGSGREKIPYYVCNAKNSYLAHNTEKCISKNVRADWLEHLVLEDCIKILKSPNKILNMDPEKEQQLLADEVKKEHDQIKASLKKLSEERASIIELYRKKIISETDLSCQLEKLSTEEATLQERLKMKIDSRKSAATKQNKEKAISLLKKFTDKCQNLDPEKLSFETKRAIIELIVEKITVTTESAPEKYYPEISVDIEYRFATTPNHIAYVEDCTVTDSALCT

SEQ ID NO: 307 - protein, 537 aa, synthetic construct
MMQQALNAVIYARYSSHNQTEQSIEGQLRDCYAFAEREGLQVIGEYIDRAITGRTDERPDFQRMIADARKQEFQRVIVWKFDRFSRDRYDSAIYKHKLKQCGVRVLSAMENVGEGDVSIILEALLEASAEQYSLDLSKKVLRGQRESRLKGTFLGGLTPIGYKLENRKLVADERTAPIVRYIFEQYTKGTSKQDIINELATRGILNRHGKPLSHSTLQTILKNKKYIGVYTHGGQDVAGGCEALIDEKTFLKVQEQLSKRKHAPAASKAVIEYLLQGKLYCGYCGFNMFGDSGRGRNGSTYRYYACRRRKKERDCKKKNEKKDFIEWYVVEQTVEYVLTPERIEYIASELVAQYKKDCGIDRIKTYEKQLDRIKAEISRLVDTLAVCPAAARQPIFDKMEQLDAEKQEVELDLSKLRISAKIQISKEHIADWLKQFCNGDALDVDFQKRIIDTFINSVYLYDDKVIIYYNIEGGKQVSYIDMIDSTEEPPFSDDAPGSSGGSDLKRPALPEYNRTKLFLPHLRLQAPRLQSPLFYLQ

SEQ ID NO: 308 - protein, 500 aa, synthetic construct
MRMCGYARVSTDEERQLDSLEHQMEFFSDFAKQNGHHLVNVYTDEGITGRQLKKRDAFNKMLSDSKLGLFDLLVVKDVSRFARNTVDLLTSIRQLKSRGIDVIFVNNSQKVLGESEFVITLLGAVAQEESSNLSKRVKFGKNITSKKGRVPPRIFGYDRIDNFTMEINEREAEVVREIYHLYIDEGLGCRLIAITLGEKQMKTKYGNDWNQRNIRRILENPIYSGHYINHRYTVVDFLEGTTKALPKEQHYHHDRPEWAIITPERFQQAQEILEQRRKQYATEYTHFTGRYSNRHLFSTLIRCKECGRAFSRRVTHYPNSDYIYWRCPTNNQYTAKRCSNNTIVREDDLIETLSTYLKEVVSNKESIAQEIARKFKEANAVEGSKPDAQTLEAKKVKLKAKLEKYMEMYANDIITMEALKSKTAEINESINVIDDQLILLEGQRTQERTIESITNEAMAEIERFLSLQSATNMDLRRIIDSIIVDDKKKVKINLKITGNL

SEQ ID NO: 309 - protein, 527 aa, synthetic construct
MIKSKKKQKKQPGKRAALYGRFSPGPNQREESITGQFREGELLCEKNGWNIVLRYADRSLTGRTDDRPEFQKMIKDAEAGLFDILVCYKTDRFARDRLDAAIYKNKLRKYGVRVVYSKMSIPEGPEGIILESVLEGLDEYYSKDLSQKISRGFYDNALQCKTVGGAVPFGYYIDENGKYNINPEQAPILREIFIRYASGERAIDICNDLNERGFRTKKGNLFGKNSLRGFFKNPKYMGVYQFESGDENFEDVSIEGGVPAIVDKELFEKAAMRLKTNQRKTQSIDFPPPVFYLSGKMFDAVCGGAFIGDSGTSKSKKKHFYYTCQNKKARKGCKTKSIRKDFIEDLIISYTSKYVLTEEFIEYIAEIILMLQEEEKDTSVLNSIKAELNTTKTSLQNIMKAIEQGIYTETTKTRLLELEERQLQLETQYKIEELKIHAPKIEKDFIEYKFRKLANANIEDHETKEWIVNMFIQSVILTNDSAIIAYNFAPTEDYSDTVEIDFQTLKNSLNKSVRVSSLNWRLGDSNS

SEQ ID NO: 310 - protein, 582 aa, synthetic construct
MDTENTKPLAYSYVRMSTDMQLKGNSLERQKEKSKEYAIRHDLQLVENFEDIGVSAFKGKNIKEGMLGDFISLIENKTVPAGSYLLIESLDRLSRENIFESIPLFIKILKSGIKIVTLIDEQVYGAENADFKDLLYPMVVLSRAHEESVAKSFRVGKAWANKRKNIYQRKLTKVCPAWLKLNTDSNSFEVIPGRDDVVKRIFDLADSGYGSYSIGRILNNEAVPPFGEDSKGWHASYISRILNNRSVLGEFQPHRQVNGIAEPDGDTVPNYFPQLIDEEQFLRIKHARRKRQVEGAGRKGPVYRNLFSRIAKCAYCASPMRFVDKGPPPKGGQFLRCTNADRHFGCSASNWRYDHFENVFLYFVHELDLIETLKRADEQSERYTLEQKLVSINENIRGKRELLNTTFDMLQTSNASKDFIQSKIEEISSEILELENQKGAVEAKLEKDAALAPVDDQQIKSLIKELQDADDGDLERKRRVVANRLQMMIKSLTLAPDGLRKDAEKLVLSQFGSSEALFDFFETGALSGEVSTGMSFSVVLLDGIMRRVTVSRREPLKVIQLIAVDKHGLIIETEQTHESLKI

SEQ ID NO: 311 - protein, 429 aa, synthetic construct
MRVRIIEPILKVQKKKKRVCAYARVSTIHDKQGESLDNQVQYYENIVSSNPEYEYVGVFQDRGITGFTGNRPEFQRMLHLCREGQIDIIITKSISRFARNTAVVLYTVRELKNLGIEVRFEKENINTLSGDGELMLAVLSSFAQEESRNVSENLKWRARKQFQQGELMINTTRFLGYDKNEYGELVINIKEAEVVNRIYNDYLCGKSSSKIAKELNKEDIPTVGNKTWHNSTIIGILKNEKYKGDAILQKYYTPEHLKKTSIRNNGVIDSYYIRENHSPIITKEMWEQVQEEIKRRGITKGNVLGDSDKYTKRYALTGMLYCSKCGSTLRRRTWNSKNSSKKIVWQCSNYIKNGKDACNGTSIDDEVISRLNIKEEIIVKEEVKDGKKHYSYTCKSKQNQFSTNHRTTEKENGSLLQSINRPIRTVIKL

SEQ ID NO: 312 - protein, 536 aa, synthetic construct
MERREDADELAVLGFTSDELHEMGLAEPATGDPEQLMDVYLRRSKKQEDMATLRGHLRDMVRWAKANNMAIRHVWLEQRSASKAHVRRDEFEAAKAAVLARRSLTLGVWKTDRLDRRGMGEVGSLLDELDKRRARLVSISEGLDSSKGGRMVFAILSERAREEAKDISLRVQIGLDSHRILGRAPGGRPPYGVRHVGDGKVGPDPAEYPTARAIADALLAGDAGTAISHRLTAEGATTRTGRHWSANAISRMAQSPLWAGLVPYRERQTDEYGNPIDKWGWKAEPLLDAEGHPVSCGTGVVSVTEWYAIRTYFGSRTVAGTVGRHGVRSASKILTGIMRCHHCGVGMVSGGDSYRCRTRMEGGPAACLGVRTSAARVDWMVGEMWVTHVSALEPDDPVLSEIARRWLAYQDPERAERQRHVSAALDDAERRMTELEDAYFVHGRIKRDRYEKLASSLTDQIEGQRTELAELQRQSDLTPLLDGVLLAEAWEAAELVDKRMLLRCAIDALTLLPSTGQGDRRPIEDRLDVKWVSADA

SEQ ID NO: 313 - protein, 537 aa, synthetic construct
MSMDQSKTKAVIYCRVSNVKQTTRGNGLASQETRCREYANYKGYEVIEVYQDDVSGGLIDRPGMQAMLGHLRRQRKDPHIVIIDDISRLARGIEAHLQLRAAIGKAGGVLESPSVEFGEDSDSILVENLLASVSQHQRQKNGEQTKNRMRGRVMNGYWVFQAPIGYRYERVTGHGKLLIRNEPVASIITEALEGYASGRFQTQAEVKRFLESQPYYPKDLPNGEIRYERVRDLLRRPIYAGYIEVPKWDVKLRKGHHEPLVSFECYQKIQERLTDTPKVPAKTNLHADFPLRGFVTCGDCGKPLSGAWSKGRSQRYAYYMCFERGCVSNRKSIRKDELETAFEALLDQAQPAEGLCHLVFDMFKDLWERRLSQSTALVRMMKDELKKLDKQVSQLLDRIVDASSDTLISAYEKRVTDLEKRQIELKEKITENGKPKWDFDETFRTAIEFLSNPHRLWDSDRIEDKRAVLKLTFADKLAYVRNEGFRTAALTLPFKVLSETDEGENKMARPRGFEPLTSASGGQRSIQLSYGRAWGAT

SEQ ID NO: 314 - protein, 574 aa, synthetic construct
MTTASKIGQEEKITALYARLSDDDPEEEKKKGKSKPEDKESNSIQNQRTILYDYARRNGHLHPKFFYDDGVSGTTFERPGFKEMEELVEAGKVSTIIVKDLSRFGRNYLEVGNYLEVVYPTLGVKFIAIQENVDTLAGTGTEMMPFHNIFNEWYASQTSKKIKAVWAMKAANGKRISSAVPYGYVKDPTDHDKWYVDEPAAEVVRRIFALCIGGLGPFQIAKQLESECILTPTAYYRSIGRPTSNKAPTDPYHWSDSSIENILANRQYTGCTVNFMTTTVSYRVHKTVYKPEEDWQIIPNTQEAIIDENTWLRVQELRQNKRRPTATGRKSLFSGLVFCPDCGAKLHFSTAKSLGRNQEHFRCANYKSGRGNCKIHYIRNVVLEKIVLAAISELADFVRCYESVFLFLLAKKNDSLRQKSLQETKSKLVRSQKRVGEIDRIISRLYEDNIVGKLSDERFSKMSANYETEQKELVRTISLCEQELREADKAQVGLRMLLKGLREFTEVRELTPTIINTLIRRIEVHNNDKYDGHCHVKVDIYFTAAGMITLPTEKELEKLMDEIRQNPQQYRITA

SEQ ID NO: 315 - protein, 521 aa, synthetic construct
MNKTVTTIAPTRAMPAITDKETNMTLMRNVGAYCRVSTDSDEQLNSYDQQVEEWTKRILDNPSYRLVKIYADAGISGTSIKGRDGFKEMLDDARRGKLDLILVKSISRFARNTVLTISTIRELKELGVEVYFDNEHMSTFDPKNEFMFSIMSSMAQEESRHISENVKWTFQKMMKEGKPFVNCTRFLGYKKDEQGNLVIVPEEAEIVKYIFELYDQGYGPAAIEKKLKARHYKTAAGNPYWYASTINGILRNEKYKGDLLLQKSYTVDYLTHKAVKNKGEVQQYYVSNSHEPIVSIELWERVQKRLASQALKTRGKNRDLSKYNARYPLSGMLMCYHCGRSFKRRQWTQGYKTPKIMFQCNGYVTTNMTNKRCVAKPISATIIYEACVDVINKIYLSNGKAFQKILKAIETNLEVANIDKDLQAKYDRRKELENQLDFLLNERMKKNDQEIQRKLDTKYSETMDQYNSVQMDIAYLSQRKERTSDSSERYQKIKDILKGKTLTAEMLTKEVIDAFILPLLF

SEQ ID NO: 316 - protein, 554 aa, synthetic construct
MTLAVTPETRRVATYERVSSDDQALRQTIKTQTDELARSLARDPSVVLVDRYADDGVSGTIPLAERPAGGRLMRDAAAARFDELHVYKFDRLGRDAVDLLVVRRRLIELGIRVISVVEAEPDLLSYDLLSVVADHARREFLRRSADGMARAAREGRYTGGIVAYGYTVLGTKGTARLMPDEREVAPGLSAADTVRLMYRRVADDGWSCERLARELNHLGVLPHYARDARQVRRGERRQRTQGIWRAGRVRNTLANPLYRGELAYGRRTTKAREVIRAKVVPLVEPALWERAQATLAGHRIGVARGDRTYLLRGVMRCGSCGLTYVGSATPRGSAWYRCNGRSARRGPLGVLCPGRGFRADLMDALVWRDVERLLIEPESLVAELGPVSPTGPDARRRAELLAQAADVAGQQQRAVALHIRGHLGAPELEVELARIARERAAIEAELDAGGPLGAVSRTELEAVITATRDRPAAGLTDGQQHELIALLVRGIVRSAVSTGVAAVEFTYRLAAATSPTGTEAAVRRTVGLPLPRQRRPGPPGTLGSSGRQIDPAVP

SEQ ID NO: 317 - protein, 463 aa, synthetic construct
MEKKKRVALYSRYSTHTQDGNYSIEIQLERMEAMCKSKGWEVTEYFSDAAYSGANMDRPELQNLLSRLSEFDVVMVYRLDRLSRSQRDTMTLIQDHFLLNDVAFVSVSETLDTTTAFGMAMIGILAVFAELERATITERMQSGIKKRIEAGYRLVSGNHMPTGYKKGSDGNGNNILVIDDTQAKKVQRIYELYEQYHSITKIQHVLKEEGYSGRRFTTIRQILSNRLYLGEVKYKNEYYEGIHESIISPEQFDRVQALLARHPKGANAGKAKESLFSGFIYCGCCGENYKTYSYKVENKVKGDYYVRSYLCRARRFPSEYDQKCMNQIVKNDTLEDLFIKNLDILISNRQTETVKSKRKTNYDLALKKVDEKIARLIDLYEDGELDKKTLNIRVEQRKKEKEDIILKKNLEAQYEAVNIEIKDVNNYLTKYEMMDFIEKRALVEKVLDRIVIEPNEINFEWNI

SEQ ID NO: 318 - protein, 526 aa, synthetic construct
MNTLITQGSSALTPEREIIRIKATATEIHTKLRVAGYARVSSDSADQLNSFSAQVNYYQRLIEKNSGWELAEIYADEAVSGVSTDKRDDFGRMLADCQKGKIDRIITKSTSRFARNTLDAIRVIRELKDMGVTVYFEKENLDTATLTSENLLTLYSLLAQEESLSISKNCKKGNRMRMEKGVYVSSNPPYAYRLIENQLVVYEPEAEIVRRIFTEYLGGSSITRIAQALMEDAVPFKNGRMKWRHQAISNIIKNERYVGDMLLQKTYSEDALPYRKCKNKGELPKYYVRNTHKPIVERIQYELANILLKERGEHINSECGEYPLSRKIRCKECGTAYRRKITNQIPYWVCRQHDNNKADCGGERIREEAVHEAFVRLYNKLKQNYAGILLPMLSGLEKLQELKTRNNPEISTLNKQIAELSEQNHVMNGLLSKGILDSALFISQTDELNRKIRSLKVTKARLLSEQESDGVLDKTEDLVEIMENGPDRISSMEITLFHEMVEKINAHNTQTVDFILINGLVLTERL

SEQ ID NO: 319 - protein, 584 aa, synthetic construct
MIIMTEEKLIQQIERGDFKDYYLAYPRRSTDDEDNQKNSISFQKDGIFKLAIKDEIKIAPITIKGFCTEGVVTERHSGFKQSENFTVQKNGKVVIQIERPKFQRMMHYLSKGYFKGVICLSWDRLSRNETDNVIIGNLMKQGVDFRFVFTKYEDSASGALYMGIDGLFAVHYSRVVKERVTIGIHKARNNGKCTYRAPIGYLNQKGVDYKHFDPKRAEKVKQLFELYATGNYSLSDLARYAADQGLTTVPMRRKRTTEEMNEDEVVKLPKITRPLTVTHISKILRNQFYLGRTLGNYGEYVPSISHKALISQQLFDKVQRLLKKKYVSVYYEKKNDLLLRGLLRCWECNRAYTPYVKKRHLYLRAKCNKKCANTCRNIRDEKLFGIIAHTIRNLYLGTLQRKQLNRASDQKLEVLKLDFEKSKLKAKQRRQKVQRDLDYLTSNKLELLSTGTYDAEGYANELKKLNEKITELDEKLSVNVDTYAESSKTADNLGELLESLMYYYQMAIPAKKELIIKTLFGELFISDMTLKYSLNSEFFVLNERALSFGDPKGSYGELLMQSEQLKKMKKGLALIEKLMDDLKE

SEQ ID NO: 320 - protein, 539 aa, synthetic construct
MKKVIGYLRVSTSNQDIKRQKMLISEYCKCNNYQLINYIGDEGISGATDERSGFQSLFDLQLSDCDMIILSELSRFSRSDSMIDVANQLKRITDNGIDIYILNTNKLISKGFDKEIIDVVTLVIESEAAAKERKKIKERCLSGKITKAKSSPFSIGACAKFGYKIENQTIIKDETDAEVVKDIFDKYCAGYSSKDIASYLLNINNSRKWNANYITKLLSEPLYTGLYNVLINGEKIEKYYPELRIISDEQFELAKEMLSKNSKRLAGKKTDKIFTLRNLIKCANCGRDFSIKNNKVYQCLTFHSHYANQGAKCVSSSLNIELTESAIFKAVAHYALTNKHLNNQTEELEQYNEQLSNYNQIKEVKENRISELNEEFKRYLSKAIKYNLSDSDIDEFRDNTDKDIKLINSELKDLNSKIKTLNKRIQFILNESNNSEAYSNLFANTQNDKELTKQMLEDFIDVIYVHSFKGFTMLQIIRKDGIEQYIFLKKWSKMVYHITSHDYQLTDGRFFRGSDSCTIEDMFNLILQQDTDIYILDLN

SEQ ID NO: 321 - protein, 434 aa, synthetic construct
MAKIRVITKQLELPKLVKVAAYTRVSSDKDAMLHSLSNQVSYFSSYIQSNKNWIYCGVYSDEAQTGTKSKRSAFQRMIQDAKNGKIDIIITKSISRFARNTETLLKTIRELKEINVDVYFQEQNIHTLSNDGELLMSILASYAQEESRVSSENSLWRVKKNFNEGKIYGGKNCLGYKIVDGQFEVVPDEAELVKLIFNLCEQGYGDDKIAKTLNDMGVKSYFGNLWYRSSVRGVLTNYNYTGDLILQKTYRENHLTKTTKINYGEMDMFHVVNNHEPIISKEQFQNVKRIRAERLPRNHRVAFTLHSFTGFLKCGVCGRSYKHKKNKYLEYWVCSTYEQLGKSYCDSKQIRDDVLKKATCQVLNLEEFDTQKLDQFIAQIEILNGNKLTFNMHNGEKREVNWDVPKRSDSWTDEMKEKARLNALKRKTVAGGSE

SEQ ID NO: 322 - protein, 579 aa, synthetic construct
MPRRFAAGAKCGRHRVHCAIYTRKSTEEGLEQDFNSLDAQREACEAFVASQKHEGWIMLPARYDDGGYSGGTLERPALQRLLADIRGSKIDVVVVYKIDRLTRSLLDFAKIVEVLDTHGASFVSVTQAFNTATSMGRLTLNVLLSFAQFEREVTGERIRDKIAASKKKGLWMGGYPPLGYDVRDRKLVVNETEAETVRTIFRHYHELGSVRLLKERLDAAGIISKRRTAPDGRSYGGKPISRGALYLMLQNRLYRGEIVHKNDAYPGEQTPIVDPALWQKVQKTLAENRVDRGVAKGSHQFSLLAGLLYDAHGEPMTPSHAVKKGVRYRYYVSKSLVTGGIKAEGKGQRIPAIQIETLVSDRVCGWLADPVAVLNAFAGSEPDVVAQKRLLSEAAQLAASWKTLDAERLRALLRTIVRRVQVHADRVEVTLDHMAVASWLNPTDHREPSQARAEDRERHLTMLKIPARLKRAGIGMKLVVEDGSEPATVDAVLVRLLLRANAIRARLIEEPGLTLKEIAAEDGISGSYVTRLLRISFLAPDIVTAILNGRHPPQLTANRLMDDTRLPLDWGAQREFLWS

SEQ ID NO: 323 - protein, 496 aa, synthetic construct
MNEVIEAIGYIRQSDERSDKEDISEQTQLKKIQEYCDYHGFKLVGVFKDIDYSGFRINYTKRPGIMGALSKLKTPGNRIKKFVVYNLSRVTRLKQDFGYIHSSLAKLNVDICSASESLDFGSPSGRLVAGILVDFNEYYSDNLSDITMQSKKTNAEKGRWNGGPPPYGLKKEGDRFIVDEPAATVIREIFKMALDGKGPFIITNWLNDQGFKMVSGAEWSVRRVRYVLSNSTYAGMQHWEGEYYPLKDCDYLIEWSDFQFIQNTRFAKGTVWRGHDDRQLLSSILRCPLCGSKMHARRVSSRLDTRRYICSKKNSTGKCACPSFDLESLDQAVLKLLTDTAKQRFSSHQIMSALSDKEDSENNSKKSSLAKLQQEYQILDAAKQKVFDDYYLNSKLSEEQFGALMKRYESRQKEIDLLLEKVPLPTKKEYGDYDDILETLAGDALLSLPADKRRISIELLIHKIIPGSPAEVHFKWGDVQEIPVQYTKRKGSTYFY

SEQ ID NO: 324 - protein, 528 aa, synthetic construct
MEQYCMYLRKSRADREAEQRGEMETLSRHEAALLALAARNHHPITKIYREVVSGETIAARPCMQELLSEVEAGIWTGVYVMEVERLARGDTIDQGVVSRAFRLSSTLIITPIKTYHPDNEFDEEYFEFGLFMSRREYATIKRRLQRGRDASVREGKYIGNRTPYGYYREKIPHDKGFRLVPDPDQADVVRNIYKWYCNGIPADGVSPTTFGMAKIRDRLNGLGIPAATGGPWTISSVSGILQNPVYTGKIRHNYRPAEKSLSGGVITVRRPRNGSGDLYDGLHEAIISQESFDMVQDFMKNRKLPSIPYKKKMANPLSGIVRCSVCGKVMIRRPYQSGRQCTLMCQTAHCATVASDLDDVEREILNGLAEWLKDYKLQWNIPDSADSSPAVSMLQTQLVQKRKEEERLQSQLDNTYDLLEQGIYTKDVFLTRNKMVVEKLEDVHISINSLEKEIVLEQKRLQAKIDVIPKVENILDVYWTLPDAKSKNDLLKSVLDKVIYTKSGRNGPHRKVHYTFALDLYPRLPKSP

SEQ ID NO: 325 - protein, 525 aa, synthetic construct
MYLEISNPMDYHVALYIRLSKEDETEGPSQSVTNQKSLLKEFVQQHHLSVYDIYVDDGWSGTNFERPDFQRMIKDIEAKKVNMVITKDLSRLGRDYIMTGHYMERYFPEHRVRYISLLDGIDTGVDSTANDITPFRAIMNDMYAKDISKKIKSVKRDKQRKGQFIGGKPMYGYKMHPTEKNKIVVDEKVAPIVRRIFMMALSGMSCRKIAATLNDEKIPTPATYCGWKVGNPGPYTGLWSSERISEMLKNETYIGNMVQGRMVKISYKSKKCIKRAPEDWVIVKGTHEPLVDQETFQKVQMLVNSRKYTRSRTYDFLLKGLIFCHECGHPMAVINRKNAEGEDCLYFVCRTYQRFTKAGVCTCHSIKEETVNEAVISKIRNVCQTYLNVEYLQPIAERVLKESCKEEQCETEIRALQSQIVNLTAHLDRMYMDRINGLLSENDFQRIYSKTKTDRGMLEHRLESLRVQREQPTSTADRAKELVQRFMDSAFTSREVLVSLVERIELTENKEIIIKFKFHELETIS

SEQ ID NO: 326 - protein, 437 aa, synthetic construct
MGRKITKIEAMTPMPKRKRVAAYARVSCGKDEMLHSLAAQVSFYSDLIQSRSDWEFAGVFADEAETGTKDSRPEFQRLIAECQSGQVDMVITKSISRFARNTVILLETVRDLKERGIDVYFEEQNIHTESADGELMLTILASYAQEESRSISENCKWRYRNGFKEGKPSNYIRVYGYDYKNGRLTVIPEEAEVVRMIFTDYLGGMGRNAIMKKLTRLAVPTKTGGRWSESTVMSMLSNEKYIGDMMLQKGYVADHITKRIKPNRGELPMYYVEGTHEAIIDKETFEAVQAEIAHRSALSHHPRTKTVSEFSGMIHCARCGANFCKKINCSGTKYAKVIWACRTFTYRGKRECPAKRIPEDILKAKCAEVLGLAEYDPEAFKSQIAAITVPDDGVLIFEFHDHTQTTVMWENPSRRESWTDDMKAVARERAKEGHANG

SEQ ID NO: 327 - protein, 576 aa, synthetic construct
MKIAIYARKSKLSEQGESITMQVDICKEYIDKFTMIQNPEFKIYVDDGYSGSNTVRPQFQQFLKDIQCNKFEMLICYKFDRVSRSLQDFINIQSTLANKNIEFISVKEHCDTSTPAGRMMLNMIASFAQWERDTIAERIKDNMHKLARSGRWLGGTTPLGFESEKIEYYDENFTLKKMYKLTPVQSELETVKLIFSKYLELKSLHAVETFLRLNHIKTKRSCNFLPSTVLSVLENPVYAIADSAMYDYLQSNNCDIASAKTAFDGKHGLMAYNRTRSASGSGGYQPKNDISDWIIAVGKHDGVILGAEWVLTQSIRKASATQNCYKVRAKSKCGILGGLIKCAHCQSTMRLKKGKILKDGTQAFVYICSTKEVTNRQLCNQKNVQGKDIDSDVLNYLVSLADESSEQMQILCSKKQLATQAVETNNNELQLLKSEVEEKETAIENLLQQLSTLNITQTEISNLIIAQIDKLNKEATAVRQKLTEAEIVNKNTEADELAISLVQKALVELKNLVTLNDIDMQRTLVKNVVKQMVWDGTRMVIELYYRDSAVISGVYNGESTLVKTTLQSDSERNTDC

SEQ ID NO: 328 - protein, 552 aa, synthetic construct
MNIHSPTTTARAALYLRVSTARQAEHDISIPDQKRQGEAYCEQRGYQLVETYVEPGATATNDKRPEFQRMIEAGTSKPAPFDIVVVHSFSRFFRDHFEMEFYVRKLAKNGVKLVSITQEMGDDPMHQMMRQIMALFDEYQSKENAKHVLRAMNENARQGFWNGARPPIGYRIVAAEQRGSKIKKKLEIDPLHADTVRLIYRLFLEGDGTSGAMGVKAIATYLNERRFFTRDGGRWGLAQIHAILTRTTYIGEHRFNTRSHKNREKKPESEVAIMAVPPLIEREIYDAVQARLKSRNPMVTPARISSGPTLLTGICFCAKCGGAMTLRTGRGSAGQTYRYYTCSTKARQGKTGCKGRTIPMGKLDHLVADYIGDRLLQPKRLETVLASVIERRQERTERRREHLAELQRRIAEADQRLGRLFDAIEAGMVDKDDAMAKERMVSLKALRDQAAADAERTQFALDSSGNQGISPDMLKGFARKARERIRLDGGGYRRDHLRALAQRVEVADDEVRIMGSKSELLRTLVAASSGKPAAFGVKSSVLKWRTRKDSNL

SEQ ID NO: 329 - protein, 528 aa, synthetic construct
MMIRTAAYARYSSDAQREASIRDQLRNIEACCAQRGWPPPKVFQDQALSGARSDRPGYQALLAAVDAGLIDVLLVDDFSRLSRDNLEATRAVRLFMHHGVRLIGVSDGVDTARQGSKLDTGFRALMNELYLDDLAEKTHRGMTGQALDGYSTGGLPYGYDSVPDGQGQRRVVNEQEAQWVRWIFQRYVEGNTPRAIVDQLNRLGVPSPRGGTWVATALYPDAKGTGILGNEIYVGTLIWNRTKWSKHPTTGRRIPAARPRSEWVIKEAPELRILDEHLWEAAQARTRAIRARTSQQRDGGSKTRGGGGISKYLFSGLLRCGCCGGAYVIVDRTRYGCATHKDRGDAVCSNTLKVKRAVVEDRLLAGIKRDLLSDEAYRVFEDEVTTLLKASQPDPAAARKAEAKARLEVDNIVNAIRQGIVTPSTRRALEEAEAKLLEAQERLQEIERFTPTETIPRLKETFARLVKGLEGADDVAAMREAVREIVGEIRLVPEGDELVAEMTSAGLAGACQMALVAGARFELATFGL

SEQ ID NO: 330 - protein, 485 aa, synthetic construct
MKIAAAYVRVSTEEQTELSPDSQVKLIREYAKKNGYIVPKEFIFHDDGISGRSTAKRQGFNQMIGTAKLKPKPFDAILLWKFSRFARNREDSIVYKSMLRKLGIDVISISENVGDDKMSVLIEAMIEAMDEYYSINLAEEVKRGMTEKFGRGLKVSGPPLGYDMKNGEFVVNEQGAEIVRRIFDMYVNQDMGYLNIARELNAEGIRTLHGNDFETRTIAYIIKNPVYIGMQRWTPGGGGSKGHYRSAVAENVVVTQAHHPAIIDKEIFEKAQQKAVKTRRPYERSGSTKHEYMLRGLLKCSSCGSNLTMASVKSGTLQCYQYAHGRCKESHAITIGKIDKAVIEDIQGLVDGTATDYKLVDQSHVKPKKDTSKFETQLERERMKLERVKAAYADGIDTLEEYKHNKSEVLASIAELESKLRQAQPPKPQHTADRLPDLKVRAQEVLKVITSPNATPMEKNNALRTIVDKVVFDRKTSSIEMYYLC

SEQ ID NO: 331 - protein, 628 aa, synthetic construct
MSDTIQISTEEKKTKIRERYKGISIDNLDVIPAISTEDFYDETKIKRVGVYARVSTDDPRQTSSYELQKNHYHDMVNRRPDWKLVEIYADEGISGTSLKHRDDFLRMISDCEAGKLDLIVTKSVARFARNVVDCIGYVRALAAMSPPIGVFFETENIYTLNPNAEMSLSFISTLAQEESHTKSEIMNASIEMRFQRGIFLLPVLLGFDHDENNDLIVNHSEARIVRLCFFDYYLGQSSNDISERLVKLKCKSKRGNICWSPSVVLSILQNERYCGDVLARKTFTPNYLNHKSRRNRQDRNQYRQRDHHEAIIPRDIFIAVQHMITNRKYGRQSHLPNLFVISIGMLKGFVSINPRWRFRIEDYINASISVYDDIVKIQSKPLELRVNPGDFDLSNYEVTNSIFINSKRFPALLLSHSQLRFSLAAIQLLGGCPYIQILIHPGKYQLIIKPATEGERNAIKWSDTIQGKIIPKFISGSAFIPTLYKLCGWNASYKYRMVGSFYRTLDTSILFFDLRDTEILISIDEYDNKSNIDLFVTKKYVKAYPIEWCNSFGKKYFESSQDFLFKDLYSERLEFVPYYASCNHVKSYTTEQLTQEVEKIVKELEMERDNEHGTEYPVLASTDTETIL

SEQ ID NO: 332 - protein, 537 aa, synthetic construct
MNKMVIGKYIRLSQEDRDLGDDKAVSCSILHQRDLIQNYIKNNPELAKCPQQEFFDDGYTGRDFERPAFERLLEKIRAGEINCVIVKDFSRFGRDYIELGDYLERIFPFLGVRFISVNDGYDSNDYKGTTGGLDVVMKNIVYDYYSKDLSVKVTTAKKQKMKKGEYLGGHVPFGLMKNPEAKGKLMPDPEVAPVVKEIFGYALQKMKLKDIVAALNDKGYETPAAYYRRKHPGTKKYANSSALSGWTMDNVRNILQQEMYYGAVVQHKRECVGVGGKHTRAVPKDKQIIVEGMHEPIISKEVFLQAQEIFYHWKDRKPGKARNFPLKGKVKCAVCGRTMNYRSNTIRGRDYNYFWCPLSKYQDGSQCSKEYIREADVNEVVWQSIEQLQVLADKAAGRIARKKAGATDIHLKKVKELADLQRELEKCNTEKFANMDGFMAGTVDKETFQKRRGELTEQESRLKEQIAILEKQVQELKMEGSGETARAVEKIRSFSGAEALSAEMAKALVKEVRITDREHMEIRWNFKDEVMEFISEE

SEQ ID NO: 333 - protein, 565 aa, synthetic construct
MPVKAYSYVRISTPEQRKGRGEERQLDAARAYAAKHGLDLDESYIDPGKSGFHGHHVSKGALGRFLELVANGKVAVGSYLLVENLDRLSRQAPIDAQAQFIAILQAGIKIVTLMDGQVYERGRDFTQMIISLTVMSRGHEESARKSYNSKNNHDKNRQDMLAGLPRFQSGCVGWIDQIRTPGSKDCKFALNGHAKTVQRIFELADQGVGALRIARILNDANTPPLKASGTKWWETTVVRILNNETAIGTLQVNDTVDGKLVPMGDPIKNYYPAAVSEELFWRVQRNKKKAPTKGRKGLSFTNLFPMTTRCEHCGGGLGLVRSTTKGDYQYYRCKKRYEDGNCPGPSALFPYNVLEAAILDHVKDFYLDADISRKSGTTPRDEMVTAIAAIEARLFDLEKERKNTLAMAGIVEHDEDRAELQATLRSLRPQIDQVRAELSERQSELQEIDDKQSEMADVVDVIAKERAVWATGSHDEVFVSRSRVSQSIRNFVHDICVNFELQTVRVQVAGATKSYEFNRKGELTNVFHSPLSTDEMREMVSFVYGEDRVEGIMDAHNKVKSLHSK

SEQ ID NO: 334 - protein, 573 aa, synthetic construct
MKVAIYSRKSKYTGKGDSIGNQIQMCKDYIENLYKNKKIEYSIYEDEGFSGKNTNRPEFQKLLNDIKKEKFNVLICYRLDRISRNVADFSSTLDELQVYGVDFVSIREQFDTTSPMGRAMIYIASVFAQLERETIAERVRDNMIELAKNGQWLGGSPPLGYSRKRETCYDENGNEKAISFLVQEPDEVKLVKLLYDTYLRLGSIHQTERYLMNNGICAPSGKLFATSTMHKILKNPLYAKSSDEILKYLEDDGINVFGSPDGIHGILEYNKTSVIARDGKKTTPFKDKSEWIAAVSKRCEGFIDPDTWLKTQKQLKTNSALSPNLGKTNNALLTSKLKCKCCGSSMGITLGRRLNETGLCKVYYRCNLKRRSSGHLCNSKNLIGDKVDECVLDSLVEMAKNKQAFLDRILKSKKENKKLKEDKLKKSTLEKQLANKTKQLNGLLDKLSVADDLLDIFMNKIRSLKTEISQLEENLKSIGENIENNSSELYDIEFINAVLDKCVNIKNESIESKRRIINFLIEEIIYDAETELLEIYPIGSGGSKKKRYNTFIKEITNDPLLLHFYSRTSWAAN

SEQ ID NO: 335 - protein, 536 aa, synthetic construct
MKVWLYYRLSRDEDAELNSLTNQRNILVEYAKANNHEIVGESYDDNVSGMHFNREGINKIYEEVEKKSFETILVKDMSRLGRHKTQTAIFIDYLRENGINVVSVTENLDTGNESDDLIIGFKGLFNDMYARDISKKVRAGMNQKLKDGLVLTPPMGYFKDKNTNEIVIVEEHAEIVRRIFDMYLSGYGFNAIAKILNEEGVKSPAYYQKKLFGKNLGYNKPEIGRRYLWDNKGVKRILENEFYIGTVVNHKTYNNKINHIRKNLPEEEQYRHENIVPAIIDEDKWKQVQFLISDKVKRNVRAGSNKPCHRYAGLIKCGDCGSCFVCKTRKWREHPDRIEYVCNGYHRYGKENCSPHRVNERDLDELIYKEILGVKDSAIDNYKSIETNVKKWMKKKNTVNNKLKKLEDRLEQRKSDQKEILLERIRDKEHAEIYTEMLKTCEEDIQQITEEIESIKYYNTTIKKRKSELKKTVDLIEEIIKDGAISDANLRLLVDEIKIYESDKKLRIEINLKAKFTKHYEIYGKSGVEHNLILQG

SEQ ID NO: 336 - protein, 435 aa, synthetic construct
MAAYCRVSTDQDEQLSSYENQVRYYKEYIQQNPLYELVDIYADEGISGTNTKKRTEFNRLIADCRKGKVDRIIVKSISRFSRNTLDCLKYVRELKELGIGVTFEKENIDSLDAKGEVLLTILSSLAQDESRSISENATWGIRKKFERGEIRVNTTKFVGYDKGENGNLVINEEQAKIVRRIFRDILQGETPESIARSLKEEGVPGWNGKANWYPTTVQRMLQNEKYMGDALLQKTYTVDFLTKKRSENQGQVNQYYIEGNHEAIIDKEEWELVQLEIERRNQFRQDNHINFYIIQCEQNPFTCKVFCKECGGLFGRKNWTTSRGKRPVWQCNNRYKVKGVQGCTNRHIDEETLQQAFLRAIEVLRENKEKLQEKWNNFSEEQKLEKYHAAQLQEMLDRDQEQLNGRKMCQVLEKVTLDEDGNISIKFLEGTEVNL

SEQ ID NO: 337 - protein, 569 aa, synthetic construct
MTNSNLVLADCPQMMEESTMKQSDKITALYCRLSRDDESQGDSNSIVNQKAYLSRYAKEHSFRNTEFFVDDGYTGANFQRPDWQRMMALVEEGKIGTVITKDMSRIGRNYLEVGMYTEITFPQNNVRFIAVNSGVDSANQQDNEFVPFVNIINEYYVRDGSKKVRTSLRLKGESGEHLTTIPPYGYVKDPDNSEHWLVDPEAAQVVKRIFSLCMDGNGPTQIARMLKEDHVLTPTVYQDRQKRKVRCALPENPYNWNGSTVAAILERMEYCGHTVNFKTHRQSYKIKKTIENPPEQWKIFRNTHEAIVDEETFQRVQELRRNKRRPARTGKSNLFSGVAYCADCGEKMYYCTSRNFEERQDHFVCSTSRKKGKDVCGTHFIRAVVLEKGVLKFLQILLWYISDCEDLFRDKLGAKRKEDFKKELAAKRRQLTQAQRRMEELDRLFKRLYEDNISGKINDSRFEKLSADYENEQTELTEKMQLLEQEIAQQEEEADSIEQFILRAKKYPNLQELTPAVLHDLVNRVYVSAPDKSSGQRVQDVHISLACIGFLPESIIAEMLTHASKSRTA

SEQ ID NO: 338 - protein, 565 aa, synthetic construct
MARTSRKNIVAPVKSPPTPKTEYSAALYARISVEDERKREADTIGNQIQLLRDFAGEDPDISVFDVYCDDDVSGTDFQRPEFSRMMNDIRDGKVNCVIVKDLSRLGRNHLESGEFIEMVFPYLNVRFISITDRFDSLYKQADISVQIKNLLNERYAKDVSKKICSVMESMQKQGKYVGSKAPYGYLRDPMDKHHLVIDPEAAPIVRELFEMVAEGCTLHYAAVTMNDRGIPSPGRHNFNLGLVKSDKFKNSLWYQQTVRKILIDRTYLGWTIGGKYRSDFYSSGEKKSKAVPKEDWIITKGTHEPIVSEGLFDCVQKYFDDLKHTAGAATKYNCKSKQASIFKGHLRCGECGKAMFLRAKKNNGKTTWWYYCTLHENYNSSYCPKKAVKKEELESSVLRLIKVQMQLFTDAQAIVASLNQREKNKSRYRIFQEQIRSVMARIDLYGERKATLYRSFKEGILSEQEYIAEANACATKADELRIFAHELEKEAQKYSPEYKGSIYWTELIKEYGNRTELDAAMVDALIDEVVLFNDGHYEVKLKYRDEMEELLLNAALWQKEAQRYA

SEQ ID NO: 339 - protein, 545 aa, synthetic construct
MRTIRKIEQKISGLKQRKKVAAYARVSMESERMHHSLSAQVSYYSKLIQKNPNWEYAGVYADYGISGTGIKKRQEFRRMLEDAEAGKIDIILTKSIQRFARNTVDLLQTVRHLKELGIEVWFEKENIHTMSGDGELMLTILASFAQEESRSISDNIKWRFRKKFEQGIPHAKFFVYGYCWEKDNLVIQPEEAAIVREIFDAYLQGRTRKDILRELKRREIRTMYGNYFKDASIRQILTNRIYTGVLEIQKTFVTDPITKRQAVNHGERNRYVVEWHHEAIISSDMFERVQQELKNRKEMGMQRGGYARDFLNTSCFTGIIKCGICGKSYVHVVRKYKGRIREYWTCDSHKGKGTNCGAYGSIPQPALKKACAAVLGTDEFDEELFVQRVKKIVVPSYHTLVFHFKDGNVITQEWKSTALKDMWTDEQKKKQRQWMETYHQRDTSGRYTAFSERIVCPACQTKFIRCLEKRKNGKVAYWRCRGEHRCIHVRSIKEEWLQRMAAETMGKLEFDDTAFRAQVQRIEVQDNETLLFQFNDGHTKEVKLS

SEQ ID NO: 340 - protein, 550 aa, synthetic construct
MSKELVYSGPGASAVPAAQYIRMSTEHQRYSPDSQRAAIAAFAAYRGFQIVQTYQDAGKSGLTFDGRPALKALLADVLGGQQEFRAILVLDVSRWGRFQDTDQAAHYEFMCREAGVAVHYCTEPFDNDGGPIASIVKHMKRVMAAEFSRELSSKVSRAQRLQAQLGFKQGSTCPYGLRRQVVDDQGRPRAILKTGERKALGTHKVVFVRGTAKEAAVVRRVFEMYAHEGRRLTEIAEWANKRKLKQPHGAPWSRQTVHRLLRNPLYVGDYVFGKRCNNLGNIVRVAEKEWVRVRVVDPIISPELFEAVQERHPRSRLQFTDQEIKTGLKRLLAEKGRLTQRLLTECPYVPSPTAIICRFGSLAAAYNAIGYEPPKYYPPNPDGERFSHDELIERIRELYERHGYISVRMIKAEPSLPAYNYIWARLGGITKILNRLGVDVTQRSQRLENLARSQSSLIGIPGRSNPRRHRNEDGSLVSDDQLVGHLKRLLTEHGHLTTEIIARDRLCPDPQLFRRRFGSIPHAYALAGYAGTRRDIALAAHARKRLVGPS

SEQ ID NO: 341 - protein, 553 aa, synthetic construct
MEKSKRVVGYARVSTEAQDITRQIELITAYCNDRNYHLIKIIQEKISGARKDRKSLNELLDVDDAVADMIIVSELSRLSREDDILSVLSTINELLKQGVDILFLDKQDRIYKAGTILSLYDIITLSVEAKASADERYKIAGRMQTGLRSKLAEFSNMFAGGTVPFGYKVIHNPDYKLNQTPKNLLVVDAKEAEAVKYLFQQLIDGNTIRQTVRVYNKLYPYKLSYSGICRIIRNPKYKGEIYRRGKLYGQIPELQIITPEDFDKANKQMRENSLFQSNAPKYYNPLKGLLFCPCGCGLYMKPNHNSYLIYRCSSAYNDKQKCENYGVKCAYILSSVWTCVKETLHTEEYKRFNTQRANELQGINKQIRETITRKVNSVDELKTQSASLIAKIKKLNNDDLINELETDYNVLCKQIKQTEQEISELNGQIAENDAEIKRNVEQKDFSKMEQSALYKEKLQKAVYHSQSAMRGILEIVFKNGMTRYVLIKKHRNGGTYLLPDTFKGDMERKQIIVPSLRTDKDNPYSAQPMNLRYTFDEFFKAMPVEEYEIPITE

SEQ ID NO: 342 - protein, 556 aa, synthetic construct
MRTDIRRIAFAYLRLSNEEAAEGESSSIKNQRMIIQDYCERNEILLVRVFVDDGWSGGNFDRPAFQEMIALLEQGKANIVITKDLSRLGRDMREASYYAEQYFPEHGIRYLTVADNFDTEQENVMAPFQFAMNEVYLRDSSRKVKEVLKAKREKGLYCACAPYGYVKDPRNKNRLVPDEETAPIIQRIFEAAANGDSSRKIAMDLNSDGIIPPLKYKVLYKGNFSEDGAARASDLWNYTTVKRILKNPVYLGHTLLGKSKKVSVKSKKKLNVPKEQWAVTENTHEPIVMQEVFDLAQFNLGKGTFDFRQYDHVRRSIFSGIAFCAQCGHALCSCGTVYKGEREKYWYLSCNRHRPDITDPCVGVRIKYSDILEVVRQDLNSLICLSSEEKETVAREAMQRAGDDNLIQAKQLQLQKAKARLSTIDKVITKLYTDNAEGKIDDSRLERMLSELQRESIGLEKTIDCLSVVDPVNETQESYRAFFELTNKYTHIKELDRDTLVTFVRRIEVGPKELPEGMQKATHRSQPFRQSVRIFYKFIGELEGPSMREFPAAIDL

SEQ ID NO: 343 - protein, 516 aa, synthetic construct
MSKKVMRKSPEVTEQIRTGAAYIRVSTDDQLEYSPESQLEEIKRYCLQHNILLPSEFIFVEEEGRSGRKSSNRYAFQNMIAMAKTKPKPFDVIVLWKFSRFARNQDESTFYKSMLRKKLGIDVVSVSEPLIDGMYGRLIEMIIEWQDEFYSVNLSGEVRRSMLSRARKGLYNGKMPLGYTKPPNENPVIEEQEAAIVRKIFDMYASGSDINYITRGLNDHGYKTKTGKKFDQEGVIYILENPFYIGKVRYNMRESSATSTLRDPDEWIIADSFHEPIIDMETWNIVQERRERSKKLAGRYEHPVSHAKHWLSGLVKCPVCGKSLSHKEGYPRKSTNGTTYLSGEGFQCLGYMKGLHSGSQFISAKKLTDSVITSLRDVLESTTDVSFELVRTYEPTIELDCQRYQRELASLDRKLERIREAYMNEIDTLEDYKRNKEMIEKRRADLEALLADMTTAASGPENYKEQFLNRVQSVLDIIESDAPNDLKAEALRGIVRKIVFYKDTNTLEFHYYLMVE

SEQ ID NO: 344 - protein, 433 aa, synthetic construct
MSGKITIVSKPPKLERKKRVAAYARVSSGKDAMLHSLSAQVSYYSDLIQNHGDWLYTGVYSDEAKTGTKDSRAGFQNLVADCRAGKIDMVITKSISRFARNTVTLLQTVREFKALGVDIYFEEQNIHTISGDGELMMTILASYAQEESRSASENQKWRIKRSFESGIPWDRTLMGYRMENEHYVIVPREAEIVRRIYNEYLSGSGYQLIAKRLNEEGVPSRFGGKWNQSAVSRILSNHTYTGNLLLQKTFRENHITKRKIFNNGELPKYLAEESHEAIVDEKTFQAVQEEKSRRAARFNKKSVPKKTYPFSSLMVCDNCGKNYRRKITKTGAVWVCGTYNSLGKAACASKQIPESTLQQVTADVLGQNDFTHEWLCHRIQHIRVCNDNTLIFYFKDGSEITRIWKDRSRSQSWTDEMKEAARQKTLERSKHNA

SEQ ID NO: 345 - protein, 602 aa, synthetic construct
MYITVTLDPNGIYDAYLRKSRADMELEKLKKFDTLKQHEKFLKDRANQLGIKIRKIYREVVSGESIQERPEMQEVLKNVETGNIDGILVVEVERLTRGDAKDQGTVTQAFKYSNTKIITLNKIYDPNSDEDEEYFEFGLFMSRREYKTINRRMQRARIANVLDGKYCASEPPFGYKKVRVKYGKGYTLEPVSEEAEIVKEMYQKRADGMGYDIICNWLNTLDFKPKKSDVWTPATIKGMLSNPIYIGKIRWNSNKQKKILINGQIIKKRKKGNNEDLILVEGLHPAIISNELFDIVQGIKPNKASTKHNTELQNPLATLVKCADCGRSMQRRPYYDNKKQEPKLRRKYDIDKEKLRLCLREHKGEYSLRDIATALKVRKHCVDHWFASNQSKFTMPYADKWEELKKLLNINTTEFDKAITTYESNLIEPHEDTLICPKAHCTNIGSNLALVEQETIKALQEYISSQKELLATYNPAEEDDNVMFVSLSKELDKYNKQLDKAYELVEQGIYTPQEFTKRTKTIKDKITNTEKELNKYQIKLNKDRIEKLLPKIEKVIDSYYKVTSAEKKNKLLKSVISYIEYKKEKGGRGYESNFSIVIHPKF

SEQ ID NO: 346 - protein, 441 aa, synthetic construct
MKRAAIYVRVSTKEQKEKGLSVDSQLLALREYCSNNGYVIAGEYNDAGISARKKYINRPALLQLIDDCKEGKIDIILFTKLDRWFRSVADYYQVQTLLDSYKVPWRAIWEDYETETSTGLFKVNIMLSVSQNEADKTSERTKEAVKYRRLRGDFVGGKCPRGYRRENKKLVFDEKTYDAINAMFRTYLSCFSIAKATEAVAEYGLHIATSQICRMLKSPAYAGNASGSECPAYITWDEHLLILTNSTKRNRTPKRSDRVYLFSGLCRCGYCGGRMVARVNRWVKNGQQLYYPFYSCAAHNDKRNLDCPGVNLAETKIEAYLMEHLEAELKMCQSEFELEQENKATYENKIKALEQKLKRIGVRYEDGDIPFEEYKDKRFAIKKEIAGYKDKIDNARSVPSLPDNWKDLYNSLTPDNKRGFWLNILKEIDITKEAINIVFPV

SEQ ID NO: 347 - protein, 416 aa, synthetic construct
MAHISVVTPVRPPTPKLVNVAAYARVSTNAVEQLASLSAQVSYYSRLIQSTPGWAYAGVFTDEGITGTSTKSRQGLADLMDTARSGVVDIVLCKSISRLARNTVDLLATVRELKDLGVAVRFEREQIDTLSADGELLLTLLASFAQEESRSLSQNVKWAIRNRYKSGGTNSFVVYGYQWADCQFTIVEEEAKIVRLLFANYLDGISPEKTATMLNAEGKRSRGGGRFYGSVFRRMLENERYKGCQMLQKMYRPTIQAPTRSFNDGELPRYWVEQALPAIIDEAMFDAVQAEIAHRREAGPAATPSKNTGVFTGRICCGACGKNYQRKTRTYKSGTSYKFWRCWSACTGNGNPCRGHNLRETLLEQACADMLGTQGFDPVQVGEQIVMIEAFEHQLTFHLADGTMTPVGLTSEGRLA

SEQ ID NO: 348 - protein, 470 aa, synthetic construct
MRVAIYIRKSRGTEEDLLKHEEVLTNLCNANNWSYDLYKEIGSSQDNQREQYNRMKENIENYSKIVVMALDRLSREKQEQAELTKLINKYNFEIVTPTRIYTKHDNLLMDIQELLARQEYQMIRARQIQGTKTSFERGNWVGGIPTIGYKYDRNIRKLVIDEEKAKIYLFIKELALKGYNSSTIVSECYKKNYRSLTNKDFTPTAINRILKCRTYLGEVPYSGEWRKGNHEPLCTYEEYDTICDYITHRRVGIKSKAKTFPLSNLIVCGQCGALYGSTRRKDRGNREYLKKCWRKNVATGEKCNNKGVNAYKVHQAIKQQLEKRMFELKNTLDNFDRTNFENMKNDIQAQIYSLEDNISVLESRNDNIRNMCENGLYTVATAKEKISKNEITIKEYQNKIEILKNKLNNISNKDIENNFEKTKEVLNILYKLNLDDEKNDELINKIYKTIIDKIEMTLSDEKKELKIYYK

SEQ ID NO: 349 - protein, 528 aa, synthetic construct
MARTVTAIPATRALHTGAPLGQTTLRRVAGYARVSTDHDDQVTSYEAQVDYYTRYISDHAGWQFVKVYTDEGITGTSTKHRAGFQQMVTDALDGKIDLIITKSVSRFARNTVDSLTTVRALKDKGVEVFFEKEGIWTFDAKGELLITIMSSLAQEEARSISENVTWGHRKRFADGKVTVPYSRFLGYDKGEDGNLLVNPEQAKLVRRIYGMYLEGHSIRHIAHTLTDEPATYTAAGNKTWHYQSVRSILTNEKYKGDALLQKSYVADYLTKRQVINQGEVPQYYVTASHEAIISPAVWDFVQAEIAKGARDQRTQHRTRPFSSTFECGQCGHFFGSKTWHAGSKYEKVIWRCGHKYAGQEKCATGHISDQRLKDMFLEAIRLRFGSPTDTGVNQAVLDALDTSDLEVEAAGLLAQINEVAKKLQSMIARNARVAQDQQVYEKAFNASHEQHQALLAEHAAVVAEIQNKNNRLAAYHYYRQETANLDLEQLAFSPYLCVALLDKGVVDVDGNVTFQFRDGSTQVVAIKQ

SEQ ID NO: 350 - protein, 539 aa, synthetic construct
MPAFTRKVQKIESRASLRQNAIDATMQQKRRVAAYARVSTDSDEQQSSYEAQVDFYTRHIQSNPEWEFVGLYADEGISGTNTKRREGFNRMVVDALDGKIDLILTKSISRFARNTVDTLTTVRKLKERNVEVYFEKENIYTLDAKGEVMITIMSSLAQEESRSISENITWGKRRSMEEGKFSLAYKHFLGYKKGEDGILEIVEDEAKIVRKIYQLFLEGQTVRMIADHLTKQGIPTPMGKEKWSVSTIMSILQNEKYKGDALLQKTYVADFLTKRVKKNCGEIPQYYIKDSHPAIIDPATFDLVQKEIERRRPERHKLHRSSPFTAKVICGDCGGYYGRKVWHSNSKHRKYIWRCNQKYEEKTACSTPNLDEAALKAAFVEAFNRMLGDKEQYIARFEEMLPLLADTSKLERQLAEAQNKHSHLMNNLRLYMEENTRQIQDQEKYNRRFSELDTECKKAEEEIEAIQKEILEQSGRKEQIRRCLDELRECGDILDEFDDDLWNSMIESVTVYADKTLEFLFQDGTRIPIQMPKNKKGIN

SEQ ID NO: 351 - protein, 503 aa, synthetic construct
MNNRIDAIYARQSIDKKDSISIESQIEFCKYELRGGSCQEYQDKGYSGKNTDRPQFQMLVEDIKRGLIARVVVYKLDRISRSILDFANMMALFQEYNVEFISSTEKFDTSTPMGRAMLNICIVFAQLERETIQKRVQDAWYARCQRGFKMGGRAPYGFRTEPIIIDGIHTKKLVIEPTEAAFVRKMYEMYIDPQVSLHDITRQLTEQGMRTYFGKPFSRATISIMLRNPIYTMADLDIYEFFKSQGTNIYNDAADFVGTNGCYYYRSKDSTENKHTHLEGQTLVLAPSEGFIPSDLWLRVRKKMMANQTYQPARKARNTWMAGKIKCGKCGYALMSAHSCGYLYLRCTKHADSKFCSGCGTIRLRDLEAVVYQQMVKKLEDYKTLTGRKKRRAASPKLTAKQMELAQVESEIEKLLDTLTGATPVLISYANAKIEELDSRRQALASEIAKLTAEAVSPEQIDTISNYLDDWENVSFEDKQQVVDLMITVIRATSEKLQIEWKI

SEQ ID NO: 352 - protein, 473 aa, synthetic construct
MKTAAAYIRVSTDEQTEHSPDSQLKEIRNYADRHGLILDPSHIYIDAGVSGRKAKKRPQFLKMIATAKGEPSPFSVVLVWKFSRFARNQEESIVYKSLLNRECGVEVVSITEETQDKMFGSLVERMIEWMDEFYSIRLGEEVRTKMTYVAETGKIQTAPSFGFSKNSEGEYVLNPDEAEWVLFMAESLLQKKSLRWIAKELNSHGVRTHRGNKFEPRTVRYILKNLTNTGASHWTPNREDHENEYHPYSDSTIVVDGVCDHIYTREYYDKIIAELDTRAENRKKYDKPDTVKKHWLSGFLKCSNCGSTMVYSLANKGFQCYKYGKSLCDVSHFISASKIEESVIQAIKNVTVNDKFIKSVTKPPKKADHKKDIRRLEGMLQRAKIAYMEEIDTLEEYAANKERIEKEILKFKKEDEKATAYRPAEDVRRQFAEIVDLLSSDSEDAIKRAALGEIVESIVFSRPNTAIKIYFRL

SEQ ID NO: 353 - protein, 480 aa, synthetic construct
MKIGALYIRVSTDDQLEYSPAAQQKLGLDYAKKNGIVIPKDFIFVDEGISGRKVKNRPAFQQLISLAKSNEHPIEVILVWKFSRFARNQEESIVYKNLLKRAGVELVSISEPLPDGAIGQLVERIFEWMDEYYSINLGVEVLRGMSERARQGGCNVSPPLGYKMEDGSPVIVPEQAIIVKKIFDFFVNDKLSFYDIAGKLNSLGYKTKRGGNFQNRTVAYILRNEFYDQQLVWNKTEKATRKLKDSSEWISVKGDYPRIISHELWEAAQERDKATRRPRGSRPASTYRHWLSGMLVCSNCGGKLVRVGTNKSGNTYFQCTNYNHASCSESHSTNAHIIQSAILESFKDVISSGNVVYNATATKKDDSERALIEDNIKKISFKEARIKQAYRDGIDTIEEYKENKRILFEEKANLEQMLSELKDDNAEQTLLLKKIRSAYDIIASDETSETQKHEALTSVVHKIVFNKKEEKFTLYYFINY

SEQ ID NO: 354 - protein, 545 aa, synthetic construct
MYNTLPISNQKTKSFRVGLYMRLSREDGDKEESSSVTNQREMLKRYVSEQENFFIVKEYVDDGYTGTNFDRPGFKQMIEDIEAGIIDTVITKDLSRLGRERLGVGHYTEIYFPEHNIRYIALLDNIDTYFDAGMNDMAPFKGVINDMYVRDISKKIRSSLIERKKAGNFLGVTAPYGYQKDPNNKFHLIINEKEAEVVKRVFRLYLEGNGLTRIAQILTKDGVPVPGESRDIGKTRRTALYSSWKQTTIRRILDNRVYLGELVQFKRRKINYKSKRRITVPEEERYICRGTHEAIIDEESFNAVQNILKKNKSFKGTKHDYLFKGLLFCSECGARLNVTYSNYALKRYGEYRYTTICYSYSRLYSDICTRHSNSIPELEEVLIKHIKEVCSRYINENLRDELIDMAKKQKQLALKQISNEKRLETISQKISDIGLYIKNLYMDKVKGVVSENDYISLVADFTKDRDNLIKEKEELIKIINNQKPQIDETAKIEKLAKEFLSLEKPTKQLLNELIEKITISENKEINIYFKFNELNEMKEIKKKIA

SEQ ID NO: 355 - protein, 458 aa, synthetic construct
MKAIAYYRVSTEMQEEKESLATQIKGGEQFCEDNNIELVKIFTDVMSGGNRKRKGFLEAQRFLEDHKDINMFIAYDVSRIARDAFAFLGLFNKLNSMGIKLKLINNPNLDSDSHMGRLILTILAAIFEFFRFDNSDRVRDNMIVKVKEGRRMGGIFPYGYDYNKETKKATLNIEQAAEIKEMFNMFISGKTIMSIAKKFNLPEPTVRNRLMNNTYAGFNSFGYRKNDKINNNKKAITTKGDWEPIISEGVFSEAQKILKRNKEMRIKKIKDSGFSLTSFMRCSCGSKMRGSTNFNRDKTKKFRYYECRACKKYLNADKLEKNFFEQLLNCDDLQILNKKLEKRGSPESKIKKMEKEISKLSKELDHMTKLVIEKIIDEDRYMKAKAENLFKTGEIVKEIEELKKEKVEEFNFNTIELFKEILKNLKPDDILETRNILFKIIRKIIIIDEENFEVYLNI

SEQ ID NO: 356 - protein, 520 aa, synthetic construct
MKTAVIYARYSSDRQTEQSIEGQVRVCNDYAERNDILIVNQYVDRATTGTNDNRDAFQQMMKDSDKKAWDYVLVYKLDRFSRNKFEMAMHRKHLKDNGIKILSAMENIPDSPEGILLESLLEGMNQYYSEELSQKTRRGQRETRLKGLHCAGRLNYGYYTENKKVYIHEEEGPVVKEIFERYAAGERGNEIAISFAERGILYRGKPFSSANIYVILHAEKYTGRYVLHGEVYDNIYPRIIEPELFERCKQRIDANRYGNHVPDYSYLLRRRVYCGQCGTRMTSYSGTSKSGRVSKYYKCWNAIGKKNCTAKFIQKDLLDNIVLQALQNTLTGANLALIVDEIYRQHNAKLLGENPVKLLEKELAQINKAINNILKAIEQGIITDTTKERLQELETTRRELQEKLIFERMKEQVVLDKKTIADYLKDAVKQEPEMMIDLLVDKVYVHEGRIELILNYTGTPPKPKRRIDDKPENPEGESLRGSLIFMTEASVEVYSYQGIKKNRPEPKFKGVCKKSVLIEI

SEQ ID NO: 357 - protein, 543 aa, synthetic construct
MKQPTEKIYTAALYLRLSKDDGVMDKDSASIDTQRDMLTRYCNENGIIIHDLYIDDGFTGLNTDRPGFKKMIEDVEAKKVNCVITKDQSRLGRNHLESDFYMEVYFPEHGIRYIALNDNVDTLNASSLDIAPFRNLLNDMYAQDISKKVKSALYSRQKQGKFIGNKAPYGYAKDPADKNHLIVDERYAPIVRRIYSLYLEGNGVHKIANILRSEKIPKPAAAAAEYVDAYNSYVNSDEDVYGWREGAVDRILTNPVYAGHVQGQYRPKISAKSKKRHSINSKSFIVENMHEPIIEPEKWELVQTIIKSHHHERGKDGYDNIFAGLLICADCGKTLTKTTAHRRKPRADVIDMIGYQCNYYRLNGKSACTQHWLEARDLYNAVLADIQYRAKCAIEDDDKMISEIISKIDSNTFDDAKKAEKELRKAKSRIAELDKLFSSLYEDKVSGIISERNFKQLSAKYDTEQITLESRIAELENTVSNSKSAAENVDTFVNLIKDFSLITELNSAILNTLIEKIVVHEAEAIEGEKVQKIEIYYKFVGRI

SEQ ID NO: 358 - protein, 432 aa, synthetic construct
METKVTKIDALPKLEKKLKVAAYARVSSEKDAMLQSLSNQVSYYNNLIRSTEGWSFVGVYADEALSGTKDTRDEFQRLIKDAVEGKIDLILVKSISRFARNTVTMLETVRKLKAIGVDVYFEEQNLHSLSGEGEMVLTFLASFAQEEARSVSENQKWKVRKTFESGVQWSATKSYGYRVINKKYVVVPEEAKIVKYIFDLYINGLGFQAISNKLQSENIKPFYAKAWNKTSVKNIISNINYTGDLLLQKGYSENFLTKKYVANKGAKDQFLVEDDHEAIISKEIFNKAMDLKRGRAKYFKTSRETQIRYELSGKIKCGICGKSFNHRTTKYSQKWICITYNEKGKSVCPSKCVPDTELKRITDNVGLDNIDWVEVFPNNELKIYLRDGTNVTEKWNDYSRKNSWTDEMKAKAREQAIKKSLVNYLKGGNING

SEQ ID NO: 359 - protein, 492 aa, synthetic construct
MAAIDFNNVVDLYIRVSTSEQAEEGYSVAEQEERLRSYCAAFNYIINAIHIDPGFSGASLDRPGIKKVMYDVEHGRCKKVIVWKLDRLSRSQKDTLILLEDVFLANDCNFISLMESFDTSTPFGRCIVGILAAFAQMERENIKIRTMMGRQARIREGHFHGSRCPLGYKFQYASDGTLLSNDLVVDPYTSKLVQEVYRLSLGGSSFSSIAAHMASIYGCSLYDWSRNTAIRRILSNPIYMGKVKVGNELYPGIHEPLVSETDWYMVAAMLKHNKEQQKRTYAYQISGGAYADNLLTGLLFCGDCGARMYARRVSQNKKKYICHSVAKTSPAMIRSDHCTNRLHPFTVHQLDEMVIDEILKLSLDRPGFDMLCDQPDASSKSEDKEIYEERLAEVNRQLDRLVKLYQTGLIDLDNISARLGDLNQEKNFLEGNLATINEVTPAEIRETAWKSIQSLQSVLNNGDMGEVHRIIHTLIDKVVVLNTDVTIYWSFC

SEQ ID NO: 360 - protein, 560 aa, synthetic construct
MDIYTARQELRFKKLQDLHIRVVHYDRVSTEKEEQKSSIVNQNLFSEEIIRNNPNWVYAGRYADEAITGLSTEKRPGFSQMMLDAKCGKFDLIITKEVPRFARNTLDSIQCSRKLLEYGVGVWFINNNLNTISEESEFLLTIMAGQAQEESRRISNRVKFGQAQSIKRGHVLGADNMYGFVKKDCALTVKTEDVAMIRYIFERYASGKVGTKKLGDELYEKGYTNRKGGVLHSKTIQSIIQNPKYKGYYCGGKVVVEDMFTKKQRFLPESEWVLYKDDGTTVPAIISEELWDRANEVLKERSDKFMGQNRTASKNNRFTGKIICENDGAAFWLTSRGSGKNRKDLTWICSEKKTKGTSTCDSLAIKESELLAIVKDIINEHLGGISSVIDLYLEELSTISLQSDSKDEILRWEKELELIEKKRERLLEHNLNGYIDNEDFYQRDLKLKAQRSEIANRIEELSQKLANTDLDQIKKKIRKHFQEVSEITDQTITAQTIDILFDKIYAKRIGKNEMQLQFQLNLGYNINKTYEKKSAKKNMSCPDTMVKKMIEQQEQQMAGK

SEQ ID NO: 361 - protein, 519 aa, synthetic construct
MRNVAIYVRVSTMHQAEQGYSIDSQLVDCRKKAHDLGAITINEYVDKGKSGAFLDRPELQRMLNDIKTEKEYYDALIIYKLDRLSRDSMGLAYIIKILQQKNIKIISTDGAQYGTNPQDVLTMQIMGSIAQFDNALRKERSIRGKIEKRKQGKLDKITKYGYTFNDEKQNLDIKEDEAIVIRKIFKWFTEDNLSAFRISKKLNSEKIPAPQPKINRKIINKDNIWFESTIRTMLKDETYAGIRHTMIYKFEKISLNNMKKTKRTPEEWISVPVPSIISRETWDKANNIMNRKNTNPRRTQRTWILQGLVYCEKCGQIMNIKQTPKIGKIKENEEKYNFYFKCRTNILNWFGSGKKCPNRQVPIYALEDSVWETLLNIFYSKETLEKYLKETQVKDNVYTLLDKLIEDRNKLSKNKNKIVEWFADGKIDQEIADNKINDLNNKINDLDKKISNLQSTNRSKKSFSINNLYDIFHKIKNPNREQKKEIIHSVVEKIFVERLDNKRSNAYTKPVLKIRIILR

SEQ ID NO: 362 - protein, 536 aa, synthetic construct
MQRIDGRRAALYARFSTDLQNDRSIEDQLALCNGYAVREGLTVTHRYEDRAKSSATLFGRDGLLALIADAKERVFDVIVVEALDRISRNPADLHPLFQTLDFVGIRVLEVHRGQADALTVGIQGLFGQMFLDQLKEKTRRGLAGVVRDGRSAGGRAYGYATVPGQPGQLTVVEGEAKIIRRIFDEYIGGATTREIVARLNAEGIPAPRGSVWRSTVLTGNAARGYGILWNDLYDGKRIWNRVRMVRDPETGKRVSRTNPESEWQIEAAEHLRIVPPATFAAVRKLRLARMELRGEKRKRPARPLSGLMACDCCGGSIVIRARRPNGAVQAACSNAVEAGTCTERKSVRLDQIETAVFAELAQLLREPDVMGEYLKAYHEERQRLAREKGRTRATLERSAAKARGAFDRAHQLYIDGVTDGPKAKANILELRLAAERAEAALAEADPPEVLTLHPDATNRYLAALTDLAPSLSDLDTPEARKAMDTIREWISEIRVRREGDEVHVTVYGYLAALVEPSTRRGEMVAWGGLEPPTPAL

SEQ ID NO: 363 - protein, 466 aa, synthetic construct
MAREIVHIPAKPRVVGTKATAQKKIRVAAYCRVSSEQDEQLNSFENQVNYYEEYISNHPDYELAGIYADEGISGTSTKRREEFNRMIADCEAGLIDMVITKSISRFARNTQDCLMYSRRLKDLGIGIRFEKENINTMDSTGELLFTILSSLAQDESRSISENCQWGIRSLFKRGIHHLNTNRFYGYDSDENGKLIINPEQAKVVKWLYESFMNGVNPDVLVKTLNDKKVPTCMGGDYKWTCNQVKSILRNEKHMGDVILQKTYTPDFLTHKSVKNEGQLPQYYIKEDHEPIVSRKLWKAVQLELERRQEYMKQYHLKTMGQYTDENPLSHRVICGICGHTFTRKTKTRIEGRFKVWQCGQYYAKKGEHLCDGRIIREDKIYAAFDIAWNHIVEDRPRKERIWQKQINHGNELEAFRAEQFMKLTEGDGRIKTGKELVSIVLSHCVYEENGYLTFYFLDGSHVKIKP

SEQ ID NO: 364 - protein, 545 aa, synthetic construct
MNIAIYPRKSKFSPTSESIANQVAMCREYCDRCFDDPHYLVYDEDEGFSGKSTNRPAYTQMIEDMRAGKFQVLCCYRLDRISRNVRDFAELLDDLQRHNIAFVSVRNNFDTSTPFGRAMVYISSALAQMERETLAERVKDNLYEMARSGRWLGGVTPLGFVAKAQEVHRDDKKRKLLMLSPVEEELAQVRDLFDHFLRLGSVTKLLQYCLEHRIVSRNGNDYSRTTLRLLLTNPVYCTADAEAWAYFSSGDYQLCAQLEDFDGVRGIQPFARTRKDDGGTVSRPTSDWIIAPGLHRGVLPGAIWVRAQQILQDNRDLGSAYKAPRTENALLSGVIRCAGCGAYMRPKAYGKPLPDGKRRFSYVCLTKIDSCGARCAMSNAPGRDVDALVIKELTSLTSDGGAISTLRSEARLAQGEARRTHAEAVATHEKAIASMQKKVDKLVDALATGAPEGARQRILCEIDRYEQEIEQHRDALSELNASVLLDADPSALLDAAFSALESFRTSFASLTHDEQRRAIRALVDRVTWDGKNVSIEVFGEKTLPK

SEQ ID NO: 365 - protein, 540 aa, synthetic construct
MMNKSDYFQKLANSLNTESINSFNKAVIYTRVSTKEQADNNASLQTQKKYCQAFAKKKGLMVVADFGGTFESAKSDERKEFQKMLTYVKRNKEIDAIIVYSYDRFSRTGPNGAYISQQLMKSGVKTLSATQEVDPSSPSGSFQQNLYYIFSQFDNELRKDKSVTGMKERLRQGYWLYKPVIGYSNSKKGMTCDKHEFFINNNGKLIKRAFMWKLQNMRNFEISNRLESAGLKINPKRLNRIFQNPFYCGKIINKLIPGEVIDAKHPKLISEKNWIKVQDIIENNYRGQTKNTYFEEIPLKVFMKCHNTNDPLTGYIVKKKGIWYYKSRSKGTKLNINAKKLNTLFSEYLKQFELKKGLDKPFKQLVEHAFNQYHSNQQFDQSNLESRKSKLETQIDKIEERYAIGEISADLYQKYTQKYSDELADIDRKITNGLKGSSNLENITNEAIKISQNLSSTWLNMSYEQKSELQQFVFPKGTTFEKEKQRVRTPEVNLLFELTKRTTGIYENKKSGILTHNEMDSALVDLSVPVSNFFRKLLNL

SEQ ID NO: 366 - protein, 517 aa, synthetic construct
MRKITRLEPKKTALPTRKKVAAYARVSKDTERLLHSASAQVSYYSELIQKNPEWEYAGVYVDCGITGTLTYKRDEFKRMLTDCEAGKIDIILTKSISRFARNTVDLLETVRHLKSIGVEVRFEKEGIHSFSEDGELMLSLLASFAQEESRSISENVKWGIHKRFKSGEIGVANKHILGYQYDEEQKKYIIIPEEAESVRWMFQMYIDGVTLRDIADNLNNAGICTILGNDFQEASVRQLIFNEVYAGDIRRQKCYVSDPIKKDKVPNRGELPQYYMADCHEAIIDRDTYAKVKAEMERRASLLNPTYCFTKKIRCGTCGAQFTRKKGKVRGKTYVHWICRSKKETGMTCSSVNFSEEELKNICADVLETDSFDEEIFESRVKDIIVLKNGDVEFHLVGGETRRWKNLHLNPPRHKVTLTDAFQGKIRCAKCGNTYHRVNSANKWVYWYCMGKKKKGMTCDNINYTDFQLRQITAHILGLEDFDEQVFSEQIEGITVLEDGNLEYHFYKGRTERWQRV

SEQ ID NO: 367 - protein, 655 aa, synthetic construct
MGLLSKYTSLQIGKLDKKQFMKEANYDDIFTDFGIDLNVMVMCRESTAHEEQQKALGNQVERMKAIIDSHRQFNLVEDGIVIEDGKSGLAMDIRPKFKATIERAVSEDIDIIIVQEASRFSRNVGDFFYNMNILQNAGVGLLIMEGEFWTYFMSPHDYPRLANEVAKGQAESLTTSKRVFRGIETYRERGQLVSGSMFGYDLVKAVDRKDNTYKINPVDGATVQLIFDMYVNKGKGTALIATYLNANNYPTHDRKGEWSASKVRRVLMHEKYANLILYGKFKIINTNTKKKVATHIKPIRYTTYDKDGNVIQERNVVYGTWEPLVDEETWWKAQEILKTRSEEYNITKDGKTIRQNWGRRQSVDAYANKGYCSCGYTLTHVLRHKATDERYSQYAYECRWQKNSGTESYRKKHGLKPSDCTCKLPAVTDVAMKLMSVKVFKYLLTDIRDTIEDTIRIIEMANEQALVNLTNSGVALEELEATLDKLNNRLSRFADMYADGDLTKEQYRAKKESTENEIKHTDELIKSRKLAISEQKKKKLDVASIKERLNTFVDLNGYGVSNEMIEFFVERIIHRDNNEFVWELNLTGQPSKPNKYKIKEYSKEYSDSLKDDSNFNIIKTFVISLDECKEFCETMAHRQFKGAYWSQITVKIAVK

SEQ ID NO: 368 - protein, 473 aa, synthetic construct
MRIGAAYIRVSTDDQLDISPESQLDEIQRYAKSHDILIPEEYIFMERTGRSGKRADNRPEFQRMIATAKEKPQPFEVILVWKFSRFARNQDESTFYKGMLRKKLKIDIESVSEPIMEGMYGRLIEMIIEWQDEFYSYNLGVEVKRGMAKKAELKGYQLVPPLGYAAVGNGKPYVIREDEYKIVEMIFHMYAVDRLDMTAIARQLNASGYLTRRGNPFEKRSIDRIIQNRFYVGTVEWNGFSFEGTHKTRASVTELFEQCQERRKAEFRPMRHRNVSTCKHWLSGLMRCSVCGATLSYTGSGAVPYFTCWKYSKGLHPESCSISVKKMERIVLRSLDGILESGHFEYTPAASASGSPADLSNEIQSQLDRLRHQEERARIAYENEVYTLDEYKESKARLRSEIQRLSDELRRLLEQPAESAPPQKELLDRVRNVRDLLASPSVGFETKGNALRSILKCIVFDRKTEHFDFQYYA

SEQ ID NO: 369 - protein, 467 aa, synthetic construct
MNLELNKIIKVALYTRVSTIQQVEEGFSLEAQKEHLLKYSDNNNYQVYKIYEELGRSGKNINRPAFQEMMQDMRNKKFEKIVVLKLDRISRSVVDLETIIQELQSNNCGFESASEKIDTTSAMGLMFIRLLGIFAQFERERISERIKDVFAEKIQRGLAITGSLPLGYKIGYNENNEKIVVKDLEKEEFVNAIFDTYETTSSLIKTCQYLNTTYPNFVYAGGFNTIDLKRIMLNTMYYGKLKDNDNYCEPYLTYERWKKINDMRESKNIKNNKRHVYLFSGIIKGACGHRLAGTHFISSRIHKTIKYSYRCSKYAHSGQCKNLNITEEAIERKVLEMLPKTIDEFINNYEKEYVKTNVKDNSKKIKELESEKKRIINSYNKGWMSESDAENEIDKINEKLKKYSEVPIKKDYSYLKELKNLNWIDYYKGLTRENKQLFFHKIIDLITVDVEAYRVGKEDFIKIELVK

SEQ ID NO: 370 - protein, 570 aa, synthetic construct
MNIYYVREKLRNCSIYDIELNVAYYARVSTEKVEQQASIKHQEEHFEELIHSNNRWKFAGSYIDDGISGMHADKREEFQRMLRDAKLGKIDMIITKEISRFARNTLDSIQYTRELLSYGVCVWFQNDGINTIDDDSEFRLTIMAGVAQDEIRKLSSRVKFGHAQSIKNGVVLGHRMYGYSNNQGKLELIPEEADMVRMVFRDYASGMSTPRIEKKLWNMGYRSFKGGKISRDVIKNIIRNPKYKGYYCGGKVKVVDMFTKKQEFLPQSEWIMFKDDGSRVPQIIDETTWEKANAYLRERGEAIKSRRTSFKNENIFTGKLFCANDGAPYWMKQHYIRGKEDVRWVCSYKIKNGAASCDSFGLAESELKEIIAELINKSSENIDSILEEYFEILQSSIKNIPDNKNEISRLEKQIDLLKQKREKILEYNLDGKISDDEFISRNKEYVKQIKQIESHILEIQNTKSPEPVEIQLSAIKEQLEKFKGVTPKDINRQIVNELFEKITVEPLAATCATLTFQLRSGNLEKWGFPLRCSDDMILTLHPEQHKIFSRKTCIKTQDMVFFKYKYLLAL

SEQ ID NO: 371 - protein, 523 aa, synthetic construct
MNIGNQLGKLKKSDQFCIYLRKSRADAEAEKLGEGETLARHKKILTKLAAKKELYVEKIYHEIVSGESIAARPEMQKLIKDCYDGKYRGIIVIDVDRLSRGNQADMQTIMDCLKYSNNRNGLLVVTPTKTYDVANNYDDEEYIEFVLFMSRREYKTILKRMERGRKQSIIEGNYLGSTAPYGYDILKTRAGRTLIPNQEEAKIVKQIFEMYISGETSYKICTKLSSQGIKTPAGNEYWHDSTIRSIITNPVYIGRVSWSAKLTTKKLVDGKLIVQRKKSRKTDQYMEYDGKHKPIISEEMFKAANNRIPVSKTKRNCKLRNILAGIIVCKKCGKAMLYQHQYNKSTAPRYIHAPRTECTIKSVRVSDVIDALIRALELSIEDFEIKVNNLPTVDENNIQSQIEAIEKQIKKTEKKLSKLFDSWEEDLISANEFLERKNIHNKNIQSCKLQIKELKQSIPDKEEFEESISSLHEALQLLKDDAIDADIKNEYLKTIIEKIEFSRKSVDEFILDIKFKDNIIVNE

SEQ ID NO: 372 - protein, 529 aa, synthetic construct
MKTQDNRDRIAAIYVRLSEEDHDKVHETDDSLSIQNQKSMLLEFASKHGWTVYDIYNDDDYAGADRSRPEFNRLITDAREGKFGIILCKTQARFTREMELVEKYIHGLFPIWGIRFVGMVDGADTSVKGNKKARQINGLVNEWYLEDMSENIKSSLDDLRRKGHHIGAWVRYGYMKDPNQKGHIIPDPVAAAVVERIFKMYLEGNSRADIARILNSEQIPPPGLYKIQQGDKYKNAFMAGEWDSCSISRILKEEMYIGNMVQGRQASESYKTKKLRTLPKEDWIRVIGTHEAIISLETWNQTQALLAVGARSFTRSEEIGLFSRKVYCGHCNKLMRTGRSKRKSGTYYNYVICVRRHPEINPCPVHAVSNALMEKTILDQLDILAAKYKDGSLFSEIMDEESTIGIEIKRLKAELAQHKKKLVEYETGLKCLYLDKASGSISNSDYQFLSRELSAGKELAERKVDLCTENYNKILRSQEILREKAGVLESYSRPKELTRSMVETFIDHIVICSSSDGTSKQEIKIYWNF

SEQ ID NO: 373 - protein, 564 aa, synthetic construct
MAKVKQQIRITALYCRLSRDDEFSGDSVSIQTQKAMLSQYAREQGFSNCEFFVDDGYSGTNYNRPDFQRMLGFVEDGKVAIVCVKDLSRLGRDYLQTGYYTEVIFPEHDTRFIAINDNVDTAKGDNEFAPFKNIINEWYAKDCSRKVRSAFRTKALNGEYTGGYPAYGYRKDPEDRHHLIPDEHAPIVQRMFQMALEGETCFHIAKALETEQIPTPRAFLMDAYGKYRANERVKHPYAWGKTTVRQILSNPIYLGHLVSQRYQTKSFKDKRIVPRPEDEWITVENTHEPLVDQSTFDTVQERIKIKQPATWENSNNIFRGLLICGGCNTRMVFSARKGRKSKGHFCCNKHRRYGGTECSNHYITLEQITELLLGDIRTHASLASADKDKYAEYLMHLSEREWNGERASYQKEADGCQRRMSELDAILKKLYEDRVFGIISDERYLAMSADFEAESKKVKDRYSELHSLLGTFTKQSHDVKKFAELVEKYTNITDVTEELLHTLVDKIVVHEKEVIDGKIVMRVDIYYRFIGKVGDKDGDALKAPNIRRNTKLLMEAGVLPEHEA

SEQ ID NO: 374 - protein, 556 aa, synthetic construct
MKTAVALADIYLRLSREEASSGESQSINNQRNIIRQYCSDHGITIVREFVDDGFSGSNFIRPGFQAMLNHIKTGLVNMVITKDLSRLGRDMSESSYYAESFFPEHDIHYLAISDGFDSEQVNLMAPFQFAMNDVYLRDCSRKIKQVIKQKRVRGEYCACPPFGYMRNPNDKTNIVPDPNTAPIVQRIYALAVKGCSAHSIANILTDESVITPLKYRVMYRDNFCERGAAHATDIWNHTTVKRILKNQVYLGHTVLGMTKKASVKSKKKVNIPEDEWCITYNTHTPLITQEEYDTAQYNMGMNTKSWSKYDNVRKSIFNGLIFCKNCGSALCSSGSVYKGERVKYWYLSCLNIPKRSTNHCEHGARIKYADLVEIVKSELNHFISLSKKDIDEIIEVAIKESSKNAYQEKDSIKSIEKRIGDIDNIILKLYNDNALGKISDEQLSLMIAKLNKESASLNERAKELQKKADEQPIDEAYKTFFHLIEQYNHIDELTPEIVRTFIERIEVGEKILPDGYKVASHSIPFRQDVKITYRFIGTIGKDERAFNQDDLPSKIA

SEQ ID NO: 375 - protein, 579 aa, synthetic construct
MARKRVARILSTSTRQTKVAIYIRVSTVHQVDKDSIPMQKKDLIAYCQLILGTDNYEIFEDAGYSGKNTDRPAFQDMIARIRKGEFTHVLVWKIDRISRNLLDFAEMYEELQSLRVTFVSKNEQFDTSTAIGEAMLKIVLVFAELERNMTSERVTATMISRANNGQWNGGRIPFGYSYDSKTSEFSIREDEADICRKLKDLYLDNKSLVYTARALNAEGYKTRSGAEWSPTTVWIIASSPFYAGIYRYNRYKGTENRTLNPEEEWVMIPNHHPAIFTIEDHETMLSYLNTNSRQQHSLGRPRKRPGDNLHLFGKVAYCAKCRNKMVSTPGRRVNDQYVIINYTCPKSRRSLGCDNPAVNDNIIGEFVFNYILNMLNAKKTFSKIESPEDLEKALLYGNTFSSIKHIESDGLNEYFNLLSRYRSDDSYIFAIRKPRKKKATVNPELNALRKEKERQERAMQRLQDLYLYSDNAMTEKDFIIRKSEITRHLEDINSQLGLITQDVTATLSDEDFIKQASHLLIQKELQDKQYIYFKNLVSTVSPEILKTYIDAILDSLYIYKGKITSIVFKNGLTHKFIYE

SEQ ID NO: 376 - protein, 527 aa, synthetic construct
MSTEKRVTILEPISSQVIYDNTTEAPKLKVAAYARVSTEQDEQQSSYEAQVNYYNQYIRNNPAWEFVGIYADEGITGTNTKKRDGFNRMIADAKAGKIDLILTKSISRFARNTVDALQTIRELSALKIEVYFEKEGIHTLDKQCEVMLTIMSSLAQEESRSISENVRWGKQKSMQDGNVSFGYRHFLGYRKGKDGRPEVVPEEAAIVRDIYRMFLDDMTIRNIAKELTERGIKTPGGKDVWSVSTIRSILSNEKYKGDALLQKTYTLDYLTKTIKKNKGEVKQYYVTNSHEAIIDEDVFNLVQVELQRRSSMRRGLRNNSPFCTKLVCGDCGSFYGHKIFHAKEKHSKDVWYCNRRYQGSNNCSTPILAEGDLIRYYLQALSEILADKDRYISACKAQMDEANALEKIRFKREKAEVALAKDMAKIQALVRENAYISQDQQVYRQRFEEMSEQIEKQKNTIAELQEQELRLVGVREKLYRFIEALESFDAEPTFDSVTWNALVERVLVNPKSLIFEFKNGEKIKITI

SEQ ID NO: 377 - protein, 536 aa, synthetic construct
MKVWLYYRLSRDEDAELNSLNNQRNILVEYANANNHEIVGESFDDNVSGMHFNREGINKIYEQVENKAIEAIIVKDLSRLGRHRTQTAMFIDYLREHDVRVLSVTENIDTSNEDDDLMIGFKGIFNDMYARDISKKIRAGYKQKQKNGIVITVPLGYFKDKNTNEIVVVEEEAEIVRKIFDLYLSGYGLKAIAKKLNDEGIKSPQYYQSKMYNKKLPCNKPEITGRYLWVNTTVKRILQNEFYIGTVTCHKTYTSKINHIRKALPEEEQFKHENFAPAIISKEKWEQVQFLLSSKRNNNVRASSSNPCHRYTGLIECGDCGCTFVCKKRKWKDKPDRIEYNCNGYHRYGKEHCTAHRIDEEYLDKLIYNELMSIKDEALANYKSIESDVKKWMSNKGTVTNKLKQLNTSLEQRKSDQKEILLERIRDREHADIYTEMLEKCESDIQKLEYEIKSIQDYNSTIKKRKAEMKDSVEIIEEVIKEGAISDANLRLLVDKIIITENNKKLKIKIKLNAKFQRHKDCYDENGNLTEKAFIA

SEQ ID NO: 378 - protein, 513 aa, synthetic construct
MHFTMPTDWLCCAYLRKSREDEQRDREYDSDTLARHQSIIEDLAEENSHTVRQWYREVVSGETIAARPEMTSLLHDIANGKWDAVYVVEASRLGRGGGADQERIINALRYTGTWLVTESNGIYDPDSDTDMKRLKDDLRDSEDELGSITTRLTRGSRKAVKDGRWLATGRAPYGWRAVRIMGAWQLEPDENHDNMLRIYDMLEAGDGFATIAATFNHEGIPTLRGGEHWTPSAIQYIARNPANCGYVVYGVHKTRRVFDPDTFEVHKVKEKNDKPLIYKGLHFGKGGIPPERFEKIIGRRAQDARIQKDRQLRNPLATLLRCGKCGKCLTVQLLNAHKPSRALYFAHKPAKRYTGTCSGVKGVKVDTIMELLADALESMCNDIEIQIASSGPDDYEMRRARIIKEQEKAIKSRDRAMEAFEAGVYTLDDFAERKRAIEVRIEKLDEALAQCKPKAPLGDTIVNLKECIRAIKDDSLSAKDKNDLLKSFIDHIDYYNGETRPRHHDIKLEVFLR

SEQ ID NO: 379 - protein, 643 aa, synthetic construct
MSEYVIAKYLRLSLEDADLDPAEKEESNSISNQRRLIDDAISTKFASKTVKVIEFADDGRSGTNFDRPGVTKLLELAKQGKVNCIIVKDFSRWGRDYIAVSDYLEQIFPFLQIRFISVNDDYDSETLQYGSAGMVDVGFKNIMHDLYSKELSQKLRIAKQQLFAAGKYHSSFAFYGYTKSPTEKYKLIVDKDTAPIVRKIFWWADSGKSTTEIAKMLNDKKVPPPMAALAKQKGFKRYLKDDNYGRIWTSSSVRRILKDERYTGKSIYGRTKIESIGSKRSVQQPENQWVVVPDMLPVVISQSVYDSVQPKLKKHVKAKNEKTNRLFCGNVRCGHCGYALAYHPAKYPYYQCHTHSVTNVDCFGNRILEDELEQTVLTMAKKYAAAIIDADAEIGSRKPDSKKTIHNFRLRQSQLQRKKSNLLAKNNELFEALIDGKISDSDYREKSATNTEHINSLQAETDSIAAEIEKLSPTQNDNTEHKLLARLLALEHMDKPLVDSLIKSVKISLGGKIQIEWKFSCFHDIMNLNDDSSTAEVSNRVWLYYCSDDGWEELNRMRTGVMDCASRMSLTVIGESFDNAGLSITAKGFKEMQRAVRQGRVDKVIVPTLDGVAKTTNAYRAFEKAILKRNVKFYDMHGNLIIG

SEQ ID NO: 380 - protein, 426 aa, synthetic construct
MERIVEKRLIGGPKQPKATRVAAYARVSSGKDAMLHSLSAQISHYSETIQSHPGWMYAGVYSDEAKTGTKETRPGFQNLLKDCRAGKIDLVLVKSISRLARNTVTLLETVRELRNLGVDVFFEEQNIHTLSYEGELMLTILASYAQEEALSVSENQKWRVRKNFEDGRPWNCTMLGYRIEDGTFVVEPDEAAIVRRIFSMYLDGRGIQSIVNTLNAEGIRTRFGGEFNHSGMQKILRNYAYTGNLLLQKTYREDCLTKKDYVNRGQRPKYHAAGTHEPIISPEDFERVQAELTRRAEVYCPDYQPARYPFTSLITCAICGKHFIRKHTRTGPTWICGTLKQKGKAACPSKQIPEATLLKITEEIGLSRITGITADNGNRLTFYLDDGSVIQKIWQDRSRSESWTDEMKKQAAKHAKKRYTECQKEM

SEQ ID NO: 381 - protein, 482 aa, synthetic construct
MQTAAAYIRVSTDDQVEFSPDSQMKAIQKYAKDHDMILPQDLIFADEGISGRHAENRPAFQRMIGLAKTKPKPFDVILLWKFSRFARNREDSIVYKSMLRKQCGIDVVSISEQVGEDKTSILIEALLEAMDEYYSINLAEEVRRGMQEKFSRGGVVSQPPYGYRMGDNVFVIQPDEAEIVRKIYHDFLSGAGRREIAVELNALGVVTRKGRPFDNRRVEYILSNPVYTGMLRRSKNGRQSSGDPFNQREDMQVIPGNHEPIIGRETFDATQKRLKEAKRLYVKHAHTEGRPFMLKGVVRCSNCGSTLVMAMRNTSLQCHLYAKGQCDVSHAISIAKANTAVLERIKEDLRLGAVGVNVENQHKKKKPTVDATSMLLQKEKQKLERIKEAYAAGVDTLQEYREQKQKITARIEELSKSATVEYHTPEQVSREIVKRIQASLEMLEDAAVSEELKNQAMRALVEKIIFNRKKNLFEIVYRDPFA

SEQ ID NO: 382 - protein, 497 aa, synthetic construct
MQIKVIEPKQRIKAKIRVCAYCRVSTEADEQENSLTNQKEYYENLIRSNPSYEYVDVYYDFGISGFKESRPGFQKMMEDARAGKIDLILTKSISRMARNTVTMLKAVRELQSMGVGIFFELQNMNTLSGEGELMLSIYSAFAQAESDDSSKNAYMTFQRKFKEGVPAVQFDRCFGFRLDSEGNPAIDEREAFVVRKIFKLAHEGIAPTRIATHLNEMGIRTKTGKRWDATGVFRTLRNEKYKGDVMMQKTYLDADRVRHKNTGEKDRYYIADNHPALVDADVWNEVQEILDDKSLVCKEKKEPKKMGGNSHNTYPLSRMLYCPKCGATLHHKVSNGGRQIYWGCSTTIKKGRDKCSGIFVPEEVANEWQVSEPSTVFVKEDQFGRKSYSFMKKTDYEKQKNCPYKPKVRTTRDSHSTYPLSGRLYCPRCGSVMHHQWAWNGKEFWWCSKRVKDGESACEGVRVPAEIADAWQFDGCVYVLKGEDENGKISYSYQSKS

SEQ ID NO: 383 - protein, 518 aa, synthetic construct
MKTAVLWNRVSSPGQQFGYSQDSQDAEMAEAAKKYDVVKTWRITESANRSEQRKRFKEMVEFVKANHVDTIIAWSRKRLGRNYEDDYTIQSLVDKHDVTVVLIQEHLEVSKSSPSQVRFMFQLLGSLAEMDNKDRADETRAKMKEKARQGEVPHYVPIGYLNVRDPKYPDNKRGMTIKDPERFAHVLWAWETYDRGNWSYEKMVKELNRRGLTTKPSKKRPSGPITVSHLQKVFENEFYYGEFKSHGQLWKGNYEPMVSKALWNRVKARRLANKTHSRPETKKWFCYRPFTKCGYCRASITAYEQEGRHGRGHYVYYECQSSKKRKEPDFYLKRFGTENCPQRRWTEKEIEQFVDGEIGKLYVNDFIAAEVKERLKRTALREDAAETKELQRLQSEFARKSKHLKLCYKDRLDEKISMEQYEEVTAEVQADLDQISADLDRLGRHNVKFREQGSLVIELLKGVKEVYSKADQRGKQKFLEVLVKEIVLKKEPLVVWQEPFDTLFALGQVFREKGIWGE

SEQ ID NO: 384 - protein, 483 aa, synthetic construct
MTVSGSTPKTSGTAKPLRYPFYMEATTAIYVRQSLDKTGEEAAVERQESSCRQLAGAKDWTVAQLYRDNSISATSGRTRPEFERLLADIEAGTVQNVIVWHLDRLTRSMRDLTRVIEAGQSRRVNIASVHGVSLDLGDPTGVAVATILTAIAAMEVQHKGQRQKAANRQRATKGNAHWVRRPFGYERTGDKVTVVPKEAAALREAADRVMAGDTLASIVRDFNAAGWTSTVGKPWNVTSLRRALINPRTAGRRLYNGEDMGAGVWEPIFSEDLHQALEQKLTDPRRRTAPDDLNSKYLLSGIAHCGKCGNKMFASPVNSGGKTWMVYRCFGGYCTTRRLDLVDLVVENIVIGVLSRPDAATLFSGEADSRKLRSKAAELRDRRDALAALLADGLLSPAAVREQSGRITSELLSVENALSAAGSLNPAANVVHADDVGAAWAALPLGHKRQIIRSLMEVTVLPAGKGVRFKPEQVLTTPKSQKG

SEQ ID NO: 385 - protein, 524 aa, synthetic construct
MRNDPILSLSHVIIYLRKSRADDPNMSVEDVLASHERQLQEYATKTFGSVIPESQIYREVVSGETISDRPVVQQVLRLIESEDIRAVLVIEPQRLSRGDLEDCGRIINLFRYSQTYVLTPMVSYDLCDEYDRKFFEMELTRGNDYLEYTKRILLRGRLAAVKQGDYIGNVAPYGYRKAVIVDGKKRHHTLEIVPEEADAVKIMFSMYADGTGFPTIAHHLDALGIIPRNGDHWKVATLKDMLENPVYIGKIRWNWKKTRKVVEDGEIRKIRRRDENCLLFDGLHPAIINKDLYDRANAIRKSRPHVRKNSQLSNPFAGLLFCECGTAMSMKRYVNHGRSGDRVLYSMICNDQTYCHTKSVSYNDFIGRVISVLRDAIKDFEVKLSDDCTGATIALEAHIRALESNLNQLRKKDERQKDAYENGVYSLSDYIARNAKIQDQIRKTTAALDTAKSTPLPSVDYSGKIVKFQACIDSLLDDSVSAVEKNRLLKECIERIDYHNDMPSLPGVGRHVDNIFDLKISLRL

SEQ ID NO: 386 - protein, 504 aa, synthetic construct
MNGVIYARYSSENQREESIDGQLRECTAFAQHNDIQIVGEYIDRAFSAKTDNRPSFQKMIKDSAKGEFDVIIVWKLDRFARNRYDSAHYKNILKKNGVKVVSATEAISSGAEGIILESVLEGMAEYYSAELAEKVSRGMKENALKCKYNGGSVPLGYYIDESKHFQIDSSVAPFVVECFEHYADGMTMKQFRDELNMKGVKNSRGGKLSIDVISRMLTNRKYLGEYTFQDITIKDGIPAIVSTSLFEKVQDRLTKTKKAPSSHKADDDYILTTKLFCGKCKSFMVGESGTNAQGKKYRYYKCVNHKKHQGCDMKSIRKDLIENMTIKYIREFLNDEDLINTLIDLAYDAQHKENEQLPLLRKQLAQTEKGIKNIVDAIEQGISTKSTRERLLDLEQRKNDIEMSISKESIENPMLTKKQFKFWFDQLKKLDISKSEQRQKLVDLFVNSIIIYDDHIKFFFNYKEHTETITFDELNNCSDLPDSPRPKKEIPNERYLFLFSMHKT

SEQ ID NO: 387 - protein, 520 aa, synthetic construct
MKNNKFKVAGYLRLSVEDGDKEVSDSIISQKNIIEDKIKNLGDKFELVDFYIDDGYTGLNTNRPNFQRMLDDIEKKKVNCVITKDLSRLSRNNFEANYYIELYFLEREIRYIAILDNVDTYLKNSNNDMIQFKTLINDWYSKDISRKVKSGVWARKEQGLYVAAKAPYGYMKDEKNKNHLIINPEEAPIVKKIFQMYNSGSSMGEIAEKLRNDKAYCPSYNGFQKNKNGEYGWERSTISKMLKNEMYLGNTVYGKGINLSYKSKKVKQIPRNEWKKYENTHKAIISKELFESVQKRMKLNQKAKSHTHTWILNGIIYCKECGEPMQLKVKYRKDGTTISFMRLYCSSSLHKKGYCIRKYKGIELQSVTQIVVANLNKKVNNLINCEDVTKLLEKSYKNRDVQGIKNELDLKQKKLAKINKMITSLYSDYKNGIIQEYDFNSMYNQEIEKRDRLNEEIKKLNNKINNQTIISEAEYKRVVKKVSDVKKWSKEQIADIIDNVQVDNDDNIYINYKYAVMEMA

SEQ ID NO: 388 - protein, 587 aa, synthetic construct
MTNPTVQVRKATKQTVNRRKGVHLNTLRVAAYARVSTDSEEQLESYQSQVKYYTELISNNPEWQFVGVYADEAITGTQTTKREDFNRMINDCMNGDIDLIIVKSISRFARNTVDTLQYVRALKEKSVAVMFEEENINTLTMDGELLLTILSSVAQQEVQNISEHVKLGLSMKMQRGEMVGFNGCLGYDYHKEDKTITVNEKEAEAVRYIFNRYVEGAGGKIIARELKNLGYKNKRGESSFSEHGVIGIIKNEKYKGDLLMGKTFTVDPITKRRLDNMGEADQYYTENHHEAIVSRELWDKANEILNKRKGSHSRSNGKRDKYSRQYSFSCLLKCGFCGGNLTRRTWNSRTDYKKTIWQCVTATKHGKKECPYCKGVPEALIEEAFVRAYNALCTYDGEFIDGFLEHVRAGLQNNDTDRELKNLNKKITRLKERNSSLVDMRLDDKIDEEIYQIKVTEINEKMDGLLLQKQSLKDKMQDQQDINKRLTEFQNIISKHEILQKFDRHVFESIIDRVIVGEKAENGEINPYKLKFIFKTGYEKDEVASSQPFSFANSCSNGNNDCGIISLQGDNDTCGDGCQIIPLKRYT

SEQ ID NO: 389 - protein, 569 aa, synthetic construct
MWGKMSVTARIIANQQAKKVAIYCRVSTTEQAEEGYSIGEQKKLLTYECEKNGNTVYKIYSDEGISGKNIKARPALKELLNDANEGKFDSVIVWKINRIGRNLKDVLDMVDLFDRNNITFKSATEPFDTTTPGGKMQFQMMALIGEFERGTIAQNVKMGMMARAREGRWNGNVIIGYDLKLKEHTTNKKRKDTELVVNEKEAEIVRTIFTMYSQGNGYKAIANYLNKFGYKTKKGNPFSLTAIKDILNNPVYIGKIRYNLRPNWSEKRRKGTNSNPLIVDGKHEAIIEQELWDKVQSMLQTSKGKPSRIYDGEFPLTGILKCPQCGAGMVIMRTSRTRKDGTKRRLEYYCCGNWKNKGTAVCHSNAIRVDKANDYVFGKLSELLSNDKLVKDIVKNINTDRKNKVDPSKDELQKLTRELDKISAKKDKLFEAFEEDIITKEEFKERVAELQSRERLLQEDVNNLKMNVLDDNVQQVSYEVVKETLSKVGEMLGNCKSMEQKKKLLHMLISKITINELREVDSIQININDNLISYLNNGGEPNPDGGGSPFSFVSRRKLMINSVNIRICI

SEQ ID NO: 390 - protein, 481 aa, synthetic construct
MIFYIYEVIFMIRAAIYIRVSTEEQARHGFSLAEQEHDLTDYADKHHYLVVGVYADEGSSARKAITRRKQLQRLLDDVRADRVDIILLKCLDRWFRNVADFYKVQAILDEHKVQWVCTQEDYNTTTTNGRLMLNLKLSIAQNESDQTADRIKYVNQGILRRKREIGGKAPFGYRFVDLEDGGKRIAVVEEQRAAVEFIFASHLSGHSPMRIAHDVFAQYGIPITCRRVRCVLRNETYTGRRYGIDDFCPAIISPDTFRQAQERISGNKFWPKNRDFLYLFRGKIICPGCGKILLGHHGSRKRNGYVSHYCNYWCSKHFVSGAPDVAAGGCAYGGAVGERPIERYLLDHLAELLESYQLDISKRHSSSRLSPDQRIQTATAKLTRLKDLYVDGFIGKPTYQTDYAKLQQEISTALAEKQATRTPPEAVQNLILHANDIRKIYATMDRQHKYDLWQSTIKSIKIGEPKPSPGHAYKKFIVEFY

SEQ ID NO: 391 - protein, 526 aa, synthetic construct
MKIAAYCRVSTEKEAQIDSLEKQIEFFNEFTKKNGYELYKLYADEGISGKQIKHRKQFQAMMQDAKAHKFERVVVKDVSRFARNTVDLLQSIRELKSYGIQVDFLNNGEVMEGGSEFILTILGAMAQQESANMSKRVKFGKDITAKKGRVPNLVFGYDKIPDEKYILKINEEEAKIVKEIFESYVYKGMGTTKIAWELNDKGIRTKKTKSKWVQTSIVRMLKNPIYTGRITNKKSEITDFITGTRKDLPEDEWIIVEKPEMRIISDELFNRAQDILAQRSNEFKLNSKREKTEYVFSTLIYCKHCGYSFRRIKRKYTTDGPEYIRWVCSGRNSMGVNHCPNTTVIDEEELLNAIKEYLKSIISNKKNFMKAVEKEFEKITALRESNERSEESLLKEIEKVTVKKQKYMEMFQNEVINIQELKQYTNPLNEDIARLERELKLITSEIKEKDVLEKELAKTISTVDDVLNNETITNAMLKTIIDVIEVDSDSNVEVRLKLLNEIGSQPTVITNFEDINSTVTKSNIGT

SEQ ID NO: 392 - protein, 509 aa, synthetic construct
MYVIYLRKSRKDSDLEALGIDVLKRHEETLLELARARSLPIGAIYREVVSGDSIDARPEMVRLLSEVESGIWEGVLVMEVERLARGDTIDQGRVQRAFFYSNTLIVTPGKTYNPAIENDNEYFEFSLFMSRREYATIKRRMQAGRIRSVKDGYYVGNIAPYGWRRVKADDCKHFTLVPDEKENPVLKLMYDFMGNKKYGFQKTCSALTGMGIVSRSGKPFNPATVKTIISNPVNIGMLRWNYRKSQKAIVNGKIATSRPKADDYILVKGKHPGCISEDLYYRANSVNSSMTAPVKRSCRIQNPFAGIVRCSCCGRVMVRKKMSAKQPRDYLICQYAGCATVAIELEELENAVLEWIRNYIADYKVNNFESTDDSEQESLRSILVNLEKEKETTLKQRGSLFDLLEQGIYTKEIFFERSTALEDKIKDFDKKIESVNADIVRLDLSKKNRSTFVPKCQELLNAWDTFDAADKNTALKNVIERIDFTKTEKNARGQRHSSFSIDVFPRISR

SEQ ID NO: 393 - protein, 516 aa, synthetic construct
MSTNAVIYARFSSDKQREESIDGQIRECKAFAQANQLNVIAIYIDRAMSARTDHRPDFLRMIKDSRSGAFDYVLVYQLDRFSRSRYDSAIYKHELKKNGVKVLSAKENITDSPTGIMLEAMLEGYAEYYSAELSQKVKRGMTENLLEHKWNGSPVPLGYALDTDHRLILDEAAAPHVKALFDMFLAGKSYAELARYLDEKHIKTVTGRKYTGPTVHNLLKRQLYTGTYTWGGQVIEGFCPAIVSKRDFAIASLRMANRKSTTKDGRIIRSVRRSPEYALTGHIYCGECGRTMTGYSGCSQNGDHYYYYRCNSNNNRCRQAERIECKNHPIRRSRLEDLVLQTTVNILSDNEAVAAIAEQVSRIKLESPYASELANIKARLSDLKKRHDNSVKAIEAGVMSQAIMDNVCKYEAEMDNLKARQEKIKLATPSLQIDPVAVEYFLKSLLLNKKQHDKYRLDLFEAFIHRVVVYHDKVEIQYNYLPGHKLENPITTPLPGCSNLNKVVGPLGFEPRTNRL

SEQ ID NO: 394 - protein, 493 aa, synthetic construct
MKETLSERKTGAIYIRVSTDKQEELSPDAQLRLLMDYAKTNHTDIPMEYIFQDNGISGRKADKRPAFQQMIALAKSKEHPIDTIIVWKFSRFARNQEESIVYKSLLKKNNVDVVSVSEPLIDGPFGSLIERIIEWMDEYYSIRLSGEVMRGMTQNALRGHYQGDAPIGYQSPGNKKPPEKDPKTVQIPIMMKDLLLSGSSLLQIARKLNEQGYRTKHGNLWDARGVRYVLENPFYAGISRWNYTDRGRQLKPADEVIYTKGNWEPLWDKATLEEIKKHLTMNMRKAKSRDVSTAKHWLSGLLICSSCGGTLAYSGTKNSRGFQCWKYTKGFCNESHYIGIRPIEKMVIEYLESILHSPAIVYTVISSASADADSKLADLEKQLQKVENKEKRIKAAYLNEIDSLEEYKANKAALLKERAAIEKNIKLLTISNTDMSKEEMDKKMKQNISALLTVLQDDSADYVQKGNMMRNVVDHIVFDRGNTSLDMFLKLVI

SEQ ID NO: 395 - protein, 516 aa, synthetic construct
MSYCIYLRKSRKDLEAEQHGEGETLARHERALLSLAKKNNLIISNIYREVVSGETIAARPVMQQLLHEVEQNLWDGVLVMEVERLARGDTIDQGVVQRAFQYSNTLIITPSKTYDPANEFDEEYFEFGLFMSRREYKTIKRRMQNGRYAAISEGKWPYNSAPYGFRRTKLEKEKGWTLAFDENEAPVVRLIFSMFTGPERVGIRSITRTLNSYGTKPRNSKLWSESTVRGILSNVVYDQCVKIGERKVVRTIENGVLTTTRPRTNDYTIVSGRHPRLIDHDVFAEAQSYLGCGSPKPAGSNIIKNPLAGIIVCSECKKKMIRRPPSGTASRVPYDLMLCSTYDCPTIGSPLDLVEREVYNALSDWVEGYRLSGQMPSKSLIPEKEVLLESAQQTLDQLLRQKGTMYDLLEQGVYSTEVFLERSDSLQNRISEAESNVAQLKLELDKERQREANIEQFLPACEDLLSCYWDLSIPERNRLLKLLIESIEYKKLTKNKRGHLNEPNFELTIKPRIPRK

SEQ ID NO: 396 - protein, 463 aa, synthetic construct
MAQPQTALQRVALYIRVSSDEQAERGDSIRDQKERGTKYIDDHQNMILQDTYIDDGVSGQKLDRDDFTRLIGNVKAGLVDLIIFTKLDRWFRSLRHYLNTQVILDKYNVAWTAIDQPYFDTSTPYGRAFVAQSMTWAELEAQNGGLRVADVFRSKVEHGEVITGKVPRGYMIQNKHLVFSDEAPAMLDSIQYFHREQGLAKTINYMRETHGIIMSIQNLKNSILRNEKYTGRYRGNENYCPRLISDEMYHDIQRVLDNNSTIRSNQKYPYIFSGILVCDQCGHKMCGCHITVTSHRTSGKVYRYKYPAYECLQYRTYKKCSNGGEIREVRIEEYLLKHVREELSGYLVDFETGETKRIDNRAKKNKLRRKLDRLKDLYLNEVISLDEYKKDRIEYEEQLAALPDMEQPIKNLEPLKQVLDCNFEVIYNKLSNEERRAFWRSIIKEIRISKSVERNRKYQIIFL

SEQ ID NO: 397 - protein, 493 aa, synthetic construct
MKTAIYARQSVNKKDSISIETQIDICKREIKDNGPIEIYQDKGYSGKNTSRPAFQSLLNDVKQNKINNIIVYRLDRISRSVLDFANIIDILKEHNVGFVSANEKFDTTTPVGKAMLYIVMVFAQLERETIAERVKDNYYARGTEGVWLGGPAPYGFNNTKISIGNKNVATIVPNEKIELIKWIFEQYQQDDTSLGIIARQLVAQHPGEMWNNIKLSRILHNPAYVRADVDVYNYFKSKGCIIKSDISQFDGIHGLNIYGKRDRTLNKYNNIENHHVTVSLHEGIISSRDWLQCQYKLENNIQIKNTGTGKHTWLTGLLKCGYCGRAVTPKKTTKTTMKLYCSGKPLGLCDEVTNSHYLTDVENLVSEKIKKYIDKMQECEINTIENANETEINILKIELVKVETEIDCIVNNLTLANEVMMKYANEKIIELDKKRNEILGKLSKLSVAKPHKLDVPDICDWDSGSKEFKKEVANILIDRVLIYNDQITVKWKY

SEQ ID NO: 398 - protein, 513 aa, synthetic construct
MRNYVIALYIRLSVEDFKTESLSIPNQKLILREKAMSLPEWDDSEILEFIDNGHTGTNFERPAVQELLTMVQAGKINCIIVKDLSRFGRNSIETGYFIERVFPLYHTRFISVSDDFDTANFKGDTGGIDIAFKYLISEWYSRDMSMKTKSAKYAKMRRGEYQSVICPYGYRKSADGRMEPDEDVAPNVQMIFQWASEGNTAAEITRKLYAMNIPTPGEYRKLKGKAYYNVSRTNGVWSTSTVLRILEDQRYIGTYVIGKRKVKEIGSRHTQLKDESEWFKIPNHHPAIVSVDLFERANASIKRFSLSNKKPRDYLLRGKVFCGCCDHAMSLRNGAWFYCRHSEVAETLPCHGVRIKMADLEQVVFETIRAQMCPALGIDSNKDKLDLQTVQQTEHEEKLRSIQDSKRYLYEQYALGEIDLETYRTRKAVYDTELVQAKNVHAVITAQTKQIKSDYEIKLKQQEIVQKVGNANMLTKALIDRLINKVYVFPGDRIEIEYATQDFLETKESEKEV

SEQ ID NO: 399 - protein, 559 aa, synthetic construct
MPRVSKRTKKAETQPQIKYYRTYIYLRLSEKDGGHGRRDSIYIQKQICVDFAKKHPEMLIMKVYTDNGVTGTTFERKAFEELMTDVRAGKVDCIIVKDFSRFGRDALDAVDLIDVIFPTLDVRFISVLDEYDSENPACVQDRVTNILKHFMNDYYAREVSSKLIQAHKISREKGEYWGGRPPYGYERAEDNNKKLVPEKTERKIVQKIFYWYVFEDMSSYDMARELNGGGIPSPTESYEIRRFGKVKRKKRIYWGADTIQRILQNPLYIGAAVSGKTKQMLCENLPFQIIPKEQWEIQENVWEPLIERTVFEQAQQILKERWKDNLEIWAASIAGKGSANGPLLGRIYCGCCGKRMKRSRTGRNGKQERMSYRCSTAEITDETECLKYINEKCVFQAVRGALQYQMKLASDYHTKYGMDFYRKLEKETSLIIKKSKGDYEKYEGKLEQLFEHYATGLIDREEYLEFKETYLSEQEQAHKKLKEKQIYYQNILERLMAKIDWADELIKYQGVTEITREIVERFIEKVVVKSATEITVYFWFGDIFEQEVPDMERGLLDAV

SEQ ID NO: 400 - protein, 546 aa, synthetic construct
MGKKQKATGGDAVIYARYSSHNQRDVSIEQQVEACRKHAAELGLTVTATYEDRAISGKTDKRPSFQRMMRDAEQHKFAYVLAWKSNRIGRNMMQALVNESRLVDCGVKVFYAEEDFDDNAAGRFALRSMMNVNQFYIENMAEDVKRGLYDNAKKGLVNGSLPLGYKRGADGKPEIDEPKAAIVREIYTRVAAGELFASIAADLNARGIRTARGREWNKGSFHVLCHNDRYRGIYMYGDIRIPGGMPRIISDELFYDAQEAYGMKKDNRYGRARHGAENYLLTGKLYCGHCGSYMVGISGTSKTGEMHYYYACQKHRLEHACEKKAIRRDVIENAVARAIMMYCLDDETIDFIVDSTIAYFKQKDHELHIEAMENELAAVQQAISNLMKAIEAGIITPTTRTRLLDLEEQQAKLSAKINTAKAERVEIDRDDLIAGLQLFRTGDIKNKKFLAKLFNTFLLAVYLYDDNRLKIVFSFTGNHNNIEIPLELDNDCPDSESGPYETEVRMSHLECRKNSGTPPSSGGAEKGDGCSSGRFVRTVPLPPHKK

SEQ ID NO: 401 - protein, 427 aa, synthetic construct
MAVKAHRRIARRAAIYARVSTVRQAERELSIPDQLRQLREYCEAQGVEIVDEYVEPGVSGRDESRAEFQRMLARACSEERPYDLILVHSFSRFARDGMVLQGRYRELMACGVKLDAITQPADDSPEGAVMRSIFGAFDEYQSAQNSKHTHRAMCQCARDGYWPGSHAPDGYRKVPAARVGDKTRYVLQPDPARAPLIARIFELAVSGDGDGPMGVKAIATWLNAHGHRTRPGGRWGISTVHKLLTSPTYIGEHYFNRKSSRTNQERPREEWITVSSEPIIERETFEAVNRNLKARAPKKMAPRLSSSPMLLTGIVKCGHCGAAMTQMTGKNGRYVYYICSNRKRTGANSCTRKSVPQPVIETAVTDALVHGVLAPAHIEALVSECVAQVQAQSDHEVRQRRAQKALLDAEAGLKRLYDGVAAVHPDT

SEQ ID NO: 402 - protein, 545 aa, synthetic construct
MVRINCAVYVRKSTEKGLELEFNSLHNQEDACRSYIMSQAFNDWEYFKTYTDGGISGGTMERPALKQMLEDIRRGLIQTVVVYKVDRLSRSIMDFHNMMKEFDKYGCSFVSITQAFDTSTSMGKLTLNMLLSFAQFEREVSSERVRDKIRASKAKGLWTGGVPKLGYDIKDKKLVINQVEAEQIRSIFEGYLQCSSLAELEKFTEVNDFKHKGWITNKGEQRGGKPFKISALHRLLHEKLYLGMIENKRTGQAFKGQHEAIISKELWEKVQAKLKDNDNSSNHTRSRNNNLLTGKLFDANGTIFTNQANSKKKATKRHYYSIKGLFLPTEQIDKLAKNAIIEILNSNLNGLNKDSAMALKLINFNDMNYFVQRNFIRNFINKIIYQNDYLTFFFNTDQIILSAYAGDSLNQNNNPLEFIADNANNQIIYEKQVVINRGLSSNIYNAGKVGLMSVNDNNRLIVRAFAYAWRYKKLYERGIPTDDIAKQERISKRTIYKYLNLAYLSPKIVNQLLNGTLTINLQTLFDIASKNLSFEEQEKMLEKLN

SEQ ID NO: 403 - protein, 550 aa, synthetic construct
MNNKVAIYVRVSTHHQIDKDSLPLQRQDLINYTKYVLNINEYELFEDAGYSAKNTDRPNFQNMMTKIRNNEFSHLLVWKIDRISRNLLDFCDMYEELKKYNCTFVSKNEQFDTSSAMGEAMLKIILVFAELERKLTGERVTAVMLDRASKGLWNGAPIPLGYVWDKVKKFPIIDRTEKSTIELIYNTYLKAKSTTEVRGLLNANGIKTKRGGSWTTKTVSDIIRNPFYKGTYRYNYKEPGRGKIKNKNEWIVIEDNHPGIIEKELWKKCNEIMDVNAQRNNASGFRANGKVHVFAGILECGECYKNLYAKQDKPNIEGFRPSIYVCSGRYNHLGCSQKTISDNYVGTFIFNFISNILTVQRKIKKLDLEVLEKTLIKGKAFTNVVGIENIEVLQQLSYSESTFKSKNIEDKENSFELEVIKKEKSKYERALERLEDLYLFDDESMSEKDYVLKKNKINEKLNDANEKLRKIDNYNDISELNLEKEASDFMLSKQLLNTECINYKNLVLNVGRDILKEFVNTIIDKIIVKDKKISSVKFKSGLVIKFVYKC

SEQ ID NO: 404 - protein, 518 aa, synthetic construct
MRTILYARYSSELQNALSTVDQIASLRERADREGWTIIDTFADEEISGRAGIGEMQRPGLNAMLNRVERGDVDQVLAEATDRIARHSGDAHAVREHLEHFGARLFTLADGHVDEITGTIKGLMDSRFLKDLADRIRRGQRGQHGRGFNAGGLAYGYNVVKKIGEDGEIIRGILEVNEAEAAIVRRIFDETLAGVSSRAIVKALNEEGIPSPSGRLWATNVIHGDRIRANGILRNNLYRGVMVYGRTRRAYHPKTRRYVARVNPVSEWRFVDVPHLRIVSDAQWKAIEAHYAAFDGDIRTKKRHPKRLLSGLGKCGICGGTWTVISPAKWGCSTAKNKQACSNTRTISTALYEQRTMGQLKQILLNPDAIQLFVERYNVGIRKRLADATANRAPLERKAADLRGRISRLVDAIADGAGEFQEVKDRLRTARAELADAEHQLKALDDAAPIALPDDLADRYRIYIAQLDDALATEGAARERAASAIRELIDSLTLTPNKTGRGVEIQVTGHMANIINLAK

SEQ ID NO: 405 - protein, 412 aa, synthetic construct
MTKPVRCAVYTRKSSDEGLDQAFNSLDAQRDAGEAYVRSQASEGWTCLPTLYDDGGYSGGTLDRPALTRLLADIERGLIDVVVVYKIDRLTRSLSDFSRIIEVFDKHDASFVSVTQSFNTTDSMGRLMLNVLLSFAQFEREVTGERIRDKIAASKAKGMWMGGVLPLGYDLPEQGTRKLVVNDTEAETVRAIFARYLELGSVHGLQRELANAGIVSKQRTAPDGSVRGGQPFSRGALFHLLRNRLYLGQIVHRGVVHEGEHDGIVDPALFDQVQHMLDRNARRHRNAGEARVIKAPLTGKLRDAAGDVMSPTFSRGKSGRSYRYYVSASLQQGAADDKTVIRRISASSIEKVVADALERWLSAPIDVALAVRLTSAGLLIDLPGKCALDLASNLANGAFRLSPLHRLRLTSG

SEQ ID NO: 406 - protein, 486 aa, synthetic construct
MSPKGKITKPLDVYVRVSRVGGREGDSFISPAVQEERCRALATARDYRVGEVLTDLDKSGGTMDRPALNEALARIRSGVSGGIIVARIDRFARTMQGALNAIEEIEEAGGFLIEADGEWDTSTSMGRFGRDLVLRISQLFREQATEGWATARSGAVERGIHGGSRVPTGYRRNGERRLVVDPRTSPHVAECFAMRMRGASWGEISDYLHAHKIVTSKGGTAKIEGSRRGVGGQRWSDTALRSMIANRCYLGEARSGEFVMEGAHEAIVDDALFRAANAVKGSAPVRRGESEGALLAGLLYCACGGRLTSDYTMRNGTRYRYYTCKKVPACPERSTISASIIEPYATDIAFGLLHATIRVYAEPSQEIEDAVLLAESELAEVESAHAQGDLSALAYGIALEAARNALEAAQEARAAELAAASVSDVQRARANRWVQGTETYQATWDALSVTERREAIRETLTLMGHRGYVVTRGRGRVEDRVRPVAI

SEQ ID NO: 407 - protein, 560 aa, synthetic construct
MKQIERIPPKQEVNKLGSRKSLKRVAAYCRVSKATEEQLTSFENQKEYYENLISKNEHWQLVSIYADEGISGTKTAKRHEFNRMIADAMDGKIDLIITKSVSRFARNVVDTITYVRALKDSSVEVIFEGENIQTSAMEGELLLTVLSAVAQMQVENLSENVNWSLRKKMESGEIVGFSGCLGYDYNSGEKKIIINEKEAEIVRLIFSRYLGGAGCYTIAKELTKIGYRTKRGSRKWHESTVRTILKNEKYCGDVLQGKTFTKDVLNHTRVKNRGEKAQYIVRNNHEALVERTEFEEVQAIMNERRVQLNLKEGAQRLSRKYAFSKMITCGFCGSSYTRRKHHSSSKYEHFSWTCIKPGKGFRSECPSSKSIREDIIEQAFLECFNMLLSESDDVIESFLSTVKKTLESADHSKELTEFESKMGNVSDKMDNLVKLNIESKISTELYEKNYEELEEELAYLEGEYKNVRKAVSSQKTVKERVERFADLFKSNRKISEFDGDIFEAVVDCIIIGGKNEYGINSPYLITFILKTGSKLNVDTDKKKDKSFDSGLYPFSGNHTC

SEQ ID NO: 408 - protein, 526 aa, synthetic construct
MDEYCLYLRKSRIDLEAEANGQGDTLARHRAALLKLAQKRGFNITGCYEEVRSGESIAARPEMQRLLNDVEDGRWAGVLVMEVERLARGNTTDQGIVADTFKYSDTKIVTPNKIYDPGDEFDEEYFEFGLFMSRREYKTINRRLQRGRRASLSEGKYIAGKATYGYERYKLSGEKGYSLRIIPEQAEIVRQIYDWYVNGELLPDGTLRPLGSYTIAKRLDARGISSPTGGKWPPCTVKDILTNPTYIGKLRWSYRPTVKRMVDGELVKTRPVDRSVHLSDGRHEPILDEVLWHRAQLMLKNRSHAPVPKSTNIRNPLAGLLICSKCGRSMERRKFKHGRDTVACPNKDCTCKSSVLEEVEAGMLDSLRIWLSDYKVKLAQSQETISHTGPTAEQEITSLQRTLGTLQAQMENLYNLVEQGVYSTDLFLQRSQALTARMAEVNQQIESTQAALTASRRIARNRFEIIPRIERVLALYPTLTDPREKNTILKEVLEKILYTKTTGSRWEASDMNLYVFPRVETDGEQL

SEQ ID NO: 409 - protein, 467 aa, synthetic construct
MRRAALYIRVSTLEQAQEGYSVGEQRERLIAYCKAQDWLIADIYVDGGYTGSNLNRPGIQKLMSETEKFDVVLVYKLDRLSRSQRDTLYLIEEIFRPNKVDFVSMQESFDTSSPFGKAMIGLLAVFAQLEREQIKERTWMGRVARAKTGLHHGGGNIPIGYDYEDGKLIVNPYEAEQVRKIYEWYLSGASLKAITDKLQDAGYTNKYSSYNSWSSVRNILENETYIGRLHFGGVVVDHAHEAIITEEQFNAAQILRGKRREQFGSHAFQSKHVLTGLLFCGHCGGRYYLRNTGKYSYYACYSRTKQMKNMIKDPNCQNKIWRAQDLEPIIEEKILALLRNPQIAEELAAGKPKTAAPVSKNTDIERRIREIDRQIGKLMELYQQDDIPPELLGEKINRLYGEKTALENSIAPVKETDAMPLDLVAELITNAAEIWDFADENQKRRILQSLISRIVLTDDQVDIEWAF

SEQ ID NO: 410 - protein, 430 aa, synthetic construct
MEVDQPMQYCLYARKSSEDDERQAMSIDSQIKEMTDLASREGFIIKEIRRESHSAKESGQRPVFKKLLEDIRDGMFTGILSWAPDRLSRNAGDLGMVVDLMDQGRLQQIKTFSQSFSNNPNEKFLLMILCSQAKLENDQKGINVKRGIRAKCEMGWRPGMPPIGYYNRAFAGVKDIIVDQDRGYIVTEMFERVVKNGDSGRTLKKWLDTCLTTRGGKKVTLSQIYLMLKNPFYYGEFEYPVGSGNWYKGKHEHLISKDVYNKVQQKLVVPKKSKWGSKFFIYKGILKCASCKSTVVAEERFRKRKYGKPPRRHIYYHCSRQKNYDCSEPYATEDGLEKSLIRFIDFVYINHPDKISFTEKLHTSMQIYKEFRDEVLIQQNISPNSKVWDIRDYTRYAIRYGKPEMKRELFKMFDYDFYLKNKQITTLRAH

SEQ ID NO: 411 - protein, 515 aa, synthetic construct
MQYLIYLRKSRADREAELRGEGETLARHEKALLELARRQHLPIADIYREVVSGETIASRPMMQQLLSEVEQGIWNGVLVMEVERLARGDTIDQGIVAQAFKLSDTKIITPIKTYDPNNEFDEEYFEFGLFMSRREYKTIKRRLNNGRQASVKEGKYVGNRPPYGYERIKIENDKGFTLKPLEKEVQVVRMMFRWYAYGAHGISTIADQLNEMAIPSKTGKQWVYPTVRDILQNPVYVGKIRWGWRGQRKKVKNGSVSVSRPRSDDYLLADGIHPPIIDQQLFDQVQKKFSTHKPLPTSAREMKNPLAGLVICAKCGAKMQRRPYQRENIRTGLICPNNKCKNVSAPFDDVEQKLIEVLAEYIKEEKLRISNGHTQIDDSVLQILQNQLADLREETVDLNKQNDNIHDFLEKGIYDVDTFLQRSQKISSRITEIEEKQKTMQQEIIEENKRIESATSIIPMTEQLLLQYENMSALEKNSMLKEVLRCVKYERECSIRDGGTADNFTLYLYPKISHK

SEQ ID NO: 412 - protein, 557 aa, synthetic construct
MEQMQKNTPDIYDAALYLRLSRDDMDDGSEKTESNSIANQRELLRSFIKSQPDIQIFDIYVDDGYSGGNFDRPEFKRMTTDIEAGRVNCVIVKDLSRFGREYIEAGRWIEKTYPALNVRFISVTDQFDSKTADFSEKSFVVPIKNFVNESYCRDISGKVRSHQKIKREKGEFIGAFAPYGYCKDPENKNCLVIDDYAADIVRKIFAWKIEGFSFGAIAEKLNVRHVQSPKEYKIANGENYNAGFQGTDTPKWSAVQIKRILTNEVYIGNMVQGKQERISYKVKKRLDKPESEWVRVKNTHPAIINQSDFDVVQKLLQYDGRASKTSDSASFFAGFIFCGDCGVPMIRRVNRYKGKEKAFYICQTKNKGGDCTRHSIPEEVLKKIVLKEIQMYTALFVDYEMIMEELQQMEVSYDQVISYDTQIAKLQEEYNKCYSIKVSLADDLKSGMITKEEFDEFRESYGKKCEELDQMIEHQKKLVKQMFEGGVSAKVQLEDWKKSLEIKELDRTLLALTVDKIYIYENKQIKIRIRYQDVIEKMKVIKRFYTEHQAEYRKEVG

SEQ ID NO: 413 - protein, 549 aa, synthetic construct
MFFQENGQYRCAVYLRLSRSDGDQQESNSIKNQRALLNDYMGKHPELHKVDEYVDDGYSGTNFERPDFKRMMQDIEKRNVNCIIVKDLSRFGRNYIETGRYLERIFPFMGVRFIAINDHYDSAEENDDKGRILIPFNNLINDTYCRDISLRVRSHLDVKRKEGQFIGSFAGYGYQKDPKDKNHLIIDEYAAGIVQEIFKQKLNGMSSQRIASHLNELGVLPPNEYKRANGFNYTCGFQAGLNQKWTVVSVNRILKNESYTGTLIQGKRRKINYKVKKSHDVGSENWIRVEDAHDSIISKGEFQQVQQLLELDTRTAPSQTTVYPLSGFLRCADCGQNMIRRTVTKNGKKYQYYHCSTYKNGGDCTPHMINSEKLTESVLAAIRHQVTLLVEAERVLSNAELASGEQIGIKILDSQITALEAELERYSNLKIRLYQDLCDDVVSREEYGEMNTRFAQKIKEAQDKIQEIREKKQEALKHDTLLPTWLEEFKQYEHIKTLERRVVVELIDHIDVHSKTEIEIHFCFEDELHSITEKFMEYQAHHGNEVAEE

SEQ ID NO: 414 - protein, 457 aa, synthetic construct
MSEKNIISDGKVMRAALYPRVSTEEQAKFGLSIHDQQNDLERYAKEHGMKIVGVFADAGFSARKKIEKRPAMMALLDAVRRDEVDIVLVTKLDRWFRNIGEYYKVQDILEAHNVSWKTIYEDYETTTASGRLKINIMLAVAQDEADRTSERIKKINEGKRLRREALTGDKPLGYTIVNKKLVKDPQTALAVDAFFRKYMACGSVSATQDYIREEFGLTIPYQGANKMLRSTAYYGVYYGVDGMCPPYITKEQYDQIQTMRRKVIKRTDENRIYLFSGLIVCGDCGGRIGGKVNQDHKTFHYNCSNHFCRRKPCGNNRSISEKKLEKYLLDTVECKLESYKTEFSAVQENVVEKDYRSEINALRGKLSRLKDLYLNELLTMDEYKKDYASITEKIHELEIKQQPPRPSNLPQIQKLLSHNWRDMYGALSPMQKREFWRIIIKEIRWYPDRHIEFDINF

SEQ ID NO: 415 - protein, 522 aa, synthetic construct
MYVLKKVTKIDKVQNAPSQKEKIRVAAYCRVSTSNEAQLESLETQKSHYENYINSRSDWELAGIYFDEGITGTKKDKRPELLHLIKDCEANRIDFIITKSISRFSRSTTDCLELVRKLLNLNIPIYFEKENINTGSMESELFLTILSSMAEDESASISENKKWSNRKQFRDGTFKTMCPPYGYCYNDGTMCIFPEQAKVVKRIFSDVLSGKGTTAIAKELNNDGIPSKQGKKWNQTAVKKILSNEAYIGDAIFQKTYTDEYFNRHINNGEKEMYYIQNHHEAIISKEDFKSASAIISQHATEKNISSNDNKYRNRYAFSGKIICSECGNTFKRRLHTNTYSKYCAWCCNTHLVDKSKCSMLYLRDDDLKIAFATVLNKLIYGHNLILKPYVEALKNISGNKDFARIQHLEQLIKQNKEQQEVLTKLLCQGYIDQVLFTNETNSLLAQSGKYKKDIDAINSTINGDNSRHYEAEKLLYFTEHNTMIKEYSENLFERFVDHIIVYSRHLVGFVMKCGLTFKEVI

SEQ ID NO: 416 - protein, 608 aa, synthetic construct
MSNYSSREELRQVYQREDQGEKTFIPAKPKADLYGGSHTFRTCAYCRVSTDNDEQLSSFELQQNHYKHLVQDHPNWELKAIYADEGISGTSLKNRDQFNEMIEACKQGQYDLIVTKSVSRFARNLVDCISLIRMLKGLKPPVGVYFETDNLYTLDENKEFMLSFLATFAQEESVKKSESMNWSLQQRFKDGKLLTPAPLGYDRPKDVTGRYIKYAPLEVNEAEAKIVKFIYDAYLSGWSQEEIAAFLTDIGCETKSGAAEWNNGSVGYILTNERYCGNVLTWKTFTADLYEHKHKKNNQDRDQYLYKDRHEAIISVEQFESVQTLIENRKHHIRGGLPMMHVIDEGIFRGFIPINHHWVNDDPNTYYDISNSVKRPTKAKAIPKSSFSAFDLQGYQVVRGQFMQVRYEGPTINITNERISFNKFCVQKFENVAYVQLLLHPTERRIAIRPCSSTDAHNIRWRPDPEKAVYSKTLNCQHFGNALYSIMDWNPDYVYKIRGTWAQRGTEQIIVFNLPNAIPAMTVPAESGDESRQKRVSLCPEEWADDFGEEFYEHTLENGFYYIAPNTEWNSQAKSVLAPGMMQFATTTPEQLQMSINELKRGTNEDDG

SEQ ID NO: 417 - protein, 554 aa, synthetic construct
MPEKTAVIYCRVSTARQAEEELPIQSQRQRCEDKARALDATVLRVYSDEGLSGQSGDRPAFQQAILYCETHNPTYFVTWSTSRFARNRLDAQLYKRRLSQSGVMLVYAGMEIDRDTDGGWLTEGILELFDEFTSKQIAADTRRSMIKAAQGGYWCGGHPPFGYCSVPAVDDPRRRRLDILPEEAVIVRRMFALRAQGVGAKPLAMALNQDGHLNRRRPWNKTSVLALLRNPAMIGQLVFGRMMRIDGERRRVAPENWINVPSHLPIIDRALWDTVQRLLDVEAVNTQPALDAVHPGSPRSTYLFTGLLRCGVCGASLQIETAKGRSERYSYYNCRNAQRKGDCPPRRIPARELDHWLLEIVCADLFTPYHLRQMIQDMQEMAGRWHHERTERRKAVESRWQDLKRRNSKLYDVLEELGRDAPHLGDLAQRLRENTTQMKALERQIVEIDSETPPQMEVADEDLQAVAQQLVATLRNGYNPAQTRALFAEFIEKIVVESASVRIEYDPHRLIGTLTDVSGTTVHSQACWLPDSSSLGTVQRLLPAPLAQRRRRHG

SEQ ID NO: 418 - protein, 560 aa, synthetic construct
MYNKNPFQNKNAGSDVRKVALIYCRVSSKRQAEERFWIETQEAMCKERCERNDVIVAKVIKDGWVSWGTFERDWFDEVLDILDKQRKRTEKALKNKSKTTSGKWSANEAENISEDGTMPFITHFVCVDNSRISRNDNMGETLMMTNMIREAWCEILYTLYPVDYNTSAWMLQENILYAFAAFERRNTRVKAMNGMRARLYDGHRPFGLVPIGYMRQKEGKNSMVVIHPTKGQLVKEALEMYANGILESESAVFRYMKDKGMKSNSTQNTQWVLYKTIVETLFWESRLYFYAGFIHHPKRDINELIPAKHEALISMETVKKIMNRRFADKYIGKTKLKDNPDFPLKDYIHCGHCGTKISGYRSQWRNQKYPYYGCTNKKDKNRWQVARDTIHSQFDQLLGTLDINEDTWNLLEETIKRVWKKRYEFQELMIVDKKKALGQIEKQLTSVRQIMVKTENTNLIEDMEKEWELLRIEKEKIKEEIKSKEFMSEQELQECLVQAKAIYLSPKKVRELSNNELRKQMVHVLFGDKLLYEKENGFRTAWNSLYQAVNLLIQSTDFLV

SEQ ID NO: 419 - protein, 554 aa, synthetic construct
MIRKTVTPAVAYIRMSSAPQEASPAQQREAVAKLAKDRGYKLIREYFDGAVSGNKTAKRKDFLRMIADVEEKGDFCAILCWDQDRFGRFDSIEAGRWIHPLREAGVWLVTVEDKEVDWNDFASRITYSVKQEGKHQFLMDLSKNVLRGKIASAKKGQGANISPYGFDRVYYDESGAMVKRLRYGERFTKPKGWQKRFVIAEDGSAEIVRRIFKRFADSDAGYATIAAELNAEGITSPNGGVWCVQTIQQMLKRRTYTGANVFGGRPEGEYHYTDGNGEIAKGKARQKNGSPIVVEGVHEQLIPIELFDRVQRKIAGRAHSTNRPRTSDYVLTGVLRCGHCGGTLAGKGYPKNPEIPKYYTCTNGQTKPGTCCRYQIPQREIERYILGVIEKRILAPRAIAKVKQAVLRRARSKKVVQNETKSLRTKIEALDRKISKGSENLLLASPEHIDDLSRMLGGWKSEREQLQMALERAATNPDGMTPEKLAEQAGAELRRLAGYLKSHDPMKLRGVVKAMVEEVRLWWEPYGKNQKRFVQGEIRFRNNLEVLSTVSRGR

SEQ ID NO: 420 - protein, 536 aa, synthetic construct
MQTGKITALYVRFSYDDGIDAESGSIEHQKSLLRSYAESNGFTDLSYYADDGYTGTNFNRPDFQRMLGDIHKGLVSTVIVKDMSRLGRNYLMVGQYVEIEFPKHNVRFIAISDNVDSAKGMNDLLPIHNLMNEWYSRDISKKVRAMIRQKGNSGQSIASKLPYGYYNTPEDKQTWLIDESAANVVRRIFDLYLNQSFGMYQIARILKAEGIPRPTYHRRMAKGIKVEADDLCVWSASVVRDILQHREYIGDTVNFRTEITSYKNKKVIHNSDDKLKIFPNTHPAIIDKETFQKVQDKISKEIRHTRNVHSYLFADYLYCMDCHSRMHGRQCYLKGGRTLSAYECSTYRKSKGCCFHGVPEMYLQAEVLVKIQNVLAFAKSNPAEFRQNISKALKEQSDGSKAVIQEELDKAQARTAEIDKYIQGLFEAKVRGEIDGSLFASLKKTYDEEKEQLNKLIIDLITKLSRENEADEKIQLLYAAIRKYDAVWELTPEVLTDFIEKIEVGQVSAENKKISFELRDNQISVFFWGVGIIDFM

SEQ ID NO: 421 - protein, 527 aa, synthetic construct
MDFTDKLDILYARRSSEDGKDGESIENQVALLKQYAADKGYYNIKVVTDDGYTGTNFNRPGFQEAFALIQHRRVGRFIVKDLSRLGRNTIEVGQYIGVIFPRFGVEFISIHDGPESSDPDSLVTQFKNIMNEYYAKDISDKQKLSLQARSNSGRHIASTPTYGYKLDPNDRHHWIIDEPAAEVVRLVFKYYNEGMQVSEIARTLEKAKYPAPSHYRKRVVKGSRTEKNPYHWTGSSVTAILKRQEYVGDTVNFKTYHTSFKDKQVRYRDEESFTIIRDTQEAIISREEYEKAKKRRKSTKRVIQTRERHLLDDMIFCEDCGKKMYLNFRKYAGGNCYVYICDSYRKKKGCTSHYVQETEVIESVLNAVRQIFDMYKIDKNECRRTLVRWICRRNETRTREVNERIKEITDRLNTINKTEQALFEQKLQQEISQETFTNITVSMNAESESLRTEYGKLLILLDSFDDQKKSVTRFLTKVGIFADMEITKDDRYILEQLIEKVTIQEIETKIKVLVHFVDIGLISVAAL

SEQ ID NO: 422 - protein, 575 aa, synthetic construct
MARTVRNHPVPRDKMQEERGAEQIPEVKTQEISVGLYIRLSKEDSGKHNQNTVENQKALLEDFVRSKADMKVFDVYIDNGFSGTNFERPAFQKMMEDAKSGKINCIIVKDLSRFGRSYLEIGNYLEKIFPFLNIRFISVTDHFDTFAAASSESGRPLTNGLEIPLKNIINEVYAKDISRKVGSAIEIKKKEGRYGGGVAPYGYRKSKTVKGKYEVDEEAAKVVRYIFGLRSEGYGYCSIVKILNEKEIKSPSAYRYEKGIVKNEKLRDVLWKAYAIEDMLRDEVYLGNMVRGKTHSAMHKGEKRHPVPREEWIVVPGMHKPIVSKELFDAVQAVNEKRAQEHKKKLEKAKENPKRDNVFKGKIFCGDCGITMGCSVGKHNSKSYYCTNYRENGAMGCVKKHISAGKLEKAVAEAVQIYLKMFLESRDIIRSRNGNIEISKKRMVLEKEIRDLGQKEVQLQQKLSSSYLDYKDKLLTVQEYFMLKEEYQRALAQTDEVRKEKELLLHEMQETYGDNLELSQAAEQYAGQDTVTQDMIDSLIERIEVFAGGRIHVIFRFEDDCRRLLEKKEEMEVGE

SEQ ID NO: 423 - protein, 468 aa, synthetic construct
MLYGKPQNYAWYRARVILYIRVSTDEQARHGYSLGAQREALREFCDTFQCQIVAEYSDDGVSARKEIQRRPGLLRVLEAVKAGGVDYVLFIKLDRWFRSVREYYRVQDVLDAAGTNWKAILEDYDTSTTNGRLNLNIRLSVAQDESDRTADRIKFVFSERVKNGGAIFGSKSLPYGLEVRDHRVQIVEDQAVIVRAFFDHYEAAHSTRSTQVWLRDQYGVDLPRATIGRMLRNGLYCGQYRDNKNYCPAIISPDQFQRVQEILARQASGHTRQSKYSYVFTGLLRCPVCGCTLKAFPQFDYKWNRLYLRYRCTQHWIERRCSWKTTPWEPRLEGWLLDHIQPQLDAYVAQFDVQEAQRRQAVVDVGAIQRKLSRLQDLYVDGVIDRAAYDEKYRALIQQQDAAEAARAAQSAGRDLEPLRQLLAGDFRSIYATLSPQERHTLWASVIDHIVVKDGRYGHYDLDVIFLP

SEQ ID NO: 424 - protein, 445 aa, synthetic construct
MKRAALYVRVSTQEQKNSGLSVDSQIDALEKYCEEQGYTVAGIYNDAGISARKKYTKRPALLQLLEDCKQCKIDIILFTRLDRWFRAVAGYYEVQSVLDACKVPWRAIWEDYETETSQGIFKVNIMLSVAQAEADRDSEKIRSVMEFKRNNKEYIGGKVPVGYRIEGKKIVKDEKTRGIIEDMFEHYFQTFSKAGTADYILSKYPGFVRTRTRLVKIMSSPAYRGEMYGVKNYCEPYITEEQAQKISEVSSQKTWTDCKRRIYIFSGLMKCPLCGCRLSGCAIGKKGKKYKVYHCPHSVAQKHKTYTRSEKKLETYMLDHIEEKIQLDVLKAEGRVKASGNDVEKRKKKLSSELGRINKMFEKGRITEEYYDERYEAISKELKELSQTAATEELETKKKIQSRFPDGWKDMYMQLNEQGKQVFWKSIVKEIKISPNEFVEDIIFF

SEQ ID NO: 425 - protein, 485 aa, synthetic construct
MGYVTKKAAQRFEEKKAAIYVRVSTQYQVDRASLPVQREELINYAKYALGISDYVIFEDAGYSAKNTDRPDYQQMMARMRTGEFSHLLVWKIDRISRNLLDFSVMYAELKELGVVFVSKNEQFDTSSAMGEAMLKIILIFAELERKTTSERVSAVFVSRANDGIWNGGKVPYGYSYDKEGKTFSIAEDEAKIVRLIYSLYESEKSIVRVARIMNERGLKSRAGSDWSPTTVHTILSSPFYSGTYRYNYRNESNRKRFREKGKDEWVLVENHHPAIVSPERQAAVGVILESKRYNKNATYQRKNVHVFAGLLTCGCCGSTMAATTDKVRADGWRPSMYICSRRRKSEDCTNKYVSDVSLGPFVLNFFANLIKASNSFGRTTSIETLEKKLLRGEALSRVDHIERPGLEELYNHLRSGFDEKRFESPTIAATESSADLSERDLLLSEKRRLERALNRLKTIYFTEMTRWQAKTSTSSVSASQKPSAR

SEQ ID NO: 426 - protein, 588 aa, synthetic construct
MNIYTLIEKMTLEHKTIFDMQLRVAFYARVSTTKEVQLNSRDNQIQTFTELIQKNSNWTLIKGYVDTVRGETAANRNNFMRMIDDAKLGKFDLIVCKEISRFSRDLIDSISYTRELFKNNVGVYFTSDNLCTIDRDSELRLGIMASIAQQEVARLSERIKFGHKKAIENGVVMGNSRIFGYIKNDGKLVVDPYESKLVEKIFQMYSTGDYSLRNISEDLYKMGYKNHSGNMIAHTTIKAIIKNPKYKGYYCGNKVKVLDYRTKEQKFLPEESWIVYKDETGEKVPAIISEEIWDRCNAMLKTRCTGTKGNIGGKRFTSPLSSKIFCTHCGKNYHHDSYGHKNGKDNVQWHWICSEKKKRSSNCPSFSIKDDDMLKIIKNFLVSFIGDMDKYIEKYLTVYKSQFSNNKIQETLKSIETEIKKYQNKKDKLLDLYTDEIISKEDFKIKNEKIQAHLDELNREKESLCGGKHSIEKSISQLKDIKEYFNNSNVTVDNMSDTFAYELSKTIIKRIEIEPIDKITANIVFYTNFSDNFKMSIAKECRGKANCSGMTNGHIFLIMIPLVTMKFTYSFLRNQPSITKTLNLKLKM

SEQ ID NO: 427 - protein, 506 aa, synthetic construct
MNDKIVPETEGLDAAVYLRKSRMEEGLATDEVLAKHQKTLYDYAAAHGIHILEEYPEVVSGESLYARPQMLRLLQDVEDGKYDAVLCMDLDRLSRGRMKDQGIVLDAFRDSGTLIITPEKIYNLADEIDEEYAELKTFISRREYKIITKRLRRGLQMSIQDGCYVANAPYGYHKTVVDRKPTLEIYEPEARFVRMMFELYAKGYGCVAVARHVNALGAHPHRSPEFSRNSVAKILRNPTYIGKIVWNQKKHIRKGAQGNPKHITIYQPRDQWTITDGLHPPIIDRELWETVQAISDGRYRPARNDGTVRSPLAGLVKCANCGQNMQRMVMKGSAYLLCTRPGCCASTKIDLVEGQILNYLADTLAKLTMDQPQHIPGRDTDVLETALAQVRDSLAGTDRQKNRLYELLELGEYDLELFRVRMAAVKEKRAALEKKEAELERSLQEIQCSNPALLAEKIRAVLDAYGTADAAGKNALLKSVLEAVWYEKKKKTKPADFQLTFQLRAI

SEQ ID NO: 428 - protein, 485 aa, synthetic construct
MSKIAVIYARYSSDKQTEDSIEAQVRACREYAAAHGLSVVDVYTDEAISGKGSKTANRRQYQRLLRDCGKGLFSVILIHKYDRIARNLGEHVNLEARLKEKGVQLIATAQDFGQTNEAKIMRALMWSLSEYYIDNLAQETKKGLRETALRAEHTGGYAPFGYDIVNKKYIINDLEAGYVRKMFDAAQSRTGFTDLIEEMANAGISGKRGKPIKYPQIYEILRNEKYTGAYLYSPTEAKNRADRRTKPDSIKIENAIPAIISKAQFKEVQKIMNERKQTGRKAGYLCSGLVYCRCGAKMHGTTTHRKGHEYKYFTCSKKCGAPVVHMEEVDNAAIEYLRELLTDENQRTIAAALRQYQAGEGSRMEEFKQALNARIDEKQQEYDTLMKNLSSGVLPADIVSDIGQQMQDIKAEIATLKTTEPPKDFTVDTIREWLESIKAAPDEAAIHLLIERIDVICTPEKEKTAFNMQSTLKTVLGKNGCGGRI

SEQ ID NO: 429 - protein, 476 aa, synthetic construct
MRIGAAYIRVSTDDQLDISPESQLDEIQRYAKSHDILIPEEYIFMERTGRSGKRADNRPEFQRMIATAKEKPQPFEVILVWKFSRFARNQDESTFYKGMLRKKLKIDIESVSEPIMEGMYGRLIEMIIEWQDEFYSYNLGVEVKRGMAKKAELKGYQLVPPLGYAAVGNGKPYVIREDEYKIVEMIFHMYAVDRLDMTAIARQLNASGYLTRRGNPFEKRSIDRIIQNRFYVGTVEWNGFSFEGTHKTRASVTELFEQCQERRKAEFRPMRHRNVSTCKHWLSGLMRCSVCGATLSYTGSGAVPYFTCWKYSKGLHPESCSISVKKMERIVLRSLDGILESGHFEYTPAASASGSPADPSNEIQSIHTQLDRLRHQEERARIAYENEVYTLDEYKESKARLRSEIQRLSDELQRLLEQPAESAPPQKELLDRVRNVRDLLASPSVGFETKGNALRSILKCIVFDRKTEHFDFQYYA

SEQ ID NO: 430 - protein, 463 aa, synthetic construct
MKRVAIYARVSTQEQAENGNSLEFQIEKLKAYCQLHELKIVGEYIDAGVSGAKFSRPALDRLKNDIEKIDIVLVYKIDRLSRTIKDTMLLIEDIFKPNNVDLISLSENFDTSQAVGMAMIAVISTFAQLERETIKERMIAGKVQAVKNGKYINRPPFGYIKKDGKILKDEKTEGCVKFIFDCVLKRKSLSEIVSMLHMREYSKLRKWNVTAIGRMVKNNIYCGHTETFGTIQKNTHERYITDEQQKYMLELIAERKTHSSKSGKNKIPALFRGIISCPKCYHRLTPTNKKSSNGDKLIYYRCINCLKNKQSDFSVPERKFEKKLLDFLKYDFKIEFKKSEIEKKDYSKILNNLENKKFKLQKAWLNELLTDEELKKLQNEINDQITLIEKEKNDYNLMVENSKKQKNISGIISNFENLYAEMSNNEKIEFLNTIIKEIKIKVEPKKVNVINKYEINIIDIIFR

SEQ ID NO: 431 - protein, 451 aa, synthetic construct
MSDVLKRRMRCAVYTRKSTDEGLDQEYNSIDAQRDAGHAYIASQRAEGWIPVADDYDDPAFSGGNMERPALRRMMADIEAGKIDVVVIYKIDRLTRSLADFSKMVEVFERYGVSFVSVTQQFNTTTSMGRLMLNILLSFAQFEREVTGERIRDKIAASKRKGMWMGGVPPLGYDVENRRLVPNEREAKLIRHIFQRFVELGSSTALVKELKLDGVTSKAWTTQDGKTRDGRPIDKGHIYKLLSNRTYLGELRHKDQWYQAEHPPIISREMWDSVHAILATNGRVRGNATRATVAYLLKGIVFGNDGRALSPWHTTKKNGRRYRYYVPQRDAKEHAGASGLPRLPAAELESAVLDQLRAILRAPNLLGDMLPQAIKLDPTLDEAKITVAMTRLDAIWDQLFPAEQTRIVKLLVEKVIVSPNDLEVRLRANGIERLVLELRPEPVEQQVEALA

SEQ ID NO: 432 - protein, 520 aa, synthetic construct
MEKEKVKAAIYCRLSDEDRDKESEGDDSNSIINQKSMLIEYAGERDWEIYDIYSDDDYSGIKANRPEYQRLLQDAKEGRFQIVLCKTQARFTRDAEAVEKYLHRLFPLWGIRFIGVTDSADTSNRGNKKSRQINALVNEWYIEDLSDNVRAGLTRMRKDGKHIGGRALYGYKIDPKDRHHLIVDPEAADVVRRIFQMYISGIGKQEICTILNKEGILSPSAYKRANGIKANGRSGSHPELWKCPTINYILDNENYIGNLVQGKHTIMSYKVQKTVPVPEEEWIIVKQTHEAVIDQDTWLLARKLRKERSKQGKTGTLSLFAGFVRCRFCGYKAATNKNHDKRYLMCPTRRQHKNACAGFCISEDDLKAAVLRELKAIVAELYDEEAVGREVIEGQPQRCFDNLKEQYRELQEEGKILVKAKTDIYLDKARGNISEEGCSALLNELKKQEELLREKLEHLEQKLEAEEVLEKNKKTKDEILKKYSSIDSLNRGIITMLIDHIEIGKRTKGGEPPIYIYWNF

SEQ ID NO: 433 - protein, 459 aa, synthetic construct
MSTTHFYSHYPTIEYKTCALYVRCSKEEQAKFGDTIEAQIEDLKAFAKLHHLKIYAIYVDEGHTARKKYNKRKEFMRMLQDVELHKFEYIIFTKLDRWFRNIADFYKIQEILDNNGVTWLTALERYEMETTNGKLNVNIRLSVAQDEADRDSDRIKDVFRLKVKKGEAITGSLPIGLMVGENGKVDIDPDTVQIAYDMFDYFEVHNSKRGTLLYLIDKYNRYFCYETIARALRNPLYKGEYRGNPDYCPKIIDPARFDRIQVLGKRNVKVRKNNRYYVFSGLAQCKECGHALVANTTVQKRYNREYTQYRCNYYSNSHLCTHSHGINEKVIEKYLLDNIKPELEKYVTAYDVKQNAPTKKADPSKIKTKMQRLKELYVNELIDLDDYRIEYEQYKQELDKLTSTAAPEVKDLSAIRSFLALDLQSIYDSLTPQEKRTLWSSIIDKIIISDGGDIEIVFL

SEQ ID NO: 434 - protein, 537 aa, synthetic construct
MNKRKNEVIEIPAKPVETDQPVKRQLRVAAYCRVSTSQESQQNSYQAQKAYYTDKIASNPDWCLAGIFADEGISGTSAEKRPAFQRMIRCCKKGKIDLILTKSISRLSRNTVDCLQYVRLLQELRIPVIFEAEGINTLNMQNEFLLAVMGANSQAESEATSSRVKWGVRNAFREGKVRYYYQYWLGYRKGKDGTPEIIPEEAETVKQIYADYLSGKSLRSIADSLESRGILPRAGQAKWTTTYIRGILQNERYTGDALLQKTYTTDPITKKQKKNRGELPQYLVKNCHPAIISHELFDLVQKEISRRSVATGNSDADSARPKPAYSGKYTLSELLVCGECNTLYRRCTWKGNKGTRIVWRCRSRLDHGKKYCKHSPTLDEAAIHQALVKAINQQLVRPEYLLAPFEKIPFHLSAFPVPAKSWPELYSNLLERQSMLDTEIVDLIAEYAANEDWNGESELLIEILRERNKCANYISIFRLDRYGRDFSQDRFHFPYCLTEYNDAVVRYVVDTIKVLDKQHLQITFKGGLVVEQKIPSN

SEQ ID NO: 435 - protein, 495 aa, synthetic construct
MKQYCMYLRKSRADAEAEARGEGETLARHEHALQELAKRQHLPIVKVYREIVSGDSIAARPQMQQLLQDLEQNRYEGVLVMEVERLARGNTIDQGIVAQAFKDSETKIITPVKTYDPNNEFDEEYFEFSLFMSRREYKTIKRRMQAGRIASIKEGNYIGTNPPYGYRKIHPAPKVRTLEIVEEEANVIRMIFDDYLHHGKGAKAIATKLNLLQIPPQKADRWECVSVRKILKNPIYAGKILWHTKKDGDILAEGHHEGIISYESFCEVQKRMKKKAVPQTQVGTELKNYYHDVMFCGNCGHQMRRRPAKIRDGYMLCLRNECRGKVCCSPIEIVDEAVLAAVRARLNDLELSASNSHTQSQQTQHEEQQNKAVEEMQAALQKLKKQKDKLYTLLETDVYTTEVFVERLNIVEKQEKELKIELEHLRAEQEQIENHLDANASVAFLRQLLDEFSDAQPKRRNELLKQVIGKIVYYKTERMCRNRMQSDLRLDITFL

SEQ ID NO: 436 - protein, 544 aa, synthetic construct
MDRESEMRDNLFRVVTVLYIIIYARLSKEEEGKTPEEQSKSIQNQIDICQRYINDEQQKYPNIQFKVVAKLSDDGISGTTFDRADFKRLIKLIESKQANMVITKDQSRFGREHIESDNYMERWFPEHNVRYVAVLDGVDTYVPDSANNDMAPIKNWMNEMYAKHTSRSVKATKKKNALEGIWNGGEPVLGLQIDPNNEGCLILEPKGAEIVKMLADLVLDNKSLDEIVDILIEKKIPIPSIIKGNSRNLNKEVEEIWDTETIRDILTNEMITGVMVQGKTTTLSHKSKKVIYLPEEDWIRVPDKVPVIIPRERFDAIQTMLKSNKNKTTKSHDYLLKGLMRCADCGHAISIKHFKDRKNNYVECCYYKKYGRRKEVCTAHRFSYEELEKLVLDNVKNECMQYVKDNDLAEKLKNKKESKEKQVDLRLKIDKCNRNIDKLNKSIDKMYQRLDAGIIDEDDYTRMTKNTKAAINSEKLLLETYTKDLEVLKEKKVKEPNYIKIVKEFLSLKKPNRILLSRLIEVIYVNEDGTIDIHYRVKNPYKDN

SEQ ID NO: 437 - protein, 538 aa, synthetic construct
MEKENAIGYRRLSDQDQSRYSLEYQEKAIRDYADRYNLNLISIYTDNGQSSFTFDRPDYKELESFLKKHKGLAQYLIIMDHDRFSRNLPHALLKIEELEEKFGIKVRATNEDIRLDSKDPAVFMQRAFNYLMANQELFRIRKRTKEGIREAQKQGRVVNNAPFGYRNAKDNSGKSLIEVDEEKADIVRYIFQEYLKDTPPYIIHQAAKKKGFKNSGNSAITRILSNHIYAGLVKINADDKSDEVLIKGLHQPIVNESVFWLVQEKLGRKHAKKVLPNSEFPLRGILRCPCGRSMTAGFSKGKNKYYLYYRCTKHVDKNYRGETLHQQFAELLDHLSLTEEQVLYIKDNVKNSLNQGIDNHEKVLRARKTQIEKIEKKIESLEARLFEDEIDGATYNKWRKKYLEEKSVVENSIEAFDHTEIERNLKRLDVLIPKLKSLKSIYEMATLKNKHLLINEVFKRNLTYANGQFRTPYINPLFAHNLLKIKEKSLIEIDEALNSRDKIPFSTTYGNRTRDSSVKGRRLNPLTNAASIVLGLQR

SEQ ID NO: 438 - protein, 442 aa, synthetic construct
MQRNIKKIEPLMPKAPAKKRVAAYARVSSGKDAMLHSLSSQISYYSEYIQKHAGWEYMGVYADEALTGTKESRPEFQRLMNDCRNGKIDIIITKSISRFARNTVTMLEAVRELKSLNINVYFEKENIHSISGDGELLLTILASFAQEESRSVSENCKWRIRKRFADGEIVNLRFIFGYSIKKGKIEINPREAEFVRMIFEEYINGKGCTLIAKKLRDMGIQSMRGGTWNADRVADIIKNEKYAGHALLQKKYVQDHLTKALVANKGELPKYYAENTHQPIIDEATFKKAQEIMAFNRELNAGKKEAGHYPFTSKIVCGRCGKNFKRKTTRGKVYWNCSSYLKFGKEACHAKQIPDGVLTLLVEEVLGLSEFDKTIFELKIKEIQVSECNVVVFIFHDGHIVEKEWQNKSRSESWDGERRYNARNKALEYYERRNAQCRQQER

SEQ ID NO: 439 - protein, 456 aa, synthetic construct
MSKVKRCAIYIRVSTEEQHLNGLSLPAQKRALTEYAERNGLTVVDCYADEGISARKPMKHRKGLLRLLKDVEQDKIDMILVTKLDRWFRNIKDYNITEEILQAHNCYWKTIFENYDSSTANGQMVINIMLSVNQAECDRTSERIKAVLDYKRSIGEVTSGMCACYGYKVVNNRLVKDEAVSAIVEDAYDHYRSCYSIRSTYNYLLKKYGNQAPSCNKVDRLFKNETYAGRDKNNINYCEPYITWAEFQKFRQITTTKTYTAGRYDPYIFSSLIKCPVCGNNFTGYRKKQKLKNGGESIYIKYRCGNKFGRHGGASLTEHKIEDYMLTHVSSRLEQEITQVQFKARQQKECRDTDAARKELERLNILFQKGRITESYYDEQYEQLEKKIRESEPDEKITPLKSYDHLVTAFSGNWQELYATLDKQHKQTFWKGTIRSIEIDPETHKISGFSFLTELE

SEQ ID NO: 440 - protein, 569 aa, synthetic construct
MKQSSSRKNREDTAFLYPRLSRDDNLDGDSYSIQNQKKLLTKAAKDMGYTNLVTFCDDGVSGVTMDRPGFNAMIAELEKGHAAAVFVKDMSRLGRNYIEVGRLMEEFFPEHDIRLVAVSDGIDTAEGESEMAPIKNLFNEWYARDISKKRRISNKIKGNAGEPMGQPPYGYMKDPDNLKHWLVDDEPAAVVRRIYRMTMDGLGTEQIATRLEEEGVLTPMAYWQSKGINRPGKRKDAPPTKWNSSSVIKILSSQEYCGDILNFKTYSKSYKLKKRIENDRENWVIFRDVHEAIIERTVWEQVQQKRGKLRKRKTNDGDTCMFSGLLVCADCGKNLHFHFNQGNPEIKYFNCSNYKGNRGTCNSTHYIRVDFLEQVVLGEIRRLTKFASQYEKMFAEAVMGYSQQSAVTERQSMQKELYALQARDRELDTLFEKIYEDNASGKISDERFARMSIKYEDEQKELTEKIKALRNALDKSVSKSVTADMFISTVRKYTRAKKLTPRMLNELVERIEVHQAEKVNGVWEQRLTIRYNCIGAIDIPDMLPLPYPEVSVNTRKGVIVNYVPNTLAS

SEQ ID NO: 441 - protein, 595 aa, synthetic construct
MSKVIALYRSSTDRQEVESQKKEVVDMAISDGNKEADIIAIGCAGASAIKLDKQYIDRINEVYKTIEEQDIKCVYAWAIDRIGRNEVVLMQFKNFMIQHKVQLKIRTMSTPLFNSDGSVDSGFELVYSFFATQAKQEMEQKQARFERARRRNMEAGKYNGGYIALGYKVNDNGYFEIDEEEADLIRLIFREFNSGNYSTVTLAKELNQRGYTSKGNIPFCSAIISRILNHRQYSGEVTDKKGRKKVFPAIISKEEQDKAKQILNGNNTKQTKATKHYYFANKLIVCPECGHHFQVLNNCYQCSGAIMAKREGTQHLSNCKNNIAITFTNLDGMLWDITKREVIIFIETDHSAAAEETKAKIAVLVQKIQTLSDKLSKYEDKINDIIENSDVLLLSEAQIAKRVANVRKAQEAEKNELNILLEEKERLEYTLNYSETFKRWLNGYGSLNEIDLNGDEKVMYDLVHQYISKITVERSEYNGNKNYQLITIEAKSGIYKIYYHGHKKVGSRAIIQYPEYAEGDFVDYDFDKVERTNSGITTAETELFKEFIAMLSEKETDFESNEEMWEFLITNDTYKKCMEKNAQRTTSYINEITSR

SEQ ID NO: 442 - protein, 400 aa, synthetic construct
MKITKKQPLRPRGRSDEKRQSTKDAIREAYANGPQKEVQIIPAKKDLVTDAEKKKLRVCAYCRVSTEEDNQASSYELQVQNYTKMIQENPDWEFAGIFADEGISGTSVLHREHFLEMIEKCKAGEIDLIITKQVSRFARNVLDSLNYIFMLRKLDPPVGVYFETEKLNTLDRSSDMVITVLSLVAQSESEQKSNSLKWSFKRRRAQGLGIYPNWSLLGYKGHEWEIDEDEADVVRTIYSLYLEGYSSTQIADLLTKSGILTVKGLSTWSSGSVLGILRNEKYCGDALCQKTVTVDFFTHKSVKNNGLETQYFIEGHHAPIIEKSDWLLVQQIRKERRYTRRQTRKCKPRIVVKGPLAGFIIADPKWGPEDVDSIMEKLSLPTEIVTSPMLEDENFMIEKE

SEQ ID NO: 443 - protein, 545 aa, synthetic construct
MIMVASYCRVSTDKEDQANSFASQQRYFKEYINRQPDWELYRVYADEGLSGTTTKKRIEFNQMISDAKMGKFKIILTKEVSRFSRNILDTIGYTRELKTLGVGVLFLNDGINTLDSDAELRLSIMGSIAQEESRKTSTRVKWGQTRQMERGVVFGRSMLGYDVKGGKLTINPEGAELVRLIFYKYGVEKKGTSIIAREMREAGYLTFSGNPRWNNTHIVKILKNEKYVGDLVQKKTYTPDYLTHQKKSNNGAEEKVCLTNHHEAIIDRDLWNTVQAEMAMRNRHNKLGLGHGNRYVFSGKIKCGLCGSSFVSRKRRYKSGKITKKWCCFTATTEGTNHLDPMGNIVGCDITHNVRDDFAHVVLKTSVAAVLKSSDWSTDLIANCAIAEIMRSKSDSGESVEKMEHEIQQVRQKKEGILDAFFSKDITKEEMRWMNERYDRELEELHSSLQAARERDKLSYDTTTLQADVKAHIKELMDREVDELFEKEILEVAIVYPDRRLEVHLNLLPMQWRFVLDAVARIRRQSGCHYDPSVPMSVRSPLSSG

SEQ ID NO: 444 - protein, 581 aa, synthetic construct
MPEKIINCAIYTRKSTEEGLEQGFNSLDNQYEFCTNYLKSLNDPALQLLPARYDDGGYSGGSLNRPALQRLLADIQCGLVNRVIIYKIDRLTREIRDFFKLLDIFEKYNVEFVSVKENQYYNTTTAIGRLMVNMFLVFAQFERENAGDRIRDKIATSKAKGMWMGGCPPYGYDIGDRCLVINETEAQNVRFIYQTFCNTHSLADTTDALNSGGIRTKRYTTRQGRTFGGRKFSVKTVQRILQNPLYKGMVAHRGKQYPGQHAAIIDAVQFDMVQAVFAAHKEKRETRRPKMPSSGGERETAALTGLIFCGCCGSAMTPSYCCKGDIRYHYYRCYRRASKLEDKCPINQIRTSEIDRVVMEQVLAILKSRDFFVQYISHHHEFDVSTAFALFNSLDDVWNSLFETEKRRILRELLAKVTIYKDKIVLDVKKAGLAGVFAELSQNNRLAEVEYKENETFQISVAYRATRLANGAKIIVPATAKEESRFNGSLRLARQIAKGFAWRKMMESGLSLQELTASAKTNERDIRFAMRLSMIDPAIVESVLSGKSPEFLTYAFMKKHPIPLLWSDQRKLYGFEERKQQ

SEQ ID NO: 445 - protein, 528 aa, synthetic construct
MSRTAARSVTVIPPTINPLTHLSRVAVQKRRVAGYARVSTDSDEQFTSYEAQVDYYTQYIKRNPEWEFVKVYTDEGISGTNTKHRIGFNEMIADAMSGKIDLIVTKSVSRFARNTVDSLVTIRKLKEKGVEVYFEKENIYTFDGKGELLLTIMSSLAQEESRSISENVTWGQRKRFADGKVNLPYKQFLGYRKGADGFPEVVPEEAIVVHRIYTRFMEGLTPGAIAKELTADGIPTPSRKQRWQTSTVESILQNEKYKGAALLQKCFTVDFLTKKRKVNEGEVPQYYVEHSHEPIITPEEFDKVQTELARRKRISRQYSGKSIFSSRIVCGDCGSYFGSKVWNSTSKYRRVIWQCNSKFKGEHKCETPHLDEETIKARFVTALNAIIESKDNILEDCRLMQATLTDCTGIDTEIESLLEEIDVVTELTKRCIAENSQMAQIQEEYAARYNGFVERYEKAKARLEQLRTTKAAREAQAEAIGAFMFEVQELDALTEFDEKLWLTIIDTITVHADGRMTFKFQGGTEIEA

SEQ ID NO: 446 - protein, 491 aa, synthetic construct
MLGAIYARYSAGPNQTDQSIEGQVADCQAYAEKNGIQIVEIYADRHVSGKSIVGRNEFQRMLHDAEQHRFECVIVWKIDRFGRDRQDIALSKMKLKKAGVRLLYAEESVPEGPEGIILESVLEGLAEYYSADLRQKIVRGMRETAKKGQYCGAPLPIGYTVDDEKHIIVDEEKAAVVREAFWMHNAGAQTKELVELFRKHGVTGQRGKPITQAVIYRMLRNEKYLGRFEIQGVEILTDPIIDLATFEEAAKHFGTPRNNAAGRAKVDYLLSCKCFCSYCGAMLNGESGTSKTGKVYHYYKCGAKKRGEKCELKPIPRDHFEDRVIEATVEDMLTEDMIEKLTVRILEIQEQEDALDPAAAYRKQLDSNRKRQRNILDAIEEGTGARGLAGRLAELEAEEEELLVEIERAEMKKPRLTSEAVGAWLRSFRNGDTKDAAFRQRLVDTFIARIEVRNGQAMIFYNIQEKGPHSKVRVRPEWWSLTRARRTLGSR

SEQ ID NO: 447 - protein, 517 aa, synthetic construct
MSGLLETTILSPFRRAAAYVRMSTERQTYSTANQMQRIQEYAAEQQITIVAVYEDAGKSGLTMRGRPGLQQLLADVQSKDDFTCILVYDVSRWGRFQDVDESAHYEYICRLNGVQVTYCTEAFQNDDSPYTSIIKAMKRIAAADYSRELSSKVFLAQCRIIKMGYKLGGMAGYGLRRALLDSNGEFIRIMEKGEWKAVQTHRVVLVPGPKHEIEVVNLIFHWYAVDKVGDRRIAIVLNKQNVVSESGRLWTGALIRGMIRNEKYIGNLIFNKGSYKLRKTAVRNAPALWVRCDAAFPPIVPLQLFHAARTERSDRNYRYTTEELMQTLQRIYKAHGGVTSALIDRDPDGPACQLFCRRFGSMYAAYELAGIPGPFNAEAIVTRSRTLSIKAGFLDSVKAAIIEAGGTWQATNIPHTLRINDAVTASIRVVRCALDNKWGYHRWRINKRLATGYDFLIAAVLDQRNEKIEAYLLLSAREFENRDISFTELTRASLGNIIRHELADFFPHAVELSEQGG

SEQ ID NO: 448 - protein, 518 aa, synthetic construct
MATFDPSAERGSGPTPVAAYMRMSTDMQQYSILNQSRAIAAYAKQRDMVVVRIYRDDGRSGLDIEHRPGLLGLMEDIQRGHPGYEAILVLDVSRWGRFQNVDEAAFYEFLCWRAGVRVCYVAELFENDGSPFAMIMKGLKRAMAAEYSRELSGKTSAGHRHLASLGYRQGAQPGYGLRRQLLNARGEPRTVLASGEVKSCTTDRIVLVPGPKEEVRIVRWIFDQCLAGQLCGEIARQLNDRGWLRPGQRAWTYGRVRFILQSEKYAGDAVYGRNSKKLGSPLQPNPRGEWVRKAGAYRPIIDPEVFARAQEQLAISLKGVSDDELLEGTRRLYARKGRLTGPLIDAEPGLLASQNMARRFGGLTALYRLVGFTPVRNPRYAEVRSWVTRWRQTLTGFTQDWLVEQGSVVRREGWCLTVDGAWSVSFSVLNGCHIHSHREPQWFNHRPSERTDIVVFARGACGEVGLRDYLVLPRALFDTWPRGFYRNNGPIVDSCTYPSLAILGDLARLSRMEAQVCG

SEQ ID NO: 449 - protein, 458 aa, synthetic construct
MKERIIRCAIYDRVSTDIQVKEGLSLEAQRQALTDYAISHGYKIIGYYADEGITARKKMQNRKELVRLLHDVKSDKIDLILVTKLDRWFRNVKDYHNTQAILEAHNCNWKTIFEEYDTSTSNGRFAINIMLSVNENECDRDSDRIKTVFEYKKARKEHLNGRPGYGYIANKDKMLIKDPATQHIVEEIFRRYFSTYSKKDTVNYILSKYAGEPNAPTMYQVNRMLTCETYAGRKYGIDNYCEPYITWEQYKKIVDISDAKIIPHQTEPFLFSSMIKCPICGKNMSGFVKRQKLKDGSMSEYKRYRCGAKFTEYHNGACISESVIEIYLLENIMGELDRELLQIKSKEKDLKKRPAANPAKIQDEINRLNIMYQKGRINDEYYDSQYSKLKKKLADVQQPQNIASLEAFKPIIQTLDEGWREMYDKLDIKHKKAFWKGLIKAIYIDKKSRKICGFKFIL

SEQ ID NO: 450 - protein, 514 aa, synthetic construct
MKKAIIYVRVSTDEQSEKGYSLQHQEDRLRLYCQHQHIEIIGFYKEDHSAKTFERPAFKELLAFLKKHRNAADLLLFLKWDRFSRNAGDAYFMINKLNRMGVEPQAIEQPLDLNIPENKIMLAFYLAAPEVENDRRSLNTIAGMRRAMKDGRYVTVAPKGYKNTRNEVNKPIIVPGKDAPLVKWVFEEVANGVLSVKDVWRMAKRKGLDVGRSNIWYMLRNPIYCGKIFLPAYKDERAMLVSGLHEPIISEDLFYEVQDALDGRKRKTAAKYTAKEELPLRGFLKCPRCGRNLTGSAAKGNGGIYFYYHCQLGCKERVKAEDANNRFVKRLGRAIGKEKYITLFEKIAEHTYVKNSHQQSNAAEIIQGEIEKHRLRIANAQQLMLDGELSVADYREIKARYEPEIEQLERKQKGIAKIDANLLEYVNETADLLRHLPNYYKTATLPVKQKLVGSICSGKLVFQDGDYQTMEFNDIIQGICRLGEYFDELEKRQASDFGSLSEEVTPSGFKPETF

SEQ ID NO: 451 - protein, 562 aa, synthetic construct
MDGRDNLNLVLHLRFFHYITHLLGEVAMGSLKNNKTPGLRAVGYSRVSSEEQIEGYSISAQERAYKHYVEAQGYISVGEYKDEGKSARTDNIRKRPQFAQMLEDAQAGLFDVIVVHKMDRFSRSLRVAVQVFELLGKCNIGLVSVSEPNLDYSTPQGKLFMHMIWALSQFYSDNLSQETKKGKTERKQQGLYNGHLPFGVMKSNDGLPVPDTRDLGLGENKTNYAALIHAFKKAAEGLSTRLIAEELNSLGYRTQSNRGNNLFTKDTVWAILRNRFYLGELPDGEYTPGKSRRGSYTKGLKGKHEALVPKELWEAAQRAHEVGLTHPGRPATSIKARTYSLSGLLTCSYCGGKIHMHPWADGKARIYCYRRGQGVAQDCKQKAVPLSEFENQVEQYLSSISLPDNYKEVILEAYKKENDEGPGFEKQRSELENRLKRLQTIFTWGDIPEDEYRAQRDQIRGELAALPPASSSKASEVERLANYLQSVGQAWKDAGPEQRNRLAKTLFESIRIEDSTIKGVTPQLEFTPLLVLDHFKKRQGSFRKSGSDGIRTRGLFLDREAC

SEQ ID NO: 452 - protein, 516 aa, synthetic construct
MTAARAKKAAAGQKPKAVRCAIYTRKSTEEGLDMDFNSLDAQREAAESFINSQRHEGWVVLPERYDDGGFTGGNMERPALQRLLSDVEAKKVDAIVVYKVDRLSRSLLDFSRIMETLDARACSFVSVTQQFNTTHSMGRLTLNILLSFAQFEREIIGERTRDKMSAARKKGKWVGGSLILGYDLDREARRLVVNADEAERVRAIFGLYIEIRSLLGTAAELNRRGWVRKTWTGKSGKTCGGGPWTKSNLQLLLTNANYTGKVDYQGEIYDGQHDAILDAATWAKTQALLGRNRTNATPVPRHKYSPLLRGILNCGTCGCAMIHTYTTKGKVRYRYYVCQKATKQGYHACETRSIPAQEIEDFVIDRISTIGADKKLVAEVENEARSQREANLATLADEKVQIEKSLRHQARTVAGIVGQPNAAKRMADLNDQIRAGENRMAEIAMGIARLEDATISRAEVAAALGGFRELFDRLTSPERARLVALLVEKIAYNGGRGSLSITFHPSGIKTIAEEIP

SEQ ID NO: 453 - protein, 517 aa, synthetic construct
MTRKVAIYLRMSLDMDGKGAGIERQREDCRTLAANRGWEVVDEYVDNSISASKSNVRRPAYDRMEADYEAGRFDTIVCWHFDRLTRQPMQMEQWLNRAEQGNLQVVTCTGDYNLTDHTGRLMVRVLAAVARNEIENKSARQKRATIQKAHKGGPSAGIPPYGYDDEYNVIEDRAETVRGIFKAIQAGVSMADIVRALNGEAGRDHEVPWLKPCPSPGVVRWQRDNAKRAERGLEPKAKLKKTRWTHHMVLRIAINPSYAAYRMHMPQDIRDKPEHRGAGSETAPGKRACIVRDDDGEPVQGQWEPIVDKDLWWSVSEILCDPKRDKRRHNRSGRAGLGSGTYICGECGHYMTTLGQSYRCRQCGITRRSAKIDQLVCRVIERRLSREDAVEALTARSKPTEESKAIEEQIRDQEAKIKRAEADYDDGVITGRDLKRNRDKATAEIENLRQQQVATLPEATQSVLVGMSDPAEGFKKSSMVTKRSIIEALLEVKVYKAVRGRKQFDPGTVDIVWKTDA

SEQ ID NO: 454 - protein, 400 aa, synthetic construct
MDLYTVRNNIMKGVPLQELNLRVCFYARVSTDKDEQLHSLQSQISFFNEYISKVPNWCFIGSYIDEGISGTQVKKREEFLRMIEDAKRHKFDLILTKEISRFSRSTLDSIMYTQELLSNGVGVYFLNDNINTILPDSELRLTMMSSIAQDEVRRLSERVSFGMKRSIDNGVVLGCSNIYGYVKDKGKLVIDEEQAEMIKIIFDRYANTTDGLSKVSRYLYNLGYKSRTGKRIDTTILTRIIENSKYKGYYCGHKSKVLDYRTKQKKRLNESDWIIYKDYENVPPIVSEELWERANIKLKQRQDSFTNRAVNKAVFQNRYTYSGKIYCGCHNLTYHRSSAGKRKNNPVWECQVYRRESLKGCSNPVFPTMKLTNPYFIRVLLCQNQFIYHLYTNFDSFTNY

SEQ ID NO: 455 - protein, 452 aa, synthetic construct
MKKRAVIYIRESTKFQDPESQKRECINYCKKNKLDIVKIYQDIASGANNNRKDFLQLLQDMEEDFFDVVVLWELSRSTRDFLMYKTTLMRMKELGKELYSLQEGTLTEDDLDKEFSTDIVALVNSHERKRVGRRVKIRREFATREGKWMGGKLPLGYKCVDGKIEIDPDTAPLVKEIFRLFLSGEKRTDIAKKFGFQDPKKINRLLVNPIYTGKLKLNETEMINDKRVYHGKYELIQGKHEAIIDDDTFKLSLILSKEKRREKYKNGDYLLKNVYCYDGDKMYPSTSKNRNKKPYYAAKFSGKVIGVKYLEETVINTLINEVDKLEILNTVESNVELEERKELYEKEIKKLKLQEERIFKKYIEGKLEEETFDKYDSDVKLKIKSFKSKIAEVEKLQLNKLKYEDNKKILREYIEKLSKTQEREELKQLLDIIIAEVRLINDFRVMVITNIF

SEQ ID NO: 456 - protein, 538 aa, synthetic construct
MSRNNNRGRGEARESASRTNGTIRCAIYTRKSTDEGLEQEFNSLDAQRESAEAYIASQRHEGWVCIPDRFDDGGFTGGNMERPALKRLFAGIESGDIDCVVVYKVDRLSRSLLDFARMMELFDKHAVSFVSVTQQFNTTSSMGRLTLNILLSFAQFEREIISERTRDKMSAARRKGKWVGGMPVLGYDVDPKGGRLIVNEDEAVQVRGMYQLYLEQRAMIPVVQEIDRRGWQTKRWTTKKGQERGGKPFTKNSLFRLLTNVIYTGKVDYKGTIYNGEHNGIVDVDLWQRVQDALRRNGSTGGKEVRNKYGALLKGLLYCAPCGTGMVHTYTAKDNGKRYRYYVCLNAQQRGWASCPTKSLNAHEIETAVVEHIRGIGRNEEIIAATAAKVREESGKRMAELETEQRGHERELKRLHTRIQKLVSESFTAVSNGGAAMDQLADLQDQIRTIEQRMTAIREEVITIQRETVDEGDLARALAVFDPVWESLSPREQSRIVRLLVERVGYDGRDGRVTVTFRSPGVKALCSEADIRSREVSA

SEQ ID NO: 457 - protein, 598 aa, synthetic construct
MPKPPTHTRGPAQRSNAGSSMRTALYLRCSSVDQVKHGFSIPDQLARLRAEAKSAGEVIVAEFIDQARSGTSAARREEFQKLLTAARRHEFDRVRVESVDRGHRNDMERRQFEAELQTLGIQVLYVGEPEKQAPQYRKLQRGIRGVLAEWEVDETSQRTYKRHRYRAQQGKWRGGPIPYGLQPDSTGWFEPDPETYPILLWMLERRAESQGYHAIAKQLNQGIALTEGQPREVPPTPGLIIYRRKPYLERQDPETGDIIRESRPMPSGTWTDSTVEKICKRVFDGVYAGVLRWGERYNKFDEDADGNLKEPVRVETGKPLIPESLLRRVQAVELAAQEGEAATMSAFNSYLLSLRCGACGEAMHGYTSTKYKGEKKYRYRKYRCAGRVNKPGSCHMPMLSADELERMVLEVVMKDIIERSREALLEEINDAIARKRGELLSAIEVAEERLRELEERREAALEALTTQYKGVSERTRAVLAEQADRMVLAYDEVEEQIRKLRLGMTVLDEKARSIMLILTDPLLDPSRWQEPEATHALKRALKLLVHDLILREKAQGEFHVEVQLYEIRQSLLHESTRKFFRTKMVLPRRLEYLRVSAS

SEQ ID NO: 458 - protein, 578 aa, synthetic construct
MKTTRCAIYTRKSNEEGLDMAFNSLDAQREAGIDYIKSQKHEGWLLVEDEYNDGGFSGGTMKRPGLKQLLDDIDRGRIDVVVVYKVDRLSRSLSDFARMMDVFDEKQVSFVSVTQQFNTTTSMGRLTLNMLLSFAQFEREVSGERIRDKLAATKKKGYWVGGTPPLGYRLQSSEESKGLYIIPEQTDLVRTIFDRYIKLSSPVAVANELNEAGYTTKQWTSKKGIVHGGKRLSQKYIHGVLTNRIYIGKITHTRGDHTDIYDGLHESIIDQATWDTTQKLMTKQDRKSLHRWTHPHLLKGKLRTSDGFAMSPTSTHRPLTKKSETKQKRLVRYYISQKAIKHGFKNCPIKTINAVHLDELVRGLVLGHLKHNDLDRQSTEVRDRWIRKAIHEVTLAPDSITVQLDTKKIELLQRHSFRSLPNDIPSRPVCLRTPEVDDRGEHIELKLQLQIKKLDGRRLLLSPDGHDLIIPSTPEPRQHIVDAIGLAYRWHDGLIKSGLQIREYAIEHQLNRTRILNLLPLTLLSPNILRNALAGTLPSRITLGDLLTASKQLDWNRQADELGISTAMSQCISSQSAS

SEQ ID NO: 459 - protein, 568 aa, synthetic construct
MHAYSLVWLQGKIMRENKPIEEAKRRAAIYARFSTDLQNERSIEDQLSLCQTYAGRDGLSVIRTYEDRARSGGSLMGRDGLRQLLDDAREKSFDVVVVEALDRLSRDMEDLAGIHKRLSFLGIEIRAVHEGVVNTVLVGLRGLVGQLYREDNAHKVRRGQAGRIKQGLAGGGSTYGYAAIAGRSGERVVVEAEAQVIRRIFQEYVDGRTPREIAHDLNKERVSPPRGRAWNASTINGNLERGAGILQNELYVGRLVWNKVRMVKDPDSGKRLSRPNPKSDWQIAEVPHLAIISSELFTAAQKRKEERGRTHPSRQRRPRRMLSGLIRCGSCGSGMATNGRDKSGRVRIRCSADTESGTCPDAKTFYLDRIESAVLSGLKAELRAPKVISEYVRTYLEERKRLASASVAKRQGLEQQLGKLNREIDRLVDAIAKGLGDPSILGPRSTALGAERKRISEELQNAPPAAKEVALHPAILKRYEEQLGRLEEALAKGISAGDGEAAEAIRDLVETVTVFRDPERPGGVTVEIAGRLNALLGEKAYPNRVKGVWGKMVAGEGRATRSKIEAKS

SEQ ID NO: 460 - protein, 629 aa, synthetic construct
MKKCFIYHRVSSDLQLSGTGIERQEQNLNAYVERINLLAEMDDPEATIISDQGVSAFKGLNMSEGELGRWMDQVRAGMWDDSHLVLESIDRFSRQNPFQVVGYLAELDRHNITIHDVSLNMLINRGNSAMLPIVAMSAQRAYEESKIKSDRIRDGWRRKREQAFKQGTIVTNKRPQWIDIVEDKYELNDKVAIVREIFRLYQTGIGTPTIAKMLNERGSEWLFESGRLWRGESIHKLLRNKRVTGSIFISEIIRDYSSTSNPVDQKRYEMDVYPIAISKEEFNLVQELLKSRRPGAKVTGGKVLKKFYDPITNKPYLDRDGNVIELEVDTGKEIIQSNIFNGICRCARCGEAMYHNVVVAKRDSKKKGKFTEEYRYIRCIAERDGLCDNKALQYEVVEQFVIEHIKNLDFTQILKPNEINPEIELVRLKIEEEEAHIEDYKLNIERIRNTGKKIPFAVLVELEESEDRLKELKERQTTFTEVQVDTDYLKMVDPSVLFDVKNIEVRARMSAELSKILDSIQLYRTGKHYVITINYKKVEVLKHVLFVEAKKEPVLVSGVAIERFGDTVAYCTPSFSIVVEGVTSPRLINIEGEPLSIIDYSLLLNYVDAVDPNDAVGVWMRNQFNTLTA

SEQ ID NO: 461 - protein, 570 aa, synthetic construct
MKMKAAVGVYARYSDDSQSPMSVEDQMRRALDYLSRIGIEATKVERFIDEDVSAYKTREAYARPAFNAMMAAWDAGAFDIVVADEFSRLGRNPRQQLEILERLDSTQVRLICADGIDSANSGSRMALGIKGVMAQEESRSTSYRVKRGMLGQLIRGYMMAAPAFGYRAERHYESGRAVGTSWHIVPEEAKIVQRMYEMRRDGAAFDKIARWLNETAVPTARGGRLWRSAGVQRMLSNAVYRGEVAWTEESLDPASVHGKSTKEHFFERPHLRIVTDELWHCGQSGKVSRSGYGGGRQAYSGILKCGHCGNLLSSTAKGKAFTCGSCNSNRLVGDPQVLAVPTISVAGLNAVLSFALERVLNDERIEALRARLRERLAQGADGELAELRKTRDRLVKVGQHLLRLIYQREQPDPLLDEEYAKNSKSVADTERQIKALEATKVSVARRDIAAQLDVDPRALTEKLLDGKLPPEHLRAALAKLFPRFVFLGRESRYIARFEIEFAPGAAVAWLSDSAPILDERAVIRVRLIGSARRPVVWNVIEESVEVGELATTSELAETAHVMDEDCAIPA

SEQ ID NO: 462 - protein, 547 aa, synthetic construct
MFDVQGLAAGILVRISDDREGRALGVKRQEEDARHLAARLGVIVQKVYVENDISASAIAGSERQEFDEFMHDWQRGAFKVPLAYTTGRLTRDNIVAERVIAAARQTGISPYYVASPWCDLNTAAGRRMYRSLAVNDTGEAEDIQERVQRKKLEDAREGKAAGGPRTYGYGLVIGYDPVKKKDIRDPYQVIDEEVAVLQEGKRRTLAGDSQFTIVRDWNARGITTSKAGQKVKHKGNVTICDGRWDVGRLKRTLLNECYIIFDPTSHPTDCPCLQNPETGGTRIHHTERHRAKWPGLFTRAEHDSMATVFNGRNVYWSNVGQVKARTYLLSGIVECGGTWRNTEKKGSYCGGQMYGQGKVYDTKKGRVYQRRYACKKWDRDGSRLGCSTVFRIADAVEAYVTEQVLFRFDSPEVLRALTPADNEERMAQLVQDLAELQVRREQLAAEYARKEHDKDDYRVMMKAIKNDIEAAESEKKQLLSTKAKSLAVPTSGLREVWDTASIEWRASVVTLVVERVIIHPGRPVRKMWPNKNGWWFDPDLVEIVWLH

SEQ ID NO: 463 - protein, 557 aa, synthetic construct
MVTLRGSEKLNKEMFLALIDLVKVIIYVRVSTDDQAKHGYSLESQIERCAEHQKQKYNADDDEILVIVEEGESGDNPDRPALNYLLYLVEEGMGRVVYVLHPDRLSRFLHLQTNVSMRIWNAGCDLQFVEFDLDKDNPESMLMYNIQGSISQYNKAKILANSKRGKRQKAKKGKLNGGKRFYGYIYDKETSNLSVNEFEKEIYLRMVSMLLEEDCSCSDIARQLAEDNVAAPSGNYWYQSTVTRILRNELYTGISYYGKTEVIQTQGKKKQVKRKQEDWIPVAVPAYITNETYLDIQKKIDSLSKVKSGRPTQSYLLKGLSRCGRCGAAASSGITSVTKRGILKYYTCNNKSKKEFEVGTGRVRKKCRGRNWRVDHIDNFVWEYILSLIYDPVPYIETIIKKKTNISNNEVINKRLKKLEKAMKEQEFAKERYIDLYACGMIKSKEDLEKKTKPIEEKIKDMSSQISILNEEKKLYENKNNEIDQMKTMLEHYSKIIDPENVPFEMKRKLVKALIHSVTLNDNMTIDVVLKVSDSIGAISSVNKHRNQSTSQSHGGS

SEQ ID NO: 464 - protein, 445 aa, synthetic construct
MNAANPSRLRCAVYTRKSNEEGLEREYNSIEAQRDGGANYIASRRSEGWAQVADDYDELAVSARDMNRPVLQRLMEDIRQGRIDVVVVYKLDRLTRSMRDFPVLIDFLDQHKFTLVSITENFSTKDAVGRMTLNMMMTFAQFERELAVDRVRDKMLASKKKGLWMHGIPPLGYDVKDRRLVINHAEAAQVRMIFRRLIETESILTVVNDMRGMGYQSKSWTTRDGRVREPQPHDRSTIQKILHNRTYLGELKHLDQYFKECHPPIIEVAVWDQVHAVLAKNSHARGNASRARVHFLLKGLVFGPDRRALTPWHTTKRNGRMYRYYLSTAQIHEGKAATTMPRLPAQELESLVMSYLRTLLTSHDMLRLIAQHAVGIDRGLDEAKVTVAMRQFDQVWDALFPAEQQRLVKLLVEQVLVRPEAIEIRFHPNGIASLASDFERKAVAA

SEQ ID NO: 465 - protein, 593 aa, synthetic construct
MTLLDLPAGLDLASLRALAAGTNHKAKQTTATGTTEGLVPAISYLRVSTKDQASRYGQEEGLSIPAQREAAQRKAEQLGAVIVKEFIEPGESAKSARRRSLQEMLDYIAANPVRYCIINKVDRIARNRLDDAIIHATLRGANTTLVSVTENIDETPSGMLMHGILASMAEFYSLNLAQEVIKGMTQKATIGGTPTKAPLGYLNVRTADAKGREIRDIAIDPDRADLIRFAFTAYATGDWSLSSLAKELNARGLTTRPTPAQPARPITTTTLHKVLTNPYYQGTVTFRGLTYDGAHTPLVDSETWIRVQAQLDAKNAVGERPQKYDHYLKGSLYCSCGAKLMIERPRDKNGNRYEYFTCSGRRRKRTPCIRSAILAERIEQRIEATYNTNGLTKNEAERVQGVLHRVFDQLEATSDDERKLLEAQKDKLEAERLKLVQAHYADAIPLDLLKSEQERIRTSLDQITRRLDTMTATYTGARDGLDELLDLLTDLGDLYNRCEPAERRMLNRALFDRIIIDEDENISVVPAEPAASVLAHVNTDVPEPVTAETNLPRTQAGQVSIFSTYVEHRGFEPLTFSLRTRRATNCANAPRTP

SEQ ID NO: 466 - protein, 467 aa, synthetic construct
MKCVIYRRVSTDMQVEEGISLDMQKLRLEQYAKSQGWVVVNDYCDEGYSAKNTERPAFQKMIKDMKKKQFDIILVYRLDRFTRSVSDLHSILKIMDEYNVKFKSSTEIFDTTTATGRMFITLVATLAQWERETTAERVRDSMHKKAELGLRNGAKSPMGYDLNKGNLYINHTEAEIVKYIFEMFKTKGIISIVKSLNSRGVKTKRGKIFNYDAVRYIINNPIYIGKIRWGDDILTDIAQKDFETFIDKDTWYTVQQVQDSRKRGKVRLHNFFVFSNVLKCARCGKHFLGNKQVRSHNRIVMSYRCSSRHHKGTCDMPQVPEDVIEKEFLNLLEDAIVDLDDTEEKPIELGNLQEQYNRIQDKKARLKYLFIEGDIPKNEYKKDMLTLTQEENIIQKQLANVTDTASSLEIKELLNQLKDEWYNLNNESKKAAVNAIVSSITVEVTKPARVGKNPIAPVIKVTDFKIK

SEQ ID NO: 467 - protein, 526 aa, synthetic construct
MRTVIYARFSSDNQNPRSTADQIALCRQRAEQEGWHVVATFEDAATSGAAGIDAHQRPGLHAMMQMVEAGGIDQVLAESTDRISRHIADAHMIRERIEFVGARLFTLFDGTVTPMIGLVKGFMDAQFRTDLAKRVRRGQLGTLKQGRIPGSIAYGYRHANRLDEKGQLVRGLREIDTEKADIVRRIFAEYAAGRSPRQIAARLTADGVPAPQGALWHETAISGDLKHKRGILRNETYIGVVTYGRSSQVVNPQTRQRLMRPNPEEAVERQAFPHLRIIDDHLWQQVQERLASNQGVRPERKRRPKHVLSGLGFCGVCGAAWVKASGDFWRCSNYRYRLGCSNNHMTNTRLYERGVLADLKAGLLSPDAITEYVREYHRDFARQSAELGRDRAKIERKLQEAERKMERMLKAFSEGGSEFAEIRTMLAAARDEKERLTRELASLDAMPNVLSLHPHIEQAYRNQVEELEKALAEPEAELEAVPRLRAMIARVIVHPDTERKRGVKVEVVRQMDEILSMAKGQQAQLR

SEQ ID NO: 468 - protein, 537 aa, synthetic construct
MISCAIYARFSSDRQNERSVDDQVHLCSERAKAEGWAVDQVFPDFAISGATRDRPQLNALLASADRFDVVICESIDRLSRDQEDIAAIFKALRFAGVRLVTLADGDVSEIHIGLKGTMAALFLKDLGDKVRRGQIGNARAGRIPGGRSYGYRPVYKLDSRGRPEGGWSEIDEEQAAIVRRIFAEYLAGRSPLAIARDLNRERIPSPRGGQWNASTIMGHRQRGNGILHNSLYRGTIVYNRQRFEKHPDTRRRVSKPNPRDQWIETQVEELRIVDEVTWKAVEARLALVPLRQAAQHRRPKRLLSGLVECGVCGGTITVLGNERWGCSTAKSKGTCSNRATISTRLLEGRVIEALKTRALTPEWVEEFLDEWRLLNEVERRRQQTLRATADRRAAKVQGRIERLTRAIADGLGDYTEVKAQLMAAHEERAAITAEIADIAAVDQIPLHPAIAHEYRRWIENMQANLASGEYDTEAFRISLRPHIGKVIMTPGTNGRAQLELHGVLAAMLNSLGMQAETSDRTLSVVAGAGFEPATFRL

SEQ ID NO: 469 - protein, 523 aa, synthetic construct
MVQHMEFTYENFKIKYVAIYLRKSRGESEKDLDNHKNALIEICERNGWEYDIFEEIVSGESLELRPKAQELLYYLENEPDSYDAILVMDIDRLSRAGTSESDLVKKLLIDSETLLVIKDRIMDLSNEQDDITYDIQSFVAKLEYKMIKKRLRQGKFQNAKKGYWSNGIPPIPYLYNKEARMLSIDETLLRTYRYIIDSVVIDRKSTNQIAYELNQKGWLTAGKKGKRYWTSKTVRDTLLDKTHLQYSEETDRGCIVIGKSKGNGHKKRSSIALKFKRIPQDKWLTFKGLHKSLKTQEEHTIIEVFLKRKTKAPRKTTAKTIFPLTGLIKCGCCGHYLGFTERSDRKGLLSVKNCWYKDPFGNKCHNRSSPMLVLIDKIHELIEKHIADVQYEIDTIDNDRITAIEDEIKTSKRLVEVKDTAIDRVDEAYEAGAYSVDELKMRKGKLKSEKGKILEDIKALEVELNYLRERGKTERVDALKEFKELIAHPDLTWEEQNELYKTLIEYVVYTKVDEKIKIQVVYR

SEQ ID NO: 470 - protein, 510 aa, synthetic construct
MTTETKRAALYLRLSDDKKKTGENVADQERGGRELAKSRGLTVVAVYSDNSRPASDPEHQPRPEFERLMADAETGLFDAVICRHADRLYRHPIDQLRVSSTFGPRKITIHQEWSGYPLDLSTPTGVLNAGIAAQVALYEIQHKKERQRATNDALLKAGKPQPGGPRPFGFNRDMTPNLAEATEVGLATQAVLSGVSLGAIIRDWNERGITATRGGKWGYSSMRTLLLRWSNAGIRQRTITDPVTRKKTVVEHGAGTWEGFISEADFRALKAKLEDPARIRHRGETGRKHLLSHILKCGKCQSPLRASHTTTRAGLHYMMYQCSGSGCRLGIDYDTAERVVIRAVASRLAMPSPSMLALTADERKKAGDAHTRLTQITEDEQLIEESKISAASKIRQLESLQTEREHLENIVSGIGQRMALAAMMQDQIPVISKGKASLSKASEAMAEALDRFEGLDLDRKRELIRSLFSVSVEPSLKGVRPTKETAAKRLVLTRLDPATGQPEQEESEAA

SEQ ID NO: 471 - protein, 581 aa, synthetic construct
MTPLTKRTPGWRPNLDHVRAVSYIRQSKRREDDSQGSPLAQRDRCSSLIASKGWDDAGHFEDVGKSGWDPRVHRPGFEEMMAAVRAGHVDAVVVFSLSRLTRRGALEAMKIIDELERYGVRLVSVEEPYLDTSTPVGVGILAIIAGLAQQESDLKSAYITSTKDTLRRAGSHVSGVAPFGFRSERETRDKLTVTRLVPDPLEAPVVRDMSAWVSDGLTASAVAKRLNEAGVPTKTTGLGEAGVKRIAARRGRAGSSEAAERPGWTSSTVLRILRDPRLAGYAMEWQGRKERTTDVDGKVVPGTAGKRVILRDDEGRPVESHEAIIPDDEWWKLQDVLDGRTRTVVRSGRRVPTLLAGHGLLFCDVCGSVMVSDKRSGKLYYKCNRAGGVVPGHGGLVISMVDADDEVARRVWARLTAMDPSDEDDREWLAEAARRFAHQRDTSQREADRAATRAELEHVRDALRTIYQDRQEGLYAGEVGSKMFRESVERLTAHEGRTAERLAELDGAAGAAIEIPAEWTSLSGDPIGEGTPWSDWGLEECREFLGLFIDSVRIAKAVGRGRNANTRDRVVIRWAEKPQQE

SEQ ID NO: 472 - protein, 461 aa, synthetic construct
MDAVIYARISRDAEGTSLGVNRQLEDCRQAASARGWTVVHEYVENDTSATRAKVRPQYQQMLRDLANGIAGALIVWDVDRLTRTPRELEDVIDLADAHSIALVSIGGEIDLATPQGRMTARIKGSVARHETDQMARRIRRKQRERAEQGLPNGLCPFGWRRVYDDQGRRAGSRDVAYAPEAEQIRDGVSRLLAGESVRSIAMRWNTEGLPTQRGNGWRTGTVRQTLRRAANAGLREHKGEIFPSDVIEPLITEDELHRVRALLADPGRRVQHGTTPAYLLTGIAECGRCGGKMRYLKPRGRHNIPSYGCRDCTRVARSMGLVDAVVEGAILGRLQRPDVLETLPTMDPKRGDDLRSQAEALEAKLSEAADLFTAGTITGEQLSRITAGVRPQLERTRAQLADLTPASAAAAIAGDDAVARWEDATLLVKREIVDTLMTVTILPAGPGRGRDPESVKIEWKA

SEQ ID NO: 473 - protein, 613 aa, synthetic construct
MTRVALYARYSSDSQRDASIEDQLRLCREQVAREGWSVAGTYEDAAISGASTVLRPGIQQLVRDAQRGRFEVVLAEALDRISRDQADVATLFKHLKFAGVAIVTLAEGEVSELHVGLKGTMNALFLKDLALKTHRGLRGRVEKGKAGGGLCYGYRVVKKLDAEGEPVRGDREIVPEEATIVRRIFREFAAGKSPKAIAVDLNKEDVPGPLGRHWGDTSVRGHIIRGTGVINNELYTGVLVWNRLHFVKDPATGKRVSRANPLVKWIRTEVPHLRIVEDELWQAVKERQKSIAGQFEAVAIATRKARARKLHTMRRPVSLLSGLLTCGCCGGRYGLFTRDRYACLNHQRRGICDNGRTIAREKIEQRVLAGLKERLVSADAVGEAIRAYAQETNRLNQERRAQGEQDRKALDKIERAIAGIMTAIEDGLYQPSMKARMEDLERQKAEITARLAMAPTDVPDLHPNIATLYKKRIEQLTQALADHEDGRSAAEALRSLIGEIVLTPGDRRGEVHAELRGELFGILELAKPDQNQTSGDVMTKGVAGPRNQHSTARLKRAVLLFADAGRRFEPVISGPQAGKAKAAGQKTQSLPQNQHKTARIKRAVRVFGSSEAR

SEQ ID NO: 474 - protein, 519 aa, synthetic construct
MKKAIRYLRFSSIGQSHGSIETQEMYTKNWCDRNNVQILDTFVDAGYTARTFDRPDMNKLLTFIKNYYMLVDYLVVSEFDRFSRDAGEALSLIKKLQLNYSVQIVSVQEGITFDYRDNGSFFRAGLSVLLGEEDNIRRINKINSGIYNAKAKEGRYIHGHPPYGYRKEGEGKNRHLVINETEAEIVRYVYESFLSGVPIYFIEDRIKEMGCKHTANSFVTKMLMNPVYSGRQYVKPWRDLQGGIFPSNHEAIIDVFTWNLVQEKLNNKERSKVSIIDELPLRGVLHCHCGKFLTGAPSRGKSGKYFYYYKCNESKHNNISANKAHTQLEEILKYLSLPEKIVKAVKEQSEKMLEASLASNKNKLTEQKKALTATEKKIASLEEKWINNQVNFETYERWHNSLINERISIQSQIDRLNGDLNESLKNLNKNIELCTDLNYVYQSATLPNKQKLINMVFDSKLYYQDKCYRTPSIMRLFAHNSLILKQKQLLEITNMGNFSSEIALSGPEESRTPVQTYLP

SEQ ID NO: 475 - protein, 606 aa, synthetic construct
MPRRRIEGIPIARADDLWRKVGEPGPGAHYRGYLRFSHEAGHYGLTIESQRKHILSFAEAREWICDGWDTEPATTAKYEEIERRPAFRRHLEALERHESAISLCYMADRWARNKIVAYSSLSRLRRAGIWWATSDGRWTIDRTEEDGWDVAFAVEVSLNAGYSRRLSEKFRDAKNTRAHLGFHNGDLMFGYLRPPDPPRPAGAPFTWKPPRQAPIRHPEDFARLMQIGEWAAGGLTDRQIADRCNVNGWRMDAQKVAGPRLHYTGDDEDGQPQLAHDHIHGPRPFSKDTVRAMLIRAFPREYAPGSGRGTVIAPDGARIEGRHPAAWSWDLWHRIDEQRALRGRGGSRGQVAPAIGDAREQDAPPAHRPYRVWPFSGIIVCADCGCRLRAQAEKRGLRPGYRDTARMRGLECTNGGSRAIRAELLDEQFAALLTRPLPQNWREQIAKLATSLDQSVNWDSVEDRRRALQAERERLKTQHRYGLVTDEELLREAERIRQALEALPLPETQQTEAAGLVKAGETIASLQGYWEQAAPDERAELVRLLLLPEGLRYDLLRKEIVGLRARPLFAPVMALALKEWHVQNDGWLIKCDQPATHDSERREITL

SEQ ID NO: 476 - protein, 538 aa, synthetic construct
MNKNIKYFLYCRKSSESDERQVQSLDDQIRIMTAKAKLLWIEIVDQFVESMSAKEPGRYKFDEMIQRIQKKEANGIITWQYDRLSRNPIDSGTIQFMLQRWSLEKIITNDREYTKEESGLLMSVESGMANQYILNLIKNVKRGLDSKCQKGIRPNLVPIGYLNDVAHRSIISDPNRFDIVRRMWDLMLTGTYSIRKVIDKANEEWWLRTVQKRKSWWWPLSRSSGERIFRNIFYAGYFEHRWELIKGIHEPMITMEEFNRVQMLLWKKNGKPRPKTRHFSYTWMITCWYCWCMVTAETKNKYIKSTAETKEYTYYHCTKKKREAKCTQKCISIENLEDQIVKVLESIEIDMEFQQWVYEAIKENFNSEFETRQKIYESILSSIETEKNRRKKLTDMYLDELISKEEFEKKKSDILRTIAVLEEKRDTTDMTGNRNMELTEKVFELALGVTESFNSWSIQRKKDVFHALGKNFVLQDWLLSIELEPWFKVIQKEYPKLEREFRGVEPTKKDTSTELHDVSESKMFKWWTDRGSNPGPTD

SEQ ID NO: 477 - protein, 437 aa, synthetic construct
MTKRTVTKVNALPKLASKKRVAAYARVSSGKDAMLHSLSAQVNHYKKIIQENAEWLFIGVYADEALTGTKDSRTEFQQLLKDCRAGKIDMIITKSISRFARNTVTLLKTVRDLNAINVDVFFEEQNIHSISGEGEMILTFLATFAQEESRSVSENMKWRIKKDFEQGIMWGGKPCLGYDLENKRLILVPEEAKIVQLIYQLYIDGNGDEQICKILTSMGVIPKTGIRWHWSTIRYILSNYNYTGDLILQKTYRENHLTKKKITNNGEFDKYLIKDDHDPIITKELFSKAQRIRKKRLSKIKASPVKKRYEFSGMLKCGICGRGYSHKNTASSEIWKCSYSIKKGIEACDSKQVPNDKLIEATNHILDRNQFDKQIMKSKVSMIVVKPDKKLEFHMKDKTIREYHWKERSRSEIWTPEKREQARIRALKQLKGGVNNG

SEQ ID NO: 478 - protein, 517 aa, synthetic construct
MRAVIYARYSSSLQREESIEAQLRACTDFIAKQNNWVLTGTYIDRAFSARSDQRPEFQNMINDAKRQKFDTIVIHKLDRFSRDRYDHAFYKRELRQAGVSLVSVLEHLDNSPESVVLESVLEGFSEYYSKNLGREVMKGLRETALSCRHTGGVPPLGYDVGPDGKYIINEKEANAIRYVFTAYINSVGYTEIADWLKINNINGKRGKIIAKNSLHDILSNEKYTGTYIYNRSAAKDAFGKRNGHENKKDEQIIRIEGGMPQIISHEIFEKAMMKMQNNKSGKNRAKEPYLLSGLLFCGKCEGAYVGSSRGNPRTATETPKKYYECSTKKRTKECDADSVNRDEIENIVLNYLESLMTKDTITDITEWISENAKIYIKSAAEEEKQIKKELASITKDANKLLDKILDGFDSPLARQRLEDAEAKKLQLEVRLTDIQIRAASTPEISKEGIKNYLSQLKGIKSKDRQTQSNIIHQFIERVYIYPGAPGGPSKEVKIKTKLDSLLTREDRNGHAPSPPYR

SEQ ID NO: 479 - protein, 539 aa, synthetic construct
MNQARVQVVPVHQPTVSVISNVDLHTSMGQLKPQKPRVASYCRVSSEEELQLGSLENQIIHYTNYIRSKPEWIYAGVYSDKGKSGTDMSKRTGFNRMIRKAMNGEIDIIICKSISRFARNVVDTLDTVRQLTEKGVHVIFEKERLNTKDITSSLLIKILATFAEEESRSTSENIEWALRKRFERGEVVASQIFGYKTKKNKEWEIVEREAAVVREAYAMFLSGYNLTDIAQHFIRRGYKKRSGEIDWTSSNISSFLTNERYCGDALSRKTCTLDFRSHKTVVNSGHKPQYYVEDHHEGIVSKEDFLKVQEIMNENKTTSSNTGTYKRSAITSRIVCSSCGKNYHRFGQKGKITRWRCSSNAKSGLLCKAQPIEETKIEELLIEGFEKRYGMVQRTNDGLLIKQLIRELSSAETVREREQNLLRVELEKCLITENNAILKNLDVEEIKAKRIEVEETIAEKTKLWEAFDKDHVFREASLNKLKTLKGSDKAIYKILDISFIRAWVIHITVESPFLFTIKWIDGEETVVGQFRGGMYYDSK

SEQ ID NO: 480 - protein, 530 aa, synthetic construct
MPAPKTTKGRWATRPRRSRATPEEPARPARRQAVLYARVSTKDQEREGYSIPAQKELLVAYAADKGFDVVHEFVDVETAKRAGRTAFSEMVTFLKKTRTCKVVLVEKTDRLYRNLKDWVRLDDMDLEIHLAKEGVVLSDGSRSTDKFMHGIRVLMAKNYIDNLSEEVRKGMRQKAQEGHWPNPAPIGYLNRREAGKSTLVRDPERAPLIAGVFERCAAGQSIDDIVAWVRQAGMKGKHGGVVTKSTIHSVLRNPLYAGQFWWDGVLYDGKDPTLISVTLFDRAQARLDGHHDTRVNTHEFAFSGLIRCAHCGLAVVAEIQKKKYIYYHCSRNCQKEPFVREEKLVDMFGSVLRALHLGDKGMELAREVLLDSRKSIKADAEARQQAARLRYDRLTHLIDKAYEDKLEGRVDEEFFQRRREEWDRERTALVETMQRLNKADRENLDLAVQVLEIGNRAYELYNEASVTEKRQLLDLLCSNCEMGNGRLMINLRDPWNKQRSLAEAMRNEETPLTEIKGVRSEWWAILDLNQ

SEQ ID NO: 481 - protein, 648 aa, synthetic construct
MEKRKLKVAVYIRVSTEDQENRSTYENQMNVIERYIENRNESLELAGEEYVYKDLWISGASPIEERPALSQLKNDLQYYSEIGEKPFDLVIVYRLDRVARSLSILLQTLELLNNYGVGYISTQEAIDTSTSFWRAMVWIIWTFAELERALINERTQEGIKRSQQKGIWTKKKYGYDIVKGRPVINKKEASVVKHIFHLFAYKKYSISQIIQQLESDKIQRPGTSRLGKNIFLWEDNTIRKYLADEAYIGKYYYKKTQNTKKGNKHKTEYRDKSDRILSDIPHDPIIDEETFWKVQERLQEMRIGSSRGQKHNEEGEIKYILSEFLRCDHCKKYRHWQHMCHFKGTASWKTKQYYVCNGKDTKKNKETYICPVVPIAKDDLELLVLHHIKNIFYMPNKIATFLANSNKNEIARNFLQDNISKLRKKIDEKYIQEKKNKIRDLYLEWDIEKIDYQNKKKEIENQVVIDKQKLEEYLSLQKEDHRVKTYEKTIKILQELWNIKKLLEDRNLLARLLKLLVKEIIVYSREITNDDVVAWRKKTWGIKQYIPYHIEIIFHLPSDIIEWFISERLNPTPTTSENTIKMRNWKFYHWDSEVNLSKELEKLNNSTSSSPMNKPHIIPNNSLQLDHNSHITSYLNDCPSLIKTKEKV

SEQ ID NO: 482 - protein, 563 aa, synthetic construct
MSKQISKIYHAAIYVRLSKEDGDVSTSAKAESNSISNQKDFIRNFLADKKDIRIVKEYVDDGYSGSNFDRPSFQTMMEDIKRGVIDCVVVKDLSRFGREYIDSGRYIERLFPALGVRFIAINDNYDSVTGKSQGDEIIIPFKNLINDAYCRDISIKIRSHLDVKRKNGEYIGAFVPYGYEKSDDDKHKLVIDIYAAGIVKEIFRLKLHGMSQDAIATQLNNEGVLAPMEYKQSTGSGYQTGFLQNEKSVWSSVTVRRILENEIYIGNLVQGKRTTPNHKVKQEVVKPESDWIRIEKNHEPIISDRDFEIVQRLLGMDTRISPDSDMVYNLSGIAVCADCGSPMTRKITTAGDKKYAYYICSNHKLTKQCSQHSISVSLLEDTVLEMLKLHIKNVMNLEEILDYIGTIPFQQLDVKSLEARKQKKLEEVEKCKRLKTSLYEDMKDGILTKEEYLELHEAYLKKAKEGEEIIRQIERDIALILEEKDDKHLWMNYFTEYKDIKELTRDVVVKLICEVRVSENKEVEIVFDFDDCYKQLLESVEKLGYQVDKEPGGQLNISRREAV

SEQ ID NO: 483 - protein, 530 aa, synthetic construct
MKMITKLEAKQPDNSLRKIRVAAYARVSTDSDEQLLSLEVQKEHYENYIKSNPCWEYAGLYFDEGISGTKIDKRESLKQLLKDCESGQIDRIITKSISRLARNTVDCLEIVRKLTGLGIYLYFEKENIDTEHMSSELMLSILSSIAQSESRSISENSMWSIQKRFENGTYVISSPSYGYKNENGKMIIVPKEAEVIKDIFSMALLGKGGHVIANELTAKKIPAKKGAKWSSTTVNAILNNKTYTGDVIFQKTFTDDNFNRHKNRGEKKQYVIENHHEAIISHETFNLVHELRQKRKLKLNITGGSNKYLARYVFSGKLYCGNCHSRLKKHDRHKKDGAYVVWCCTKHIREIKCCPMKAVKEEYVKLAFLQMLNKLKATYAQILTPFIKSLRNVNNKDGLNKVIGLEEKIAKLQEQEQVLSKLFAGGYIEMDSYYLESNQLKTEIDTCLKEKRQLSNSLNGNLTHLNEAQKLQRFVSVTEVFSEFKDEDFLDFVDNVVVKSRTEFIFHLKCGLELEEEVKETWHTSHMVTE

SEQ ID NO: 484 - protein, 532 aa, synthetic construct
MKELEEKLKDNKIYNTALYCRLSLDDGSVGESGSIQTQKIILEEYAKMHGFKIYDVYVDDGYSGLNFNRPGFQRMIQDIQGGKINLVITKDLSRLGRNYIETGYYTEHYFKDVGVRYIAINDGIDTINDNNDIAPFKNILNDMYAKDLSRKVKAAKRSRNQKGLYTAAQVPYGYKKDPENNNHLIVDEEIRPIIKLIYRLALEGHGCPKIASILTEKGIYTPGYYKRLKGDIRFARFKNKGWTYVTVRKILGDVVYLGHIESNKYEVINYKTKKCVPVPKERHLIVKNTHEAIISQSDFDAVQSMIASRTHPWVHNHENLFKGIIYCAHCGNRMALVYQKRKYGTVSHTYKCTTYMRNKDYCPRPNTLLHRQIKSIVEQELRDLTKNINREDFLTMLIERKKKESSNIDIESKISKLEARKDKLYQLTKKVYDDALNEIIDSETSSKMIKEYQEEQKKITSEIETLKNLKQEEESTIENYKLLKEKVNEFLEFKELNSLIVHSLISRIEVGYRDNPRTIKIYYKFIDDSISN

SEQ ID NO: 485 - protein, 433 aa, synthetic construct
MKKIIGYVRESTQLQVINGYNLGEQKRKIELYCEYKYEKDSYTLEVKEERGVSAKNLKRPQMNSIIQLIKSKELDTLIIHNLDRLTRSVKDLAYLIEILEKNHIELISITENIDTSTPSGRMFIMIIGVISQWEEDSISWRTKRGLEEAARRGFYCKGKVPLGYERNPDDKHYLIINDETAGVIKNIFDCIVNKGMNVWNVTSEYRRNKVLNRKWQKNDIYKIVRNLVYSGTLVFGGNNYDDVIPPIVDKETQLEAIRLTNLKSRNRRYKYLFKGVVTCKICKRTLVCDCSSRKKNHTKQRELYKYYVCSECKKRISEEIIRDSVKGQLKKYLIGKQIKLEQKKSCSKLKEIDEEMNIVLDMVISNGRDEVLLTRYNELAEKRRKISEMEYRCLDENLDEEELITYVRKYIQQIIVDFEEMSVNTIFRGSKGK

SEQ ID NO: 486 - protein, 663 aa, synthetic construct
MPDALAPDPFTAMAAQLTPKRAVSYIRVSTREQAQRGGSEEGFSLPAQREANKRKAQSMGALVVKEFADRGESARSANRPELQKMLAYLKEDGGIDYVIVHKLDRLARNRADDVEINRAFEEAGVRLVSTSENIDQTPGGMLLHGIMSSIAEFYSRNLANEVIKGMGEKARNGGTLGKAPLGYLNVRARDENGREIRTIALDEERAPLIRLAFTEYATGQWTTKRLAAHLHDRGLTTVPTARKPAKAVTGAQLHRMLRHPYYKGVISFQGVEYVGAHEPLVDEETWSQVQAVLDFHRFGERERQHNHHLKTTVYCGLCGARLLVQNTRNSKGDLYPYFICARRQRTHDCSFRAVLIDVVEERMSDLYRTIQLGSQDRQLVEQYVREELRHLERDKDRTVRSLTTRRTNIEDKRRRLMHAHYEGAVPLELLKEEQTQLTAELDHIARQLTAYQADISEVRQRLAQALDLLEDCHRLYQAAPAHLKKLLNQVFFKRVLVNPAVDEDGRVILPEDGTNDGRGRNAADAAAGDCPIGESDGPLQRATAPRLLADASSDASLAANLRLPFACLTSRLMHKVARQHRATLLHDNTRENRDAQVDCPVINTVCNDEALTSGGERFASSTNNPDRVTHDLGLGKAIVVPPLGFEPRTLCLSGTTRGISSLL

SEQ ID NO: 487 - protein, 554 aa, synthetic construct
MAYRKITDIRDTIGMRAVFYARVSTAEEEQLNAIELQIEENRGCIKDHGWKLVGEYIDRSKSGTMVKGRDDYQRLYEDLYEDLFDIVVIKDQERLQRNTLDWYLFINRVVQTGKLLFMYMDGKFYSPDDALITGVRAIIAEEFSRNLSKKLHNYHDHRIEKARQGQEIALQGSGNVYGWDKKDGKYYINPEQAKVRRLMCEGIMARKGSTLIAKELNDAGYRNTVGKPWKPMDIPKFVYDCKNVGTMIINKERHDFESKQTIKLPKEEWVYVENALPPIVTQEEWDLICKIHEERVIATGSDRRGKKTSGYSFSGKLVCGICGAPYWRKQRVSKDEYWVCSTKQTKGRRTRKRDSTMGKAGEINPLGCDNENISYNSLMEIMGVVSERLQANTDTIKHDMINWLTKLRKQLLEANGGHTEADLQRELSRKSKLLDAYLDGILNKQEYQKKAEELDERIIQLKAETEKNKANSGDIAEIDKVLANIDEEVSRYVDGNEKLKVEYLLEHLEQVQIFPDKVIVIVPILSEGIVVEKTQYVSREKRRREKYNVWYADG

SEQ ID NO: 488 - protein, 540 aa, synthetic construct
MKKIRTIEAMVLGCDVNGRRVERLKVCAYCRVSTDQIEQQQSFSAQAEHYTDYIKNNPAWEFAGIYADQGISGKNKAKRPEFMRMVKDAENKKLDLIITKSISRFARNVTDCLETVRKLKSIGVGIYFEKENINTLHAESELMLSILSSIAEEELVSISQNMRWSNQNRFKQGKIMVNTKRFMGYDKDPKGKLLIDEKQAAIVRRIFADYISGSGLSLIAKGLEKDEIQNISGNERWSVSAISCILKNEKYIGDAILQKTVTADAYNRKKNKGDAPMYYVKDSHPAIISREDFEKVEKLMVDRAKSKGNVEGSREKYLNRYALTSTILCNRCGSKFKRHLNNCGNVAEIACWVCNTYINEGRSNCDMGRVKEETIKALFVRVFNRLYTERVRLLGDYRVRLEREKFSRFDLGRMTKLDEEIECLIKQERVLFAIKEKGYADLGLFTTEHEELVSSLTKLQVEREELVGISTKQDSRIARTLELNAIIEAQGCIISEFKDDLYTAIVEKIVIMERTRLVFHLKNGLAFEERYSLKRGRDQL

SEQ ID NO: 489 - protein, 539 aa, synthetic construct
MRAVIYARVSSGIQADLGTSIPSQIKICEEYAEKNNFEIAKIYTDEGESARSDKRGAFQEMIGDAKKSPPTFETILIYNQSRFSRNVLDVLTYKNLLKNHGINVVSVTEPFDEESPQGKLINGIISVINEFYSSNLANETIRGEKENAIQGFWNGGVPPIGYKIKKVKRGNAEKSTFEIDEAYEGVVKQIFSLFLAGNGFKRIAITLNEMGLRTPKGNLWNPSTIRSILINDAYAGTLVWNKYDKKTKNKKYKDKDKWVVVNDAFPRIIGPEIFKKVADIFNKNKMYNPKSIGKTHVLSGLIKCGQCDSNYIFFRAMKVKSGGFHYIGYYRCGLKNNLGKNACDNISLRADDIEKAVLMAVEEKIFTKNNLEKIALMLNKDRNKNLRESEREKKLLEDSIKDTEKRIANLLKSIEKGIDESTLITRINELKINKDSLSARLSQIENEEETPLEFMEEDIENVVKIIKEKLRDSDPPNINSFLKIFIDKIAVFKDRTEIYYNFPQVDSSKVAFCNTTSPRHQLFLFELVFESLIEQAYYM

SEQ ID NO: 490 - protein, 490 aa, synthetic construct
MKIAHLYVRVSTDEQKKKGYSLPEQEDRLLKYCVYNNIKVLGVYREDYSAKDFNRPEWKKLLAIVKQKPREDKNILFIKWDRFSRNIEYAYEMIGLLRKYNTIPIAIDQPIDLSVPESTVMLAVYLSVPEAENSRRAMNTANGIRRAKQMGRFPGKAPLGFLNNTGIDGRKIIVPKQPEADIIKWIFGQLAKNINKIDHIRKMADAKGLKCSRSHFFRIIRNPVYCGLISIKISSKEQQIVKGIHEPLISEVLFNEVQRIITRKRIVTSKTNELNETFYLKSFLLCPICYKRLCGSFSKGKTKRYPYYHCNAKCKTRVNALTLNDAYCSELQSLQLSKNVTELFSSILEDCNINIQQAEDIQERNMLVRRLRDQGLLLSQARKLFVASVLGNDDYYAIKMEYQINSQSIKGELSNVNTKLENYKKHRELMSVSFIDVFQVFKHLETADKMHLVSLIPHNRFDLQKRSVSLHLDSALSKILLPKISQIQQP

SEQ ID NO: 491 - protein, 615 aa, synthetic construct
MKKCFMYYRVSSDKQLGGTGIERQEENLRAYVKRLNLCSQMDVPLPIELSDPGVSAFKGLNMSEGNLGKWMKEVATGIHDGSLLVLESIDRFSRQNPFTVMKYLSTLDEHDISIHDVSLGLVINRSNSSMLPIVAMSAQRAYEESKYKSTRISDGWQRKRITAFEKGTVVTNKRPLWIDVVDDYYVLNEKAEIVREIFRLYQTGIGCPTIAKILQAKGDEWRLASPKNRGGWRAESVYKVLTNKRVTGVIFITQIVRDFDKYDTDAVQKKYERNVYPEVISMEEFELVQKMLESRNPKNNQKTIGRVSQKNDDGAPLIKSNIFTSVFRCGRCHEGMYHNVVTRERFAKRVGEIVTSEYRYIRCIAERDKLCDNKSLRYEVLEQFIIEYIKNLNFTQIIKSGELKPEIELLQMKIKEEQEHISDYEQGIEKLKSKGKKVPFDALVELEESQTNLKAMQERLNGIKDVSIDTEVLTEIDIATVFDVENIELRSRIEYEISKVIDRIELVTESNHYICTLHYKDVDVLKHVLIIQSGKKPKLASSVSISREVDETHYKTPSFELIVKDNEFTLTVLQNVIVFTDYALLLNYVDTLPGSKVLGVWMREHFNEVLANSVL

SEQ ID NO: 492 - protein, 491 aa, synthetic construct
MTKTKNGKTAAGYLRVSQARDGMLADSIYRQEIEGYASAYGYRLAEVFADLDFSGRKGSKARPAFTTMLERRDEFDLIIVPKLSRFGRSMKDNLAAYDVLEGSGVGIAFLDLRMDTTTSGGKLMRNVLTALAEYESDLISERWKDTHRYLAKNGRHLGGVTVPFGYQYVDKQLSPHPSQAPEARLIFERFAAGWGLRAIARDLNERGVTCQRGSKVWNQSRIARILDNPTFAGYRHYGDELTEGQWEPLIDRKLWERVKLTRMATKASRPALNRKGKGGSLLSELLTCTCGAPMWRSTASNPARSTYECSKSARKREGGECRAGGVAAGRVENIVTEAFMERIAAPFAAHVRKAPERAFGAATPREDSTARLARIDRKLETLVRLTLESPGPATDATFRRQAEALEAERAEVAAQAARDEVASRATRARADSLDELRARAADIRAVWTAATVSERNEMLRTAINSVTVLPDRARLKEFMIDWVAALEVNAA

SEQ ID NO: 493 - protein, 574 aa, synthetic construct
MRKVSKLEAKLPQLPQRKKVAAYARVSEEKGRTLHSMSAQISFYSTFIQKNPEWIYAGVYADEGITGTNDNRAEFRRMLEDCKKGKIDIILTKSISRFARNTVDLLETVRHLKELGIEVRFEKEGINSMSEDGELMLTLLASFAQEESRSTSENVKWAIRKGFEQGKTNSFNIYGYRWDGEQFNIVPEEAEVIRLIYDNYLKGFSAEQTEKQLDKMGIKSYTGGRFSNTSIRAILRQERYTGNILLQKTYVENHISHKTKINKGELPMYYAENTHPAIIDQDTFDKVQVEVARRRELGVFANKSINTTCFTSKIKCGNCGVSYRRSGKRQSKGSSDVYYVWTCQTKDRKGASECNAKIVPEKMLQKVCAEVLNLDEFDEDVFSNEVEKIIVKGVDELIFRFYDGQIVHQKWKSTARNDCWSEERRKEWGERKKGIAARAYTQNCFTGKIRCPKCGANFRRAVSNYANGEKCHHWRCGSGWKVCDAVSVPEEVINTLSSEVLGIAEFDESLFSERIEYLNIISDTEITFHLIDGTVVTKPWVKKRRTAKFTEERKRKQSEKMKEVWRKKHEQQNS

SEQ ID NO: 494 - protein, 600 aa, synthetic construct
MKKKKLKCYIYIRVSTSMQVEGYSLEAQRERLTKFADFQDIEIVREYCDAGKSGKNITGRPEFSQMLNDVAEDRDGVNFILVFKLSRFGRNAADVLNSLQYIQDFGVNLICVEDGIDSSKDSGKLTITVLSAVAEIERENILVQTMEGRRQKAREGKWNGGQAPFGYTLDSKNSTLIVNPEEAEIVRIIFNKFVNEGLGAEHICDYLNQHGYTKKKLKKNELNYFARSFIMKILDNPVYTGKIAYGRSVTEKVKGSRDEYKRVRADDYMLVDGMHEAIIDQEMWEATRLRRNDTGIKWEKTHSLDHEHILSGVIKCPICGTGLVGTLRRRKNKKSGEYKDDFYYKCLHRKKIDETHFCNFRLVLSQDEVNHQVEEIILDMVADPDFKDFMVRKIDEKVDVSSLEAEREQVREQLRQVMGAKKKLTEMLNRLDVNDKHYDRKYQDMHDRLDILYDRISELEDMISDIEVKISGAYGEKITANQLYKVLLNFDKMYFKMTDLEKKQFMRDFIEEIELYPERQDDRRILKQLSLGFPVFYEGSEGDTIRLHKQNTVETVYVLSKLNAKQHIEINLDMDELDLTDAEKKLPTKKSRIMCWSIAA

SEQ ID NO: 495 - protein, 493 aa, synthetic construct
MRCAIYIRVSTDKEEQKASLKYQKELFYKFIEEKGWDIYEFYVDVQSGTTAKRKNLQRMIEDAQVKKYDIILAKELSRLARNGELSYKIKNLCENQGIHIITLDNAINTLTGNTNMFGLYAWMYEQESQNTSNRVKETLKTRAKKGLFKGSNPPYGYEVVEGKLYIRKDEAPEIVRRIYKEYLEGSGRESIARRLYKEGVKTPADVAGKKNASDKWNDSTIKLILTNPHYVGDLVQGRTTTVSVTSKKRKKQQKDEMYIFENTHEPIISRDMFEAVQNLMKQRKKFITAPKLHLFTNILFCADCGKGMWYRSNRPNGYICGNYARHGKKACSSHTIKEDFLKETILYDIQKLVQEIDKEQYLKELEAKSKKSKKDIQQKLDKFNKQIEVLKTRKKKFINMLADEKINHDEYLEMVEDNNNELTQLAEKKNEMISMLESEQIIDNIDKLKQELLQFLNFDELTPEILHRLINRIDVKEDGTPVIHYRFAAPTFE

SEQ ID NO: 496 - protein, 467 aa, synthetic construct
MDKAVFIYTRVSTREQADEGYSLGEQEERLKKYSEAMGWKVTGIYTDPGYSGSNMERPALQQMLSDISKKHPDIVLVDKLDRLSRSQYDTLYLIKKVFAAAGVSFVSRAEAFDTSTAFGRAMLGILSTFAELERERIKERMMEGRQGRAKDGLYMGSQAPLGYDYSPEDGLTINENEAGIVRFIFEQAAQRRPFTCIAEDCANMYDIDFFWSLASITRILNSKLYIGQVLFCGKWTQGKHAPIISEETFEKAQEVLSERKENFSKFTGKKTKNLLSGLIYCEYCKTRFHKIQTGKYIYYVCYSRSRVKGSMIVNRDCSAKRLNLRKTDALVLEQIKRIRTDVAFYDSIKQAADGTDQALANLEKKMASINTRINRLISLYSLEQIDIEQVKAQIDPLSAQKKELQKKLDAAESKKNDYVKREDAVTLSQAVEEAYNSGNINEARALISQLIKYISVNADSISIHWRF

SEQ ID NO: 497 - protein, 514 aa, synthetic construct
MITKYVTKYDAIYARQSVDKKDSISIESQIEIGKREVAEGTPIKIYKDKGYSGKNIERPDFQKLLSDIEKGLIKRIIVYRLDRISRSLLDFANLIGIFEKHNVEFVSSSEKFDTSTPVGKAMLYIVMVFAQLERETIQLRITDNYYERAKLGLYMGGAAPYGFNTEPIRLNGVKSRLLVQNENMQHFIECFNKYANEDVSLNNIADILNSLGVKTAKGKNWHSDKLSKLFRNPAYVKADVDVYNYFKALGCKMDNDIEDYVGENGAFAYGKTDKGTSKWGNIGDYNIVIGPHNGVVDSETWLKVQYKLNQNKSFKRKGKSMYTWISGLTKCMNCGYSMCINRGSRMQEDGTYVLYLRCFDKTNNGTCTVGSVRLEYVEENVKEQLLKFITNIDTTLKKNEHHDTKVINDLKILISSKETEINNLLDGLANASGATMDYINKRINKLDEELNSLNKELSTMMISDNDIDTNRIVEVKKLINHWEDLELEDKKKIAKAFIKKIFVSKDKIEIVWNY

SEQ ID NO: 498 - protein, 519 aa, synthetic construct
MLSRYEGGHHDKKAIAYVRFSNASQQYGDSLRRQNALISEWLSQHPDYELDDTTYQDLGLSAYSGMNATRGALYDFLDAVEHGYIAAGTVLLVESLDRLSREKISDATERLRSILRSGVEVVTLCDHTHYCIDSLDDPYILIKAILIAQRANEESETKSRRMRAAWQKKREDAAATGKLITRSCPRWLTVSPDGEKFELIEEHARTINVIFRLRLKGSSLNGITKTLNERGVPTLTGEIGRWNPSTIESLLGNKALTGTFTPSYQTMAKGVSEISGYFPQVVPDKLFHDVQSVRLARFGNPGVSDNPYLINIFRSLMYCGTCGHSIILTSVDKKGRGYYACPMRRLKRCNEPAIRRDHVDAALVDVLLCSMDMLQANGTVVGTASRLESRLVELNMSINRLIAALQIAPDVPELAMKVRELSKELRAGELKLRALRSRGVAGSREWIAALNLADRRNRERCRDYAARHIDRLFLHSAEGRCDVHLLNGLKLINFPLKKKLPVSSFISSLAYLCGDTLIL

SEQ ID NO: 499 - protein, 544 aa, synthetic construct
MSTKPKAYAYSRISSRAQLKGDGLRRQLAAALEWSANHPDVDFDPTFRDEGVSAFRGDHRDTGKLGVLLGMIEAGTIRPNDYILIDEFSRLTREAETEALYLLTSITRRNVRVVTLVDGEEYHAKSEAIDLMRALFTMSNAHRENKERQRKVAVAWSEKKKRARETGEVLSKRGPAWTIYNPTTKRFDLDHDKAEVIRGIFAECLDGLGITAIAQRLNANKVEPFVKGSDGWHQGYVLTILRSPSVMGFYQPTLTSQRAHQRMLRQPDGDPIPNYYPAFIDEETFDKAQAMIAMRNKRGGGAGRKGKTFPNLIMGMGKCEECGGTLVVGNHPNSKRVRAFRCYQANRKQNCDNRQTYLCADVEERLTAFLMVARMEEAQPLPDQTDLTNKLAARHSIQMKIDNLNDTIENREPGEDVSSTRARLSLRQAEASKIDKEIEELRATLKHQTRMVGVDAIEEAAKWLDSLGDDETDDLYRKRAKANAMLLALYDTIMPIDGGLYVLSNGKGWLINDEVYVELDVSDKRPVTRKELEMTSTWAKVTMI

SEQ ID NO: 500 - protein, 528 aa, synthetic construct
MPYLIYLRKSRADMDAEARGEGETLARHEKTLIELAKKMNLNVTGIYKEIVSGETIAARPKMQQVIREVEEGLWEGVLVMEVERLARGDTKDQGTVAEAFKFSNTKIITPVKIYDPSNEFDEEYFEFGLFMSRREYKTINRRIQRGRIASVEEGKYIASSAPYGYERVRIKNDKGYTLKIVPSEADIVRLIYDLYTRGELQENGEFKRLGMYLISKRLDSLHIQPRNSTMWSRSTIKDILTNPTYTGKVRWRWRKVEKKIVNGELVEKRPKDYDNCMKIKALHDPIIDEDIFELAQAIMREKKNISISSNQVLQNPFTGLVYCGKCGALMTRAASNTKVNYPVMKCPNRYCDNISSPIFLIEEQLLVALQDWLDRYELPFRQKESPLVSALSLRVSAIKNTEARIETLKKQLLSTYDLLEQGIYTSEVFLERNRSLSDQITEATESLQELQEQYERELLQEQARTKFLPAVRHIIDVYDSMEDASAKNALLKNVIDRIVYVKNERNKKGDLHNINFELTVYPKIPLRP

SEQ ID NO: 501 - protein, 588 aa, synthetic construct
MKRAALLLRCSTDAQDYERQKLDLLDTIKGMGYTTSDDLVFGQYITGKDDVRKKDRESVAECKQAVREGKVDAIFINEVSRLSRDSIAGRLFIREFNDEYKIPVYFRDLGMWTINPTTRIVDRSFETMLGFYFDMAQNELKSMKTRFASGKRKNAREGKTIGGAVPFGFYKDEDGKLQVDEEQAQVVRLVYNKYLEDGGSIPSVCRYLLSCGYDKKFNKKFGTGSVRNLLRERRYIGEQRYNLVNPDEPDEAKKQEVYIYKVDAIIDTTIYNKVQIKLDKNRTTETKKVNKDKKIHLLAKLITCPICGDSYTSKTASANKSGERYRIWNYCCVSKYNFSECTSDITLNADNIESIIWQLTKREILALQELSLEERQSKIDEAEQKLASYKDELDVIAKSIDKLNVKKKKLVALFLDIEDDDTAIFNEQREAINKEIDSYNNRIQFLNTEITICEGNIARFKEADFTDEVLDKIEQDLLKKKELIKEYIKVIRPYRLTKARLILEVESKQTNYCILFEPRNSKRRCWYIQSSLAQWQNGLLKTSTAPLGNFFYIPMASLLLDEPDDLDAIASFEDMKEICRINNYVIEY

SEQ ID NO: 502 - protein, 522 aa, synthetic construct
MKTAYSYIRFSSKAQELGDSLRRQVEATAEYCKQHNLKLSDKSYRDLGISAFKERDRASLADMLSAVDNGKISSDSYIIIEAMDRLSRQGIDITLDILKAILRKDINIVILSDNLTLTKASLNDLTSIIKIAVAADLAHKESMRKSERVQEAKDKIRAKALKGEVINKRLPFWLTRDGDKYVLNGKKVVVETIIEHRKQGIGFSKIAQKLNDLGYKASTQDLWQDRSVAETIKSKALYGAYQQKKLSNGKYVDSDLVLDYYPALLTFKAFQSIQSKFVARPAGTTRHNHLAGLACCACCGSSLLKKTSNRETKTTKHVYQNWLCRNARVNACKNKGTAKDLDKIIIKAVKHLKVDKIPDNLIDKLQQEIEAKATKLAELTDYVNNSDDINVTILGMITSIEKEIASLKTELETKPQADQADLDQLKEYVNDPVNFNIQLKLLVRKIEVTFKSRDLFHVRLVQHNGHLINITAFRKTQRSEFKHFIGDTEKVTGLFESNSYEEFDPNAINDKIFEELYEYLLN

SEQ ID NO: 503 - protein, 510 aa, synthetic construct
MKKSSTQQQRKAVLFARVSTKDQEEQGHSLPAQTEKLRAYASKNGMTIIKEFVFQETGGSKKQRKKFNEMIDYLKRHDDGNVPILLTTNVDRITRNFKDAVEIDELRIHKGLHVHFIQDGFTISPQSTGNDMFMWEAKVFMGKQYLNRIREDAVRSREYKIKNGEWTHRAPVGYLHSKDQNGRSTVILDPDRAPLVRRLFVEYAKGGISVSELSRMATNWGLRNPTKAQGKISKSQAHRMIQNPFYYGVIIDGDDVITHQYPPLIDKATWDQCQRVREGYHKKPFAYAAKPFAFRGLVTCSHCGSAYTTEQKKGKYNYLFCTKNKDKNCPAVRVKETDLLDQVACVLDSISIPPDVLDVAKEHLAKTHDAKNEYHNAAVKNIEKALSSVDRQIQRLFDLYLKAEDSSSITTNELDKKMSELKQEQHDLRHQLSTHQSADDDFYVSLNLMLELVQNASDLFRAGNIEQKRKLLNLLCWNLQIKHGKLEIALRSPFDLFMNRTDRNEWQWLQ

SEQ ID NO: 504 - protein, 438 aa, synthetic construct
MERKINVRQPIKPDIPSFLRVAAYVRVSNLKDAMLQSLSNQVSYYNDFIQRHSGWQYAGVYVDEGLTGTKDLRPEFQRILSDCRAGKIDMVITKSTTRFARNTITMLETVRMLKEIGVDVFFEKENIHSMSGDGELMLTILASFAQEESRSVSENCKWRLREKMKQGEMVGLRGMYGYTIGKNSVSIHPEQAEAVRRIFHAYVSGQSSIEIARRLVSECTPSLLGGEWTAKRVREILKNEKYTGNALLQKTFISDYMTKRKVVNHGKLPQYFVTQGHEAIIDQETYDKVQSMLTASLKRNQPAKPVNARYPLTGKIVCGNCGKHLQRKTTKGRIAWICSTYLEHGKSACPAKQIPEETILQAAADALGQDRFDEHEFNRRIERIEVPEPNRLRFVFFNGNVSECEWKHRSRSESWTNEMKKNARERNDERRRDQTCQQ

SEQ ID NO: 505 - protein, 521 aa, synthetic construct
MKKVITIEPAKQVTHKVELPRFTKRRVAGYARVSTDHEDQTTSYEAQMTYYTDYINSRSDWEFVKMYSDEGISGTNTKKRLGFQEMVEDALDGKIDLILTKSVSRFARNTVDSLSTVRKLKEAGVEIYFEKENIWTFDSKGELLITIMSSLAQEESRSISENVTWGRRRQLAEGQVTFSYSQVLGFKKSDTGGFEIDHEEAKIVRYIFHQVLLGNNPNKIARELTAQGIPTPQGKRQWSYGTVKRMLRNEKYKGDALLQKSFTTDFLTKSTKLNEGELPQYYVENNHEAIIKREVFDLVQVELDKLERKRQTSNIFTGRLFCGDCGSAFGSKVWHSTSKYKRTIYQCNAKYKGEHKCQTPHVTEEEIKGWFLSAINQLLSNRDEIIANTELLIDMAKDTSSLEARLDDLEHHLETIRQDIEDLVDRNARKAQNQDLYQEQYNTLVTAYQEKQKELQETRSVLEEQKSKQLSLDGFIQNFKEQDDLITDFNQELWQTSVERLDIKEDKKIFLTFKNGLRIDL

SEQ ID NO: 506 - protein, 488 aa, synthetic construct
MRIAIYTRKSVYVENSESIETQINLCKTYFKGDNDYEIFEDEGYSGKNTNRPAFKRLILECKMNKFDALICYRLDRISRNVADFSSTLELLQKYNVTFISIKEQFDTSTPMGRAMIYIASVFAQLERETIAERVKDNMLQLAKKGCYTGGTVPKGCKIIKENKKSFLQIIDSDLIHLYFNSYLDNGSLFLGYKFLKEKGITISREGYRKVLRNPIYVKSSKEVTNYLKSKGYEVIGQVDNKSGYMTYGKINNTPIAIVGKHIGVLDSNIWLKVQMQLDERKEQFKNTSEVNFLSSVLKCPYCGGYYQLSQSNKVRYYVCQNRINRTKTGIDKSKEKCKNKKYIKADLLEEKISQFLKQLENKDIFKKLFSDPKEGRESNILILEKQLNKNNNVINGLVEKVALLSTEASKVFIEKIEELTQRNNEIKNKIEIEKLLEMQKKANDTSSEFIYNKIIEFNKLKSTKEKNRILKLIFTNLQYDPYKNKITI

SEQ ID NO: 507 - protein, 538 aa, synthetic construct
MARTKNRYRMEMMEELPLQTYRTGIYIRLSKERTESWRNKSHSLGTQESLARTFAKDKALTVTKCYIDYEYSGTTFNRPAYQDMMEDVKRGVINCILIRDLSRLGRNYIEMGRLIDKVFPFLGVRFISINDNLDTLNGLEDKKSFEVEIKNLVNDLYSKDISKKLTAYNIHQASQGYFIGSFPPYGYQLDKQEKGAKLVIDSIVQPVLKTVFEKLKEGQSIIDITKYLNEEGLAVPTAYRQTGQLTRLDSDTRKWKSANLLRLIKSPVYQGQLVQRKTSKSLSEKDYIRFEHAHEAYISSDDFERIQAKISERKSTRKSFEARTPNRYSGLIYAKTKSTQMIRKCRHFSNNKSDYDYYYFTDYVYDTRHSERQTVYISENALDKIILELLQTEIKRLGTVETLLPLLETKKEDCLKKCHRQITCHQRAIMQLQAELSDCYASFSLNRSEREGYLSQKKEIIAKIETISQEIAQCETSIKQIEMEYSKQVNWVKHLAKSQNQTVLTAELLNALIDRIEIEVDKTVTVTFTCQIGGGDYD

SEQ ID NO: 508 - protein, 471 aa, synthetic construct
MMQKVGIYIRVSKREQAEEGYSIPAQRRKLEAFCEVQEWKEFDFYIDEGLSAKDMNRPELKRLLTDVKEGKINILLVYRLDRLTRSVVDLYKILQELKDHDATFRSATEPYDTASSMGRMFIGLIALLAQWERENLSERVKFGKREKVLSGKVVSSHAPFGFRIEDETYKIDNRQSLQLLEMIDLYEKGASGNELSRMTKQRIDWHPMETADVLKAIANPALIGYGHHRGEPYPLKNAEKLITEERYEKILKLKEERSKKRNRKSKEPFIFRMKVKCPICGDAHLSGIPVSSTNEGTGRGPSYRCAKCKKNGRAFNVTEKKLENALIEYMQSVEHNKAKPTESKYKKDRVALKKEYDALAAKREKFTMSWAEGFTSKKEYKKLMDATKDRFEQLETILSTEEEKEIEKNKKSMAALVKAKFNDLWGLMTRKEKEEFCQTHIQSLYIHRGNRIVENGKSGFKITITDIDFYV

SEQ ID NO: 509 - protein, 480 aa, synthetic construct
MRIAAYIRVSTDEQADKGNSLQEQQERLTAYCKVMGWTSPTFYVDDGYSAKNLQRPAIQRLLDDVKANKIDVVLTSKLDRFCRNLLDLLQTVNLLEDHNCTFVSATESFDTSTAVGKMVLQLLGAFAEFERERISERVRDNMMSLKKNTGKAMTKPCFGYDVINGHYAINEKEAEYVRLMFDLAEQGNGYRMIAKILNEKGVTTKQGKMWDQVSVKRLLNNETLAGTMIYNKRKSKNNKTVLRDPSEWLVKENNHPAIIPLERFERVKAIMRSRSYANKHADSETYLFTGLLKCKHCGRNMKGSTSRHKTKYNEYTYYRYVCSSYVLGYGCKYHAAHRDDLEQVIIDQIKGLASGSIKELDYVVAASPTAEDEIKDLKARLARVDRRMQKQIEAYENDLISAQDLKAARERVENERNALTEQIKKLESQKGDIKALQQTAINMLPDITGADRGKAKAALRQLIHRIDIENSELASIIWKC

SEQ ID NO: 510 - protein, 486 aa, synthetic construct
MIRAAEYARYSTDNQTSNSIEYQFCKIREYCLNNDIEIVASFYDEAKSGTNLSREGFQQMLTAAHRKEFDAVVIYDVTRGSRDVADWFSFRKEMRALRISVISVENNLGDPLNPNDFLIELMNVGLGQHQVLTSRQKSIDGVAVKAREAVFLGGIAPLGYDIVEGKYVVNEMEADIVRKIFDLYASGKSYNQILDTLKNKKGKRGRPFGKNSIQSILSNDRYIGTYTWNKRICKQLRKWAGGVPNPKVIRLEGAIPAIIDDNTWCSCQRRLNTPASNARNTAKREYLLSGLIKCSSCGSSYVGHASTNQRGYENIYYVCSNRKRTRTCKSPNIPAKIIEPFVLENLKEFLSKLDIEFVVDYIYNTYKAMVPNLDKYQSELLDIQTKIKNGMDAILSGIDISELKETLLQLKDRKKELENIISSSNSRLILDKSRLTMFVKKQFSNWEYKNDTELVKSYITGIVIMPNGDIEVSVGVARTDNSEGGI

SEQ ID NO: 511 - protein, 447 aa, synthetic construct
MTTCAIYVRQSIDKAEGISRQLARCRALADSRGWTVIAEFEDNAVSAFKSRGQGTAWQRLLDSSADVVASVNMDRLLRGQADLLALIDAGKTVATVEGDLDLTTAEGRFRAELLTSLASFEARRKGERQVRGNESRVANGLPVPGKRRFGFEAGNVVERPEEAEQVREAYADILAGHSLRSIAARFGKAPVRVREILTNPAYAGYVVRKGQRFEAHATVARVVERDVWEAVQDLLADDARRTSPGPSRKHFLSGIARCECGALMRVISVYYRCTADTSHATIYRRDLEPHVKSHLAVALIRNAGAATVGAPAPLARRLSELEDERTRWTRMGALPGVDFAEVERELVRIAREAEAVAEQLGRSRVESATQRLTVEALTVLADALEDPDAMEELPDGSRDVEVNFDAWETYFDGLPLDSRRDLVDSRLTVVVSKGRGLGRVSVTARDA

SEQ ID NO: 512 - protein, 529 aa, synthetic construct
MQSQPNIIQRAHRGDFTGLKFAGLVRLSFEINPDRERPEVPLTGADINNREEQERLCREYVESRGGIYIGTYDEPHTSAWKKKRITQPDGSYAYRVIRPVFEGMLSDLKKSSTNPKFFTPLNGYMPRTEIQGAIVYDVDRLTRDNRHLEDAIETVEFFNCPIIDITGTLDLLSENGRDMARVMVTMAGKQSAATSRRVKNIHNAMAREGIPVGGTRPFGWKADKRTADPEEKKLVVDAARDLLDGVNVNTVLKRWEKKGVQTPRGNFWVRSTFIHMITSPRMVGWRVHGPQNLPFHERYARDTEGNPIKAQYEALLDEKTWRAVVELLTGPDRPGAGEYTGKLKYMCSGIIRCGNCGSKLRGNAKAKNSHEYVCDGCRRVTGSGRAIDKLITALVLARLEQEELSVPPANWPKTEELTALEASKAGLLAQFKENPDMGSYIWPEVRKLEVEITKLTKERAAYLRKVTRSRRPNLVEAWPTLEVEQQRDICAENFEVVILNSATKGGNRFDETRLQVVYRQESSQYASAA

SEQ ID NO: 513 - protein, 515 aa, synthetic construct
MTQENNQDKLIPAVAYVRMSTDHQECSIENQLDFIYQYAKTYGYKINHLFKDEGKSGLQIKGREQFQALIQLIEKKEINFSAVLVYDVSRWGRFQNINEASHYIYLFEKAGVKVIFCAEPFSREAGLFAKIQAVMKQGMAAEYSRELGDKVFYGQANLIRKGFRQGGPAGFGLRRQLVDHQGVSKGILSPGEHKSIQTDRVILVKGPSEELQVVQCIYRLFVNHGLSEQTIANKLNLQGVLTDRNRCWTRGVVHQILINEKYIGHNVWNRRSFKLKEERTKNSKETWIRANDVFEAIVSKEIFNKAQSIIVARTLRFTDDEILDKLKALYQKKKRLSSIIIDEDESCPSSSVYQNRFGSLLRTYQLIGYTPNRDYRYIEINKLLRARYPVIVNSVIENIQHLGGSVYIDKKTELLVINDEFTVSLILSRCQETKKGRNRWVIRLDTGLTPDISIIVRMCLLGQEIKDYYLLPSSYLETPKFRLMDYQANSLDAFRFNSLDYLYIMAKRLQLKDCV

SEQ ID NO: 514 - protein, 558 aa, synthetic construct
MERTKAYMYLRLSRDDGDEGESNSITNQRELIKSYADKAGFKIIKEFIDDGYTGSNFDRPDFKRMLHDLEKKDCKTIIVKDLSRFGRDYIESGKFLQKTFPQMGVRFISVNDNYDSESADVSDTHLILPIKNFINDSYCRDISMKVKSSQKTKRQRGEFIGAFAPYGYKKNKKQKNHLIVDRNVSHIIRKIFEMKIEGYSSKVIADELNKLGIQTPGTYKESQGSNYSTGFASNKNKWQAKMINRIIENRVYIGVLEQGKRTKLNYKSNKEIKVLEEDWIKVEGTHEAIVSETMFNVANKMMGRDILNRKSKPDFLTGLLYCADCGNQLIRRRQKTKDGYKIYYICGLYNRGNGCSRHSIREEEILSLLDFILRQHIKYQEELFTRIRETDLSKTKYQLDLDDLIADKKKYETLRKSLYLDLEDGLIDEDEFQSFRKSYQLKIKDIEGQMISRKKAYEELKDILSSKENWLTDLEKYKNIESIDRQTLALFVDRILVEEKDQEGRSRIAVFFNDMEKLDILKRIISGVKKGNASNLISFNTIATKNLTTPREGVVVNG

SEQ ID NO: 515 - protein, 494 aa, synthetic construct
MNNIAIYMRISFSERDRQKQTEETINSQRNIIKHFIFNDQELKKANIEEFVDEGYSVSTTSRPGLDMLLKKVRGQEINCIIVKDMSRFMRNYIEIGDYLENIFPFMGVRFIAINDGYDSDKEGHNGTELDIQFKNLLNDYYSRDISEKMTTALYTARKQGKYTTGTPPYGYLKDPKNKYKLIIDESVSDNVRYIFQLILEGYTLNETAKILNDEGVITARARRNQIKGYDSYSNRWFSTVEQTIWSHSMVRRILKNEVYTGTMVFNKTSKSKLDGGSVTYHPKEEWEKIYNNHEAIISKETFDRVSELLKSRHKNKFYGGKSKYKNSPIAPFVRCNKCGYKIRFLKSSNGKELIGINLYCYYCRMLDQEEKLPHYKDLEEDVFKILKDRFHTDKAEKERLLKEQKKLYDKNDELLKKKRIEFENYKFGKISREAFIGLKDQLEESTEENNKRIKVIDKELKESGSIESLTEDVVAKYIKTIYISGKGIEKIEYC

SEQ ID NO: 516 - protein, 532 aa, synthetic construct
MRACLYARYSTDNQSQNSIADQLRAGRERVAREGWSIVASHSDEGISGATPVALRAGGKALLADALADRFDVLVVEGLDRITRDLAEQERTVKRLEHRGIRIIGTADGYDSQADGRKVMRIARGLVNELYLDDLRKKTHRGLSGQFERGFAAGGRTYGYKSVPEEGGHRILIDEEQAQHVRWIYEQVAAGSTLRSIVHDLNARGVRSPRGNGWAASALVGNAKMGDGLLNNEIYIGRVIWNRRQWLKDPETGKRLPVARPPEEWLVREAPELQIIDQGLWEQTRPQQLLRANPTRGRPHGTLFGGLLRCDTCDGPIIAINGTRYGCSAHKEKGPTACANAATWRRSDVDQRLLSELREDLLSPSALAEVQATVRRLLDEMDSGHERVQAAAKRRSVELDREIERIVDAIVTVGASEALANRLRAAELERKTLQATMQQAPQPLASTAEITARYRQLVMNLKETLSGDGHTVKEARPIIAGLLGTVTLVRDAGTGESWARMKNPAEQLLLEATGGKSLMMVARARFELATFGL

SEQ ID NO: 517 - protein, 547 aa, synthetic construct
MCDYWSMGTNAQLEAIVYARVSDNRGGRSRSVDQQLAAGRRECERRGWVISKEIIDDDKGASRYSRAKRTGYEALLEQELRPGRVLVTWESSRAQRDLRAYIRLREICEETGALWCYDGQVYDMRDPRDRHRTGQDALDDELEVEKTRKRVLRDMRANAEAGRPHGKVAYGYRIVRDPRSGRAIDRVPDELTAPIVREIAERVLAGEAIRSIATDLNRRGIPAPRPIRKGPRAGQPGQWITQTITSLIKSPTYAGLRTVRGEVVREGTWQPILTREQHERIVALLSDPSRRTQRGTSPRWLLSYIATCGECGGTIARLKPRGHDMYTCITNQCVGRAVSYVDKLVEEAIIQRLESPDVLALLSSDDQAASEAYEEARTLRERLDSFIDQAAEGALSAQALARIEAKLRPQIAAAERRARAAISSPLVAELAGPHARSTWQTLTMPQKREVVRALVEIRIWKARKGMRRVNPRYIHLRWIGSDEPVPTGPVPPLPLAEGGDPLDYTIAEVLAHMSSADAAERQRILDAERAGYARGRILRLNPNPTRR

SEQ ID NO: 518 - protein, 479 aa, synthetic construct
MNKVAIYVRVSTKGQAEEGYSIDEQIAMLTSYCSIHKWTVYETYVDAGFSGATIDRPALSKLSRDAQKKRFNTVLVYDLKRLGRSQRNNIAFIEDILEKNDIGFISLTENFDTSTPLGKAMVGILSAFGQLDRDTIRERMMMGKIGRAKSGKPMMTSTIAFGYTYDRLTSTLNINQAEAIVVKTIFKEYLGGRSLTKLRDYLNENNILRNGKLWNYQGISRILRNPVYMGMIRFRGEVYQGNHEPIIDAETFETTQAELKKRQIETYQFYKNSRPFRAKYMLSGMIRCGYCGAPLEIILGTKRKDGSRYRRYQCVNRFPRTTKGITVYNEGKKCNSKYYEKEDIEVFVLGQVRLLQLNQAKLDKMFEMVNKIDVEGIEKQIDQLNNKLKRLNDLYLNDMIYLDELKRQSYALLTQKELLEKELENNPDIQKKIDKENFQRLLDTKDVTTLDYDSQKHILNRLINKVFVKDGHVKIEWKI

SEQ ID NO: 519 - protein, 506 aa, synthetic construct
MILKKIIVLNRVSSNRQDFESQNNAIREYIDKNNILVDQWITEEGVSGYSNKLSDRQAIKQIEEMALLGELDTLIIFNLDRIGRTTEGAEFIKRMTYSNVKVISVTEGLLNSGNDTDELINGIKFWMAQQESKKISLRSKNGKEATNKKGLFAGGPVNFGYGVLDQKMFVIPEEAEIVKLIFDLYIKCGKNETVKYLQEKNITKRGKRFSQHMVHDLLKDTVYIGLKRYNQWQKVSTDPTNKKRKYNNETLKFQEYREELRILDDNTFNKVQELIEKRTSSKDKVKYTNRTNALFEGLLWHRCGDEEIRKLHLDNKKDKYGNVIYSYRCSHCRRNFYKDVTKTYGSKKYNKLLENNVLKLMNNMSIEELEKKAKEKQGSTSNSILVSIESHKKELDKKRKAISNMEKELINIFSGESSMDKDILINMITKTKEDIVTLSDNLKSLEAEYIEISKTISIDRALIEQYKSFNYVYGLADDKQKKLLLQEVVEKITFDGDKLIITLFLE

SEQ ID NO: 520 - protein, 522 aa, synthetic construct
MSPRDAATSANPPVVGLYLRVSEDKSLKAGAASWREVGEEVAAQQDELEGMAAGLGWTVGAIYNDNNTPATDPFIVRKDFEQSLLDLETGTIQGLLFYHSDRLARLEYDAARINRLYQMNAKLVGLSFSGGVDLSQPEGRAMFMMQATMGGMEVASTKRRTTRKNKRLAEKGVMHGAPRPFGWADDRETIHPVESKDLADATRAVPGGKKIGTIRKEWFEKGYQKKQTKKGLERYGERAMPLDHSTVEAILVNPRNCGYMTYLPQSERRDSKKKPWMPDYVVYKDGKPVIGPWQPIVTPDEWAACVEAIKTRKERRKKGLNKPHETSDKYLLSGVARCGKCMFPLTANWYSKQSPSYERYGYRYACLSTLGGCGGVTRVGPPIEELVEAAFLEEVRRSLGSVAKDDEVDETVHDERIAEIEQEIDEVNERRKSKRITLTRALDLMEELETERAELRDERQRLMASKLQQKTEYPTLLREWEKYSIAEKKYRLKQDIRAVIVHPQGRGRRPFNPELIEIEWST

SEQ ID NO: 521 - protein, 659 aa, synthetic construct
MFSFDKTKYKGIGVPYARFSTKAQSKVGKKSLERQLSEARRYAKQHDLFINEDLIFADKGVSGHALQGNVAKAFKKGQMQVMLALLDKVPEKERENIYIMFHNFDRFSRMSPDDAREYFNLILKRGFNIVTTIDNQLYTRHNKDLSRMLISSIKMTTAWQESEVKSVYIKDALKRKKDIITYLYTHPSQKGQWKHVGVVQPTMPSWIDHEKVELTYVDANGLSKIDTFKKFTLNEEKAKVVRYIFDLKIKGYGYNRISRILNEQQVPVFEPQKRKMFEKWYESAIRQIIIEEKAIGHLTLMGLEVEEYLCEEENIFKKRKIRKDYTEKLIDYYPAVVSEETFLKANEMIVKQNRPAKLGRIGERTNVFGNIAVCGCGSNLQYRRTVRKLKKKKTDLINEYLNCVNSHTNYKCECKTINYRLLEDAFFRYINHIDFEKVCNADSKNKLEEFDSIDNQIDQIESELKKVEKTNEGLIKTFEATVSQGIDGSFVVKQISENNKKKETLNDELERLKLLQQTKKIELEDDGEEVTDTLSYLKTLKSSTMDEKIELRKKINDFLVTKIVWMEVVCLEREKYVIVAFTDNVIRTFSFDDRAASDLMFNTVKVSTDGLNSDQSKALLLKLIVGVKSALSGELGIISKIDLIDYIKSIKSDFSKNIK

SEQ ID NO: 522 - protein, 507 aa, synthetic construct
MRAVIYARYSSKNQDKKSIKDQVILCQIEAEKQNDEVVVVFFDEAKSGLSDDREAYQQMLEYVKKHRIKKIYTYHTSRISRDTAEIKLRVRELKYIYGVNIVFVSQGISTEQENIELLLSANGIADEQYVESIRKNTWRGLYGRLQQGKAVFAPKFGYKLKDGELYIDENEAEIVKEIFELYISGKGFKEIAKILNQRGIPSPRGAKWSLTAVREIITNEIYKGVIVWNKYQYRKIPGFSKRKKIPNPPEQWVRIKRPDLQIVPVEIWEEANRKRVLRQKQDNSKNRVGYTTLLGGFIKCQCGSNLIKHSKVSFKCRQALVGACDITASFRENMLNTLVIHAIKQHLMENRQLFKEELEKQIRALYSRQKTKSDIEKEIETLNKKLQSFLEIFEENPSKTIAKKIQEYEEQIRLLEMELKSFEEIEGVEIDDGVIDILLEQIDNLLSMDVSLAREIIKNVLEEVRIEKDKIEGFYWIEYSFKNPFRTYDRKINMVAGEGFEPSTSGL

SEQ ID NO: 523 - protein, 590 aa, synthetic construct
MNKVAIYARVSTVDNQIYDRQISDLTKVINNHGYNINQIEIFAEKLSGYDKERPQLNKLISEASNYKCIYISEISRLGRDPSHTRKIIDDLTDKNIPIYIQSIGQSTLNPDGSRNTIMSIILQVLMEFAHSEAETMKTRMKSGKLEAVKSGKVAGNNQAYGYANVDKMQVIDEDEAMVVEKIFQMYLEGKGTRVIAGILNDMKIPTRLAKTHKDKTVSFEKTGIEKSGADILWDGNTILQMIKNPIYKGTRIFKGEKIPTPQIISEEIWEQANTLRTTKTHRNYLTSYTYLLKDFCYCGKCGKKYLGTFNLKKSHEFYRCVSFLKKGQQCGNAGININLIESVIYHQLIQSENLLKYLDNPNDILNQIKAELSDIELQFKLQSNVLASKERELERLLDLYLSNPSYKKELFENKEKELSNEIEALNKKISILKKQIFDKQLTVANYDKETATKEMLINAKNNRTELQTIFKQFINKIYINTLNKRFALITLEIKINGVIIPNTLKLIIDVKKSHRRGHNKVKSYQYIAVSKMENNPVFKNNVLMNDLKDIEEEVEKLFELAEKVKDVNQNILPDTIDIVPEENWLSINPK

SEQ ID NO: 524 - protein, 550 aa, synthetic construct
MADGQQWLSAVFFSLYAKKRKVKGNLRKHLLLLAFRVIYRLPKRKEVRLVEIQIREGSREQKRKLKVCAYCRVSTDADEQENSLENQIRHYETVIKANPDYEYAGVYSDFAISGFKEKRPGLQKMLADAEKGKIDLILTKSVSRFARNTSIVLEATRKLKELNVGVFFELQNINTLSGEGELMLTILAAFAQAESESGSAGAKMVYQRKYEAGIPVQYLERSFGYTKDERGVFVADEAESVWVRKIYEMAADGYTPASIKRYLNENGVKTVGGVQWVDSTVFRLLENEIYKGDYIMHKHFVNEERKLVRNRGEVDAWYIEDDHEAIVSPELWQKAQDALAVKRDYLAEGSVIEAFTEENYPYMNKIYCAKCGYPLYKRIYSKGNRLNWGCSGTKRYGKSFCDGINIPDGVLRSAWHFEENTYIDEKASDKGVKEFTYLKERSWKRRHKKKQPSAIPENTETEYPYREKIFCALCGSRLVRYVNPQNHKVTWVCNRRKRKGKEACDGTRVPDTVIKGWGEIKNDIYIQRKDDKNVKKRYSYTSKKPSGIRV

SEQ ID NO: 525 - protein, 482 aa, synthetic construct
MASRTARRAAIYTRISRDIEGTGWGVERQREDCEKLAASMGLTVVETYSDNDVSAYSGKTRPAYERLLAAIQRGEVQTVLTWNTDRLHRRTSELERYIDICQPLDVETHSVKAGHINLDSANGRAVAKILGTIAQQESELKSERIKRQKRQAAQSGRYLGGRVPWGWRVDEGVIVEDTAAADFIRAGVQAILDGHSLIEVTRRWSDAGARSLAGNRMNTTQVRRVLTRSRNAGIVTHHGEPVSSDWPALLSVEDFRAMEAKLNDRTIPRQSASKFKYLLSGIVACHCGEYMTGFGAAATAEHPEYRRMYRCRVHQQGGRYVPGHSTREMNRLDGYVTDVIAAYLQRPDLKAAVLSAAADIADSAVSSAPAKALDTGALLTRKQDLARLFAAGVIEESQLIEGTAQIRSELADIERQAVQDGGSSELIGVLMAADPGEAFRGAETGVQRGVIRALADVQILQGKSTPGVFNPELIAITWKGAN

SEQ ID NO: 526 - protein, 559 aa, synthetic construct
MRKVYCYVRFSSKKQQLGDSIERQQKLIEQYLTEHNAEIAEQFSDLGVSAFRGKNVKVGALSRLLERVKSGEISHGDTLIVESLDRISRQKELNTLEILISILNAGVVIYTLSDGRIYNAKTEDQANLVFQINFIISRAYDESLNKQKRSVSAWNRKHEEARKAKTVMTRKLPYWLKVVENHGEARIEIIEDRAREVRKAFELAKYKLGAQAIASRLNKDGAQKRWTLIAVRHLLTSKSVYGSFEAFKTKSLNGTLEKNQAYEEIENYFPAVIEKSEYYNIQSILQSNKEVYATRGRTPKGFRNVFKGLIKCMDCNSYLHQNFLKRKGKEYMYLVCQKSLVHACPAGKKVIIPYRHILEPFLLFFKNYGIEELFSEPSDTQSLNQRLTAIREEKSDKKGALQRMSDDIEKNSGEIPKTILALIGKIEGQLSSLDEEENRTMAQIESLRVSKSVKEEITKSDIDELLETEEGRLKFNSLLSERKIELLVSREFEEEYSNLFIFFKEKGFSENIKFNRKEAIFPFMGVYNFNRKTYSDGFGGEPKPNEKVDYEKFRIDWSL

SEQ ID NO: 527 - protein, 525 aa, synthetic construct
MTENRKTAVYIRLSMEDENVDGRTKLESDSVTSQRILLKSFVIDQLGVDESDILEYVDDGVSGTHFKRNGFQQLQEDMKSGQIGCVVVKDFSRFGRDYLEVGFYIEYIFPLLQIRFISINDSYDSAASSGMTGGMNVALKNLVYNMYSLDLSKKISSAMQTRMKNGTRLPVNARYGYRKGKDGRLEIDPDSAKVVKMIFQMAAEGMSFAEITRELNKQEIATCDEQKMSRGEQVQFRRFDTIMKKRWNPTTVSAIIRDEIYIGTRIWGKTRCSMHTGHKAVINDESDWIRLENHHDPIVDRELFEKANRLHPKKSRGVAETRTNYTLARRKKQPALMLCAHCGHCLVRETEHLLKCSDGRTSGDHVCKSLVVRREPLEKNIMELVHQFAFSMLENRKIVESRNQSKGMETNVAELLKQSRQLSSEKMKLYDEYKDDRIDRELYKQKAGQIGRQLEEIRRKIAESERDAKILEQNNTAKEMKLEEFLSMEKFDTEKLREIIKVIRVHSQEEIEIEWNFDDVFLGQR

SEQ ID NO: 528 - protein, 496 aa, synthetic construct
MEEIDLYLRKSRIVREGTEALTFETQESKGREWARRHDFRVRKVWKDNLSAWTDTKRPDFDKALAALRRKEVPALWCYAIDRFDRKGALSVLQLLDSGVRIIFDYERLDSADPRDRGRIVDDAERAKAASDLLSTRVRDTKQVQRRKGVWLGAAPYGLRKDKHGKLHHAKEWDCVMRVLAEVADGKTPRKVARSLTDDRKPSPKGGAWNASTVRRIVYNPVYEGWQVVALSRDYTWPVAYRDEAGNRVGVFAEGVEPAPADVVAKARRVHAGHQRGALGPRVGKASHLLTDLLRCAGCGAKMPTSGRSYVCNGHQMGKPCPAPASAMRARIEEYVYREWVGAVSAADVDEGDPLMIAVAERWAALTAPEDTEEAHEALAAVKAAEAAVERLANDRAQGLYDGAMGKHFPRLVAEAEETLREAQEHADELSGHRIDLTMFDDAGLLEEAWEAADLPMRRDLLRVAIDKITVTRAERRGALFDGDARCDIEWATPEED

SEQ ID NO: 529 - protein, 490 aa, synthetic construct
MKKIAIYIRKSVKGDENSISLEAQTEVIKHYFNDKNEFVVYKDDGFSGGNTNRPAFQRLMADAMENKFDTVACYKLDRIARNTLDFLTTFNTLKEYGIDLICVEDKYDPSTPSGRLMMTLLASLAEMERENIKQRVSDSMLNLAKQGRWTGGTPPFGYKVVTIDGGKYLELEDEKNIKYIFNEFIDGKGIIRLGNEFNCDKKKISRILHNITYLQSSKDANIYLKQVLGYEVIGQPNNCGYLPYGKYKVVNSKKIKNTDGLKVATVSKHNAVIDLDTFIKTQNRLKTFEGKKAPRISNKSFLAQMVKCGGCGSNMLIALGNKRKDGTRKLYFYCPNRCGNSFADVDKVEYTTLATLKDVDFFNKINKNKSVVNKDNSKIKKSMLKELEEKKKILDGLMDKLALVDSNLANVIIEKMNSVNIDINDLQNKIDLLEKEEISSSYNKEDFKLKEENRKHFIEDFENMDMEEKQNSIRGVINKVIWDGENIIIS

SEQ ID NO: 530 - protein, 530 aa, synthetic construct
MIGGIYARSSLGQTKQGDTVKHQVQMIQEYAKRLEFNVSFDEKFIYPDDGESGYKTTLLQRPPMKQLLEDIDSGLIDIVFFKGISRFARDSGEAIQTSKRLIQKGVRVISIEENYDSDVSDPTFFQMYAVLAEAESRKTSIRVSLGNKQKSRNGLWAGSVPPFGYIKVKDITDKAKKEELISKGVHPQTLFPHPEKADIIRKIFDMYVNQGFGRKKIVNWVNSQGIKTQYGNKIGDITIKRILMNPAYIGVIVYGKTRYNYIDSDDGLRKIQKVINVDKEDWAICEDAHPPIIEREVFMKAQRLIKQKEKAFNKGRRFNNAKHPLTGLLKCSLCGAPMICQKRTNKKADGTKVTYRYYVCSTYHQKGRDVCPQANINADELEDYIHKQISQQIEKVKNDEYFLEGYSTYNPNEEINSQIKVIDREIEKNTNKSLTLLENKDLYDDQTFRDLNLKLKEEIVRLRKQKDELMDELKFAEEIMTKDDLKAKFDEFLELNLSDISRTREVFHEWINEVRVEDKKVIIDQKFKMI

SEQ ID NO: 531 - protein, 694 aa, synthetic construct
MFTETHQKVTADHLSRDAFLYVRQSSLRQVFENTESTKRQYALRERASALGWPIERIHVIDSDLGRSGASAEGRDGFQQLVSEVAIGHAGIVLGLEVSRLARNNADWHRLIELAALSHTLILDEDGIYDPAHFNDRLLLGLKGTMSEAELHVLRARLQGGIRNKARRGELELALPIGLVYGADGSVVLDPDRQIQDTLRLLFVSFAECGSASAVVRRFQREGWAFPRRIRGGIGKGELLWATLDHSRAVQILHNPRYAGAFVYGRTRGGRNAQLKSVQHKVAREQWHVLIRDAHVGYIDWEEYERNQATLKQNVGGFGEASRGRVPREGTGLLQGRVVCGLCGARMRVRYQEVEGRLEPYYQCTDAVVRRAGKLCQSVRGRPIDEAISALLLESVAPAAIEVALAVQEEIAGRLEQAETLRASQLERARYEAELARRRYLKVDPDNRLVADALEADWNARLRQLDALQREHERQRAADQGLLGEEARGRILALAKEFRHVWNDPRTEPIERKRMMALLIEDVTLVKADRVSIHVRFRGGKTRSLLIDKPKPIAQIRKTSPQVVQTVDELLETCTDRQVAARLNELGYRNWQGQSFTFKKVIVLRNAYHLKSRFERLRERGMRTGDELAKQLDVCPTTIHQWGRQGLLRRHLYGNNHRCLYEPVGEVLVTKGAGGRYGSRSPTLIAVSSTTQGAI

SEQ ID NO: 532 - protein, 489 aa, synthetic construct
MTTAAIYARLSQDKRQGTSEEGASVKSQIDACKRFIKAQGWTLGETYADNSISATSGAERPEFERMLREAPSIVVAFKQDRLSRSLMDTLRIKGAGITGHMCDGGRLDFSSADSEMLTVIRTAVDSAEGRKKAERQKLATLRDAKAGKYRGSIRPFGQERSGEWVPAEAEAVRTAAKLIAEGRQTFFRTAELWNAAGLLTPATGKQGGKQWTSGTVRNYFTRPRLIGKQEYEGTLYELKDWKPLLDETTFEQIQTLINGKRTGQRGVSTSRSDTKLLTGIVRCVECGRGMNSGQRGAAGSTRLYKCPTVKHQSVVAEPLEDAVSLHALELLNQHEDSKEQAEETSKALAALMSEKRVAVSAHDEWMEDAAVAGLKPSVLGARQKAHDKRMAEMDDEILRLNKDMKVSIFQLSEEPIDLKNMNTRYLHGWRSVSMEQRRDLLTTVFDSITVERAGQGKRFSPSRVHYTYTELGTKLADRWAADMEAYFSA

SEQ ID NO: 533 - protein, 649 aa, synthetic construct
MNREGKKCVLYPRVSTEMQVDGYSLEGQKNGLKRFADREEMEIVGIYEDAGKSGKSIEGRPAFKKMLSDIKNGLEIDYILVYKLSRFGRNAADILNSLEFVQSYGINLICIEEGIDSSQTSGKLLISVLSAVAEIERENIIEQTMNGRREKARQGGWNGGFAPYGYYLKDNQLLIEETEAEAIRIIFDKFANSDIGLGGVAKYLNLQGIKKIPRQNGTLETWSSHFIRLILDNPVYCGKIAYGRRTREKVKGTKNEYKQVHAEDYILEDGQHEGIISEELWQKVHAKRMATGIKQPSKIGKDRSHLLTGILKCPLCGSSMYTNKHAWTNKDGTYKEVYYYICGRNKQERGHHCDYKASLRKTDIEPLVIEAVKELVSDKYFAKEIEKRIGVQTDTTAIDKELANYESKLKEVDLNKARLEREIDNLPVDTRFRERKIHDMTLRLDALYDTIVELEERIEDAKLRKSSIEMETITLDNIYKLMLNFGKLYDIISDEEKKSLITYLIKEIQIYPNGESEQPLKSIEFNFPIYRDGQEVRRLLWEKGNTVETVVLLSKGEVDSKKIRVEFSLEDMDMSEFQDGATYPQIKEYVLEHTGLKVSNLYISQIKRKCGIGVGKNYNLPKSEDSRQPQCPQEKEKAIREAFKYFGMI

SEQ ID NO: 534 - protein, 540 aa, synthetic construct
MKPALRAYGYVRVSVDEEGGQNASISAQGAAIRAHAEREGIELVTIFEELNVSGRKLQRKQFDRMMTQATAPDRPVHMIIVYALSRFARRLLTQVVSEHRLAEAGVSLLSLTENFGNDSNGKMGRAMVAVMNEKYVHDASVFTTRDRRGNAISGHWNGGPIPLGYESRVVSVFDRKERKKLFIREDEARIVRLIFDLALQGLHGRPMGTRAIAAYLNDNGYSLRGRRFHNSNVDGILTRQHYAGAYLHRPTNAQALPAGGGDPVIVSCPQIIEPDLMAQVAATRAKSAPRVRAPRITNSPVLLGGVATCGHSGCGAGLVIRSGKAGAYRYYTCNAKATAGAERCKSKPIREEALDQIVLDGLLKRVLAPARLRILLADVLDRSDEAEERRRKDHDRVRRERIAAEGRLSRLLDLVAEEIMSPREPVFAAKLAEARASIAALSETERSLAKQIGRKAGRIDDAAVKRFGERLRAEITGANTELRRAYLRIFVSGVVVNDNEILVAGSRAALEAGAHKGETGSLTSVPSFDREWCRLQDSNL

SEQ ID NO: 535 - protein, 463 aa, synthetic construct
MGKIIGYARQSVDKKKIENSVKSQIKAIQTYTNKHHLQDVTFLSDVKSGRTTTRDGYQSMLEMIQNNECQHIIVFRINRLNRNYHDFLEFQELCETHQVLITSLCDGHFDLSDKTQAFKIRFLAIFGETESKIISENVRSANALKAKNHQLLGTNAPFGYIYKNKSFHIDSSKVTTIKFVFNSYIQQGWGYKKISQALNNHIELFDRTPKQVKRILTNAKYAGLIRNQFGEYKGTFKPIIDEAIFRQAETIRASKQTLKHQHPMVLLRKKIKCICGATMTPIRMKRKHMTHPITYYICPLNENVGYKKCDMGYLVASEVDQQTIDIIEDNILTKPTLQCLESMVQKRLATKIHRSKPNFSKATLIEELSKKQISIEDYKMKINGLEIWQYKMNYYQQSNSDINAYKITKNILNNYTLYLDQLNEMITRVTVDQDKNITGVFLKDHPINLLKEKDDINVVSKTK

SEQ ID NO: 536 - protein, 514 aa, synthetic construct
MKKVYSYIRFSSTKQAFGDSHRRQSKAIQDWLANHPDHILDESLSFEDLGRSAFHGDHLKEGGALRAFLEAVKQGLIPSDSVLLVESLDRVSRQSISHAQETIRGILEQGITVVTLSDGETYNRQSLDDSLALIRMIILQERSHNESVIKSDRIKKAWSHKRQQFEQDGTKITGNCPGWLKLNSDKKSFSLIPHHIETIHRIFDEKLSGKSLHAIARDLNLENIPTITNKRVDTGWTPTRVRDLLLKESLIGVAYGVSDYFPPAISKEKFHAVQMIRGQGKGKKPTSRQPSSIDILKGICKCAECGSTLRQRNTKKTPEGRYPRGYLECRNRQLGRCNSKAFNRSLIEDILIQKVFPTLQYLSLKSNGDNISVTTLKADITSLEKGINNLISLAEKGLGDLDTLAQRITNNRVELESKKKDLRQAEAILSLRSDNDIQDSDRKTVEGRIKLQLAIKSFVKEIIFDYDKQEITIRLLNGKSFSGISVAREDKDFDHSSMFEVLQKSLLDVDGVCL

SEQ ID NO: 537 - protein, 567 aa, synthetic construct
MKAYLYCRISSGKQKDGYGIQRQSDAVLEYLSNSKEAEKLGYKLSPDHYEMLDPDLGKSGYHGYQFTKGALGRFKQRVADGEIACGALVIENVDRFSRAEEYTASEEFNFLIQRGIDIHEVETGIVYSSKISGTLSKLSHAIERAHGESERKSRMASKSWSNRHKKALEQGIALKTNHPRWLRIVDDHYEVLKEQLAIYIIIFERFLEGHGIAVLLDYLNENGILNNGKRWTRTSLHRILRDRRLIGYNKDNRIYPIAINEQMFKRVQDHFDSQDGSTKRRTTRKMRNVFNGMTKCGVCKSAMIANKNPHGKHHLYCVKKRGDKHACSASACRYEYVEKEVLKHLHNIDWNSVYSNKNKVSVDVQGKNTQLIDLARRVDELQKEMTGADHDMVLALVRSLKILRKEHQELKDELTIISTDVKPKFNFDISEVIEQKNVSLRQEINVLIKKTVHKIFVQKFSGHIYVNVEYYNTVLSHMLVLENLTGKLLANIAIIDTSNELRISSNGFSIWHDKTKDIWNVSDFKAIGSRDFFLALNHMSQFVDREVIDDLFDMWEMKSLGSVENMV

SEQ ID NO: 538 - protein, 700 aa, synthetic construct
MDSNAFLNDLMSKMKLPEAKGKKKAEQSESVAQILAAMQKVKTEKKKPPVTSYAPTKEMPVNELESMEEFSQLASDVMQECRPAIPAVKTSISEKAVRVAAYIRVSSTNPAQEDSYEMQECYFMSLLAGNAGWTSAGIYSDHGISATSREGRTGFNRLLRHCKQGKIDRVICKSISRFARNTQDFLVALRTLKENNVTILFEREAMDTADAYSEFILTTLAAIAQEESRSISANIAWSNQKRFPAGNVCNKDIYGYEFRKGEYTVNENGYRYRAVFIIPEEAEIVRMVFRFFTKEELSFTQIAQKLDALHIPPPNSGCRQRQKRKPTVLPAGALKEEDKRGWTATDVRYMIANVRYCGSVLCQKTYTDHRNGHKQKVNKGEKPKYLIRNHHPAIISEELWQEAQEIWKAYTAKYRGIEKGRNERNYSKLLLCGECGRYFQGHSTTRTTIWRCATKLAQQGQKRCRMEPIYEEQIQTLLCKAFAEKFKLGEKMDAEVHEVMQMISKAPIDNARNQALKNLTEKLREIHDFDHMEQEGDFLKRQLSAVNYSIRDVHQHIRDIQAEKEALKVRCEVLGEPRDKEAVTELENRLLNEEEQLEKLEHEAQQQAEQVRYMEDYWKKLEQTHEIREKTLQWLDSLAGGTQMFLDEAVGTYVKAFVLSVTIFSPKHFRIHWFDDTCTEVECDSVFEGYQQPGMIRRKY

SEQ ID NO: 539 - protein, 461 aa, synthetic construct
MPIDSPAVVYCRISQDRTGEGVGVERQRSDCFKLADSLGWSVVETYTDNDVSAYSGKPRPEYRRMLDKLKTGNVGAVLAWHTDRLYRSIPDLSELIEICDDRGIEIRTCRAGEVDLSTPSGRLSATMFASISRYEVERSAERIRSAKEAQAREGKYRGGVRPIGYEVGGMVLNETEAARIRKAADDLLAGASLMSTARAWNAEGFTTSQGNRWTATSVRRVLTRARNAGLVESDGKIVGPAQWPAIYDADTLNAIRTIVSDPSRRSYVSFARRNQGAGVYRCGRCDAPMRVQHGVKRERYYQCSRSYHLSQMQAPLDEFVSALVLERLSRQDAISVFTSDDDVDLSDVRRRRAELQARKDELAALFATGSIDGSQLRLGSARIQSDIDRLDKQLAVARESSPVAGMILAEDIASQWDSLTADIRGKIIDALMVVTVLPLGPGRARRKDFHVSERVKVEWKQ

SEQ ID NO: 540 - protein, 499 aa, synthetic construct
MPRAVIYARFSSDMQREESIDAQVRACCSYCQSKGYLVVGQYVDEAKSGRELTKRDAYNQMLADALEDKFDIIIFHKIDRNRRNELNYYTTKDKLEKLGIRYEYAVQHIDASPEGQMMEGMLVSMAAYYSRNLAKETKKGLNENAYKAQFNGGTPPLGYKIVDKYYVIDDQEAEAIRLIFNLYVAGHGYKDICIILAKKGFTTRNGQPFGKNSLYDIIGNERYCGTYTFNKSPRKKGGRNMHAKTRPDDFIRLEDAIPAIVSKDVFQQAQARRKINKARPTFKSKVNYLLSGKIICGHCGQAMGGHSVTPHKKMYSYYGCLTKERVPLQSCPQKTIRKDDVEEAVLTKIKNEILTPQAFSSIADKMRKKYAAQKGSIDKDIARKQSQLTQAESKRANLYKLVEDGMHDDFTITKIRAAKEAIETLQTEIKTLKKVKQNKILNDREIERAFQLFRQKLNDMSDLDAKKLLIDLFLDKVIVTDQHLDIKLSSDAITNMLQK

SEQ ID NO: 541 - protein, 604 aa, synthetic construct
MKKVFVYHRVSSDQQLDGSGIARQAELLEGYLERTGICADMDDPAPVVLSDQGVSAFKGLNISEGELGAWMEQVRNGMWDSSILVVESIDRFSRQNPFDVMGYINALMTHNVAIHDVMANIVISRSNSKDLPFVMMNAQRAYDESKYKSDRIRKGWAKKREQAFNKGTIVTNKRPQWIEVEKDKYVLNEKAAVVKEIFALYQTGMGCPTIAKQLQRKEGEQYKFNRPWTGELVHKILTNRRVTGKIFISEIIRNHDDIENPVTQKKYDMDVYPVVINEEEFELVQELLKSRRPNAGRITVKKDGQEEVLIKSNLFSGIARCTECGGPMYHNVVRAKRTPKKGDPKIEEYRYIRCLNERDGLCENKAMTYETVERFVVEHLLGMDLSTVIKEQEFNPEIEVLRIQIDQVRDQITNYENGIERRKSAGKPITFDMREDLDDAKFELEQLLARQASLATVQVDVPVLQDVNVTELYDVNNVDIRTRYENELNKIVSNIRLKRNGTSYTIDISYKQNELKRHVLFVENKKKEQTLISEVIIEDIDGGKFYYTPSFMIRLKDGEIRFQQTSEDLSIVDYSLLLNYVDAVDRNEAVGVWMRNQFNFLNSN

SEQ ID NO: 542 - protein, 491 aa, synthetic construct
MPDLVDLYVRLSIWDEAKDGLERQESDLRGWAKKQGLTVRTVWRDAGVSGYKTTVTRAAFKKATEALIAGEVGALAVWRIDRLSRRGFGQVGVLMDSLEGTGRRIVFVDDGRDTSNPNDRLGIMLASEQARQESESTSKRVKNKNSSLVAAGLPTLGKRRYGYLSADPATGRHVNTVEHPEEAQQVRQLFTRYLAGASIRTLSTELGWRPLRVRDTLSNAAYIGKLTAGGLTYEAAEHVARLVSKEDFEAAQTRLQARSETYRGFAGPGGVIKHPLSGIMRCAVCGGAMSYRNGYLCLADLSHPVITGHLAEDRVRKVVALHFLSSDSGIWKNKKQLDLPHIEKQIASVKAEEDDILTGLAQGLSMSQLLPYLSPLREKREALEAQRDRAIAADVETRVRYEILKNFEYEYENADAYQDNKARGEAVLAALPLDELRQVYRLFDIFVWPGRGAGRLRAWPVGEHEWYAGQPIEDVKYDFFNGVRQAVKKAP

SEQ ID NO: 543 - protein, 532 aa, synthetic construct
MTVKNPLPRAFSDVFRDDETINVYSYIRFSSKAQALGFGEVRQLEQLNGFFEQYPQARQVEKYEDLGVSAFRGKNLKSGQLAKFVERIKSKEILPNALLLVESFDRISRMGGYDALELVVSIIQADCAIYTLFDNRLYSKRKKDSNVDISLIQNILERSNDESRAKSERISDAKARNLTKGENGGIITKRCPFWISFVDDKFVLNEHAKAVKRMTELCFDFGFQSIAKELNKENHPKKYTDSIVGKVLHKHAIYGSFLAMKNDENGNRTIVNKEIKNYYPAVIGESEFHRISEKLKERQDPKLAGRKSEEFRNILRGLVFCKCGSTFRYHAQKNYYVDLVCHASTVGQCKYAMPGKGIRHRYARIEEIFLAYQSLIPFHKIIVKNDDIKALEKEHQEVLGQIIIKEKALANNFSILEKASDSAQKYITNRIDEVSQELDKLKVDEHKLNLKISSLHLATKPDLNVMEIYRLLITEKGRIRINNFLHSQKIKLIITPVKKKFFALDIYHNNKHIDTIDVTPDGYLAHHKPHLK

SEQ ID NO: 544 - protein, 541 aa, synthetic construct
MPRCAIYARFSSDLQSANSAEDQIAMCSARAEREGWEVAGVYTDIAISGASNRRPGMTAMLTDAGTGSFEIVCSEAIDRIARNQADIATIYQRLEFANVRIHTLSEGDVSELHIGLKGTMSALFLKDLADKIRRGQRGTVSRGRVPGGLAYGYDVVPAIRPDGELDRGLRRINPEQAAVVLRIYREYSTGRGPKAIARGLNEDGIPAPRGGDWRASAIAGSRARGLGVLHNPIYAGQYLYNRLHMRRDPETRRRVSRVNPASERVLVEMPELRIVPQDLWQLVQDQAAERSTGPLVQRKRPKHLLSGIVMCGACGGAYAMIGGGRMACTRAREAGTCDVTRTVARSMLEARVLKGVAEHLLQPEAVSVLVQEYHSEIETKRKDRTRDAADLDRQIGKAEAQVQRLIAAIADGAADFSDVREALTARKADVERYRREKSEVEAIPVIALNPGIVDSYRRRVRGLAATLDAGTPSGDEVKSRLRDLIERVKVMPDNHGGFDIEVLSSFGAVVALATDQNRRDRTSRSVMMVAKEGFEPPTPGL

SEQ ID NO: 545 - protein, 433 aa, synthetic construct
MRVAGYARVSTQEQKLHGVSVAAQEQALADWAAEHGHEYVGCYNDAGISARSRYTKRPELLRLLQDVQAHRVELIIFTKLDRWFRNVGDYYEIQRVLDDCGVAWKAIWEDYETETASGRLKVNIMLSVAQDEADRTSERLKQTNAYRWAAGEVVQKLPAGYRREGKTVVVDEKMQPAVAAFFHTYLNTGSVAAAMDAANLLGLHMTRVGASKMLRNPFFTGTVRGISVPAYLTEEEFEQIQRRKATFVRTAKHNKTYLFSGLLVCGNCGAILHAQSNRSTVYYVCGRYLNRNGCSKEARAYANERKLEQWLLDHLEYLLAQEIQVAKVEGKADEKNDISRQNALTQRLERIKLLFINGDIDLPEYQTRKEEVEQQLQALRPRPRTRAERLDGLLPEGWKDVYTGLSREGRRAFWLRTVQRVVIHPDRHPEIVF

SEQ ID NO: 546 - protein, 517 aa, synthetic construct
MDNDNKKVAIYARVSSDKQDVDLSISAQLKAIREYAKNNGYEVVREFIDEAETGRTTARPAFREMISLSRHPQKPFDSILVWKYSRFARSREDSIVYKAMLRKSGVSVISINEPFDDTPTGRLLEAIIESLDEFYSDNLGEEVTRGMRESAARGFYLSSRPPYGYRKIRFKDGEKERTKLEIEPNQAGIVSSMFNDALKGKGLTEIAKDLNNKGIASPRGKGWGKTAIRTIMSNEAYAGTFVWGRNSKRGLEPVRVENACPVIVSRQVFDSAQELIRERAPKITHPKRTGSRFLLSGFTFCGHCGKAMIGQDAKSGKFSYYVCGTLNKKGAGSCPSHYFNSRVFEETVVKVIRENILTEDHLKRLVEMVNQEMDVNSREYQNELDAVLEEMADTNRRLERLYDAVESGKIPLADLAPRIRDLRLRNEKLQERKIQITTQLSDRKVELASPEIVKSYVKDMRKILEESELTGKRAFLRGFIKKIDVINHQGVIHYLLPINGVLEERIGVLPIVQYGGQ

SEQ ID NO: 547 - protein, 523 aa, synthetic construct
MTRVAIYARVSTEGQADEEVPINGQIDECRKFAADKGWEVTEVFTDAGFSGRTDDRPAFRRMIEIIKTSPNPKPFDIILCWRSNRLFRSVEHRLAYSRVFRRHSIRFVAMHEPEFEGASAMFMETVLAAADELYVSQVSEDTLRGLKQIAMAGYSTGGKAATGYRNVRKVAGLKPNGEPILRTGWEPDPDYAPKIKRAFEMCASGASGPEIIKATGVVTSPSSLVSLLRNRAYLGERIYNVMKQVDGKTRRRANSKPEDIIRKENAHEALISLELFDAVQDVLVRRRPDTKGKSKQSPQTYLLTGLLWCSEHQAFYTGNTNSERNYYVCSAKRKLGAKISPCRNVKKETMEEFILDNLQKHVFTEKRIRAGLEAIAREKIKNKQEDDKERKELALKINQTEIELKRFYEAIASGVNPENLAQPIEERSALKNKLYLQLAEIDRQREIDLQIPDITDTMVEDIQEKYIGIFLTSPEKLKAILPQFIERIELDGTKAKIKYFAAEEQKVGSYWRPQGDSNPRSPP

SEQ ID NO: 548 - protein, 476 aa, synthetic construct
MALRAAIYVRISQDRDGTRLGVERQEQDCRKLAQRLGWDVRNVYVDNDISAYSGKRRPEYQALLADIEDGALDGVVAWHPDRLHRSPLELETYIDLSNKFGIQTHTVQAGAWDLSTASGRAVARTLGAWARCESEHKGERIRRARQQQAKAGGWHGGIRPYGFEKDGVTIRPDEAAEIAKATEAIVSGVSLRSLVRDLNERGVPTATGRGPWTSVALKDTIMRPRTAGLSSYHGEIVGPAVWPPIVPEDTWRAACAILSDPARRTNGGRGGTIRWLGSGLYVCGVCGEAQLRVGTGGSVKRHTYRCGNRNIRDGGGHVTREASTLDAYVEEVIVTRLSEPGLLDGLLEADDDRDTAALRVELVAVRERQDELAGLFAAGQITARQLAIGTEQLTAKEEALAKALASAGRRNPIQMLCGAKDLRSLWFGTREGRSDGLSLGQRRALLDVLMTVTVLPAPRNRGGFDPNYVRIEWKVG

SEQ ID NO: 549 - protein, 479 aa, synthetic construct
MIKNVAIYARVSTTNQAEEGYSVDQQIDKLTKYAELNDWKISKIYKDAGFSGAKLQRPGMQQLINDIREKKFEAVLVYKLDRLSRSVRDTLYLTKDVFTKNNIAFVSLNENIDTSSAMGSLFLTILSAINEFERENIKERMTMGKLGRIKSGKTSAWSNVPFGYKYIDGELVQDEIQAPIVRNIFESYLSGQSLSKIKRILNEEGHIGKDKQWSFSRVRQVLENVIHAGYNNFKGEIYKGNHKEIVSYEMWQEVQDELQKRQKMSYSKYNNPRPFQSKYLLSGLVRCGYCNSTLELRFGQTRKDNTRMRRYQCKSTIGKLKQDDRCPALTYDLEELENNILQKIEDYKAAPSTLSPLSSNNNGGNKDYQTKIINDKISAIDKKLSRLVDLYLDGTISSDILDTKKATLESERSTYINKLNSLKDNATKESKMDRFTNLIGDTGLSLFDMSYEKKKEITRSLIKEITLKGDEIKVEWDFL

SEQ ID NO: 550 - protein, 595 aa, synthetic construct
MTDRDPAIRTDPVRSLIDPPQGTAQAVSYLRVSTKEQAEKGGTDEGFSIPAQREANRRKAEQLGAVIVEEFVDAGESARKADRPDLMRMIKYVKQHRVAYCIVHKVDRLARNRADDVTIHLALQESGVMLVSATENIDETPSGMLLHGIMSTIAEFYSRNLATEVIKGMTQKAASGGTIGKAPIGYLNVRERDELGREVRTVDFDPDRAPLVEWAFKAYASGDWTVSQLHDELTSRGLTTPATPKRPSKMLAVSSVHRMLTNPYYKGEITYRGVLYKGSHTPLVPAEVWYQVQSVLTAHKTASEATQVHDHYLKGTVYCGQCGSRLIVSNAKNSYGNVYPYFVCSGRHAKRTDCSRQAMLIDEVEHLIEQYYQRVQVTHAQRQALSGMIHAEFDRLMSAEADELGQLTAHRDRLEHEQDRLLQAHYAEAIPLSVLKREQDRILGELDQVTRRIDAHYGEYTDARAHLDDALNLLENCAEIYARCDDANRRLCNQAFFTKIYIDEDGDVRAENARPFEMLLDPEVNADALTWAANADKAQTQPDDSSGQSSSLVRWVPPLGLEPRTHGLKVRCSNQLSYGGPPSVAAPTLQRRPVF

SEQ ID NO: 551 - protein, 537 aa, synthetic construct
MARRNPTASPLRVCIYARMSTDKQSADSPADQIAHCREYAAREGWRVVEDLVVSETGISGSSRHNRPGLLELFNRIDDWDVLLCFDSSRLARNGEDLGWIRNRLKLRQRRAVEVSTGFDLENIGAKVMGVFNEEYVAKLKVDVRRGLRGRVDRGRAAGAMPYGYRTEPCEDGSRIVVVPEHAATVRRIFCRYAGGSGLRAIAHDLNAEGVQAPRGRGWAPSAVREMLRNPLYRGEYLWNRSEWIKDHDTGRRCRIERPESEWVRQFDESWRIVTDAQWDAVQAAIGSRSTQVAKSRAGGRAYARHALSGFLECGECGGSFHALNGRERYGCAWRRDRGGQVCNSGLLVDRGALESRIFGAIRDQILVPEHVTYVVSRAIEEIQGSRADRDTESVRHRLGQIEVELERAVDLGVRTGGLDLATRKIEALRAEQSELLEQARTEPLALPPIEDLVPVIEARVRDFRWAFDSEPETIRTALRALLGDSRFAVRADAERGFAVEGYVALPLMRQTPGVSEDTGRLQRMVAGEGFEPPTSGL

SEQ ID NO: 552 - protein, 690 aa, synthetic construct
MNTKITPQHQSKPAYIYIRQSTLAQVRHHQESTERQYALRDKALALGWPQTSIRILDRDLGQSGAQMTGREDFKTLVADVSMGHVGAVFALEVSRLARSNLDWHRLLELCALTHTLVIDADGCYDPGDFNDGLLLGLKGTMAQAELHFLRGRLQGGKLNKAQKGELRFPLPVGLCYDDEGHIVLDPDDEVRGAVQLVFRLFRETGSAYAVVKRFAEDGLRFPKRAYGGAWAGRLIWGRLSHERVIGLIKNPSYAGIYVFGRYQYRQRITPQGEVHKRVQPVPKADWRVHLPDHHEGYISPEEFERNQARLAGNRTNGEGTVLSGPAREGLALLQGMLICGCCGRALTVRYQGNGGIYPMYLCNAQRRQGLATRDCMSVRSDLLDNAIGEAMLAALRPAELELAVTALNELEQRDQAIMRQWHMRIERAEYEVALAERRYQECDPANRLVTGTLERRWNDAMLRLAAIKTEAAQFQSQKARVATPEQKAQILALARNLPRLWRAPATPAKDRKRMLRLLIRDITVEKLPATRQVVLHVRWQGGTCTDTTVTLPKPVADAMRYPTATVEHVRKLSQHLSDPQIAAHLNQEGLRSSTGKSFTLSMVKWIRFRYGIAATNFMRPDELTVQQLAHRLGISPHVVYYWIERQVVHARKLDGRGPWWITLDPVKEQQLRDWVRTSGHLRGQHSHTQL

SEQ ID NO: 553 - protein, 503 aa, synthetic construct
MGILVGGYARISDVGELGDGRDGEEGVTRQKEDVHDLVKVRALTLHRMYVDNDLSAFKRRVKRPDFDELVSDLETEVIDGIAAYNIDRVTRQPRQLERLIDIYERARRPMVFATTAGDYDLSTDDGRFNARLYVMIANKFSADAARRVARQKKAEAMEGKPHRGVAPFGWKDGGKEAEPFEAELINKAHRDILNGKLLSEVHLEWVELGVRSRQTPPGRNITYTSVRYILTNPRLCGYRVYVPQAEREKRGRLDLSEFVLERADGTPVIGDWEKICSPDQWRAVCDVLKSRAISGRGRKKGSTVTKRLLTRIARCGECGGGMLTMMYTRGTTSYERHGFFYTCLKSAGGCGGVSRSGPPVEEFVEAALLAYLRRMAKALRSGTSEINPALVKARAELDQVKAEIAEARQLRESGEFPLKEFVREIKRLDDRRDALEIEVATLNVSGMESSTTAAERIAREWETYTTPMKRAAIERFIEAVVIKKQPRGGNHAFRPDLIDVIWK

SEQ ID NO: 554 - protein, 522 aa, synthetic construct
MRKVTRIDGNNALQAFKPKVRVAAYCRVSTDSDEQMASLEAQKDHYESYIKANPDWEFAGIYYDEGISGTKKENRTGLLRLLADCENKKIDFIITKSVSRFARNTTDCIEMVRKLTDLGVFIYFEKENINTQRMEGELVLTILSSLAENESLSIAENSKWSIRRRFQNGTYKISYPPYGYDYVDGKLFINKEQAEIVKRIFSEALDGKGTQKIADGLNLDKIPTKRGSHWTATTIRGILSNEKYTGDVLLQKTYTDENFKRHYNRGEKDQYMIKDHHEAIISHEEFEAAQEILKQRGKEKGVIKGSSKYQKRYPFSGKIKCAECGSSFKRRIHGSGDRKYIAWCCTKHIKDASSCSMKFVREDAIHQAFVVMINKLIFGHKFILRPLLQSLKKTNYSDNITKIQEMETKIKENTERVQMIMGLMAKGYLEPALFNTQKNELLKEAAILKEQKEAIKRAIDGSMTALVEVEKLLNFATKAEKQIDAFDSDIFEDFTREIIVFSQEEIGFKMKCGLNLRERLVK

SEQ ID NO: 555 - protein, 533 aa, synthetic construct
MIKIAIYSRKSVFTGKGESIENQIELCKNYCNTYVNSGSNLEYIIYEDEGFSGKNTNRPEFQHMIDDIKKNKIDTLICYRLDRISRNVADFSSTLELLQKYNVNFISIKERFDTSTPLGRAMIYIASVFAQLERETIAERVRDNMIQLAKSGRWLGGNIPYGFNIARKTYISDFKEKEFSILSPNKKELETVNFVYSYYIKTHSIRQVTRLLNVNSIIGKNGGSFDLTQIRRMLRNPLYVISDDKSHQYLIKKGLNVFGSPNGNGYITYNKSNQKNISADSNQWIVAVSNHKGIITSDNWLKVQYQLDNNKSKMPRIGTGKNHSLFSGILKCKKCGSNMIVKFSGKNKNNIPYEYYVCSGKQNKYLNKCTTKNIRVDKLDKLLTRKLKIHNKTALMKTLRDSIDNICCDFKNNQISSIEYEIHENKVSMDNLIKQLAKSASSTVSDRLMNEINLLDKNIVRLKKHLETIELEQSHDKKTNIDIKNIINVLNSFSDTIEYIDDTAQKRFLIQTLIKSAVWDSDNNNVEIIFNTH

SEQ ID NO: 556 - protein, 551 aa, synthetic construct
MKVAIYARYSSDNQREASIADQFRMCRLRAEKEGWTVVEEYSDHAISGSSMIQRPGIQAVIMDSTRGRFDMILAEALDRISRDQEDIAGIYKRMRYADVRMFTLSEGEISELHVGLKGTMNALFLKDLADKTRRGQRGRVEAGKSGGGNSYGYDVVKKFDANGEPVRGDRTVNEAQAEVVRRIFRDYAAGKSAKTIAFALNRDHIPAPSGGDWGFSTINGNPKRGNGILNNEMYVGKIVWNRQRFVKDPDTGKRQARPNPESEWVIQEAPELRILNDDLWDAVKARQGEMRTERDESGLADVSKMNHRRRPKYLFSGLTRCACCGGGYSAISATLIGCSTARNKGTCDNRTNIRRDELETRVLNALRTRLVDPELFARFCEVFTQEMNRLRMEGRAGIAGAEAEMAKIDRELAKLLTAIKSGGPIEAIVEDMKRLEGRKAELRSFLAEAEEPPPRLHPSMALQYRKRVQQLYEALQDEEEEKRIEAADILRSLVDKIVLTPVDGKVEIDVQGDLAGILMISAQTKNPAGERGGSQVKMVAGAGFEPAAFRL

SEQ ID NO: 557 - protein, 480 aa, synthetic construct
MRASIYTRISADHVGGGLGVERQRQDCEELATRLGWEIVEVFSDNDVSAYSSKPRPAYRRMLEAIEQGRVDAVIAWHTDRLHRRPSELEEFITLVEQHGVAIQTVKSGNLDLSTSAGKMVARLLGAVARAEVDSARDRMVRAHEQAAANGQWRARRRVFGWVKGGSEVVPAEATAIQAAAKAILSGTSLRAVARQWNEAGLETTGSAAKFDASAVRDILASPRCASIQVYKGREVGKGNWPSILTEDEHRALVALFANPARRRSVSYERRYPGSGIYRCGVCGAPMESHSDAKGERSYRCTESTSHVSRRSTTLDEHIAEQVLKRLARRNAHLLLERREDGVDLGALQVERDGLSERLSQLAGLFAAGDIDAAQLRDGTAALRTKIEAIDAKLAAAQTSSPLAGLVMASQSGFLVEQLWNDLSPDVRGKVIAELADVTILRAPRGQRKFQPEFVKIDWRKPLELTPEEAAPIVKLVQAGR

SEQ ID NO: 558 - protein, 456 aa, synthetic construct
MRAAIYTRISLDQTGEGRGVERQLDDCLKLADQLGWEVTARYDDNDISAFSGKARPGFESMLDGMKRGEFGALLCWHTDRLYRSMKDLERLIDIAEERRVQIRTVQGGDLDLSTSAGRMVARILGSVSRQESEHKGERQKRANAQQAAAGKWRTANRPFGYTTSGRLLESEAIHLRQAMLDVLAGKSISQVAREWNALGLRGTRGTSWSSPRIRRLLVNPRYARIPVYRGKPVENVVGDWDELIDVDTHRGLVAFLCDPSRLTCTSFEKVHIGSGVYLCGICDAPMRHAFAGRPRVRRYECSAKQHVTRRGEPVDALVEELVLERLSSPQVRLVVDSGEKVDVAELQAKRAALQARLDELAGLFAEGSIDGSQLRRGSSDLRAQVSAVDSVLADLAHTSPVADLLAAGEKLRERWAELTPDIKSKVIRETVTIRIMPAPRGYLPFKPELIAPEWKV

SEQ ID NO: 559 - protein, 567 aa, synthetic construct
MNRTLTISDYRQVDTSKLSDITVVYCRLSQDDGLDGDSNSIINQKNILLDVVAREKLLNPVLFVDDGFSGTNFDRPAISEALRLVENRQVSNFIVKDLSRLGRSYIKVGQLTEITFPSFDVRFIALNDGVDSNKPNETNSIFLPIKSLMDEMYAADTSKKIRAVVQAKAKAGERVTTNPPYGYLKDSSNPKNWIIDSVASEVVKRIFQEAKSGKSLSEIAKGLENDKIFKPDRHRIEIGLKSISSSPNVETLPYFWTRETLSAILGREEYLGHTVNLRTRTKSYKDKRKVDNSKEDWLIFKNTHEAIIDQETFDIVQKMRSHKRSNQRYKNRAGHENLFAGLVFCGTCGRKHYFCPQEKNGLNHDHYKCSAYRKPIDGCENPHYIQKSALIEIVSDKLRQTIHECQLDQETFLKKIEQQSQAQFCKDSKRQQLQLQKDEYRSKEIDSIIQKLYEDNLLGKISDERFVKLSQSYEEEQKQLQTSISDLTEKLTKQQEDSLNISKFMARILKYTELPELTVEIVNELIDKIVIHKPTGTKRNRIIQIDIYYNFIGKLNNEKSEPNDLAR

SEQ ID NO: 560 - protein, 550 aa, synthetic construct
MSVQNIKKAYCYCRVSQKGQSTANGGFGMTRQQNLLLSYVQEYEAKEKDKPKDKTKDDLSYDLSIDHMEYLNAEGVSGFSGKNIDKGSVLFNFIEQCISGAISNAVLIVENLDRFSRANPQRAARILMDLLWADCHIHETELDIIHTKNSKLIDIATGLERSHKESLRKQKLSTKNWDKRFQNVVTDQKALTAKCPAWLHVESGKYQVNEYHAEQIRLIFELYNSGYGQAFIRDTLNDKGYLYNSNTWGSWLVHRILNDRRVTGSHVTQSSLRGEYDGLKMYPVIISDTDFSAVQQRLKSPGRDKKINRNANNLFAGLTVCSYCNTAHLSVMTDSKNNQRYFYCTNKTAGNGRCNTRGFKYDIVENAVLQYIRNIEFEIVDDKNINAELHALKTDLITKMQYRDEVLADINKVDIPDPIDRRAYKALQATIINLETQIKNLESLDDVSTEVKAIGNAISPELLDRKNVAMRQDFNARLRRVVKEIGVFRNENTLLIRIEYFSKINMQMIIVDAKTGRVILQSISDEGGLIIDTISGNRERHNDGKWVKIE

SEQ ID NO: 561 - protein, 506 aa, synthetic construct
MRTVITYLRFSSAIQGAEGADSTRRQNDLFKQWLKKNSDAQVVASFSDEGLSGYKGKHLTGQFGDMLARIESGEFPEGTILLVEAIDRIGRLEHLETEALMNRIIAHGIEIHTLQDGLIYTRDALSDDLGISIIQRVKSYVAHQESKQKSFRVSQKWKQRAKLALAGEQRLTKMVPGWIDPDTFKCNKHAETVRLIFKLLLDGESLHNIARHLQANNISSFSRRKDANGFSVHSVRTILRSETTIGTLPASQRNDRPAIPNYYEAAIDASTFNKAQEILDKNRKGRTPASDNPLTINIFKGLFRCQCGASVHPTGTKNKYQGVYRCNNHLDGRCDVPPLKRKPFDKWMIDNFLGMIDVGNDGEAEGKIASLQHEVEIVTTRIKKATALLLEMDDITELKAQVKELNQKRTELQTTIDSMRRKTSLSDKGLPQLKDIDLMTKAGRVECQLILSKHLKGLTLGKDSVTVTLQNDTEITIPTNPLPLNDGTSIFEIAEKELLEIDAYQL

SEQ ID NO: 562 - protein, 629 aa, synthetic construct
MPQLYSYIRWSTDRQDKGTTRTRQVAAAKAYAEEAGLEMVEIIEPGVSAFRGKNRAGKLGDFIDAVKNAAIPSDSWLYCENLDRLSRDQVDEALRLFLELIGLGLTIVTGMDRKVYNRDTIRQNPTDLMISILMFIRGNEESETKSNRTVGNVVALVERHKEGLPVNIKSVGRHPFWIDDTGSQYEAVKKHPFYWNIAREIIDMFLSGNGVYSVKKYLDEKYPNGLKGREWDYQVLKKMRDNRALIGERTINLRGVPYKLENYYPWLCKDEAEFFLLEKRKQQNNYKSKKEGADTIKLLSGLSILRCSKCGGTMHSFMNHGKARYICTNGVHLQKNCSGWSITAQLVEHCTMIALLIGYMDKSRKNGSDTTLIEEELNEKEKLIKALDSKISNLVTAIAIAPDVNSLAHSLNEINSKRKELVLSVEKLKERLVSFQGKGSFEVDIMEFLILIQWAVFTNMEDNDRDKIRKIIDAIIEYIVVDKTNDCITIKIKYYGNDEVLVFGGVDRKPHWRFSIDFDTGKEGALTVLENDLKDVPEIQKAVSYLHKLEKGYLAMYDSAVTMLAEVGYPEIKGTQFWPNTGKHEKITVAFDGVEHTISFNGRLPKAIASAIEKTGLTRQQFIEKFKIQ

SEQ ID NO: 563 - protein, 526 aa, synthetic construct
MKNCYLYRRYSTSKQSKGSSLERQQLLADRWCATNDGQLLDVITDEGYSAFKGDHISQGAFAGVLSAISSGVIPAGSYLLVENIDRLSRQAIGDALTTWMNILGADINIVTLMDGKIFTKESRNDLGSMLTYLVTQERAWSESHAKSVRTTNAIKAANTRLLNGEVARVTRPASWVTFTPSGYELNHKADAVRRLFELYLSGLGQASTAKQLNDEGVATLSGRSPKWSSASVRKVLLNENVTGIKNIDGNAVEVYPVVVTREDWLKAKDQLSSKSLGASITVGKVANPLTGFCHCGECSETMHYASSRSSAGVRYEYLQCASHRRLHKCGNVMFKLSHLFAVAKSLAAVLCDLPVEKDETQRLTAAVQDAALSLKDVRGRLATASDMAVKFPSEAAFSALSRLELEVTENTQHLEQAEIALASAKGVQAAPLIQLSAVRKLHLSDEASRREAAQIFRNSFESWVFNADGSSELLTKRHGVIYLDGAGRNLEIRAQSAAFEGIVSRFKAIPFVIGGKQGHITFDRTG

SEQ ID NO: 564 - protein, 500 aa, synthetic construct
MEKVAIYIRVSKKEQSKDNGSESSLNIQLKKCLDYCKEKNYEVLKVYQDVESGRVDDRKEFNELFESISKKIYTKIVFWEVSRIARKISTGMKFFEELELYKITFDSISQPYLKDFMTLSIFLAWGAEDIKQMSLRIRSNLEEKTKAGYFVHGNPATGYMRGENKMIVPDPEKAPFILKIFETYAETHNLSEVGRRFKKTRSDIVEIIDNKIYIGFVPFRRYVKELNEKKRKESRKNIKWYKGLHEPIVPLELFEFCQSLREKNMKVRASFGNAKPYLLYSSLIYCKCGHKMYQQKRKKSYETKNGKVVRTYYSYTCVNRKCRKVFSAKTMDKAIKDLILNSKELEELNQYSSKDKKNEEKKFLKLKNDLKLLENEKERVINLFQKGYINEEELDNKFKDINNDLKITKEKVSEFEKILNISTPKDIKILEKLKFIIENYDDEDIIETKKILKILIKEIRIISFKPLKLSILFYWKATLYKLLFFTGVIYLKKRSDVNGR

SEQ ID NO: 565 - protein, 522 aa, synthetic construct
MATSLVRAVVGARVSIFTDGKESQITQRTKGTAYAESQGWTVVGAFEDLDVSAIKQSPWDRPDLKQWLTDRADDWDALVFAKTDRVFRSAADCVKLSEWCRDHKKILVLVDDGIKLDYFHPDSQQDAFAGAMSKVFLILASVFAEIEGQRFVQRALDRVTQYRHQPRWAYGVPPYGFQVVDRPEGGKTLGHDLEAQQVLQGIATRLLSGDSLTRITADLNETGVLSPADRLRQRTGKELRGSRWTVITVQTILTNPATQGIKTAKGKPVLDAGGEPVRVGPPSFDSETWGRIHSELAQRSQSGQQRRHSDNPLLGVAKCGVCGKNMRHFQRTKGGRHYRYYICGSTPKACPGVLINADNAELAVETSFLDVHTNRRIKERVWRAGSDHSAELEQTTNTITALWEDRALGLFTTPEDQDMFRSQMAALVAKRDALAQTPVIKAGWVDVETEQTYGAVWPDATPVERRKMLTDAGMKLTVYRANKYETYVDLDKAIGEGSVGEELHSELEARAADERRRFGIPD

SEQ ID NO: 566 - protein, 697 aa, synthetic construct
MSQKISAEHLCRGAVVYVRQSTMSQVVEHTESQNRQYALAESARAMGFASVTTIDDDLGRSGSGSVERPGFQKLVASVCAGSVGAVFCLEASRLARNGRDWHHLIDLCALVGTVVVDHDGIYDPRLVNDRLLLGLKGTMSEYELSLLRQRGIAARDSKARRGELRFALPPGYCWNELGQIEMDADERVAEAIRVLFRKFRELGSARQVLLWAIQSDVKLPVTRHGPAGIRIEWSRPAYHTVVQILEHPVYAGAYVFGRTTHRTAVIDGRARKTEGHSKPMRDWSVLLRDHHPGYITWDQFEEHQRMIAENTHMKKRASRRSARGGRALLTGLARCGRCGRMMRVNYGTRAGHAHRYYCRGDEAHVGAFRCIGIGGIRIDKAVAAAILEAVSEHAVEAAVRAAQQTSRAGDDVRRALACELEEARYDASLAARRYEVVDPTKRLVARELEGRWNTALERVAHLEERAALLDREVASRPAIDQTQLMTLARDLPAAWNAPGTDMRTKQRLTRILIQEVVIDLDDITNEAVATVHWTGGRHTELRVARVNVGRYPSSQHFSAVEVMRKLGGQWPDRELAVTMNRMRCKSPDSRTWTTVRVTEMRERLGIAPFDPTASHAETISVEEASRRLGIYGSSIHRLIREGILPATQLMPSAPWQVPVAALDSDAVRAGVQAIKDRRPPHFKARQEADKSLKLPGF

SEQ ID NO: 567 - protein, 471 aa, synthetic construct
MTVGIYIRVSTEEQVKEGFSISAQKEKLKAYCTAQGWEDFKFYVDEGKSAKDMHRPLLQEMITHIKKGLIDTVLVYKLDRLTRSVVDLHNLLSIFDEYNCAFKSATEVYDTSSAMGRFFITIISSVAQFERENTSERVSFGMAEKVRQGEYIPLAPFGYVKGPDGKLIINEAEKEIFLHVVNMVSTGYSLRQTCEYLTNIGLKTRRSNDVWKVSTLIWMLKNPAVYGAIKWNNEIYENTHEPLIDKTTFDKLANILSIRSKSTTSRRGHVHHVFKGRLICPQCGKRLSGLRTKYVNKNKETFYNNNYRCATCKEHRRPAIQISEQKIEKAFIDYISNYTLNKANISSKKLDNNLRKQEMIQKEIISLQRKREKFQKAWAADLMNDDEFSKLMIDTKMEIDAAEDRKKEYDVSLFVSPEDIAKRNNILRELKINWTSLSPTEKTDFISMFIEGIEYVKDDENKAVITKISFL

SEQ ID NO: 568 - protein, 484 aa, synthetic construct
MIKVAAYLRVSTEEQAEQNISLPLQQSRLLAYCESRQWDLFDFYIDDGYSGKDLSRPNMSRLISDAKASKFDMVLVVKLDRLSRRQQHVMYLIEDILIPKNIGFASVTENFDTTTPMGRAMLGIMAAFAQLERETIVERVTDAKKEAAKQGRFMGGISPYGYSHDAATKSLKVDPLQADIVRFIFDEYLKGQVGYQGIADILQTRKVPPHTAKQWHRTTIRAILSSPFYIGMIPHKGVLHPGKHEPIIDPEKWDEVQRLKQSRGGSRPVAQNCGLLQGIVYCGECGARMRYKLVNQTSGTASRYYACYSQEGSPRYMVKDINCKPGYKIIDDIDAKVVEQLTRISVDEDYYEQITRDVFKEVDTSELESALLKAKKEHGGIKGRIDRWASAFESKGIDIDEYLERTKELKNRRYYLESEMQSLEERIMAQSSKSTSKIELLESLKNFKHIWDITSEEEHKSILAGLVKRVNVFADGHVGIEFED

SEQ ID NO: 569 - protein, 530 aa, synthetic construct
MMYQMGVYCRLSKDDGENKVSESIENQMKLIREYVTKSEDLEIADIYIDDGYSGLYFANRPEFQRMMEDIYKGKIQGVITKDISRLGREHIETSNYIERVFPSLGVRYIAILDGVDSVHHSNEELAQFKTLFNDMYSRDISKKIRGALTAQKKRGQFMSGFAPYGYVKDPADKHHFLVDEEAAKVVRRIFYMSLEGYSRDGIAKKLNQEGILTPSEYKRKVQGLKYANALEKAGAKGWAYPTINVILRNRVYTGAMVQHKSEKISYKVEKYQYIPEEQQYIVEGMHEAIISKDTFEQVQELMKKRTRTPGFNSEVRKVNPYAGIIVCGDCGYNFQRVTCRDGYECGTYHKKGNTVCYSHFIKKEVLDSIVKNEIQRQAELALKESDKDEILKVADRKKEVQRRCAEADQQIERLQKELAAVQKYKKKTYENYVDGVLDKEEYLSYKAEYEKQDKDIRAKIQLAEQEKDSFGEAEESYENWIEKFIKYGTLSEVTREIVTELIEKIVVNGDKSIDIVFKYQSPYPVEKQAV

SEQ ID NO: 570 - protein, 552 aa, synthetic construct
MKDKLYIYCRVSTSSQSDEGVSLDVQEQRGIEVSKKNNMKPISIKEQGSGLKSYSEERPLFSNLMNKVSDGEVKHIWIDELTRLTRNDVDLPFISLEMKKNNVNLYVGKSGQLKEWGFETKLLDTIITMVNQNQIKTQIRKSIRSKRRLFTEGCYMKGQSPFGYDLKDKKLVLHPTNSQWVEKIFDFYEKGKSTTWIRTHLFENQVKPPMNWKTQNDWFPDRTIRVILGNQNYIGIDTYGELTNSCPQIVDKKVFRSVQKKLKQHNRIDNSEKIDFLLRGIIKCGDSSSMRTLGKKKSRKNPLYSCVHRDRQYKNRSNNKITCKVSRSVRTDIIDNYTWELLCRTLEQSSMIKEQVKKDIIGTKKKGYTKRSVNITLKGLNRKMVELDKNTLELEKRFYTNKIDQKKFDILMESISDTEEDLLGQIDDLKLQLNSIKENSQWIDWLEIHFKRIDKIRNTSDLIEKKKLINHYIREILVLEYDDETHQHKIVFKFRFPLFNDKIEWIKNKNGTFKLDKHGRRKYKIIDGKDEIKLSSPSNSHSTVTDFARFLG

SEQ ID NO: 571 - protein, 491 aa, synthetic construct
MQRMTSLRAAIYVRVSKNRTDDSAKPERQIKSCSLLGKAKGLTLIAEPFVDDDVSAYKGKKKRPQYEALLDLIKAGEVDVVLSWHIDRMLRTTREMLEFITLAEETGVSIESVQGGSLDLSTPAGRMVATILASVSQAEVEMKAERHLLKNEQTRQAGGSTGGPVPFGWTLGEKVGHSRQFIVDEDAAKAIKTATTALIEGSENLSQIARDWNAQGLRTTFDKPWNHNSLKKVLVRPRNAGLVEHHGSILEGVEASWSPLVSVEEWHAVCSVLDGQRRAQSPRKHLLSNLLTCAKCGKPLVAGMTVKKVKGREYRYEQYKHAPGQGTGCGASIERTMVDKKVRTYVRHILTFQKIESLVPQSHDLTSALSLRSEVAGIEKRMQELEDLWADGEFSTDGYKKQRKALSEAREVALKGLAGLTERNAFAGLLSGLQKASFEDSVKMGQQFDALSLDHRKTVVSALFPKIVIEPGRGEDRVKLYNADGEEFELT

SEQ ID NO: 572 - protein, 577 aa, synthetic construct
MSNNKVEVIEASLDRIDRKNSKEIKRLRVAAYCRVSTDSNEQLESYQSQVRYYKDLINSNENWEYVGVYADEAISGTQVRHRQGFQQMINDALDGKIDLILTKSISRFARNTLDILQYVRLLKDKNVAILFEKENINTLDMAGEMLLTILSSLAQAESESISRNVKLGLRMKMKRGELVGFHGCLGYDYDPETKTLTINEKEAEIVRYIFRRYVEGAGCFTIAKELTQLGFKTKNGNSTWHESSVRRIIKNEKYKGDVIMGKTFTVDPISKRRLENFGEETMYRIRDHHEPIIPREVFDKAQEILQKRSARHSNKGRGEKYSRKYAFSSLIQCGFCNSSFTRRTWHSGTKYEKITWSCVTAIKKGKKNCPHSKSIAEKDLESTFIDAFNLMISKNKQITEEFIKNVETTLSNSGTIKKLKEIEIKTSEIEKKIDNLMNLYLEGTLRKENFEAKYAELLNELEKVKVREKELQSIVNEEGDLKNRIAAFRKLFEDNKFLEEFDREIFETVIDKILVGKIDEEGVVNPYSITFVFKTGLEIEKKDIDNNLYLHSTHDTCGVCGIDVKGGKIGTNRNIDK

SEQ ID NO: 573 - protein, 483 aa, synthetic construct
MMVPRGDESPVLPAIYARISEDPLGLERGVGRQISTGRDLASRSGWTITDNLIFRDNDISALTGAHRPGYTALMQAVAAGEVNTIIVYQLSRLWRNRRERAEGIELLQKAGGRLLAVRGPSFDFTTAYGRAQAAMLGEFDSMESEVKAERVADAAYQRAVEGRANGRVSFGWRREYIRDDRGQVLGFNDVEDPHQADVVRWIVDQLLAGVSLDAITKQLNDRGEPGPTGGTWGDSSVRKIALRPMNIGDRVYHGKVIGKSAAGPIVDPVRHAMVTAMLSDPARATSRSGARRHLLSYSADLAVCGVCGGELRVGKVGKHVLYQCEAKGCVGRNQTRVDEYVGLVLVERLSMPDAAALFVRSDDSAKRAHAEADELRARLSAAADDYADGLITREQLTRITGQIRPKLEQAEATSRRAIPGVRPDLMRQMIADPEATWQGLGEVSSRHALLVGVGMFVRILPTGRGPGFNPDAIEITWPGISGG

SEQ ID NO: 574 - protein, 559 aa, synthetic construct
MSKEKIKVYLYTRVSTSIQIEGYSLEAQKSRMKAFAIYNDYEIVGEYEDAGKSGKSIEGRKQFNRMMEDIKSGKDGVSFVLVFKLSRFARNAADVLSTLQIMQDYGVNLICVEDGIDSSKDAGKLMISVLSAVAEIERENIRIQTMEGRIQKAREGKWNGGFAPYGYKLEDGKLFINEEEAVAIRTIFDQYVNTTIGANGLSKYLENHGIRKIPRQNGKNPLFDAGLIRKILKNPVYNGKIAFGRRTLEKVHGTRNEYKQVEQDEYLISEGIHEAIVSDEVWQAAQVKLKSQAKKYEHVNKGKDTRTHLLSGIVKCPICGAGMFGNKCTKKKKDGTKYKDFYYYGCKHRQMIRGHKCTFRKQIREELLDDAVAEVIVKIVSNPKFASMMQEKINMKVDTSEIEKEIDNYQKELRKSHSTKFKIIEEIDNLDVEDKHYKRRKQDLDDRLYRMYDKIDELESSLIDAKAKKQTIEAEKLTGDNIYKVLIYFDKLYKVMNDVERRQLITALISEIQVYEEKQPNGQWLKSITFKLPIIDDDLNISLDNNEQVECVSLLEKRS

SEQ ID NO: 575 - protein, 481 aa, synthetic construct
MAVDHEKPRRAGIYVRISQDSTGKKAGVERQLKECKTLARRLKWRVVDTYDDNDISAYSGSMRPGFEALLDAIEKGRIDAIVCWHPDRLYRRVKDLQRLLEMTDAGVVVTSVNGGELDLSTATGKMVARILGSVAEQESEHKGERRRAANLDRAIKGAWRADGPRVFGYTQGGNGEPGEPVPDEAKLLVQAAEDVLNNVSLRSIAVAWNQRGLRTPQAKTGKKKGGMPWSNLSLRRTLMRPVYAGLLTYTDPEGKRQLTGGDWEPLWTVDIHEALVQVLTDPERRPASRFERKYLGSGIYVCGVCGDRLYANCPRPGRFIYRCRKAHLGRTGAPIDEIVEAVALSVLSETNIVERLVKQEPGIDTVTLRAERTALEARKAGLAELFAEGVLDGNAVRRESEKLGIKIAAITTALTDAARRCTAATLLVDGPEQLRTHWAAASPDIRGKVVDELMTVTVNPQPDGWRSRGFDPSLIVIEPRS

SEQ ID NO: 576 - protein, 502 aa, synthetic construct
MKAVMYLRKSRMEELSNEEETLERHKKSLTEFAKTNKISIIKIYEEVVSGDTLYSRPQMLQLLADVEANKYDAVLCMDIDRLGRSSMSDQGVILETLKQNDTKIITPRKFYDLNNDIDETYSEFESFMARQELKIIKRRLHTGIKRTIKDGGYIANAPYGYDKIYKDKIPTLAINEDEAVFVRMIFDMYVNQGIGSLTIAETLNSLGARPRRSDKFGRTSIVAILKNQVYIGKIVWDKKKHIKKGTKNNTKHITIYNKPEQWTVVDGLHEPIIDKELFESAQEILKNRYHPPYYKGTVENPLAGLVKCGNCGRTMQRQYMHRGERGEWETILCMNKGCIPSAKLAYVEESILHFLYDEMNNIAVELKTEQRPKKDITLLEAALDATEKEISTAKQQRSRLHDLLEQGVYDIPTFTERSKALEEKLATLQEQATAQHDAIKKAQGTNKLKMYKKIKSVLQAYETADAQKRNMMLKSIIREIVYKKEQKSKPHDFALSISFKDL

SEQ ID NO: 577 - protein, 552 aa, synthetic construct
MARLISYLRMSTSEQLKGFSLERQRKLIADFALRYGLSLDESHSIEDIGRSSFSDDAEQRQLARFFTDLDAGKFSPGDVFALENIDRLTRRGPIDAILKVNAIISKGLKLAIISTNEQKIIEDVNDVFTIINLSIDAARSHGESKNKSDKGLSNWEEKRKLAASHGVAMTAQAPAWLDTEIFYLMDETKGKQIKRRRYVLNPEKAETVRLIFELFQNGNGSLKIKNILNERNIPTFKGAEYWEPSIISKMLRNPATFGFYQPQKQGTGKRDLIPAGEPIEGYFPAIVSRETFEQCQRITAANSTRKGRKGKLFTNLFTGLLKCVDCGGPVHLLNPGIDKRAKVPKSVNYIVCKKGKFTRECILKRLRYDDFEAVMLNAIQEINLADVLNENNPLEQLIKQIRAIETKIEKNQKLLENFQKSFVETGDLPAFMIEAAKNAETANKALEIERIELQVQISQLNVYNANIENAIEELKNNGTYETRAKINLLLHEIIKSINIDFELVDFAIIFKNGVKRFVNDGIIQNVFIAKSFSEQSFRELEEILNYKPPEKI

SEQ ID NO: 578 - protein, 542 aa, synthetic construct
MTRVALYARYSSDRQNERSISDQVNVLIQHAAAKGWAVVGTYTDAAISGSAMANRPGLLAALAAADRGEFDLLLAEDEDRLARNLEHLAHVANRLADIGAGIATLSTDQVQDMHVAFKGLIAQDFIRNLSMKTKRGMASNAEKGLATGSRLYGYRSQPGGAVEIVPDQAEVIRRIFSMYVNDRMSSREIAERLNRDRIPSPAGRQWNASSIQGSRQRANGVLHSEIYAGVKVYNRVEMRKDRQTGRKITICKPPSEHKRIDVPHLAIIDQDLWRAAQQRLDSRQTTDPSQRASLRRRPGLLSGLTKCGCCGASYTSLSQGRLVCAAYREKGASACDNNRHVNRAEIEQRVLDGLRTRLVAPDAVAAYVRAYHAAWAEQAAQVEVRRRPLTRRIAEVERAIERGADALLSGATAAAVIGKKLEALEIEQAQLKATLEQLDAEGAPPVQLHPRAAENYASKIEQLQARLAEAAGSTDDADRDLIGSVRGLIQKVDIEPINKSRGSPVRVTLHGDLARFVLPQHPPASGCALVVGGGIEPPTCGL

SEQ ID NO: 579 - protein, 673 aa, synthetic construct
MIGEETLREEIFQYDKTKFKGICVPYARFSTKGQSKVGKKSLERQLSKAREYAKRNNLFINEDLIFTDKGVSGYSNQGELSKAFKKGQMATMLLLLEEVPPEERDNVYITFHNFDRFSRMSPDAAQAHFNKILNRGFKIVTTIDNQLYDRRDKGMSNMLISIIKMTTAWQESLNKSIYITDALSRKKKVIEYLYNHPSQKGKHKHIGVVQPSIPRWIDQENITYAYIDADGSKRTDTFKKFSLNQYKAEVVRKIFELKIAGLSYTRICQKLNNDGVEVFKQGRFKKAKKWHPYAVQNIITSDKVLGHITLKEMVTEEYHCKETDEIKTKKVKKKVTSKLENYYPAVVDEEVFRLANVLKFQEKKGKPLGRIGERTNIFATFMSCYCGATLQYSRSQINKRSNKAPVYREQLRCNNALVKNGCFDDYINYVELEQAFFKYVNHIDFREVCLVGDKSLETEIKNLQAEITYLNGQKKELKLKNSGLEKTFESAISQGLNADYVLVALNEAKKSADLIETKINDLKVRITKLQLSLDSKESDFLDIVEYSKRIKNSSTETKIMMRKKLNEFLHSKIKWMEVCSSKHSKFVILCFHDDVIRTFAYGENYANDLMFNTIKISYEVDDSQLNYELFLIYIHQIKRSLRGETEVVSNRDLIEALQRLKRKFYAGKGINYV

SEQ ID NO: 580 - protein, 457 aa, synthetic construct
MRCAIYRRVSTDEQAEKGFSLENQKLRLESFATSQGWEVVEDYVDDGFSGKDTNRPALQRMFSNVDKFDVILVYKLDRFTRSVKDLNEMLETIKENEIAFKSATESIDTTTATGRMILNMMGTTAQWERETISERIKDVFGKLRENGIFSTGHPPYGYRCSGNKSIEIVEEQAEIVRYIYELSKTMGLFKISVELNRKGIKTRRNNKFGQSAVKRILHNPFYCGYMEVNNKWVPIKNEGYIPIISEEEFKTTQKILTKRNKAQTRSRSVSYYPFSGIVLCPECQRAMRGDRAKYGDYYYRYYRCVYGRENINCTNRKRIRAEQVDKAFAEYISGSFENTTIKLDSKDIKSDIEYELKHLDSKIERLSDIYIEGDITKSKYNEKMNSLLNEKEKLKKDLTSCKENVDAEFVRDQINKLESIWHLIDDKTKSESIRSIFDTIKIKQDKNKVTIMDHTLL

SEQ ID NO: 581 - protein, 536 aa, synthetic construct
MTDPTLTRSKKPAYIYARFSSLEQAKGFSLERQLTTARSYIERKGWQLAEELADEGRSAFKGSNRDEGAALFEFESRARSGHFKNGAVLVVESIDRLSRQGPKAAAQLIWSLNENGVDVASYHDDQVYRAGSGDMLEIFGLIIKASLAHEESDKKSKRAKASWEKKYGDIEAGSKKAITKQVPAWLTVTADNDIIENPARVKVVREIFEWYVEGIGLHTIMKRLNERGEPAFSGRETSKGWSKSAINHVLSNRAVLGEFATQQGKHIPVVYYPQVVSRDLFNRAEAMRATKTRTGGSSKYQGNNLFAGIAKCEVCDGPMGFVRDGGISRYTTASGEQRVYKSKGHNYLICDAARRGFGCDNKVHAPYATLEAATLQQLLWATIDDEEAQADPKADALRSKLDAVLHSIDLKNQQISNIIDSMAEAPSKAMAARVAALEAETDALGAECDELQKALAVQTSAPSLRDDIAQLRDLTELMNSEDEDVRRAARLRTNASLKRVIDHMTIDRAANVTVMSMDVGVWQFDKLGNRIGGQAL

SEQ ID NO: 582 - protein, 530 aa, synthetic construct
MTAVIYARYSSDSQREASIEGQLRDCKDYAEKNGITVVGTYIDRAYSAKTDDRPDFQRMIKDSGKKIFDVVLVWKLDRFARNRFDAVNYKYQLEKNGVHLVSVMEPISQGPEGIMVESMLIGMAEYYSAELALKVARGERENALQCKYNGGVVPLGFTIGKEDRLYHIDPETAPIVQEIFTRYADGEPAEKIAASLNERGLRTRTGKPFVKNSFFQIFRNRRYIGEYRYKDIVTPGGIPAIVDQDLFDRVQQRFEQNRIAHGRPAKEDVRYLLTTKLFCGKCGTLMGGESGTSHMGNTYYYYKCGNAKRHGKAHCDLKAIRKEPLERFVVETAIKVIFSDEIIEQLIDLIMEAQQQENTRLPVLKDQLRDTEKRLANLLEAIEQGILTPTTKQRLDELEARKEALNTSILEEELKKPVLTREWMRFWFEKFRKGDMRDMEHQRQIIDTFVNSVYVFDDRVVLNFNFTDDSKTISREEVLGSSAVDNAPPHKNPQTFVWGFLFCVGGEAQDENRAREQSDTIVKGRIPPSW

SEQ ID NO: 583 - protein, 453 aa, synthetic construct
MVEAIGYVRQSTLKQQSLATQQSLILNTAKQYGWSNVAFYDDKKTGRHTKRSGYQKMVEIITSGKCKVLCCYRLNRLHRNLKNAIQFFEICKKHHITIISVNDGYFDLSKEFDCFRLNILMSLAEMESNNISEQTKNGIREKAKQGKLITTHAPFGYRYRKGCFVVQEEEAYTVKSVYRWYLQGLGYKKISQHLDSNPNLIPRKPYQVRNILLNPNYCGRVINKYGTFNDIVPPIIDIDTFEEAQERRIHKQLNRSNSRNKLKRRIKCPYCQSTLTNLTIKKENYSLRYYVCPKNMNDAYRTCPFKSINAPELESEVLDTCKKYFEEQSFHKRLNNTILKVLKQQQMKHKETHLTQEQLIEKLAQNRIDVKTFKRLSASCKSEENYSTYSTYQIDDKLKYVIKNKITLQDIAPFIDCIKITQTKQLQGIYFKNSPLNIVEQSHLITPERNEVI

SEQ ID NO: 584 - protein, 560 aa, synthetic construct
MARTANRRAKAEEALLSKESGNSFQTAIYTRISRDKKEKPSDSIENQIALCESYIKKNDGHNLVGIYKDIAKTGTEFERPDFEKLVGEVRTGKVNCIIVKDLSRFGRNYTELGNFIEKIFPFLGVRFIAVNDNLDTFHMEDPNKSLEVILKNIVNETYAKDISKKVSSSHQMRIKQGGFICGAAPYGYTARKDEDGVRRLYVDENTASIVKEIFDAYLKGFSTLDISKLLFEKKVYIATDYRKFGKAKADENELIRAWIPTTILQVLKNRVYTGTLIQGRNQKHLFEGKKRERLDEEHWTITEDAHEAIISLDTFEKVQEKISSKSNSIKNSRKENKNAKDDTVFRGKLYCGICKRKMSVHMQKSGNKTVFYFSCNRFREFTTEKCGTSITEATLEKTVKAAFEAILLSNSKSYKAYLNAYDNLKIEMDKKKEKEITEIERKILGFSRLQSEYYEKYVLGKWSKEDFEREKGLLGKKKAELEILKERQVAIFEKEVFELEERHKYLTALFKGKTKKWDKDFVDSIIDKIFIGKDNTIEIKFNFEETPVITEKLGRKTRRS

SEQ ID NO: 585 - protein, 528 aa, synthetic construct
MHKNNSNSKARAYVRVSTLKDAQKDSPEHQEGLIRERALSDNVDIDQVYTDKGTATNIIEREDVQQMVEDAKQRKFNTIYFASLSRFSRDTLDAISLKRILVNALGVRVISIEDMYDSGKEDNEMVFTMISSVNQQQSENTSKSSKRGIRQSAKKGNFTGSVPPYGYKKVVVDGRKTLEVVPEEAAVVRDLYDRYVNQGMGEKSLTVYLNDLGIPSSKGGVWGLSSVQRILQNENYTGFLVYGKMESIKVYEDVNDLQNRRKKLVQRDKGAWEKTEFQTHEAIVSKELFDEAQRIRLIRGGGSRGGRRSYVNVFAKLIFCKHCGSAMVTMASGRERKSGDMTYYRYLMCSKRRRQGVNGCDNSSWVPYYELRDGLIQQIIERLSRVGEGIEGLDKAAEKQLTIQAKDFEKDITKLEKQISNNRRLLFEIRRQSMNDEIDTEQYEFEKSQYEKEIKESELKLMGLNKRSEELKNKERVLKEVGKSVNALKSITNLDDVELVRGPLSKLIQRIEIDKEGEVDIHSFLGRF

SEQ ID NO: 586 - protein, 547 aa, synthetic construct
MKLLATYIRWSTREQDSGDSLRRQTNLIDAFYSKHKNDYYLLPAHRYVDKGKSGFHQQHKAQGSDFRRMFENVMSGAIPEGSLIVVENFDRFSRADIDTAIDDVRQILRKGVSILTLGDGELYDKSALTDPVKLIKHIIIAERAHQESLVKQKRIAQVWNHKTQLARELKKPMGKQAPGWLELSEDGSHYIVDEDKASLVNIIYDKRLSGMSMFAICKWLNEQGYPTINQRKVRISKTKKPEGNWSALSVKHILTSRSVLGYLPAKISSEDRKTVLREEIESFYPQIVTDSKFYAVQQLLEETGKGKTSSGEHWLYVNILKGLIRCKCGLVMTPTGIRKPVYQGTYRCNGNKESRCSYGTVSRKLLDTQLCSRLFSKLSQLHDEATDTAKLDELQRRLNTVDSELEKLTETLIQLPNITQIQEALRVKQEEKDELIVQLSREKARVKSVSSLDLSGLDMESVEGRTEAQIIIKRLVKEIVVSGNEKLVDIYLHNGNMIRGFPLDGKDDHTLTLEEATDEMQSLDDMLIFGEPVTRIYPAGDMEEVDA

SEQ ID NO: 587 - protein, 479 aa, synthetic construct
MSNAVIYARYSSDKQSEDSIEAQLRACRQYAATKGYNIVAVYADEAISGKGSMTASRAQYQKMLRDCNKGTFDTILIHKYDRVARSLGEHVNLDARLQKMGITLIAVGQDFGLGPESKIMRALMWSMSEYYIDNLANETKKGEREIALKGLHNGGYPPFGYDIVDQKYIINPYEAEYVRKIFAAVKNHEGTKDIIAEMTAVGIVGKRGKPLKYSAVYEILRNEKYTGTYIYCVDEEKDRSKRRSKPNAIRIENALPMIIDKATFDEVQKIMDSRKQSGPKTSYLCSGLVYCSCGAKMHAHISTKKGHVYHYYRCSKKCGAPMISMDIVDDAAKTYLRTLLSEENQKAIANAMRKYKCGEPERAADFKKIVASKISEKQKQYDTLMANMSSGVLPADVIEDIGAKMNQLRSEIEALKKTEMPKDYTTDQISLWLKALHDSPDDKAIRLLISRIDIKNTTEINIQSTLTSVVGTTGCGSWI

SEQ ID NO: 588 - protein, 551 aa, synthetic construct
MSGMNTQTDDTSHLIDLVCRKSQAVKSKTGRREISVSAQEARGRKTAELLGLTVRHVWREVGSASRFRRSKKVPKQDLALQALDRGEIGALWVFRLDRWTRRGAGAILSIVEPADGRPRRLLIDNGDADNPGIGLDSANPRDRSELIRRAEDAREETEVLSERVRNTKTFQLENGEWLNGVAPYGLRVVTVSAFDEDGEEIEERKLQRDPETSAGIPGEPQVTKMEIARLVTYEWPVARVTKREMARRLNERGVPSPTGGDWAFSTVANMIGNPAYAGWQITGRSDNRSRRMLYLNENGEKVSVMVGPPLLTDEEYNEAQAASRGNGPPADAESWKAKHLLTDLLECCGCFSSMPSAGTSYACWRSRAGGVCPAPANAAAYSAEEYVFQRWSARLHSADLDDPLLVIVAERWAARKDPQASEEEQTARAALADAERVLSRLWQDRRAGLFDGPSERFFAPQLTEANAAVMAAQKALDGIRGTGPVDISFLLDLEQQREAWEAADLPLKRDLLRLAIRRIRVRRAPKRGVQFDGDSRMEINWLDEPAWDTAA

SEQ ID NO: 589 - protein, 482 aa, synthetic construct
MTRTRAAIYCRISRDKTGAGLGVERQEAECRELAERLGWTVVAVYPDNDLSAYSGKPRPQYRAMLDAIRRGEVDAVLAWHGDRLHRSPVELEQYIDICNHGRDVPTHCVKAGELDLSTASGRMTARIVGAVARHESEHKSERITSEKAQALGRGEWIGSGRPFGYVFVPMVDEQGRPVMNKAGKPKMTLGLDPAEAAAIRDGVARVIAGESVYSITKSWQATIKPARGERWAAQNVHRILTRPRNARLIEHKGVVLDNVRGTWPEITLEDDFRAVCAILKDPKRTTYSGKRSLKWVGSGLYVCGRCGADLRSATTNNGTRSYRCRSGSHVSIPGEPLDEYVIKTVCEVLDREGAALLPTRKNDDGARLHEEANTLRARLEGLADMLGDGELDRAAYNRQKARVTAKLDAVTAKMAERSGSAFDGIATAPTPSVAFRAAPVARQRAVVDALCRVTIAPAGRGRLPKGVEFDYSRVTIEPKTTT

SEQ ID NO: 590 - protein, 524 aa, synthetic construct
MRPTTNALKPPGDGTTLPSMAGAVVYIRVSTKEQTENLSLPTQLRACEEYCRREGLDVLERFREEGESAKTADRTELQRLLAFCRTNKGRVHFVVVFNLTRFARDKYDHFALRSYLQSLGISLRSATEPIDDTSTGKLMEGVLAAFAQFDNDVRSDRTRAGMKAALELGRWVFLAPLGYMNAPRAMGKSLIPDPERAPLVRRAVEEYATGRFTKQQLLQQVTAWGLRNRRGQPLSSQAIGMLLRNQLYAGIVDVAEYGVRGRRGDFEPLVSEDTFYRVQAVLSGHTPSLAPQLQGHPDFPLRGFVRCESCGRGLTGSWSKGRSSYYAYYHCRPGCRGVNVTKARLETLFEKELTRLQPTAGYMRLLKESVLQVWKTRKESARADLARAERQAEAIQKKLDRLDEAFLFERSIDIDVYDRHAEKLREELTLVRIDRHATELEELDVEGILAFAERVLPRAADLWVQASLAQRQRFQQLFFPEGMTFDGRDFVGTAVTARAFNYLQPIEEGNKRLVDLTGIEPVTS

SEQ ID NO: 591 - protein, 482 aa, synthetic construct
MTIIADTLTGRQYVRSSVKKDRSIAGQQHDNQHACAGHGITLADRAYVDNDRSASRYATKVREGYDELMGDLLNGRFTDDVLVLWESSRGSRRVGEWVLLIDVLAEQGKRVLVTEDDRLYDPANGNDRHDLIGSANDAEKEAWKIKERVNRGMAQAARDGKMHGGQTSYGYRKVYDPATGKLIGTEIDESEAPIVRELFRRVREGNTLASITRDFEQRGIRSRSGKVLSHQTLRGMLTRPVYTALRINKGKEFDGNWPAIVDRETWAAVQRILTGPDRVASPNAGKLTHEFSHAVKCDVCGSGLTVGYERKATGEYRCAGKGCISGIDKPTLDAAMRGVVFAYLAREADSWETAAENENAEIRAVRAEIEKLTLDREQLADKVASGAVSLEFAARVENGLTQRLTAAQARERELSMPSELRDLLGGSTANIEATWDAMPIAARRRVASMMLSPSMAGQPRIMRKPVRNKVIPVADRIRWAKG

SEQ ID NO: 592 - protein, 454 aa, synthetic construct
MRALIYCRISADREGSGLGVDRQREDCEALADKLGWEVVDVFTDNDLSAYSGKPRPAYKAMLEELRKGRAQAVIAWHTDRLHRSPVELESFISLCEPLSIIVRTVQAGEIDLSTPSGQMNARIVGAVARHEIDHARKRMVRAHEQAAAAGKWRARRQVFGYSKDGTSTVDTEAQAIRLAAADVLAGKSLRQVAREWNEAGHVSKGSAPKWNASSVRRILANPRYAALQEYQGRIVGNGNWPQILDRDEHAALLALFADPKRSSRLGNERKHQGSGVYRCGICGATMTMTYTSDGALHYRCTASAHLSRQGGALDAWVDELVLGRLSRPDAQMTLETRDRDLPALQTERDGLQSRMDQLASMFAEGDIDSSQLRRGTEDLRVKVARLDEELADARSVSPLADLVLAGDDLRSRWEELSADLRGQVIASLMDVVVLRSPRGLRRFEPEYISVVWKV

SEQ ID NO: 593 - protein, 460 aa, synthetic construct
MSLDASRKRRRCAVYARKSSDEGLDQDFNSIDAQRDAGHAYIASQRAEGWIPVADDYDDPAYSGGNMERPGLKRLLADIERGLIDIVVVYKIDRLTRSLADFSKMVEVFERYDVSFVSVTQQFNTTTSMGRLMLNVLLSFAQFEREVTGERIRDKIAASKRKGMWMGGVPPLGYDVLDRKLIVNEAEATVVRRLFAEFPRAVSTTLFVQRLRHEGVMTKSWVAQSGKDRMGKLMDKGALYKILSNPVYLGQIRHKEISYAGEHEPIVTQEQWDAVQSALTSKPTGVSRGQIRTERPALLKGLICTADGRAMTPHTTKRRGGRLYRYYLSTRDAQEGYGASDVKMLPAGEVEEAVVAQLRGILRAPEMVARVWREVGRSNDTHDMTEMQVAVALSRIDIVWENLFPLEQHRIVQLLVERVVVSPQELRVQLHRNGIEHFALDVVRAAGGKSVPAAAGEALA

SEQ ID NO: 594 - protein, 517 aa, synthetic construct
MAQVKIIAPQTREAEHLRVAAYCRVSSDSKDQLHSYAAQIRNYTEEIARHDGWELVDVYADEGLTGTRMDQRDDFNRMMRDCRKGKIDRILVKSVSRFARNTRDCLSALRELSAMGVSVRFEKENIDTKTLTTELMVSVSGSLAQQESISISANQKMSYQRRMERGEFITCTAPYGYRIVNKKDLEIVPEEAATVRWIFDAYLKGRSSGWIAEQLTAKGIPSQSGAECWRETGIRYLLTNEKYIGDALSQKSYSCGFPFVQKRNHGERLQYYTENSHPAIIDRDTFERVQALLQKKAQKEKKRREKSPLALKIVCGNCGTVFHRRSSQNGYVTWVCRTHDRHAADCPVGRIPEAEIHAAFLRMYHRLKSSADIILAPALRQLNTLDTILRQNHPQMLAINRAIAEATEESHKISTLRANGLLDADICAARMNAISARLAQLRGERRRLTENEAIDETMDALRKVEQTLLNGPERLDSFDEELFEHLVERIIAESQTRIRFRLYGGLELTEQWEVAAR

SEQ ID NO: 595 - protein, 520 aa, synthetic construct
MNVAIYARKSKATKKGESISNQIELCKKYFLNTTNEDVNFLIYEDEGWSGGNINRPQFTKLMNDAKLKRFTALICYRLDRIARNVADFSSTYKILEENNIAFISITEQFDTSTIMGRAMINISATFAQIERETIAERIKDNMLELSKTGRWLGGTPPLGFKSVQITENNKKMYKLEVVEEEMELVRLIYKLYPQYKSTVPIARYLVSNHIKGKNGGDFSRNTVLQILKNPVYCCSDSEAIKYFENKGSILNCINNKELGLMVYNKRKAGKKENPIDEWIIATGRHPGIIPSDQWINCQNILEEIKNRTSPRQATGNKFLLSGLLKCARCGSSMCSWSRTNKGIYYRSYRCELKNRAANRCDSKMINAEELENFIIELCKNINIEEIINVKKNKNNNTSLKKELSSLNKSLNDNEKLLQGLIKKLALIDDIDILSMIQTEIKKIKAENENINKRINEINLSMFDIEDEYKNQQILLESHKLFKDTIDLVKDIEAKRNLIMSFIEYFTYDSETNEVGYKIRL

SEQ ID NO: 596 - protein, 495 aa, synthetic construct
MKSATLYTRVSSREQEAEGFSLGAQSKLLREYASRNELDIVRAFEDVETAKTSGRKQFGEMVKWLKKNRSCRILLVEKTDRLYRNFHDAVTLEDLDVETHLVKENQVISKEAKSQARFIHGINLVVARNYSENLKEEVKKGMLEKARLGIYPGHAPFGYRNNKAERTIEIDPIDSPIVIRMMEAYASGAHTLSTIRKLLKAEFGKTMSRANVHQILKNRFYIGIFEWAGQSFPGTHPLFLDPNTFRTVQAVLAGHNRPKYSKRDIAFRGLMTCAYDGCMLTGDVQKEKYIYYRCTGHRGKCELPRFREEVLSDRLGEPLKALQVPSEVVTQIVDTLRKDQEQAENRLSAERTRLESRLTGIRNRIDAAYIDKLDGKISEEFWRRKTDEWTLEEQQLKLAIDGLANAATSDRAVDAQRVFELSNKAYSLYVSQDSAEKAKLLRMMCSNFSVDGVSVTPSYRYPFDLIFKRAKTKEWSGRADSNCRPLAPQASALPG

SEQ ID NO: 597 - protein, 618 aa, synthetic construct
MAGIKEEKKIYLVGIYCRLSKDDGTDNESASIATQKSILTDYVKKQGWHIAKTYVDDGYSGTNFQRPSFQNMIKDIESGLINCVITKDLSRLGRNYLDCGLYLEVFFPEHNVRYIAVNDGVDTLNKSAMDITPFRNILNEMYAADISVKIKSAYRARFQQGKFMGTTAPYGYIKDPADHNHLLIDDKVAHVVKEIFDLALKGNGVAKICRHLNKQHILRPAAYAAERGETGFERHFEGNEDKRYIWSGNSVRSILRSPIYAGNLVGYKRIAANMKSKKRPSKLPEEWEVIPNTHEGIVTQEEFDIVQQLITSRRLPQNKGGFVNIFAGVIKCVDCGCALRAMNVHRRKRPEIIDCVQYSCNNYARNGRSECSAHNIEARDLFNAVLADINCFADMAVNDEKAVRAIEKRLTETDQSRAKALEKERKKLNKRLAELDRLFSSLYEDKVMERITERNFEMMSGKYQKEQLEIEARLKEVTETLNESYEKSRGIRDFLALIRNYQGLKELDATVINALIDKILVSEREKMADGTVKQEIKIYYKFIGFVDELHIIPTKRWAAMPAKNCTVCGVEYVPGSGASRYCPACAKKIRREKSNESKRRSREQKRIACMNCPQKMTD

SEQ ID NO: 598 - protein, 464 aa, synthetic construct
MKKRAGLYIRVSTEEQVDNYSIPEQKRRLEAYCQSHDWAVAEEYIDGGFSGAKLDRPAMQKMIADSKAGNLDVVVSIKLDRLSRSQKDTLHLIEDIFLPYHVDYVSVNESFDTGTSFGRAMVGILSVFAQLEREQILERMHSGMEARAKTGLYHGSKPPYGYTLEKGILKIDPTEAVAVRKVFDLWLKGYSYNKISEIMEETYHGEKAWMHPSAINQLLTNPAYIGKIRFAGNVIDGQHEAIIDEISFKKANLRLETRAANRGRQTTYLLTGVVWCGNCGSRYGINLSTCKGIRYTYYTCSPNRRKKGNEGIRCCGNKPIPTKKLDPLIIEKIKRLAISKDFFEEIQKPDASLSDAIASLESAAAEIDKRIGKLMELYSMDGIPTDTLSQQINTLYAQKKDLESQISEKQSGFKQTYEDYKEVFDKVDYAFESGTIEEQKSIVRSLIKRIDILNQEITITWNFQ

SEQ ID NO: 599 - protein, 463 aa, synthetic construct
MNVVGYLRLSTRDQSKSLEYQENIIRNYCENNGLNILEIFSDNGQDSYTFDRPDYLALEEFIRTHKGECQYLVVLDHDRFSRNLPKALLKIAELEKKYGVVVISTNERIGMNTADPDVFMKRAFDYLMANHELLNIRTRVRQGILNAKEHGRYLGKAPYGYRNVKSDRESYIKIDHFQAKVVRKIFRDYLLNIPLPVIHTNARDIGFHNHGKNALYNVLKNCTYAGLVKIPLQRDIPERYVKAIHAQIISEEDFWNVQQKLSKKQPRKSRLAADFPLRGVLSCHCGRYLTVAWSKGRSKYYLYYKCTGHHNLNISGDIIHRKFEAILKNIHFLPHQAHLINQLAKPLLKASRIAEQRIDMERSRKRRLIERKILQLEEKFINNLIEKPVYDRWNVKLRSELSELEEKLWESKRRKNSLQLEINSLLSDKSSLYRIYSSCNTEQKQELVSNLCYRNVIRLKVVF

SEQ ID NO: 600 - protein, 562 aa, synthetic construct
MGRKTVTVAQRALIAIRLSRVTDATTSPERQRQTCLELCQQRGYKVVGYAEDLDVSAGATSPFDRPELGHWLKNRLGEFDVIVFFRADRIVRRLFDLSDLIRWSQQHSVTLVSATESHFDLSTRMGNVLAMLVASIAEMELDAISERNASAFRHNFKAGKYRGGIPPWGYLPRQDETGTWRLVQDPVQVEVINEVVRRVLDGEPLRAIAHDLTARSVLTPRDRFAESQGREVKGYEWHSSGLKRALTSQTLLGYAVGREPLTDAQGRIQRNAKGKKVFGPEQPVRNDDGSPVVRAEPILTREVLDRLGVELASRENRKEPTKRSTGLLLRVVHCGVCGRPAYRLKGGPGRKPRYRCKSVQDGATCGPNPSIPLEYADEAVERIILGLLGTSERLERVWDSGSDHSTELAEVDARLTDLTGQLGLGVFRQGTPQRAELDRQIEMLAARQAQLSSQAVKPAGWTWQPTGEKFADWWERQDVTGRNVWLRQMNIRLEFDNGQIHLDLGDLFALTEQMLPSGPVVGWQAVLAAMSEHGVRGVTMGADGSLVFEGPNGEVYQDHLAD

SEQ ID NO: 601 - protein, 486 aa, synthetic construct
MKVIGYARLSRATEESTSIARQRQAIQDTARQRGWELVRIETDNDVSATRTRLDRPGLNAVRDAIAAGDADAVLVWKLDRIARSVVDFGLLLDDGLQIVSCMEPLDTTTPMGRAMAEILQVFAAMEARTIGQRVSSSRKHLATIGRFPGGQPPYGYRSVPMPGGTGRTLEVDPDEAAIVRKAVDAVLGGESMYAVLKELDEAGVRTRRGLSWTLTTFPRVLCSEAMLGRARFQGKTVRDDNGLPLTPFPPILTLEEHDQLVARFAPDAEHAERTRAGRRKASRLLSGLLYCESCNSRLVVRTNNHPSRPPVYFCPSRGTGVVCTARVSGLASKLEELVTDTFLDLYGSAPFTVEHTSVQERSDVALVEAAIRDTTDELREPDADVMALVDRLNSLRAERERLDKLPTAPVVERVPTGETVAQVWHRSDYRAQRDLLIRAGFYGVLRPAKRRGYWDDDRFDIQWDVDDVLSLDPNDVEAQSRGPITV

SEQ ID NO: 602 - protein, 514 aa, synthetic construct
MMKNVIIYSRVSTDEQAQQGYSLDYQEQTIQRYCQLNDYKVIQSFREDHSAKDFERPEWKKIIKLIKAKEKQKDKITAVVILRADRFSRNLLLSLMEKAKLNFLGCDVEFVEGGIDLSSPESLVVEAIQYALPQVENEKLSLRTKEGSYRCRLSGGWTGSPLRGYKTMRLEKYPSMIFNDQAPLIKEAFEKMASGLYSADQIRRWLNSKGMKITKNQFPNIIRNVAYTGKVVVMPFKDQPKKIVDGLHPALVSEELFAAANDVLNGRKRKMDFKSDKSDLYPLKGFLRCPIHGRSLSAYKSKGRSGFYHYYVCTKNGCPRYPIQWVHDQIDRILEKIQFSAKTIKEYKKVLARKFDSMDLERKRKQKDFERDLVTLKGRKTFLQNEYLEGKITAADYNELKSTIEVKLFQVDRELANLKSQKAPFKHYLENDIPLMEDLVSFYQKADGKTKKKILGLIFADKIEFDENRKPKFIFTPPIEALSQILNGAKKGDVSIKLLEKLVKEDKGLRSFLS

SEQ ID NO: 603 - protein, 518 aa, synthetic construct
MASENDKNHRVRVAQYLRMSTDHQQYSLHNQSEYIKDYAEKNNMEIAYTYDDAGKSGVSIVGRHSLQQLLSDVEQKKIDIQAVLFYDVSRFGRFQNSDEAAYYSFLFERNGVDLIYCSEPIPTKDFPLESSVILNIKRSSAAYHSRNLSEKVFIGQVNLIKLGYHQGGMAGYGLRRLLVDENGIAKEILSFRKRKSIQTDRVILIPGPKNEIKIVNRIYDLFIDNNVPEFIIAERLNEQNIPAENGTLWTRAKIHQILTNEKYIGNNIYNKTSSKLKSRLVKNPKHEWVRCDKAYKPIISKKKYNKAQEIIQLRSIHLTNEDLLEKLKQKLESNGKLSGFIIDEDDTGPSSSVYRTRFGGLLRAYTLIGYKPEHDYSYLKINEALRSFYSEIIEDFKGEILKSNCHIDEYKYAPMLYINDEFLISVLVTKCIHMKSGKLRWKVRFDNSQKADITIVIRMNSQNISPLDFYIIPKIENEYNKMCMTETNNIRLDLYRFDNLDKLLQIITRMKVRELYAA

SEQ ID NO: 604 - protein, 615 aa, synthetic construct
MSASAPRDAPNLHPIDNGEPAYGYERLSRDREGKKRKVTEQRADIDGHGPLLGYNLVQHFEDNSVSASKYDIDRPGFEALCEALNTSGVRNLLVTEVTRISRQDETGGIFMGIMTRAKGKVVKIPEGITYDFSTSHGRDQFRQALHDAIRESDKISERVRKAQTKLREKQRWTGGPAPYGFKKDVYPELVDGRYETRIRWVVEESEAEHVREMCAAILRGESLSMISDRLNQAGVKPRRSKYWQYSSVSAITQNPRICGLYALQVDGVWEVPDVQPEEQQFPPIVDYATWNAVRLNLKARGQKPERTTAHDAVTETAGLFRCGACQQTLFRHAANSDSVSSFIRHPGPGRSRPCSAGHKLSASYDETWDYVAGLIDRFILATPLMRRTAEVRDFDDELSRVERDLQELNTALDAGELTLRLAGVRERALLQKEREIKLAREKARTRNRPVNNFGVAATWRNLPLTELRAIIFGVFQYIEISPGIQGRDPWDSRRFTPHFTEEMSPALNDLLIGSAPGWETVAQWLRAMKEDADAPKDDAGALQLSQAMVSKLLFWARAAERNGVEDFFRTPTWSQWVLKSGNFVEMPDLPPADENTPHEEVLYYLDVPTDVSPFD

SEQ ID NO: 605 - protein, 529 aa, synthetic construct
MKVVAYCRVSTNSEDQLNSLENQKNHYTKLFEKENLDVADCGMLYKKSGEKSFLYGIYADEGLSGAKDYEKREAFKKMIEDAKKGYFNKIYVKNVQRFTRYIKDGSSVLKELKKYDVEVFFEDGSLSSLNPSHELFINMFTITAQEESRIKGAAVQFGIRESQKKGKWTGGVHPFGYDLVKGYLHINNEESEIVKVIYDMYLNKGSGYQSIARYLNDDLKVTTKLGKQWSTKQIGSMLKNPLYKGVQRTHMTYVDDINSGTVKKVPEDKWIVHYKEELKIIDSEVWELTQRELAKRKKMHKDKVRPSNKHLLSNLLVCPKCGVGLRRKKRKAYVRKDGTSRDLGYEWRCTMNDRYGKSRCENNNMVIEKEIIENVKNKVIELKENKQKIDEKIMDVIKAKFNPNVDEEIKKILVEKEDINKQEMTNLNLLTKGIIDEKQFQKQNDELQKQLKENEYKHNKLLRLDEEVKELKFNYKQYINLLDSVDVNNLDNATLKKLIISVYVFASNKKAIETKFNLNLADEIPFYII

SEQ ID NO: 606 - protein, 466 aa, synthetic construct
MATTSRHRPRRAAIYARVSLDQTGEATSVGGQEESARELIERRGWTLAGVFVDNSITGTGKKHRPAFYQMLEAVKGGEVDAVVARHMDRIARNPRERLELVEACRNQGVIIALVEGSDMDPTTASGRMVIDVLGSVAEMEIGIKSERHVAALRRHAHNGGVPHGPAPYGYTTTGDVVADEAAVVARIFRAFDAGGSLRSITAKLTADGVPTRRGRPWNVRTVRDMLTNPRYAGWAVYRREIATDGDGNRIRGKWEPIVTPEVFDVIQARLSDPSRKSNRFGTDRRYLGSSLFVCDTCRGPIQTGNGGKYLCPGHLTREHKHVDRYVIDVIAERLGRKDFARLLAPPTEDMAPVVAESERLRKRLAVIDADYDRGDIDAKRWKAAKQRVQVELAEVDQKLAARRGGAALGSILSAPDPAAAFRGASLMAQRSAIDALAVVRLRRAGRGRLPAELYIDPTTVDVDWRR

SEQ ID NO: 607 - protein, 415 aa, synthetic construct
MFAPMWRDSLASNQGRATRCAIYTRKSAEERADVQLGTIENQRDLCEKYIASQAGEGWTTLLEHYDDPGYSGGTLRRPALQNLIAAVEAGQVDMIVVYKIDRLSRSLRDFVGLVEHLEAHGVKFVAVTQAFNTANSMGRLTLNILLSFAQFERELTSERLKDWFAGARARGLWQGPAPYGYHVANSILTVNEDQARFVRHIFRRYPTMGSAKEVADEITRMGALNTWGRSINGWQVMRILRNRLYLGDLPHKGQFLPGIHPPIVTAREWDKAADAIDKMSRRRRPALRLPAEAPLYPLLHDRHGASMIHIICRRARTTHRYYVPSRQRYGVGSSPGDRFRAAELEHAVVTAVAAVGYVIAVDGRPGSLTGALSRLIDRIDIMGDEMTIQLRSGAALQSATMGRVMPTARTILKDA

SEQ ID NO: 608 - protein, 559 aa, synthetic construct
MKVAIYTRVSTDKKEQKLSFQSQSEYYTQYCLEKGYDLYHIYADEGITGTKKDRKEFINMMLEAGLDVERNKSNKIISFEKSNREPKFNYILMKDITRFSRNLNIIDTVRALRDKKVYLIFEDMNITTEDDKWEFQFGLYMTFSQQESLDKSSKLKWAYERRKEQGKWHMSNPLFGYEYNKDKGIYEVNEEEAVWVKKAFDLYVNELEGTKNVATYLNNNNVKTRRGKEWRADGIKRMLTNEKYIGKVAIGKLQNAAVTSETKTQKKIDKENWKIIENGIAAIIDEKTFNKAQEILSSRVAKMADGSKVGSKKVKSIFHKKIKCSKCGSFFTRVKGYKVKEGKTIPEYNYFCINRRTLKSCDMRGVSHNVLIRELQRLIDSGIIRSLILKTSGAGNEGLEINLFEKILEDINKQRSEIDTNTVEIQKQIDDVTKKIDLLYENFFNDDTTDLMKQMTTKKLEQLAEEQNKLELKKLECSTAAIDEKERYIKEYYSSMQQLSKKKKFTVEELIEWIDRIEVHENRVLHFYFKFPSMYKIQFGDGLTPEESDLVYTRFDVKY

SEQ ID NO: 609 - protein, 500 aa, synthetic construct
MKTSARDRVRRVGIYVRISDDREGGGLGVKRQEDDCRLLAASLGWKVVEVYVDNDVTAADRRKKRKDYLRMLADIESGHIDAIVSWHPDRVYRQPAELEDLIIIVEEHKTEIATVKAGDLDLSTPTGRLVARMLGAIAKYEVEHKQERILRKIQELVEAGKIHNSGHRPFGYTRLFDGEGSRRKILGEILNEKEAAHIKKWARRVQEGEKLGTLVAEANEAGIKTSTGGAWSYQAMRFLLMSGRISGRKEHKGEIYGQAVWPKIIEPEDSDSIRALLAERSEEFKAEFGERDTPALKYPLSGLVKCTCKVRHVVGEPCSCKEEGKKHHRMSTGQRGDKDMPIYTCKKDGGGCGGRTIQIPDLEPLMEKLLFKRLEEVEAAAGEDPDDPRPALEAKLARWEKRKKELGDELLDGDRPAREIREAIDTLNGRMAWARQEIAQYAVKANLHEISAAELREAWKDYSVARKQSTYRGLIREILIHPATRPFNVWSPDRVEVFWK

SEQ ID NO: 610 - protein, 587 aa, synthetic construct
MDAIIYIRWSSLEQTKGDSYTRQINRCSAFCETNGYNVLETVVDEGRSAYTGENIHTGNLGKLVERFERREVPEGTIVVVEQLDRLTRLPALEVVGWLTRVFPTGIRFVTADRGTMVSRAAMEADQLSFMSLIFDSFRSHGESKRKSDLLLDSWQSRRNDVAEGRKRNITGVCPAWLRWDREANEFIAISDPDPRLDRKLIVQRIFDERDAGVGHAIIARKLNEDGIPSWGVGKRKADGWHPSYVYKILHNPAVIGEFQPRSRRKGEVTGTKIGEPIPNYYPQIISPAQFERVSAAKQVMNVGGGTKGRANLLAGLVHCGACNQRMIYLKKANAGRARTNPKTGTVTVDKSEGIYLKCSGAHRGHRCDHKSNFNYNWIADAVLDNLLNSALRDNHFEQRSAMVQVADRLASARRELERFEAQAQTALDMTLDPAFKHDQRIKQRYVNLGRQADQQRELVDKLDTELAASKGQVSPAEHLSRVASVRTSLDSEDEKIRAAARTKVMDALQRLIDRITFQPNRTVEVSALEGSVGWQFDDKGNMINRFDLTVGLHEERLRNGILRRDNVDRQDIAQQIEEMKKRRLEAL

SEQ ID NO: 611 - protein, 545 aa, synthetic construct
MPYAPEYLHLVIPDTRFEAWLYGRNSDDATGGGESVEAQLTTGRTFCRDYDWRILREFKDVGISASRHGTKARGDFEDLLDTIETTAPQPGVRRIVVAFEASRYYRNLEEYVRLRAACLRANVLLCYNGHVYDLSRRDDRKTTAQHAVDAEDEAEGIRDRNLRTTRLQAEAGEPHGKLPYGFNREYAFVNGRRRCTGQNENAQGTFVFQAIERADSGHSIRAIVRWLRGVPEASRPDGADWSEDLVRRMLLNRVYLGERAHHGTYRKATWDAIKGLHTAAGRAMFNRVTAKLNDPERQTQRGTGVVHLQSLIALCGECGDHAVLVSRPSTRAGTPTLYCRDAQNVAVQEALMDAYVEEGLIAWFSDKKRARAALVPEDSAVEERMNASQRLINGYEEQLRDARTLAETFDPDTGQPRLSVATLAALEQRLLPRLEAERRKLQAMTGVSPLLLSMLDDDPDLVWNGRPATETEPARPPLSLEQKREVLRKVVTVRLHKASRPGLRKLEPGRITLSFIGEPGFRARPLRAREKPPAQAPSPDAASGT

SEQ ID NO: 612 - protein, 537 aa, synthetic construct
MSSKIAHSYIRFSSAQQSMGDSLKRQQELLAKWMVAHPDHTLSSTRFTDLGISGFRRKHLQNGFGKLLAAIEHGDIARGDVVLIEAIDRAGRFNPNSMLHTLTGITDAGVRLITLDDGLEYNDDPNNTNNLFLLVAKCQQAHQYSAALSSRVKAAYATKREKAAKGEGVTRRTPLWLDADGKLVEDLAPLIVSIFQDYADGIGERRILARVRGQHPLLDNLNPTTIKKWLKNPTAIGRWQPRPIDRVEQAPIEDVYPAVVSKELWHRVQKRLASGTKIKSASAVYLLSGLVRCGRCGKNFGVVNVKRSPAVMLCMGRHRLGEAGCSNSRSIPMRVLDYIRSQTMYGAMQRAAASQNLSSGEKRMIEIDGELTELRRRELNAAEAVVQYGMSKAITDVLDKVLAQIGELEQEKVLLKVAPVPSTLEDMVDLQHALLDDDKQRLNALLQGVGYAIVCDGPTITVNEPHIETGGSVQVYEYKGSHRPTETYRLLENGQLLALDMPNSKQAAAALAEFEATPITQHLQWDGGDGFVEVGGK

SEQ ID NO: 613 - protein, 477 aa, synthetic construct
MRCAIYARVSTEEQAVEGYSISAQKKKLKAYCDAQEWDVVGYYVDEGISAKNTNRPELKRMIEHIEKGLIDCVLVHRLDRLTRSVLDLYTLLDVFEEYDCKFKSATEVYDTTTAIGRLFITIIAALAQWERENIGERVRVGQQEKVRQGKYTSPRKPYGYNADHKEGILTIIEEEAKVVRSIYNDYLKGHSATRISKRLNATKTAGRDYWNEKAVMYILENPLYIGTLRWRKETEHYFEVPNSVPAIIEEEMFNSVQILRESRQESHPRSQYGSYIFSGILKCPRCGRSLIGNYVVSKNKDGTKIKYKHYYCKGRKLNVCTMGNMSERKLEQAIIPHILSFYIDATDEDVKLENSNTENEIEQIKSELKIIEKRRKKWQYAWANDHLKDEEFTEFMQEENEKEKVLTEELYKLKPAENKKLQNEELKNILKDIKLNWANLNDEEKKIFMQIILKKLVIERSDKLHAYKLEIVEMEFN

SEQ ID NO: 614 - protein, 464 aa, synthetic construct
MVRAAAIYARISNDPEGDRLGVGRQIEDCRAEADRRGWPVADLYVDDDKSAWSGKVRPEYERMVSDIEGRRIDAVLFWHPDRLSRIPIELEQFAQVCRRANVEIVWIGGELRPGDSDGLLLLRILAAVASDSSAKTSKRIKRKNEERAAAGLPTGGGTRPFGYRPDRVTVDPDEAVLVREAVRRVLAGESVRAIAREWNARSIPTAAGKAWTVETLRRMLYSARLSAQREHLGEIVAPGKWEAIITPEETARLRATLAERTRTRTRPVRRYCLTGLLRCGLCGAPLIARPSAGGTRRYVCAKGPGHSGCGRLAINAEPVEVWLAEVVAAHLDLPAVAAAAAAATSAAAASAGEHDGLRKDRDQLDELARDFGQRLITRSEWFAARKPIEERIEAAERKVSRRSRTAVIDDYVGRSDALRADWPTLPLDRQRSIASALLDRAVVHSALRGRAAFDPDRIEPVWRG

SEQ ID NO: 615 - protein, 521 aa, synthetic construct
MARAAKQDSNSEIINGVIYARYSEGPNQTEASIEGQVRECKEYAKRNGIRIINVYSDSKHTGTNDNRAEFQKMLRDSRRGGFSVVVVWKIDRFGRNRAEMAQNKALLKLQGVKVVSAKEYIPDSPEGIILESVLEGMAEYYSANLSQNIKRGMKENALHCKSNGSGKSLGYIVDKDGYFEIEPNEATIVKTIFQKYDEGMKIADIWREIVASGAKTKRGKDFTQYGISRVLSNRAYIGEYRYGDIVTPGGMPRIIDDDLFNRVQERRALSKKTPASRRSNSDVDFLLTGKVFCGHCKGTMRGMSGTSKTGRKFYYYACHDKIFKHNKCTKKNVKKEWLETEVTRITRDDILNKETIEFIADRVVEIQRQEQEDKSMLRYYEQQLRDTQSAINNIMKAIEAGIITSSTKSRLFELEEQKSIIEGEIEREKIITPVIEKEQVIFSLERFFGGDINNKEYQRNIIDMFVNKVILYDNKIIITYNISSQNEISVDVVEQAAFAALDECSSKLSLAPYFHLIPPCS

SEQ ID NO: 616 - protein, 510 aa, synthetic construct
MMGTVALYMRLSSEDANEGESFSIRNQRDLLHNFLKSRREFDGCTVMEFCDDGYTGTNFDRPGIQKMLSMAGNPIQCIIVKDFSRFGRNLLDVGDYLDQIFPFLGVRFIAVNENYDSKNSIGSSVSLDVSLKAMVYEMYSRDISEKIRCVQQAKMKKGEYLCAIAFYGYKRSAAQKNKLEVDGKAADVVRRIFQMAVDGITPTQIALRLNAEGIPSPLVYRRENHTDGLRGWKVSGDISYWTRENVRRIISDERYTGCLISRKRTTVDVSKKQTVKVPKEEWIVAKNTHEAIVTEETYAQAQKILKSCKRKKTPAKPNQRFRGLLKCAVCGRTLERVICKEPYFCCPTRKTVPDALCRRVHVDEQDLETALTASIQSRVRLLLEAEVEHENENLPDALEKQIQECQTAISRCKAKQADAFEDYAEGRITRQEYLTRKAEAARQHDDMTASYMELSAKRVELQKAANSAEKMDLGRYACVGELTRELLTELVREIRVSGENDLEIVWNFRE

SEQ ID NO: 617 - protein, 497 aa, synthetic construct
MTINNVAIYLRKSRAEDGLTDAESLENHRNVLTGIAERNSWKYEIFEEIGSSMSISERPQLKILLDSVTNKYIYDAVLVMDVDRLSRDRYDSSLIMKILRDNDVKIVTADGKITNLRDENDALMTDFKDIFSNYEYKQITKRMIRGKEASARKGRWSSGRVPLGYVYNKDTGMLDIDEDKAPIIREIFHMYANGTGTHFISLEMNKRGYRGAMGKPFGGKSIRDIITNEIYLGNATLRKFIKAGNTYKLRPEEEHIRHEGIYPAIVEKELFESVQRRYESQKMKPNRAKAGTHSLSGLVRCGYCDKVHAIQTRPTKGKVLKGCSKRDLITGVLCKNHGILYEKVMEDVFRDLYKYSVTLDETMKGLIEDKTKYLNSKDRELAALESQLKTVEAQLKRINYMFMNDLLSEEELGEMKPLKVKEKDHILKRIAEVKELTVDDKLEEYEKVSKKLKNLLDNKEVLSDKDLNRLLSSVINRIVLYNYKDKDLEPRIVVEFK

SEQ ID NO: 618 - protein, 568 aa, synthetic construct
MRALIVVRLSRVTDATTSPERQLQTCRELCAQRGYDVVGIAEDLDVTAATAPFDRPQLGDWLTNRLGQFDVLVFYRMDRIVRRLLDLADLIRWCQEHAVSVVSATEQFLDLTAPFGDIIALLVAKVAEMELSAISERNASAARYNIRAGKYRGGVPPWGYLPQQTEAGWRYVQDPEQVGVIHEVVERVLAGEPLRSVAHDLTSRKILTPRDRFAQSQGRKVKGYEWHSGGLKRALTSQTLLGYAVARQPVLDAQGRVQRDAKGRKVFGPDAVVRNDDGSPVVRSEPILTREVFDRLAVELAERENRKEPTKRSSGLLLQVVYCGVCGKPAYRLKGGPGRKPRYRCASAQHRDPCGNKSIPLEDADEAVEALLLALLGESERLERLWDKGSDHSVELTEIDNILADLTDQLGGGVFTRGTPQRARLDARITALAARQAELAAEAVKPAGWTWQPTGEKFAHWWGRQDVTARNVWLRSMGVTLGFLYSLEGKGPTLNLDIGNLDTMTQQLETSGAAAQWQDTVKAMKENGVAGMEMFRDKVVIHGADGRRHQFDLTPGVPFEEAFNALAE

SEQ ID NO: 619 - protein, 480 aa, synthetic construct
MLAYRDIEIYNTHMTTQCAIYCRMSQDREGAGVKVARQERECRALADALGWEVAYVFTDNDVSASTGSARPGYTALMEAIERNQVQGVLAWHTDRLHRRPVELEGYLSACEPRGIVTQTVEAGPLDLATPSGRAVARTLAAWARFEVEHKAARSSAGMREAGMRGEWLGGKRAFGWDTSVKPPVLVQEEADAIRAAAVSLLAGKSLIAIADTWNAAGLRGVLGAPFTATTLRQVLLRARNAGIATYKGEETGPSTFPAIIDEEMWRAVVALLKSPNRPGTGTDNRAKYLLSGLAKCGECGNVVGSSHVKYRDGENRVVYRCRTRGKGHVGKRQADADEVVNAVMVARLSMPDVLDSLVDPVTVDLAGLQSQAGTITARMDDLADAYADGAVTLTQMTAATAKMRETLDGIQEQMRTATPLPAALESVVSADDAQAAWNDTTLTDRRRIIDALCEVTILKTPPGKQRRFDPESIQIDWRTA

SEQ ID NO: 620 - protein, 526 aa, synthetic construct
MKQAISYVRFSSHRQQGGTSVERQEKMIAEWLTSHTEYMLSALTFRDLGKSGFHEEHLENGGGFGELLFAIEQGAIKAGDVVLVEALDRAGRLQPLDMITKVIAPILNAGVAIITLDDNTEYTKQSVGGPQLFLLAAKIQAAHQYSETLSRRVTASYDKRRKQALEGVTPKRMTPVWLNSDGSVREDVAPWIKEAFELYVSGMGKSTIAKRMRESGVERLAKCSGPSVEGWLRNEAAIGRWNGNNVYPAIIEPALFYKAQIHAEKVKTQRPVKTAKHFLVGLVKCGSCGKNYIIQNKDGKPHSMRCRIRQNLKGCDNSHIVPKPVIEAIYRWTSTQAAWDALTQQQMSVNAKEIVTKEAELLDLNKKVDEVADVVVKLGGLPELVTRLEAMKASREALESELTILRKTEDSTFTMHWSQAAKIEDFKRDDPQRLAAMLRSVGYEIVVNDDGRITTSGSESAIYRYGGVDRKSGMYKVMRGDKMQLVHKLSYNVFSDEHDEWYGGDDSPAESVWLEEDYKALQDQHK

SEQ ID NO: 621 - protein, 524 aa, synthetic construct
MKRCACYTRKSIFSDKSESTKNQARMCKDYIDCHYSEQITYNVYEDEGKTGANTDRPELHRLIDDIQNDTVDILIVYQLDRLSRDIKDFSNIYAKLEEHHVQFVSIKENIDTSTPIGKAMMYIAVVFAQMERETIADRVYDNMIGLSGSGWWVGGNPPVGYKRKRITTPDGKNHVTIEPIPDQAKYVKLIHKTFQENNFSLTGFQTYLKSKNILTLNGNFFSSSQIYKILTIPYCVQATQKVYDYFAAKGCIMNPQCPRELWDGKHGVMVYGRSTERNHKHELNPPEKWRVCIGQHDAFLDDETWLRTQEKFRKNLFDKKMKYDTPLLKGILRCKCGTLMAVSRKKKNVGISSYYHCVKRMRQGTEYCDMSQINTNLLDNKVLDIFREIEIDNSMINKYASSAKKVDYTMKKKLISKRIHQESEKIHNLAGTLSEYKKSSAAKYIIEEINEHDVILNQLNRDLLDIQIAERTQEKEQGTLAEKIIMISDFMRNVNTLTAEEKNALAKKCIKGCTWDGTKLFITF

SEQ ID NO: 622 - protein, 533 aa, synthetic construct
MKRAAIYARYSTDLQNDQSVEDQFRLCRAHAERLGFNVVEEFSDRAKSGASMFGRPGLANLIQAADRAEFDVLVSEAPDRISRDIADLAHIHKTLKFRGIEMNCVNGGAMDTVQIGMYGVIGQMQREEGAKKVRRGMVGVVRSGRNPGGKAYGYRPIFGRKGELEIVEDEASTVRRIYELYAGGMAPRSIAAVLNDENVPAPRGERWNASTINGSGQRGNGILRNPIYVGRIVWNRIHMVKDPSTGRRISRVNPESEQEEVAAPHLQIVDSGLFDIVQQRKEATGGADRAKGPRSKRILSGLLRCGACGGGMALVGPDRSGNRIQCSTFRESGTCKNSRRYYVERIETEVVDGLRRQFADTSVIEAYVEAYQVEQKRLRGDAQRARANAQRALQEAKDGITKIVEKISKGLIEDDEAAALLAPLRAERDRQKAILETTEEPPNVIEIQPKAVKRFRENIESLAQIVREKDGEASPEIAAPFRQLVAAVVINPTEKGQPYEINIKGYLSSLIDSELSVIKMVAEEGFEPPTQGL

SEQ ID NO: 623 - protein, 537 aa, synthetic construct
MLRPNPPGQTLIPAIGYIRVSMMLEEKISPDIQRTAIKELARRRGYRIIEWVEDLDVSGRTFQRQIMKVIADVEEARANAILVWKYSRFGRNRTGNQLNLARVEKAGGELVSATEEVDARTAVGKLTRGVLFELAAFESDRAGEQWGEAFQNRLARGLPPLGAAQFGYIRRGRTRHPLYHDRTFAAPEDGPERYEPDHASGMASLFAESYHRWIADRNFSALADWLNSRGARTVAGGIWRPSELVRVMDRGFAAGLICVHHRDCRCAKPSSCRNKEYHPGAHEALISVETWETYRRLRKITSALPPRARRAVYPCSKLLKCGYCTNSMYPLKVNHSGTLAWVCGSIYRKRYDIPRCGTRFVTMEAVEKAIQQVLVEWLPDIEAAAAAAAADLQTVPEVEASQPEVLRRELERIDRALERQTELLINEVIPQSSYEPVRDKLLRERESVLGSLAEFENLAAPIDPMDCVPVIEGLVQEWDSLPSDRLRNILAEVISHVDVYRQDPATAWIVVHSAWGEERRRDLVGRFSKWSSREPVG

SEQ ID NO: 624 - protein, 517 aa, synthetic construct
MGYVQKIEGDAPAALIYCRVSSTKQKVDGSGLESQEQRCRSYADMHGYAVEAVFPDDVSGGGDFMKRPGMVALLSFLDAQPGKPYVIIFDDLKRFARDRDFHWKLRKALSARGAVPKCLNFNFEDTPEGEFIETIMAAQGHLEREQNRRQVIQKMKARVEAGYWVFRAPVGYKHVSAKGGGGKVLVPDEPLASVVREALDGYASGRFVSQAEVQRFLERDPHFPKDRKDGSLRPMTVTRLLKKVVYAGYVEAPKWGVTVREGQHDGLISFETYQRIQDNLEGKKRAPAARKDYHIDFPLRGFVACNCCGNAMTAAWSTGCRKRYAYYRCETRGCEEKSKGIPRAKMEEAFEGILQSLTPSRKLFGLVKAMFADAWEMRSAQAHAARDEWKRQLKDAEKQVEGLIDRLVDTENRTVAKKLEERIDALERQKLVLAEKATKELPTKARLEDCMELTLRFLSSPWNIYKNGTHAVQQTVLRLAFAEPLRYCRNNGYGTIKTAFPFKVLGDLTGLNGEMVL

SEQ ID NO: 625 - protein, 494 aa, synthetic construct
MKIGVGYIRMSTDKQQESPKVQKDIIEEYAEQNNIKILKWYEDLGISGGSLKNREGMMELIFDAEKKLFDMVISFKLDRIFRNIEEQSVILSKFDDLGIKFIGIKDPEGEGASGRLIRNILGAINQFERELTGERIFYSNRHIAKQGLWPGGVLPLGYDLNSETKTLIINKEESRLVNLIKDLYFKYRSCYKVAQELNNMGYMTKQGRKFSGVAISIILRNPTYMGNLRWNLKGKDQDKMEIFEGQHKPIWSQEEYNEIQRILDSNVNNQYGNKRSYLLSGILICGDCGYKLRPRMTGKKSYYYKCVSGDEFGKDFCKNNCSINTKLIHPIVIKKLKQNITNANLSYDKPILDNSNSMDIESEIKRLESLIDKYKNLYLMDMISSDELKENVSNYKTQIQVLQQTNSKNDNIDDTIIDLLINFNGIYEDSNNIEKKDLVNSLIQEIIIYDKFNYLISYKNLGIAGWKSQDKINIKTNKKSIREQEIERIVKELE

SEQ ID NO: 626 - protein, 528 aa, synthetic construct
MPSAISYIRFSSVKQVSSNSKQRQAEMIAGWLSANPDYSLSDLKFEDLGRSGYHGEHAAKGGGWAKLLAAVEAGAIKAGDVVLVEALDRTGRLETVDALHFLNPILRAGVSVITLDDGNVYNRESLNGPQIYLLVAKIQAAHGYSKILSERVKRSYQIRKEQARNGGPVKRAVPLWLTTDGKLKEHVAEQVKLAFELYVSGMGKIAIARRLRASGIEELSTCCGPTIDTWLQNKTAIGYWDDIPEVYPPAVSRELFLQAQKRRKDVSTPRPSKSAKHLLVGLVKCGVCGANYIMQSKGGTPHSMRCLTRQRFKDDKCKNTKTIPKNVLEWVRLQTSHFALNEALQKQQLTLSDKRRLEVEAEIEDLSSQISKIVSLLADVPDLPELGARLKGLQAQRVALQDELLVLERTEETLPAWETAYTESGMKQDDPERLNAMLKSVGYTISVFPDGLMTVSGEVFPFMYLGVKRSANAVLGFRVLWQGHEHLVAHPTSIEAITGGIPMPELKKPENAVEQFLMFRRRQGGVEV

SEQ ID NO: 627 - protein, 485 aa, synthetic construct
MTKKVAIYTRVSTTNQAEEGFSIDEQIDRLTKYAEAMGWQVSDTYTDAGFSGAKLERPAMQRLINDIENKAFDTVLVYKLDRLSRSVRDTLYLVKDVFTKNKIDFISLNESIDTSSAMGSLFLTILSAINEFERENIKERMTMGKLGRAKSGKSMMWTKTAFGYYHNRKTGILEIVPLQATIVEQIFTDYLSGISLTKLRDKLNEAGHIGKDIPWSYRTLRQTLDNPVYCGYIKFKDSLFEGMHKPIIPYETYLKVQKELEKRQQQTYERNNNPRPFQAKYMLSGMARCGYCGAPLKIVLGHKRKDGSRTMKYHCANRFPRKTKGITVYNDNKKCDSGNYDLSNLENTVIDNLIGFQENNDSLLKIINGNNQPILDTSSFKKQISQIDKKIQKNSDLYLNDFITMDELKDRTDSLQAEKKLLKAKISENKFNDSTDVFELVKTQLGSIPINELSYDNKKKIVNNLVSKVDVTADNVDIIFKFQLA

SEQ ID NO: 628 - protein, 509 aa, synthetic construct
MKTCIYLRKSRLDEEAEKQGEFETLSRHRSTLLKVAKEQNLNIVEIKEELVSGESIAYRPKMLELLEEVKNGLYDSVLVMDIDRLGRGNMQDQGLILETFKKSNTKIITPRKTYDLNNEWDEEYSEFEAFMARKELKLITRRMQRGRVKSVEEGKFIASKPPYGYKFVFDESGNKSMVIDEDKAKVVRMIFDLYVNKHYGGVKIATHLNSLGLKTTTGRTWYDKGVRDILKNKTYAGYVVWNKVERRKNSSKTRPIDERIEAKGIHEPIIDESIFLEAQSLFKSNFIPSTKQHTTITNPLAGLIVCSKCGHKMIAQQSTYKNKEIVKFVKCLNCGKNRGIKLDILEKDIINELADWVDAYNVSIKDLDSNENKNPNLESYDSIIKSLESEYQTLMKQKENLHNLLEQGIYDVDTYLDRSKILTDKINLNRSNLSQAKKDLENEKESVFSIADIIPQIKKVLELYYQSNDMQERNELLKEVIDFINYSREPKKRTSRFNIKIYPRLIKNK

SEQ ID NO: 629 - protein, 514 aa, synthetic construct
MPIAPEYLHLVKPDLAPFDALLYGRNSVGKRARSVADQLDEGRELCDTHGWPVRAVFKDPGISASRHARKRRDDFEAMLDAIAAGECRIVVAFEASRYYRDLEVYVRLRNACHEAGVLLCYNGQVYDLSKREDRKATAMDAVSAEDEGEGIRDRNLRTTRKVLAEGKPHGPAALGFKRVYDPNTGELIEQIADPEWAPVVDRIFEWTEAGDSYAVVRGRLREQGFTTRHGNDFGDSTLRAILRNRAYIGRRTHYGDDAGNGTWDGFIPEARFNNVQDILDERALDGSRDNAVRYVYSGIAWCGEHPDFDPLVRRTTNRTGRGVYRCELKHIAVDELKFEGYVEESLLAWLGSPEAAAAFRANDSEAGVKAQKARALLAGLQRQLQEARAKAKTFDGRGNPLLSIDSLADLEAGLLPLIGQAERDAQVLSVPPVVRDLVGNPRADEVWDRLDIGAKRLVVKRVVNIRLFKARAPGVKSIEPGRVTMTFYGEPGFTRKRREAGRNVTPGQAGRVVE

SEQ ID NO: 630 - protein, 504 aa, synthetic construct
MKVIIYTRQSKHRDESVTHELQENACQSFAKSRGWEVVQVLNERGISGKTIAKRTEFQTALKMIKDKEAEGLLVWRWSRFARNTLDGLITLKSIEEEAKGQVHCALEQIDRSAMGKFSLTMMLGMAELESNVKGEQWNEALMLRLSKGLPPSGKVQFGYDKVAGQYIKNPEEAAILKEAYERYTSGEGVRSICEDFSARSLPAPGPRGWYSGGMFDLLDKVFYSGKISWVPKKGEEPIIVDGAHEAILSAGEWSAYRKSRKDRKMNVRPKNPRWMLSGLVVCGLCGSKMLSHSDSRGRRQLMCAKYNAEGKGACKGVFRRQSIVTTRVWFWLGAHLDEWASAMPSNEEARKAAEKALADSQAAVETAHADYSRYADWAYEHGILAAVSASKLAEKAETIKDAESAVESAQAHLASLVPVADVHERILEGSKLMGFSDERPKMWQRPDGEWEDAPEEVSEQATARLREALSLIIDTVVVLPSTAKSPRDPDRNHAEEVKIIPRKL

SEQ ID NO: 631 - protein, 552 aa, synthetic construct
MSETLHIYTRVSTVSQEEHGTSLETQKELGIKRANSLGFSNRVWNEGGQSSSKDDLDNRPILVELLSLIDGGSVRHLYVFNTDRLSRNQKTWGMIRYKLNQNKILLYTGSDPDPIDLQNPMDDLLVGLLSEISQYDNKLRKERFRLGKLKRVKLGGWFGGPPPYGYKLEDGLLLPEPNEVKWVNFIFQNYRNGKTLDEIRDLLLDKGVLTRRNKPVWSHGSINKLLQNTHYVGYFQMTDSKSGETVKVNCEPIVSPTLVKECNNLRKKRSYTSLGGTRAKDPNQKNFYLLKSLLVCGSCGSRFHGKIIPSQYRSIYYCPSKEGNYKKTHTSKFLDCKSSRPSIKIGLTDELVWNTVVDVVSNSHLFKEDIKNELLGSSYYRKTIFDEKKSEKRLKLIEKDIENVNNKIIALETEQLLQEKTKSDIKKILKSLEEYKLNKQSEREELIGTLDGFKKQSKWVYWVKEFSSKIENLRSEQFTPQMKLDFLSGIVDKITVNTVNKNTHELIIHFYFDYVRDGLKWKDLTNKSLGYNLTKGSKDMSVQLVSLKKELN

SEQ ID NO: 632 - protein, 595 aa, synthetic construct
MDSFKTISDDGIRMPSTILVAAYTRVSTDSDDQRKSFDAQAEYYQSFCDNKDNLMLHKVYCDIGSGTNSQRKEFLEMIYDAGVDYTYVGHKNYEFKASPTREPIINLIIVKDTSRMSRDSQIGMKLAKELRKKKVFILFENSGFSTMDSEWELRLGLLFQFSEEESRNLSKRVRWGKQRRLKDYNPSRIPYGFERNEDKEIVIVPDEAKIVKEIFERIEYEGTHRIMQDLNVRGIPTKMGKNWSMDKVNRIVRNTIYYGTAIKNRYTRYSITDAERTIRDERDWHLIEGAVEAIVTKETYELANAAIAKRVQPVKNDGKKVGKNVSIDDRYLIKIYCGQCGSAFCRHSNYKMISGKKTKVYLYMCSTRKKQSTKVCNQKGISETVLDNMLSRSETLPVLSMFEAYAVYKKIHKQLNEAQNAINQIKDELQSEINKLTSVNDVLIQKIVEVTMPAVRERLEIDFQSNKTTIGEKHQMIGRLNLQRIELLHELVNAKYDVIKRYSKDVQSGKVQKLDVIDKIIVTGDDKVEFEYRLPSFLEEIKQINSVLINTEYTIDESLANIKSSRATYHRYEYKQSVYMDKMKTEIDEHYYSKD

SEQ ID NO: 633 - protein, 576 aa, synthetic construct
MTYIKTHVYTRISKTSQQEGSGLDEQLSRIEAYIQSKSQQFQGEPQYWQDIGLSAYKNKNIVDGQLGEFIKLVEEGKIGKGHALVIYSLDRLSRRSSWDEDTIQKLVKAGVDIHDVSIPLVLNIDDSFSKIHMELIVQRGNNESKIKSERATAGWAKRLKDTLENGKVFTKRLPHWLKADEDNNIVLVPEHVELIKRIFKEYTNGLSSPMIAKRLNEEGIKTSTGSLWRADTLTKLIKDERLRGNHVQFNDQTLIPNIFPVIIDSELFTIANRIREQNIVSTKGRPRESKNEKVINNIISGFVRCSQCGSKVTTSSNSLGDRYVVCKGRRNFEICTQKGVLLKRLEKVVTTYAKQLDMSKIFSYEEVDTSLEAKLQSELQSLEADEKNCIAKIEQRKKEKKTYLALADALTDIQDRIEEVRKELQEVSVNEPLVAIENYNIDDLLDPTMKELRMSLRKYLVQVLDKVEFRSIDKNILIEVVYNKDVFRHVLITDSSVSTVLNEISIAKEDGLIKYNTNGFSIIEDEEAGTCTFKGLDSVSVEDYFLLANYMDSVEGKRWIIDFMHDPLNVETVLSN

SEQ ID NO: 634 - protein, 493 aa, synthetic construct
MSQKQAILYSRFSSTQQSDGNSMERQLKAAISYCERNALELSSIRFSDLGVSGWSGVERDGLAALLRCVREGYVPNNSYILVEDADRLSRQGFMHVLQLVTELVETGCTFVTLSNGQQYTKHNVKNLSTALPLIIAADLAQIESQKKSERLRAVKTQKRMDRVIQGNQPFWITIVDGIPKLNDKAELARRIVDLTLKGYRPLHIARLFNSEGIPSPRGKNWAVAVIRRILSNTILYGAKSYHESRDGNYDAVETVKGLYPAICTHAEFQQIRVEKSTKKGTAETGPFSKLLRCPCGSALVIKQRRGEDTYRVCSAFIQNACTHNGYHKNIDSALMKVYQMVPITNKVTPSNSPDAERLAELHESLAVFEEMRLEFSGKPKMLARVYADIEKTENDIEEIENKLRTEFQDTQETIDIQDLPSIEQNAILRRYIKSITCEKLNATDTECTVETKSGKFSSIYISYTRGYKEPLVVSTFLNNNPHDNGGDKFGLYE

SEQ ID NO: 635 - protein, 525 aa, synthetic construct
MGKVRIIPAHQQKGNSIHHQRNSQPFEKLRVAAYCRVSTDYDEQTSSYETQVAHYKELIQKEPTWEFAGIYADDGISGTNTKKREQFNKMIAACKAGKIDLIVTKSISRFARNTIDCLKYIRDLKAINVAIFFEKENINTMDAKGEVLITIMASLAQQESESLSQNVKMGIQYRYQQGKVFVNHNHFLGYTKDAQGKLVIEPEESKVIKRIFYSYLNGMTMKQIADSLKADGILTGGKTKNWRSSSVAKILKNEKYMGDALLQKTYTVDFLNKKRVKNEGIMPQYYVENDHPAIIPKSVFMQVQQIIKQRRNGITTKNGKHRRLNGKYCFSQKVFCGKCGDILQRNMWYRPEKVAVWRCASRIKRSKTGRRCMIRNVKEPLLKEATVEAFNQLIEGHKLASKQIKANIMKVIKNSKGPTLDQIDQQLEEVQMKLIQAANQHQDCDALTQQIMDLRKQKEKVQGRGTNQQAKLHRMDEINELVDLHKYGLVDFDAQLVRRLVEKITIFQRYMEFTFKDGEVIRVNM

SEQ ID NO: 636 - protein, 503 aa, synthetic construct
MIALYARVSTEEQARSGYSLSDQIRQCRQKAESTNTIDYIDDGYSGEFLERPALTKLRNDIREGLIERVIVYSPDRLSRNAMNAMIIVNEFKRKVELEFVSVTYDNTPQGQFFFTLQAGIAEYEKAIINERMSRGRREKAKQGKVVKDVKVYGYLYNKEANELNINKDEAKVVRLIFDLFTDPRGRVRGINGIANYLMDKGIPTKKGKGVWHRQVVRQILMNETYTGVFYHNKWNTEGILANKFKDEKISVKHRPREEWIGVEVPAIIDKETFVHAQKLLKESRRRWAGNSKNVYLLSGLVRCGDCGNTMTGRRSKNWGTYTFEYSDAKSTAGSKYCGCGNRIKCEDLDKFVWEAFVNLMLTKGQVLSEVAATNEVEESISFEEFELERIMSELEKIKTGRKRLLNFMTLNADVVDEEDIRNQLKELKDKEEKLLKSKEETSILLESMKNEDFDEEILNEAVEQYLCESNPETLTIEQKQEYLRKVFREIRIYDDGKVELIRM

SEQ ID NO: 637 - protein, 525 aa, synthetic construct
MNANVTIIPPRKIAGNTVDKHEDKPRLRVVAYCRVSTDSEEQATSYDTQVQHYTDYISRNPLWEFAGIYADDGISGTSTKKRVGFNDMIHDCMSGKVDMVITKSISRFARNTIDCLKFVRQLKDKNIPIIFEKENINTMEASGELLLTIMASLAQQESASLSQNVKLGLKFRYQEGKVQINHNWFLGYTKDDEGNLVILEQEAKVVRRIYREYLEGASLRDIAEGLEKDGVKNGAGHLKWNLSNIKGILQNEKYIGDALLQKTITTDFINHVRIKNDGTEPQYYVKDSHTPIIPRDIFFKVQEEMLRRANMFSGEENKKRRVYSSKYALSSLCVCSKCGDVYRRIAWNNRGVHSVVWRCCTRVENGPSACDAPTVQENELQSAIVKAINKVFSISDEVLDTLKNNIREIIAGNNLSEIETVDKRIADKQAILLTLLKAKKDYTKIADEIDELKGKKQQLLIEKAGQEDAKRRIREMEDFLKSERHDISEYDEKLVRKYIKKIKVYEDRFSVTFKSEISVDVERAS

SEQ ID NO: 638 - protein, 601 aa, synthetic construct
MNQELQIIDLVEGEGKAAVKGALITTQYTGWLADGTEFDSSWSRGKPFQCVIGTGRVIKGWDQKFNMIRSALKHRRKVFAVMNAGHNTLSRSPQAISYVRFSSLRQTSGTSVERQEEMIGIWLANNPQFQLSPLQYKDLGRSGFHGEHINGGGFGKLLEAVHAGAIQAGDVVLVEAIDRTGRLDAVDMLGILHPILSAGVSIITLDDNTTYNRASLNGAGLFMLSAKIQSAHQYSAALSRRIEATYEKRRREAKAGVVPKRHTPVWLNSDGSVRELVAKQVAIAFDLYISGLGKNTIARRMRESGLPELAKASGPGVQGWLRNRAAIGEWSGYTVYPPIVSLSTFQKAQMHSENVKTVRPKKTANNFLVGLVKCASCGKNYIVQNVNGKPHTMRCRTHQNDKACDNSASLPIAVLRGLVAFTADHAKRQAVSSLHSSINETEIAALRAEVDSLTAKITGLVDSVQALGAIPELLEPLKKHQADRDSYNARITLLERSVSSGSYWATEADVWRMEAEDPQRLSSLLQQVGYTITVHPNKTIRVSGFDNVWQYLKPVRKPKSNATQGFIITNNGLPQEIGVSDYCDTGVYRRIDDDNLDILDD

SEQ ID NO: 639 - protein, 545 aa, synthetic construct
MTRQKKFKPNDNNLAIAYYRFSSHSQNEASIDQQREQAQAFAEAHGYHIVKEYEDAAMSGTTSDRPQYQLMLSEVGTIRPAVLILWKTDRLGRDRYELADAKRRIRDAGCRVCLIAEPTPDDSPESVLMETMMEGMAEFYSRQLSQNIRRGMTYNAEHALYNGHKVWGYGVDDEKHYVVDDSVAPFVLDMFTRYADGEAMQSICDDFNAKGLRTMRGALFGVKTMNKLLKNRAYIGEYRHGGVTVEGGMPQIVDEELFDRAQRRLAENKRNGSRRKASAQAQDAPRYWLTGKLYCGECGGSMQGVSGTSKTGAKHYYYYCKEQRAKRCTKRPVRKEWIEDAVTGVLKGLLDDSENLASIAVDAAKYYEDNYKSTEYLSSLEQQRRDVEKGLANFVKAIEAGIFNEATQRRMAELQERKDALNDAIEAETVRQSLFEDEHSIKAYFARFLHADFDNPEVRDSVLEYFVDKIYLHEDRLVVTSWYSEDNREVPMEVLNGETEDPFAEGEAVKFDCFPFESTKCLLALIYSRASRHVVVFLCHFGPCE

SEQ ID NO: 640 - protein, 640 aa, synthetic construct
MRRKKDKSNGITALYERLSRDDDNAGESNSIVHQKQMLEDYAIKHGFTNLVHFTDDGWSGATFDRPSWNRLVEGVKNGEITACICKDMSRIGRDHLQVGFFTDILFREKEVRFIAINNGIDSDRQETSEFAPFLNIMNEWFVRDTSKKIKAVLKSRGSSGNAHTSNIPPYGYLKDPENPDHWIIDEEAAEVVRRIYRMTIEGKGPYQIARELSEEKIERPSYYLGKKGLGNHASNYDKENPYMWRGNQVTTLIARPEYIGKTVNFRTFKNSYKDKKTKRADKEDWVVFDDTQEPIVDEETWLLAQKLRQNVRKADPMGEPNVLTGKIYCADCGAPMYNHRQRKGRERIYYTAKGEKRTSYSNPADCYECSTYNLAYQKYDRHCTCHHISTKALKSIILKTIQETCHYVSLNEQEFVYSLQEESAMKDIAVSETVKNRIERNQKRVHELDMLIRKIYEDNVIGRLPDRLFQSMLTDYENEQNELNKIIETDTADMQRIIGGQNNVERFLKLVKKYENITELTPAMINEFIDKILVHEPQGKGADRTTEVEIYLNYVGQFQVPVEQHEPTEEERIAAEKEAERLRRKRESNRKYMKKIREKSKEFAEHERIAEEKSSDSNVCVEQNATSKSNRQKVKGEKIA

SEQ ID NO: 641 - protein, 450 aa, synthetic construct
MKRVALYMRVSTEQQAKHGDSLREQKETLYEYIEQHKDLKVVNEYVDGGISGQKINRDEFQKLLQDVKENKIDLILFTKLDRWFRNLRHYLNTQEILEKHNVSWNAVSQQYYDTTTAYGRTFIAQVMSFAELEAQIDSERIKAVMANKIAQGEVVSGKTPLGYSIENKKLVINDDAPIVIDIFNYFLSSGSLRKTVYYLGSQYGIVRDYQSVKNMLTNKKYIGELRNNKNYCPPIIDKKLFYAVQKALPKNLKTNAKRDYIFKGLLKCSDCQGSVAGQTIKARYKKKDGTESIYERTCYRCVKRRNNKLRCTNKRAFYEKNLERYIFEATKQKFEQIQINYSKKQPKIIKKKNSKKNIENKLDRLKKAYLNEVIDLEEYKKDREALMKELNEIEVEPAKIDIKNVEFILSKEFDEIYKESSEEEKNALWRSIIDNIIVFPDGNITVNFLI

SEQ ID NO: 642 - protein, 517 aa, synthetic construct
MKTIHKLARPQLPEPPKLKVAAYARASTSSNEQLASLQTQITHYENHIQNNDQWEYVGVYYDEGTSGTKVEKRDGLHRLIKDAELGKIDLILTKSISRFSRNTVDCLNLVRKLTDIGVTIFFEKENINTGDMESELLLSILSSLAESESYSHSENMKWANRKRMAKGIFKTVPPYGYQRKGADFYLIPDEAKVIEQIFKWALEGVSAYQVAKRLNEKNIFTRKGSKWQDSGINNILHNIVYTGTMIHQRYFNDDQFRKKKNNGELPMYRIDNNHPPIISWEDYERVQELITLRANAKGTSKGSQKYSQRYVFTKRIICDKCGCNYKRVHIAGKGNTKVVKWSCTGHLKNKDGCDALPITDESLKTAYLTMLNKLILGHTIVLEPLINTPVEGKASKQELEKLSIEITKIDEKLEVLASLNASGVVSTKTALEEQGRLQMELNKLQEKQHKIMESVNGTSTQRIQLEQLHQFTKRSEMLTEWDEDLFLRFAELIVVYSRQEVSFELKCGLLLKERLEA

SEQ ID NO: 643 - protein, 580 aa, synthetic construct
MKSYLYSRISTLQQVQGFGIARQIQTVTDFLENAVIDARLGYQLDPNDYEILESDIGKSAFKGDNWGSNSNLGRFYEDVINRRITRGVLIVENIDRLTRLSNYDASHKLTTLITSGIDIIEVESVTCFSVRIPDSLSVLAMSISRAHNESKRKSTMGQKTWTNRINQLKNEGKASAKICPRWLSIENDKYVLDEEQAQILLSIHQMFLDGHGNTAIVRRLNDEGKLNNGVLWNTLTLQKVLKDERLTGRGIIGKQRIIHDKDISKEEKDKIIKDKLVYIDNAFPVVVPMELFSRVQSKINSSKHGSKNPKTTKNMRNLFNGLSKCGVCGNQMIVCKNGHGNQFYTCLGRRSEKTCSNVGTNYYSFERLLLKNLKEINWDTIYNGSKSNNANSIDEQRQKIIEVEQSIKAFNNELIGLDDDNLELRIIRKIKKNKEILKSLVTDLNGLMTKEISHVEFEPNLELVHDQGNVKLRQDTNVALRKVIRSIDITRNENLVISFIKYYTDTISHLFIYDIKKNNTISKTYMTDDLVFHFDAGSIDVKTGKVELTGKELKEEDKIAFDIWLETFESAVKEVVKIEQ

SEQ ID NO: 644 - protein, 496 aa, synthetic construct
MLKEVRCAIYTRKSNEDGLEQKFNSLDAQRVACEKYIKSREGWVALAKRYDDGGYSGKNLERPAIKELFEDVKVGEVDCVVVYTLDRLSRETKDSIEVTSFFRRHRVNFVAVTQIFDNNTPMGKFVQTVLSGAAQLEREMIVERVKNKIATSKEQGLWMGGTLPLGYDVKDKELIINEKEAKTVKHIFERYVELKSMAELARELNSQGYRTKSDIFKKATVRRIVTNPIYMGKIRHYEKEYEGKHEAIIEEEKWQKAQELIKNQPYRKAKYEEALLKGTIKCKSCEVNMTLTYSKKENKRYRYYVCNNHLRGKGCESINRTIVAGEVEKEVMKRAESLYEKWEEKAEEWKNLSFGKQKEVVKKLIKGVMVKEDGIEVHSESEKTFIAMNLKKKGNKCTVVEPEGKTNNALLRAVVRAHLWKRQLEEGKYRSVKELSAKINIGTRRIQQILRLNYLAPKIKEDIVNGRQPRGLKLSDLREIPVLWSEQLEKFYGLNL

SEQ ID NO: 645 - protein, 552 aa, synthetic construct
MNIAIYSRKSKFSEKGESIDNQIQYCKDYAAVHLSSVSEKNFILYEDEGFSAATSVRPQFQKLLTDIKNGKIQVLMCYRLDRITRNVSDFSKTLELLEKMNVGFLSATENFDTSTPMGKAMIYIASVFAQLERETIAERVRDNMLALSKTGRWLGGLTPLGFSSREVIYLDSEFKERKLYQLVPCKEELKTVSLLFNKYLESGSLSAVESYCLAYDIKTQKGCFFNKSSIAQILENPTYCMGDEASHNYFSKLGCIITFPKNEFDGSKGILCYNRTNQQKKSCRKKRPPAEWIIALGNHKGIIAGNLYIEVQNRLKQNKEKASPRKDTSSFSLVSGKIQCLDCGAKMRIKNIRKSNGHTRFSYACEMKMLSKGIRCTIANINGTDFDDKLMDILWSYLEHSIDYNKILKYLKQKDTPGKLEEDNTASSLIALEREKERCQNEINTIVSRLSKESSSLLEKYLLPRLEELDRQAGEIDQKITILSTSINKDYTSEKSPFFSNKKGGLKSLLAEASINSKKAIVNAMIDRIEWDGNTAYISFRTPDGQHFGIDR

SEQ ID NO: 646 - protein, 482 aa, synthetic construct
MTTRKRAVIYTRISKDRNGESLAVDRQEKACRKLAKLAEMEVVDIFTDNDISAYNGKRRDGFEDMLVAIESGRADVVLCQHTDRLYRRLADLVRLCQAGPNLLIKTIQGGDLDLSTSTGKMLAQILGSVQEQESAHHSERRKSAYVQRAELGVFHNQGNRSFGYTRDGQPIEPEATMYRDAVADLLEGTSLRAIARQWNASGVTTTVAGATRKLKGKEYVVKGVWSSTRIRRLLLNPRYAGIKTHLGKEVETQANWTPLIDEETYRRVVAELSDPTRLKVTSFEKKHVGSGVYVCGVCGAPMQISFPGPGRSQGRKYVCSAHSCVIRGGDPVDDYVENLVVERLSRPDAGLLIAERGVDVGKLQDQRAGWVTKLDRLVDLLDDGTLDGPKARRRAAEYKAEINKIDSQLAQAARTSPTAALLAAGKELRMRWPKLTAGVRGEIISEIATVTINRCGKGKRFDPHAVVDGKVVLDVQWKVDSP

SEQ ID NO: 647 - protein, 476 aa, synthetic construct
MTVGIYIRVSTEEQAAEGYSISAQRERLKAFCVAQDYADYKFYVDEGISGRNTKRPQFKKLMGDIKAGHIKVLLVYRLDRLTRSVRDLHNILDKLEKYNCVFRSATEIYDTFTAMGRMFITIVAAIAEWESANLGERVSMGQIEKARQGEWAAQAPYGFYKDENHKLHIDDQQIKAIKIMIQKVREGLSFRQLSIYMDSTEHKPKRGYKWHIRTLMDLMQNPVLYGAMYFKGTVYENTHQGIMDKKEFDQLQKLITSRQNYKTRNVTSHFVYQMKIVCPDCGSRCTSERSVWKRKTDGSTQVRNSYRCQVCALNHRDITPFNVREFTVDEALMEFMDNFPLTPDDKPQEKTDDESLELKQELKRIENQRGKYQRAWATDLVTDEEFKIRMDESRSRMEEIQVMLKEMKCEVHEEVDIERYKEIAQNFNINFENLSPKERREFVQMFIESVEIEILERTKAKGFRNQRIRVSSVHFY

SEQ ID NO: 648 - protein, 695 aa, synthetic construct
MKSELVKPTHLARRAVVYVRQSTPHQVISNQESLRLQYALRERARELGWHEADIDVIDADLGISGASTTGRNGFKELVGRVGLSEIGLILSIDVTRLARNCSDWYPLLDICGLRGCLIADRDGVYDPGSANGRLLLGLKGTISELELHTIRSRLTAGLLAKAERGELALMLPVGLVRDASGVVVKDPDLGVQERLELVFRTFLKFRTVAKVMRVLNDRDLPLPRRDRFGELRWARATVSAVARILKNPAYAGAFVYGRTHFRAAGRDGGSEAKTPKDIKDWRIIVKDRYPHYIDWSTYEKIRDIVRDNRAEYMRAKTRGAPRDGELLLHGIAWCGRCGYKMYVRYKGGGEYACNHLHSHSGLPDCQRVRAAQIDAAVADAFLAALAPGELDALARARQAQQQVNKALRAGAERELERKRYAAALAERQFNRVDPDNRLVASELERRWEAALSELRTAEDAVAQRASTEPAKRSGFSKDLNNKVVALFDSLPQIWANDATTDAHRKALLRCLVEKVVLDRGERDVALARIVWRGGAVTDLHVKMKVNSVAKLTRGEELRARLLELALTGVPDDQIAEILTREGHHSPNCEDKVLPISVQRLRLAAGIKAKAQRNRWTHEPTLLSAVQLAARLDIPVNWIYVQIRRKRLLIDQQSTGAYLFQNSPAIVNAVRDLRNRTINHLDLRIIQPHQEGHQHA

SEQ ID NO: 649 - protein, 593 aa, synthetic construct
MTLPATIYARFSNADQAQGNSKARQLTLCRDMLGRHGWEGSPDRELIDEGVSAYSGANRASGGLLHTFEQEALAGRYKNGHVLVVENLDRISRQGYDAVLPFLQQLTSQGVTVATVDGDRVYPAYERVTMVSVIEAVVKSELSREESEKKSRRLKAAQNKRVSDAQVNAGQHISSTATVPAWIDTKRISKPSERPIYRTSLNEARVAVLREIFQLTIDGFGTPAIAKILNGRGEPVWKHRNIASKNGWTVGYLTKIVLNRAVMGEYHPMNRPRSGEATSKGIAVLNHYPQGIDPVTFAKAAAARDSRKGTSGAWQITHNNLFSGIAKCGVCGGRMKQEVVVRKGGNRRNGKDRDAVYQSKQDISYLKCHNALNRVFDEERGLPRCSNRNWVRYEKLEQAVVQFAVGWLALNRQSAPSADIESMEVSIADARRFLADKQKQADNAAVSFTRTGSTTMERLMLQLEVEVAEDQKAIQVIEQQLSTLRTSAPPPDFLNQIEQQRTALYSDDETERTTTRVAMKQTLGSLIKSMECDTERNTHVILAGNSLLVSFDNEGELIGNKMGQGTVHLGPHGEIDWHPDFPDVEYEIHPEAL

SEQ ID NO: 650 - protein, 528 aa, synthetic construct
MRRAGIYARFSSEMQSERSIEDQVALCRAYAARQGWAITEIYADYAMSGASVHGRHAFERMVADARRGALDLILTEDLDRLSRSQADIAALYERMAFAGIDIWTVADGRVTEMHVGLKGTMSALFLRNLAAKTHRGLQGRVREGKSAGGRCYGYRVAGTGEREIHEGEAETVRRIFEEFAAGRSPREIAGRLNAAGIPGPRGGPWNASTINGSRERLNGILRNELYAGRLVWNRQRFVKDPDTGKRISRPNAPEARHVTEVPQLRIVPGGLWDAVQARLGNRPPQAARSRRPKHLLSGLCRCGTCGGSFVVSAPRKLGCSTRREKGTCGNRRLISLNLLEDRILSALEHHLLHPDVIEAAGAEYVAERKRLREGAAREAARKAKRLGEIERETARIVDTIAKTDLPDPTALVARLNELTAEGKALKAEAAPAPEVVEFHPGAVRWYRDLVRTLREGLQHLPPDQRAEIIDMARPLVESVIIYPNDDAAGRDLELYGTLAALLGVTEQGRKGMHKVVAGTGFEPVTFRL

SEQ ID NO: 651 - protein, 561 aa, synthetic construct
MKNKKAYVYTRVSTSMQIDGYSLDAQEERIKQYAKAYGIEIIETYKDAGKSGTSISGRNEFIAMLNDIEAEKDKVDYVMVFKLSRFGRNAADVLQSLQVMENHNVNLICVDDSLDSSKDSGKLVITILSAVAEMERENILSQTMEGRKQKAREGKWNGGFAPIGYSLDNGELVVNEDEAKAVRMIFDLYANSDMGANGVSKYLVSLGINKPIRQNGKNPYFSASLIRQILDNPVYNGKIAYGRRKTIKDKTTGKIKLEKSDHYIIAQGNHEALIDDELWNTVQEKRKSQAKKYEKINRGKDERVHILSNLIKCPYCGAGLYGNKSRKRNKNKEGEHYKDYYYYGCKHRQMMNGHKCTFNKQIRAELIEKEVETIITQVVSNPTFAKKIEEKINIQIDTKEIDEVINKHLAKIRQLTGTKASLINQIDSLNFEDKHYDRKYTDLNLRLDAIYDQLEYAEMQLNDSRKRKEAILEEKITSDNIYKILVNFNSLYTVLSDIDKKRLLNEMIEEIQIYDEKTEKDTWIKSVVFKLPLIDNEIDFGLDNKDNVESVVLMTKVAPTK

SEQ ID NO: 652 - protein, 570 aa, synthetic construct
MQKNVLPPDVSLRGLKAAQYVRMSTDAQKYSIENQMAAIAAHAARRHLTIVRTYADAGRSGLRIQGRAGLQDLIRDVQLGRADFDCVLVYDITRWGRFQDVDESAYYEFICKRAGVRVHYCADEFENDGSLASIVLKNIKRVAAADFSKQLSKKVFLGQCHVVSLGYWRGGPAGYGLRRMLLDEHGKPKGVLEYGEHKSLKSQRTVLVPGPATEQRVVRRIFSAFVDEKKTRTQIAVELNADGIHNARGKPWTSLTISNTLKNEAYAGHLVYNRRSQKLGEKQVANPPEMWVRRNNAFKHLISPQLFAQAQRRLNEVEFGRVLTDAQMLDRLRTLLRQKGRLSLKLMMTTKGIPHSKTYAQRFGSLAEAFRRVGFEPKPRYCFRETAARTDRLIASVARDIITEVEKRRRSITFLQELRLLTVSSSVTISVTLARVVSDGERYPGPAPRWELQRLEYKKSDLVLVVRLAATNGQIQDFFLLPTANLPKTRDGRVRISARVFGEFRCPTFPAVISALHQRLDGPQFSLEGPARKLSRPSAIRNHASTTTPGRPTTPRTPGRPKKQTARARR

SEQ ID NO: 653 - protein, 548 aa, synthetic construct
MNDTAPNVIIIPAKVETPQEQEKKRHLRVAAYCRVSTDSEEQLSSYENQLSYYTEKIMKEPGWTMAGVFADEGITGTSTCKRKEFLRMIRQCRQGKIDMILAKSVSRFARNTVDTLNFTRELRSLGIPVIFEEQNINSIYPESEFLITLHGAFAQAESESTSSRVRWGKRQAMKSGHVAMQYKQLLGYEKGPDGKPRIVPEQAETVRFIYDRYLAGDSIREIKVALEGQRIPTVSGKVEWMGSHIRSILTNEKYCGDVLLQKTFIQDCISKKVIPNTGQLPKYLIQNHHEGIVSREIFDAVQLEMARRNAKAGATRKSTPTGRGKYSGKHVLSNLLFCGECGTAYRRCVWTQRGVKRPVWRCVSRLDYGKKFCTQSPTLDEEPLQQAILAAVNAIMLDRDTQARQLTAVMEWELAPMLGESMSLADIDRALEELSSRFNSLLAEASANPAEDYTERFRKLSESTARLKERKAQLEGACQEQGRLQNRLRVVSAAMEHMTAAMTEWDEEVIHQLLEKVTVLSREKIRVTFRDGREIEQYVAQPKRRKLA

SEQ ID NO: 654 - protein, 616 aa, synthetic construct
MNDYNKITALYSRLSVGDEDRDGGESNSIQNQKKFLESYARQLKLTNIRHYIDDDESGRFFDRSAYSRMIEDVENGKIGVCIMKDMTRWGRDYLQVGNAMEIFRRNNVRFIAVNNGIDSEKPDTLEFAPFINIMSEWYAKDISKKVKTGIKTKGMSGKPIATEALYGYVKSPDNKDFWIIDEEAAGVVRLIFRLFLDGKNRNQIAVYLTQAQIPTPTFYMKERGRGTCKNRALNEDNRYKWNKATLTHILTRQEYCGDVVNFKTTKHFRDKRNHYVDRSQWQITENVHEPIIDRADFETAQRILENAPVRRPNGDGEIHPLSGLLFCKDCGAKMHIRIDYRNGGKRHVAYCSEYHKGKAKNPKCHSPHIIDADLLMQTVAEVLKKIEDYSISNRAEFEALVKKNLAMQQTDQTKKQQKRIPQITTRLEQIDKVLNKLYEDNALGTIPQDRYEQMSQKYSEEYYALKTELSILQEQLSAYENAGGRAQKFLKLTERHAAFTDLTPAILNEFISRIEVHERDQKRARYAIQHISIYFNYIGRFENEVTQLAEPTEQEIRQMREEIEEAKKEKSRAYHRKYSREYRARNLEKQREYERIKAREYRARRKAQTAAAQPAQ

SEQ ID NO: 655 - protein, 540 aa, synthetic construct
MPQADGILTSLAGRLAAQYVRMSTDYQQYSTENQKLAIAEFAAMQGISIIATYEDAGKSGVTLKGRPGLLQLLQDAQAPTHAFSLVLVYDVSRWGRFQDVDESAHYEYLCRQAGVQVVYCAEIFSHDGGAVATLMKTLKRAMAGEYSRELSQKVFIGQYKLAERGFWQGAAPGYGLQRVLVDSDGNIKGPLRHREHKSIQTDRVIVTPGDEREVALVRRIYDWYVSQGVGCRRIADRLNAFGMCNAYGRPWNPQNITGILSGEKYAGTNLYARTSKKLDANWHRNPPSEWARSEGAFPPVVDHATFDAAERIRTNRTQNLSDDEILKRLGDFVRSADVVSVKEIDNARTLPAGKTYSVRFGCIKNAYALVGYEPSYHMGGPEVFRASRAAQQECIGKTTSALTALGHRVDISADETTIRVDDELVIRFAVRPILHYDRRGPRWRVRWPTYSSPDLLVVLRLDSAFETPIDFYIFPRGSLVPGYDFSLSIRSGSSEPFEMFRFSDERILFELTARTRMEALDGSQSPHSNLRYPDSPDSSA

SEQ ID NO: 656 - protein, 558 aa, synthetic construct
MKIAIYARKSRTTDKGESIENQISLCRQYAAVHFQDAIFDEYKDEGYSGGNTNRPAFKELLQSFKKEHYDVLICYRLDRISRNVLDFSSTLDMLSKNNIAFVSIKENFDTTTPMGRAMLHISSVFAQLERETIAERIRDNMLELSKTGRWLGGTTPLGYTSKKVAYDVKNSKTKYYTILKADEMEASIVKLIFKKYLELGSLSQLETHLIQKDIRTLNNKFYHPHVLKNILANPVYVVADQSIYDYFYDRDAYIAHPKSDFTGDYAPMVYNKNRQGKIIYKNNISEWIVALGQHRPLISSTLWLQVQKQLNTNRRKAIPHHQSSHALLTGLIHCGHCGAPMKVTNQSVLKDGSISYIYRCTTKLKSHGKLCNMPNAKGHHLDPAVIEKVKQLLPDNNQLIQGLAKERLTTASAQQEDDKNIIIMEGALQQNEKAISKLVRLIASCEDSLLERSYHKEIDRLHKEQMVLEEKLWGLQNTKLENSKLIENTDKIIDILRDFDRRINEASINEKRILLQSIIHSVVWDGHKINVYLYRSEQDYENNNHNYPHGCKITYEKW

SEQ ID NO: 657 - protein, 477 aa, synthetic construct
MSNSSSFPAKISAIYCRESTEKQNIQSLIDMCKKAAKKINLQNIKVYYDVASGYNKDREQYSKLKEDIQNNLVDTLVLYESSRLTRDELEHHIFYGLLRVHNVKVYTVTHGWLDLQDADDTFLTNLLNLLDAREGRKTAKRSKDRMTELAEQGRWTGGPAPLGYKLVNKELVIVPEDAEKVKTIFKLFLDGKTRQSIANFFGYEVKKVRRLLENPVYIGKLKFHSVEIINKKKIHHKDYKMLDGIHEPIIDESTFSLVQGKLKNIKVERNTDVYIFKDLIKCTCGRKMYRVVNKYNYLKKSTNEISQKTENLYYCRTSDKYKSIGCGAIGIHEEELFEEVMASLQKIIFSLEVEDIDTQFDDYQSQLALYKKELASLSGKEELLTRQLLNSLISEEVFEKLMKELKEKKAFLEEKIKNLTTLINNKKNTNKNSEILKKYFFKLEKEKASEKINNFLKLIIDEIEMVNDYRFYIHLKF

SEQ ID NO: 658 - protein, 488 aa, synthetic construct
MKYAAAYARVSTKEQSILSIEGQFEKIETYARNNKIQVVKKYYDKESGTSESRENFDKLLEDAYSKKFSIILVEKIDRFSRFSKTRAEMIIEELEKEGIFVIAVDQPFDVGSPYGRFMRSILLSQSKLEAEVTQERTTQRMRDIAKHGYWMGGKPPYGYYIDSTKDSEGRKRSVLKIKRDEAKVVREIFKLFNQGWGYKKITEYLNNHLEFAKPRSKKGLWNTSTVHDMLKNEKYVGTYVYGKGYKKRNHVEREDAIKIPGVVPAIIKKEEWELAKSKVALGGQRTRTVKTYILRGYLMCGECGAKMSGTSGKYICSAYANKQHDVYVSVSQNKIEKIVIDYILKQIERFTDQDYQEMAELYKYLRKIKDKSKNEDINKLKEALSKIQNKIKNIVGIISQGELNRSLLQELDEESKRLEVERDNIVSELNYINSKAGITITAEQIKEKYEDMKVKLNSENWLHRQDVISDVIDKVIYYKSGLYEIKMK

SEQ ID NO: 659 - protein, 510 aa, synthetic construct
MPRKKCVIYTRVSTEEQTKGYSLDGQERIDRDFAASLGYEVVNVFREEGISAKDLNRPQLQNLMSWVREHAAEVDAVVFWKWERISRGTEYDYAVLGRFFDECKVAPLSATECNEDSPEGELLRWITKGTALYERRKISQRTAMGMEQKAREGIIPCKAPIGYKNYTLPDEKKIVIVDEEKAPFIKRAFELYATGNYSLKRLGDTLYLDGFRHPKTGEKFPPRKFEWMLKNSFYIGKIKYKGNYYEGKHDPIISKELFYQVQSMFGWKKPKTHNIYFPYTNMIKCACCGEHRLSAEMKRGAHNSGEYIYYRCKCGCKAIKQEELDKVFIDMLDDIYIPPKEIELIKDEARELLQAIKDYENSLESPIEMQKKIEQIKTRIKKSYSDKLDGNLPYGMDENDWNKLMADWASELNQLEMKLEERNQKSKVLYNHLNLIMAFCNQLPELFRLATPEIKREIVQTCVRTLTYNGETLQIELFPVFYKMKYWKNVKNGAEDGIRTHAYRNHNPRS

SEQ ID NO: 660 - protein, 454 aa, synthetic construct
MTMTQTPARRLRCAIYTRKSTEEGLDMEFNSLDAQREACEAYIASQRAEGWACLRERYDDGGFSGGTLDRPALKQLIADIEDGLVDVVVVYKIDRISRALMDFSKLVETFDRHGVTFVSVTQSFNTTTSMGRLTLNILLSFAQFERDVIGERIRDKVAASKKKGMWMGGFVPLGYDAVDRKLVINPAEAENVRTIFELFARSETTASVVRELDARGIRSKRGRPIDRGALYKLLHNRIYRGEITHKGAVYPGAHEAIISSELWDAAHAVLKGHTHARAGRTRAAAPALLRGLIFTQTGAAMTPHHTKRKGKRYCYYTSMDVIRDRPRAELRGPQRLPAAMVEEAVIAEVRRMLRTPEVVARTARTLTKERPDLDENTVVAALGQFDDMWAAFAPRDRPPDGHARRGSLPAEQARVVQLLVAQVTVGENGMDIDLRHDGLGALASLLTPKTEDAA

SEQ ID NO: 661 - protein, 519 aa, synthetic construct
MKVVTYGRVSGREQAESGTSLPDQKARLSEWATKDGRKHVRHFEDPGRTGGALDRPGLTALRELVASGGVDVVAVTKSDRLARDQLVQLTLADEFSRHGTAVTAIDEGLTTATAEGQLHGGILGAVAQFERQRIAARTRAGRRAAAKQGRFVGSTPPFGYRVAGEPRARRLVIDEGQAATVRTIYELLVLGRTQAKHVAAELNRRGLTPAKKGVWDAPTLRRWAKVIAHICAASGTWLFDGVEVPIPPIITPAEAALWRTWAREARTIYPQRSVSYLLTGLVVMPCGRRAMGRTASKERPTYSCRDRLTAGVGGHDDCHNVEVACLDTTVIQHVRDVLLQPAILRAAISGRGPALSPAAELSQVQAGLAELDVRIASEVALLREVGIRRDALEASLRPLKAEQDTLTARARGLRRKVAEEAAGADSRQVQQAVARLSGGLGIDDPETWRQALEALHVVVRIEDHLPCETCGGSGYHGRHATTQHPLRCTACLAGTQPVVEIEMDDVAALAVADGLEASG

SEQ ID NO: 662 - protein, 532 aa, synthetic construct
MKLPDTFRSPPPDEEGEAYIGYVRVSTYKEEKISPELQREAILAWAKKTRRRIVKWVEDLDVSGRHFKRKITKCVEDVEAGTVQGVAVWKYSRFGRDRTGNALWLARLEEVGGQLESATEPVDATTAIGRFQRGMILEFAAFESDRAGEQWRETHNYRKYTLGLPAQGRARFGYVWHRRFDAATGVLQKERYEPDPETGPLVASLYHLYVAGTGFATLVIKLNEGGHQTIQGARWTNETLTRHMDSGFAAGLLRVHNPECRCRNTGGSCRNKIYIQGAHEELIDWDIWEAYQRRRAVVRASHPRARNSLYTLTGLPSCGGCRWGASVTNTSYGGEYRRAFAYRCGLRAKAGATACDGVFIVRTKVEHAVEEWLMDKAARGIDMAPSTGPGPTLTPIDDQAARARARVSAQADVDRHRAALARLRAEHAELPEDWGPGEYEDAVDVIRKKRAEAQSILDNLPDADPAPDRAEAQQLIASTAEAWPALDDRQKNALLRQMIRRVVLTRTGRGTADIEVHPLWEPDPWSKQVSPT

SEQ ID NO: 663 - protein, 511 aa, synthetic construct
MTANTKTPIRAGCYLRISSDPNDKRKGIDRQREDVSALCEAKGWDPAEFYIDNDRSASNGKERPKWDKLLSDIKAGKRDAIAAWSLDRGWRMMSELETLREFFAGIDRPILLSTNRQGDIDLDSPSGVLMAQMNTSFAEHEIAVMKVRMRRAARQKAERGIPQWRHAFGYTSGEHTAECAANCRNPHHRLDPVTAPLVDQVYRDVLAGGSITDAAQWLNNQSAFGLTGKPWSASTLSLFLRSPRNAGLRAHNDVIVTDTNDQPVKGTWPALVSESTWYATQSKISAGTRTVMTKTGPRLVRQPGTKSVRRHILTGVMQCGKCGDGRLNGKWAAPRHGSNDAGHEIVYSCKDCRGCAIRANDVEPLLHEIVSDRLGRADAGDLLVNKAHDSTEAERIRTERAVLLTQIETANREYDDGIIDGARLKGRTERAKEKLAELDRCVQDQERLRVLDGLPLGNPAAILNAVKDLTADRFRAVLDLLLEITVLPVGRGSHNRTFNPDRVHDGLVWKV

SEQ ID NO: 664 - protein, 416 aa, synthetic construct
MAQVSVVTPVRPPTPKLVNVAAYTRVSTNAVEQLASLSAQVSYYSRLIQSTPGWAYAGVFTDEGITGTSMKSRQGLADLMNAARAGKIDLVLCKSISRLARNTVDLLATVRELKDLGVAVRFERERIDTLSADGELLLTLLASFAQEESRSLSQNVKWAIRNRYKNGGTNSFVVYGYSWADGEFTIIDDEAKIVRLLFANYLDGISPEKTAAILNGQGVRSRGGGRFYGSVFRRMLENERYKGCQMLQKMYRPAIQAPTRALNDGELPRYWVEQALPPIIDKSVFDAVQAEIAYRREIGPAATPSKNTGVFTGRICCGACGKNYQRKTRTYKSGTSYKFWRCWSACTGNGNPCRGHNLRETLLEHACADVLGTQSFDPVSVVEQIVMIEAFEHQLTFHLADGTMTPVGLTSEGRLV

SEQ ID NO: 665 - protein, 557 aa, synthetic construct
MMIRKLSAACAPRIAIYGRHSTDKQNPLSSTDQAAACMPLVQVLNGQVVATYLDSEISGYNRNRPGLKRLLASVAAGELDIVICESLDRLARDDEDIAWVGKKLAYDHVQLFTVAEGEIDQIKLAVAGLLGSMFLSSLQQKTLRGMEAAVLAGRAAGGRTYGYRTVSREGPSGSVIRGLREIDEKEAALVRRIFEEFASGLSSIEIVRRLNAEQIPSPRGGEWNPSTVQGDPKKHTGILNNPLYRGQIIWKRREWRKNPNSDDRERRYRMREESEWVRVDAPDLRIINEPLWKAVRAEIEERSRPRATFSSPVASRRRKHPLSGLIRCASCGSTFTIAGKDYYRCPGERERGTCHNSLSIRRGEIEEAALSCIENHLLDPKLIELFVAEVHRQTELQNRSADTNDVRNAARLKELEGQIATLANNMLVSSASPTLHKMLADLEDEKRLLETVKPIASPKVKILPHPVLVERFTAKVKNLRSALDDETIRLQAVEVIGALIQSVTIFPGEAPLRELSANVVDLASYAASLNDADWAVRRECSVMVVAGVGFEPTTFRL

SEQ ID NO: 666 - protein, 528 aa, synthetic construct
MVNALIVRPGTNLLSPTSEGRAAQYVRMSTEHQRYSTENQAAAIAVYAAQHSLAIVRTYKDEGRSGLRIQQRTGLAELIDDVRSGRADFDHILVYDVSRWGRFQNVDESAYHEFTCQLAGIKVCYCAEEFDNDGSVIASIVKNLKRVMAAEYSRELSVKVHAGACRVASLGFKQGGAAGYALQRELVDEDRLPRGIILSKGQRKHLQTDRVLVRPGPEQEQRIVAQIFREYVVHRRSQSSIARLLNKEKVPNHRGTPWSDDMIRNILKNEAYIGNSVYNRKSFKLKQVMKKNPPELWVRATGLYEPIVDTSIFRKAQVLLSEQYVRLSDEALLKKLREALSINGKLSVSIMAAMDGMPSPALYAYRFGSLRAAFRRVGYVNSERDFDYLDARLESDAELSRQASLIATRIRALGAAAIFNESTKVLMVDGKLGISLRMARYYTAPRHAPVWLVHRRTAEPAEHLLALRLDEERNREVRDYFLVPLSEMASQVIALTTTSRSRFAAYRCATVDDVLRAVMTKVGALPSR

SEQ ID NO: 667 - protein, 660 aa, synthetic construct
MTSTLPDWLRPPATTAPKRTIRVAFLGRTSTEEQQDPTLSIPRQLTNSERALLPNMVIVAWFWDVESSRKELSQRGRGTAWQKFDVAVQRDGGLADMLEEATSPDRRFDVVICESIDRIARWTHQGTKIEHDLELAGVPLLAADEPVMQSNSRKRAAQILLRRTKQGVAEWYMIEMLEKSWDGFEEHTTQGWNVGKPPYGYLAEKHKHPVPAKRAEGKHKTKLKIDPDRGPVVEQIYAWRIDEKLSYRAIAERLNTDLDRYPPPQPVDPARAVGRWTGSAVREILVNPKYTGHMVWNRRSTKDKLHPGKVNPREQWVVSAQPTHPGIVPIETFLAAQNVSRSRERSRADAHHGTPNRHRQTKRVYALRSYVWCTPCQRRMFGRTVTGYTYYSCQPRERAIPEGHPSMISVTEDILLDFTDRFFNTYVLGPDRVRLAECSLDITAQQAADEQRRQIAVLRRTLDDITTRRRRLLRVIEENDDPDGTVFAEISERRAQLDRDRETKTAELAHLEETMPSDPGSADILAALPEMEVKLGLLPTDRLRRLLDAFAVQIYHDVRTNQVAFRATVSQHAAPHLARLTRATADDPRTATHRHTSANDAAPADDDGGSDHLQFCDMPRRGHLEDQLMIPLACGCARQAARRRCRHRRHGDHPSGLRTT

SEQ ID NO: 668 - protein, 609 aa, synthetic construct
MRNLSPDSRAVLYLRVSTKDQAQRGGELEGFSIPAQREACRRKAESMGATVISEFVDAGESARSTDRPELQRMLLMLSSEAVDFVIVHKVDRLARNRVDDVEINVAIQKTGARLVSVTENIDETPSGMLMHGIMSSIAEFYSRNLANEVVKGMQQKVQSGGTTALAPIGYENVRKVVGGREVRTVQIDRERAEHIVWAFSAYSSGEWSLRNLAAALESRGLVQKATAKRAERPLRPNRLQTILRNRYYLGFVSWKGVEHVGQHEPLVSPEVFEQVQKVLDAHRQSGERPQKHHHYLIGSLHCARCDSKMIYSVSKGNGGAYQYFVCLGHHSKTSDCALPYLSVETVEKQVVTAWHREKSKWNELAVRAIESTLADDLRAHRDEAAQQHGAFTRRIEKIQRERLQWAEKAMDGLVPDDIARNKQSQLGRQLGSLQEQQALLDKTNADYSGTLARVANLIRNCGDIYERASDRLRRDLNQSWFNQLRVDETDGDVSVSATDRTRLMATLHQAGPGVIHAPTIDSPPPRDISLSTFFSDNENGEDRSPRRFSRVRGANEHLLVELRGLEPLTPTLPVWCATSCAIAPYSVRSNSRTRSGCSAFRLLEESYTT

SEQ ID NO: 669 - protein, 556 aa, synthetic construct
MGRLIAPEPTSMASRAALYLRVSTGRQAESDLSIPDQRRQMQAYCAGKGWTTGEEFVEPGNTATDDKRPAFQAMMDAALTKPAPFDVIIVHSFSRFFRDQFQFEFYFRKMAKNGVRLVSITQELGDDPMSEMMRKIMALFDEYQSRENAKHTLRAMKENARQGFWNGSRPPLGYRVYVAEQRGPKLKKKLEIDPVNAEKIRLIYRLALVGADGYGPMGFKAIAAYLNDREIRTRDGGKFGLDAIHQILHRPSYMGEHHFNRTSAKLKKRKPESEHAICEVPAIVTREEFQAVQDSLHLRHWKQMRPNHVNCGLLLAGICFCAKCGGAMTLRTGCSSTGLRYRYYTCSTKARQGPTGCEGITVRVDKLEAAVVDHLERRLLHPERLEVLLGNVIDKRTDWIDRRRSHVVELRQRATQAASKLKRLYEAVEDGLASTDDQDLKDRMRELAIIRDESRADADRAEAAIEKLGPMLTPEVLARFAEATKERLRDEHGKYRREHVRAVAQRVEVISPSEMRIMGNRTDLLRTMAASAGEQSAVLGVRILKPKWRTRHDSNV

SEQ ID NO: 670 - protein, 543 aa, synthetic construct
MKKIISIAARNLSFPDSGQFLRKTRVCAYCRVSTGSLKQSESLETQISYYERHIKNKSGWEYAGVFADEGISGTGMLKRTEFNRMIRACELGKVDLIMTKSISRFARNSADCIDVVRHLKNIGVGVYFERENINTLGADSELVLSILSSIAQDESRNISENVKWGIQKRFREGKFYITTKRFLGYDLNNEKQLTVNSEEGKIVKRIYREYLNGRSLKEIKSGLEKDNIKTVTGNRVWNESAIKYILQNEKYCGDAVLQKTITVDYLTGKRKKNKGEAPKYEVKEHHEAIISKEDFLKVQNIRKIKALKYGNLPENRDKYQNRYAFSGKIICGNCGAFFSRRTWNSKAKSKQIVWQCRTYINEGKSSCCMKAVDDITLKAVFVRVFNRIYEAKEDFFKRFADNIEKVLKRNEKCEDILRVDREIENISGKIKELVRKQIKGELEESTFDKRYRNLKDTLQEFKNRRNSLSYNDEKYKKLLERNKRIKKFIEDRDGIITEFDDDIFENLIEKIVAITPTHLEFHFKNGMVVEEEFIKKKGIKGLQ

SEQ ID NO: 671 - protein, 452 aa, synthetic construct
MKAAIYIRVSTQEQVENYSIQAQTEKLTALCRSKDWDVYDIFIDGGYSGSNMNRPALNEMLSKLHEIDAVVVYRLDRLSRSQKDTITLIEEYFLKNNVEFVSLSETLDTSSPFGRAMIGILSVFAQLERETIRDRMVMGQIKRVESGLPLTTAKGRTFGYDVVDTKLYINEEEAKHLQLIYDIFEEEKSITFLQKRLKELGFIVKSYSSYNKWLMNDLYIGYVSYSDKVHVKGIHEPIISEDQFYRVQEIFSRMGKNPNMNKESSSLLNNLIVCEKCGLGYVHRAKDTVSRGKKYHYRYYSCKTYKHTHELEKCGNKIWRADKLEEIIISRVKNYSFATRNLDKEDELDSITEKLKTEHSKKKRLFDLYINGSYEVAELDKMMADIDAQINYYNSQIEANKELKRNKKVQESLAELATVDFDSLEFREKQIYLKSIINKIYIDGEQVTIEWI

SEQ ID NO: 672 - protein, 563 aa, synthetic construct
MVVIYCRRSNKDLERETSTAVQREKGVAFANRLGLPYTVLTDAGVSGTHDEVEDRPEFAKMMDAIRKNLVSHVWVYDQSRLERSPKIWHIFQHLVVLKGIKYFPNGVETDLNDPQTQLTTGVISLTNRMFAQLTSKKLKDTKAKLVAAGRANGINPYGYTTDENGMLVLDDVESEVVRRLYQMSLDGLGAYTIANVLNDEGIPTKSKNFKGKSFYRKDDYTKDVKEFNRDEVKWRGNVIHDILKNTINKGKKRWNDIFVDAPAIVTEELWGKVNNNFENNKRNAGRNNTYRYLLKGILFCDCCGGQMVGRKRPLAKDTTYKCRHGQATKFGCRGIAMAKIETFVTKHLFESKGLKKFLSSQPSFDSVGEMRKHLKSVELSKDKLEKKQKHIYSLLLDPEFSDDETIKNELINVKRKLENTINEIEEAKIKIEESDSVTKERRFTDAFEAYINDKSFDTIKRGIHNVIEKIQVLHVKESKEGHYLIKICYRGYRQNSVFMTNYQAMDWIWLSETEVGENNSNPEILVDIRNTEHGVKFDYPTLSNTTDKIELLRLKKNKLLKFN

SEQ ID NO: 673 - protein, 561 aa, synthetic construct
MTVHELPATFSSRGEGEPYIGYIRVSTWREEKISPELQETALRQWAARTGRRLLEPLTYDLDVTGRNFNRKIMRDIERVERGDARGIVVWRYSRFGRNRTGNAVNLARLEAAGGQLESATEPVDASTAIGEFQREMIFAFGNFESNRAGEQWREAHEYRLAAKLPASGRARFGYIWHPRRVPDLSQPGGWRLQQERYELHPDYAPIVEEMYERKIEDHDGFNNLAHWLNEELNITTTRGRPWGVSSVSRFLDSGFAAGLLRIHDRDCKCGYGANPKMHRCPNGRMIYLAGAQPPIITPEQWEAYREHRAETKRTPPRARRATYTLTGLMRHGYCRFHMAAASNSNRHGPPEPGFWLVCSRHKHSNKLECPHGINAKREQVEGDVLRWLAEEAAAGVDAAPSVPRQRAEPAEDPQARVQRERARLQAELSKVDAAIDRLVTDNAMHPDKYPVDSFERVRDQLLGKKSTIVGQLRDLGEAAKLPTREEYKELVVGLLAEWKTIQPIERNAILKQLVRRVVCYDERDDRGRLLNVRTEIHPVWKPDPWASHPDEVIHRRDEPVR

SEQ ID NO: 674 - protein, 510 aa, synthetic construct
MTPTDVPATFRPRKRASLYARLSVAADAENLSLEGMIRDMRALCDREGLEEVALHIDDGKSGGRRDRDEFQAWLNDARTGACDVLVNPVTDRLTREGLNVAATILDVVEGKDPATGRLAHPPVRLIDCNGLDSLHGDAFRFRFVIQAEVGRAERERIRSRSRKRARNLRRAGRWGGGTPPFGYKAIPNPDGPGWVLDVEPKEAKAVQEAAEAILKTPPDPLTRVVRRMNHQGVPPRRAKAWSRVTLKRVLTGDHILGRVTQNGRLLRDEEGEILAPFSAVLSVSQVSALRERLKPKGGASKGGGHPARILSGLLSCHSCLSDLVVHHASARTRDGKQKVEGKPPRISYRCEARSQGRVCEKPVTVTAGPIEDFVVTLYLNTVGSLPMYKERTIVSGLEELASVEEEIKEALADLATAADAETFARLQKLQARQAELSSRDTGSRTEMVATGQTMAEYWEAALIDDRRELLEDAFDELIVGPGRQGPKGFDPARLSYQWAERDDVAFQESI

SEQ ID NO: 675 - protein, 530 aa, synthetic construct
MARKPAGPVRYVDLLLRKSQVVRGTAARDILSLKAQEVRGRAWAKRDGYEIRRIFRENLSAYKKGVKRPDFDAAVHALLDGDSDCLWVYDSSRYSRQGAGDVLKILDVPGKRLVFDLDRLDTDIPADRSRIVGKAEDAREYSRVLSEKVRDTKAQQREEGKWLSMAPYGLKVTKKRKLKHGKFWPVIERIHREAAEGKSNWKIALGLNADGFRSTRGGPFRSNTVGKILRNPVYLGWQVVIVKRQSQIYLNAKGKPVRVFAKGVEGIPQEVWDKHRKIAAGIDRRGNLPTVEEQAKPVERSPASGLMWCDGGGRDPKKGHSATIHGGSFRCGPLNLGEKTCPDPVTGMRTSVERVLAKEWHTKLTTASPLDPVMLAVAEGWVALAHPEESKKESEARGQIKLAEEAVAKLDRLNAGGAYTGRDGEETFIKLRRAAVEDVESARKEWEAVAKPMADIAVLRDPERCLKLWETGDAHYRGQLLRLAIDKVFLKKAPYQGARFKADRLDIVWKTPRGWKPPKKAEKKPGAGES

SEQ ID NO: 676 - protein, 455 aa, synthetic construct
MTRPTALYLRCSTSPQMEKFGPSVQRELVNSYAQRMGLSITGTYEDAISGTKARRDALDQLLIEAPRYEAVVISSVDRLARRVRIAYGVLDELAEAGLEVHSADMGLIDLEDESSGMSFGLRSVMADAQHRQIVKRMHAAKVAKVRAGEPIKPLNGFGWKQGVIDEAEAAWLRLIFDRIRSVGANILARELNTQGVTTRSGRRWSKTTVLQLITNPVYMGEYRYGRGPTRRGRIKAVCQVEAIISPALWQAANEAVQRRATSKGRTSSLEDFPLSGRLTCGTCGRSMGGVSVHRKSGMIHRYYACNSRYAEVDPCPHRTNYPAEKVHAAVMEELEGALRNPADLERLIDLPTPQAPDLGHVERDAERRLSRLEAAYDAGAYTAIEYAERRRALQAEREALTQLVARVAVPAPDLKKAARALEEALRSGKLALAVAPLGLRGVLQPGGDVEIRIAP

SEQ ID NO: 677 - protein, 553 aa, synthetic construct
MLRAAIYARFSSQLQREASIEDQVRLCQERASREGWQVTEVFSDMALSGAALLRPGLQSLLDRAGRGEIDVILAEALDRLSRDQADVATLYKRLSFYGVQIVTLAEGAVSELHVGLKGTMNQLFLKDLAAKTRRGLRGRVEAGASGGGNSYGYDVVRRLGSDGLPITGERRINAAEAAIIRRIFTDFAAGQSPKAIAKALNAEKVPGPRGSAWRDTAIRGHRQRGTGILNNELYIGKLTWNRLRYVKDPETGKRVSRLNPKAEWITTEVPDLRIMDDALWAGVKRRQGEIDAEPRVQAIKATRFWEQKRKTHLLTGLLRCGSCGGGFAAVGKDYLACSAARKLGTCSQKRSFRRDDLEALVLDLLRERLMQPEAVAAFVAAYGKQVNAGRADESAKRARLESEQAQLSRHLNGLYEAIADGLRTPGLKAKLEDLEARKAAIETALDAPLPSPVRLHPGLSEIYRRKVTDLAATLSDPAIRSQALDAIRGLIESVTVVQTAAGTILELQGALTAMLAFAQNAKSKPGEELAEADVVGSVKVVAGAGFEPATFRL

SEQ ID NO: 678 - protein, 510 aa, synthetic construct
MALHENSKIAVYSRKSREDRDSEDTLAKHRNELEYLIKRENFKNVQWFEEVVSGETIDERPMFSMLLPKIENGEFDAVCAVAMDRLSRGSQIDSGRILEAFKQSGTLFITPKKTYDLSIEGDEMLSEFESIIARSEYRAIKRRTINGKKNATREGRLHSGSVPYGYKWDKNLKAAVVVEEKKKIYRMMIKWFLEEEHSCTVIAKMLNELKVPSPSGRSIWYGEVVSEILSNDFHRGYVWFGKYKKSKSSNSIVQNKNLDEVLIAKGHHETMKTDEEHALILNRIEKLRTYKVAGRRLNMNTHKLSGIVRCPYCHKAQAIEQPKGRKKHVRKCLRKSATRTKECEQTKGIHEEVLFQSIMREIKKYNEALFSPAEQDVNDDSYTTQLIGLREKAVKKAKGRIERIKEMYLDGDISKTEYKEKLKISQETLQKAENDLAELIASTEFQNALSAETKKEKWSHHKVQEMIVSTDGMSNSEINLILKMLISHVTYTVEDLGDGTKNLNIKVYYN

SEQ ID NO: 679 - protein, 563 aa, synthetic construct
MIIKPKTDKTTNKKRYVIYTRCSTDDQAQGDFTTLDSQAYHCKNLLDAFGYELAKIGNKGRIDDDGYSGKDLDRPGIQMIIDHVRRGTAPFDGIIFFRLDRLTRNTRDLYWLIDLFNSKEIAFVSVRENLDSSTAIGRVVIGILGILSAFERELTGERVKASAIARVRQGKWVGGMLPYGYKLIPDGQPLPNGRQPHKIVLDEKISLHLKAIWEMAADNKSLTQVGLELHRRGLKTLNGKEWRRQVISRILKNPFYKGYIQYSGEYHKGTHPPIVEEWLWERANKILNARLPGHNFVQKERFYEYLLAGIIRCGDCGSHMVCNFSGGRGRRKFFYYECSRAKQALGCKAARISATTFDKAIIDYFRRASKDKSIIIKALGDAMLESQAKLEKIEADLKEKETRLNGFRHQANKLLELALGNAVTKGSTYKDKMNDLEAEIAKLEDEIDKLQAQKRVASINACSGELVYRTMGFAIQHLEDASPETQKSLIQALIKDIYVYSDRLVINMYVDEPLEGILPTEIASINEKRPTEACKALASTVSLPEVSDSCQQWLPRLDSNQDT

SEQ ID NO: 680 - protein, 533 aa, synthetic construct
MSGLALVTLSTYIGLVTRTKRAAIYARISRDSELLGEGVDRQERDCRELADRLGYAVTEVFADNDVSASTSSKKARPRYDAMVQAVRAGRVDVVLAYSNSRLTRRPRELEDLIELHAKTGVQIKTVVSGDDDLSTADGRMVARIKANVDAAEAERTAERVRRALADRAEHGAYTGPRPFGYQFAADASGRVLTGRSRRLVIDPAEAAVIRECVRRVLHDEGLWSIMNDLNRRGIRTSTGVHWRSQPLRRMLLRWTNAGYRKHQEHKDGKWTGPIRLFTGDWEPIIDEKTHERVIAKLTDPSRVSNRGDTDLKYLLTWMAFCGVCGGRLVGAQEYTYVVKGYKRANGTRSASRARTYPARYTCQNPGCHGVTRRMDDVDEFVEKVVVGLLERDGVQVLGGDRGAAEEAHERIAALKARRALLADLLGVPEHEGGLDREQFLRQNAALKAELAAEEARLRLAQPDSELMGFTGDGTTEAWLGADVARKRSVLKALEAMVGLKVTVDPIGSGAFSDKTASRYAGIRVEWEPEVGSL

SEQ ID NO: 681 - protein, 500 aa, synthetic construct
MIAIYVRVSTEEQAIKGSSIDSQIEACIKKAGTKDVLKYADEGFSGELLERPALNRLREDASKGLISQVICYDPDRLSRKLMNQLIIDDELRKRNIPLIFVNGEYANSPEGQLFFAMRGAISEFEKAKIKERTSSGRLQKIKKGMIIKDSKLYGYKFVKEKRTLEIFEEEAKIIRMIFNYFTDHKSPFFGRVNGIALHLTQMGVKTKKDAKVWHRQVVRQILMNSSYKGEHKQYKYDTEGSYVSKQAGNKSIIKIRPEEEQITIAIPAIIPTEQWDYAQELLGQSKRKHLSISPHNYLLSGLVRCGKCGNTMTGKKRKSHGKDYYVYTCRKNYSGAKDRGCGKEMSENKLNRHVWSEIFNFITNPEKYSAFKEVEQSNHLYDELELIQKEIEKTKKGRKRLLTLISLSDDDDLDIDEVKVQIIELQKKQNQLTGKCNEIQSKMKVLDDTSSSENALKRAVDYFQSIGAENLTLEDKQTIVNFIVKEVLVVDSDTVYIETY

SEQ ID NO: 682 - protein, 572 aa, synthetic construct
MKPKAYSYIRFSSPEQAKGDSYRRQRTAALEYCAENGLELADTKEYRFFDSGRSAYKGKHVSDEGEFGRFLALVNDGVIKSGSVLLVESLDRLSRDKVNIALGQLLNLLAAGIKVVTLSDKRTYSNDSPDLATELIVSIAVMMRAHNESSEKGNRVAKAWRNKRELARSEKTPLGAACPYWLKLADGVYEQVPERVEVVRRIFDMTIQGYGQAMISRRLNHDNVPVFGSTRSSKEKPRNKSGLWGTSSVEKILNNRALLGEYQPTHLVGRVRENDGDPVKGFYPEIITPDLFLQAKAAREQRKTTGATKQSKNFNVWQGLAKCHVCGDAMHLINKGRPPKGYTYLQCYSAKKGICRNGSIRIEQTNAVFKEILANVDSMSLVHGKSADIRKSLEVVEGKLAVIAGHLEGAIEAQTAFPTIAGAKVLYKFEQDHAQCSAERDELRQQLASHRVISREDFFLQVDLVTYEGRAAANSLLKRLGLQVLFRRHNPSRFQCWVLDKSEEAVTDEVQQMLFSVLYEDGHATTQPLDPDIYGRQVEQGLTTTEAAMREQEEEGIGWQWFGGKLSQGRNT

SEQ ID NO: 683 - protein, 469 aa, synthetic construct
MKVGYCRVSKREQAENSHALEQQEKRVREQGAEYIYCDIDSGSKDKRFNFLQLINDIENNIISEVICTRLDRLTRSLVKLKEFIKIVENNNVKLIALDDHVDTSSAVGRFQINMLGSLAEMEVDRLSERVSHGWNHLRDRKVAMNPPFGYCKVNDKFEFDMTPFLCTIHDQKEYSKYTIAQWIINTFFEVKGLRATVRKLNQYFGLFNSSQENGYRVRYQLRFSPSGLHNYLINPVLRGHLCYLKKSKQKDTIIIPNQHSPVITESQYQEIIQILSFNRERRGYGATAPVYPLSGLVFCAECRCACYSVTGNRGKTPGKNYYYQCKNWLVKGCSNKKMIRMDYLESSLINYLKQKYEELTALTLITKTQVIDPQITELQHQIFTLQSLPKNPAITEAIDKLELQIKELDFNQNNQDLSMKENQEYFKSIFSSVGFWDSLLPEDRRDIYRKLVSKIFVKDAEIVDIILKI

SEQ ID NO: 684 - protein, 555 aa, synthetic construct
MNKSTLTFEEIKTQNLENLPDSITALYCRLSAEDANEGESNSISNQKQILAQVAMRENLPNPFFFVDDGFSGSNAQRPDFQRMMSLVEAGKIQAVVVKDLSRLSRDYLLTGQLTEITFPSKNIRFISLNENLDSNKRNSQDAYLAPLVSLFNNWYSLQCSEKIKLSKHTKAKTGEKIGWIAPYGYLKNPENPKEWLIDDYASQIVKRIFKEYLSGKPIASIANDLRKDKVLTPANYKKKLGISNYRVLESDPFHWKSQMICQMLEKEEYTGATINLKTAKISYKQRGCKLRPREDWLIFPNTHEAIISQEDFEMARKMLGHKRVKRKNHCKDTAGHENLFAGLVFCENGHKLSFCPQQKDNTNLDHYKCYHYYRAGDTCSGSHYLRKETLEELVLGDLQQLISSIQFNEEELLTKLKSHFDIRENKKHDGLRTQLNQAENRAKELDTIIQKLYEKQLLDNISEERFRKLADSYESEQAELNGKVAELRNVLNTQTESAENIDKFLTTIRKYTNLKELTPLLVNELIDKIVVHQPTGRGKNRQVTIELHYRFIGEL

SEQ ID NO: 685 - protein, 482 aa, synthetic construct
MTTNIHKMTQAISYVRYSSKIQQEGDSDRRQNERVAKWLSEHSGFNLVEEYSDEGLSAFSGAHLAAGSDLNRLLMDCKRGIYQQGAVILIEAFDRLSRGGIDATQQLVREILLTGMRIVILQDNPDKFYDRSDLNDAFAVITIAIKAQAAFEESEKKQKRGLINWSQKRLLAAQGKIMTRACPAWLRVDEEGTRFEPVEPHLSTVRRIFKQRLAGDSMSRIAKSLNDDLTPNFKGGVQKWNQTTIQQLLKNPAVYGCKVVSSQATKDVKASAEPIENYYVWTNKLTGKPEVAIPLHEFQQVNQIVTAWAKGRSAGSKDDARLVNVFKTVLVCAHCGASIIQSSIKPMNPKHYTYGYYVCSNKRLGRCKEAKAIRRDDVENAIIQGLLYNTKRLLSGTKATENELVQMQAEETLIQDKQRKLVDLLLDDRIDKETYNTRYDALTASLDQLQKQINQHRQTVSCDFPTEFVRNIDLNDKVNRHG

SEQ ID NO: 686 - protein, 537 aa, synthetic construct
MTKREPFVAYIRVSTYYEEKISPEIQRSAIKAWADRNNANIVEWINDLDVSGRKTRRKISNALKMIEGRTARGIAVWRYSRFGRSRHGNAINLARLEALGGRLASATEAADTRTAFGRLQMGMAFKFAEYESDRIGEQWGETREHRRTAGLPATGGKRWGYIWHQRHLDDAESVIHREWYEPNDTGLIVTNLYERIAEGESMGSVTQWLGKNGHIGTRGKPWLQSGLSRYMDSGFAAGWIRYHPDDCDCPPKDPDSTASRGALCPNRIWIPGAHEPIVPEDVWEAYKEKRAKARNTPSGNRKPAYALSGLMRCARCGGTASAAGGATYGAGKVLIPKPGYMFRCSKMKDNRTCDGVYILRSIAEDAVLQRLVDWSEAIEAEAASIPQQSNPDSSTPRQRINAARERLRARLAEIQQQLDRQTDLLTRGVIPEDSYTRERDRLTQEQTGTTAELAELDKRTEEQEAKPADYQPIIRGLIDRWEITPVETRRELLRSVLRGVWAYPKSTAPDGTEVPAYAVPVAIWEDEPRPIGPRANA

SEQ ID NO: 687 - protein, 523 aa, synthetic construct
MTAEGGEIMKKVTKIEAVQQPLNNNRTRVAAYCRVSTDSEEQLGSLESQVAHYDQLIDSHPEWEKIGIYSDDGITGTNMDKRPGLQSLIDDCKQLKIDLVLIKSISRFSRNILECLTVVRELSALKIAVHFDKENLNTQQMDGELLLSSMSILAENESRTISENIKWSLRKRVENNSYRHISAPYGYKVINNNLEIDEKEARIIQDIFESYLAGEGTYRFANKLNSKDITPPRKEIWRDSTILYILTNERYVGDFLYQKTYTDSEFQRHVNDGDVDMLYIPDNHEAIISREDFEKVKDLLSNRSETKVSRGNTVYPLTKKIICGHCGSNYKRRIHYSTNQSNYIAWCCPTHISNKEQCPMKFIKETDIQAAFMTMINKLIFAREELIEETINAFSETSFVTQNRLNIVEEKIMDCQNNIQTLTELNSSGLIDVEFYHQYLNRIEQEKKNLLNEKRTVLEEDENKLIRFQELKKLNQLLKRRNPFNEHEDNVLSEFLERVKVENRETFHFYLKCGLRFTERSSQ

SEQ ID NO: 688 - protein, 506 aa, synthetic construct
MFNQTKPELLKYSEYRYVVYVRVSTDKDSQKDSVPNQIDICRYWLEQNNFEWNDYSVLMDTDKSGTMFLERDAMQLILEKARNREIKMVVFKSIHRLARDLKDALEIKEVLLGHGVRVVTIEEGYDSLVEGKNDMKFEMHSMMAAQYPKTLSVSISSALAAKVRRGEHIGKVPYGYERIDKKLVIKEDEANVVRQIYKWYNEGFGFKAITNMLNDGLLSGEFLPPRTKNTWQVTTVQRIIKNPTFCGIFILNQYTTIKVDGRKKQIRNPQEKWIIFEDHHPGIVSKEVWEEANNKPVINKKKKISPWNEFRGMLKCGNCGSNMIIMQSWRKKKDGTKTRWRYLKCSAYRRGGESLCKNHVPITYEDFREFIVKIIKEKGQQVEFDFNSVFGAHKKQQIQKLKRSIEEYQTKSKDLLDIRLNKLIDNKEFEEKRAELDKKIKEAQDKLFLLNKEESSTKLVKNIKEAFDEIDKKDQDIYHALQVIIDHITIHLGGEIDIQYNFDWKK

SEQ ID NO: 689 - protein, 481 aa, synthetic construct
MKAALYIRVSTDRQNEEGFSMEAQHDLLMELLEKKGMELYRVYSDPGISGRTIKKRPGIQRLIEDMKAGKFDAVLIHKLDRLSRNLGDLYDFIAMINKLNKRFVVASLGSEEIDTQSPMGKAFLYFNGIFAEIYSDNLREETLKGLTKKMENGGLHMSKAPLGYDIEVIDEKRQLVVNEYESELIKEVFRLYLAGKGVVSIAKHMNGHSRGKEGGVWDSKYVRIVLQNHTYTGHNHFKPVLWEESKRIIKPGEHEAIISMEDFLKVRKMMERRGENHMSKHSYDYPYGGIVKCGLCGATYIGNASRQTLADKTVRVYRSYRCRNQYSNKTCDAPGISEPHLQQLIFERLQITNKKLQDKKTNAQAKSDQRMLQKEIEVSNRRRKNWMLALGDGKLSPDDYANLIDDEEARMKAITAQYEEKEDYYINELSTEEIKDMMANLKDNWVLIEPETQKLLVQSMFRQIVIKKESDRWNIIQMLTV

SEQ ID NO: 690 - protein, 546 aa, synthetic construct
MFEIKAAIYTRKSKYTEEGESIENQIHMCIDYAEKNLGIKDYVIYQDEGFTGGNTDRPQFQKMMKDLKDKEYTHLICYRLDRISRSVADFSATLEMLNKIKVSFISIKEQFDTSSAMGRAMLNISATFAQLERETIAERIKDNLRELGKTGRWLGGPPPLGYKSVEVENNDAGGKSRKKHILAINENEVDTIKALFKLFMEHKKYNKTATLLNELGYKPRHGKVFNLTIVKQAINNPVYIIADKTIFKYFKSKGSDTYLMDKCDNKKGLMPYHRRDSENKMLDMNEWIISVGDHDGIITSDEWLQCQKIKDEIKSRPSSRHGSSKLFLLSGLIVCSKCGSSMSGRHKVLNGSTYRYYTCNLRNRASSECCNDSLNAYDAEEYVVKNLKSITRETIIDNYKQSEKRQRSKVDNDKLITKYNKEIETNKTMISNLVKRIALIEDDIVETFMEEIKKLKENNIELQSLIDTLEKENSKILEDKISVDDILRNIEHFQNFYDFTEGFEKKQDLIRSIVKFITWDSENRKIRIVLIGSDEKRPTINPLFHL

SEQ ID NO: 691 - protein, 534 aa, synthetic construct
MKAAIYSRKSKFTGKGESIENQIEMCKKYASDNEYDEIFIYEDEGFSGGNINRPEFKQMMKDAKSHKFDVIICYRLDRISRNVSDFSTLIDKLKLLNIGFISIKEQFDTTSPMGTAMMFISSVFAQLERETIAERIKDNMYELAKTGRWLGGTPPFGFISEQSLYSDTNGKQKKMFQLAPVGSECELIKYMYEKYLALGSLGKLQKHLSSKEIKTRNNATWDIKALQLILRNPVYVKSDEVVLSYLESKGAKVFGEVNGNGILSYNKKDSKDKYKDISEWILSVAKHNGLIDSSLWLLVQKKLDKNKSLAPRLVSNDSSGLLSRVLYCKKCGGKMIQKKGHTSVKTKEPFRYYVCLNKMNFKSCDSKNIRADILEKHVADKIIEETSDTGSLIKAIDDYKNKLQLDSGKSNNLNFIKKQILLKQTQINNLMENISKNPKLFDLFNSKIEELNSELKSLKFKKFEAESVKENTSNALKEIDASTQMLLNFKRLWMYADSSTKKLLIENIVDSVCYDADNKTADVKLICCKKKGAL

SEQ ID NO: 692 - protein, 558 aa, synthetic construct
MARTKKRYELSTAQEKTKKSPTFYQAGIYTRLSQERKEEYRDKSNSLAMQEELCIKEAKEKGIRIAKVYQDYEYTGTNFQRPAFHEMMADIKERKINCILVKDLSRFGREYLEIGNYIEKVFPFLGVRFISVNDHFDTENKEDDKKSFEVTIKNIINDLYAKDISKKVSSTKQAKMKQGYFIGTFAPYGYKAVRKDKGRVLIADEKVREVVELMFDLACKGASQVEIARELTKKYTTPWQYMKTGEVLRSPDNKKQWNPGAIGQFFENEVYIGNMVQGMHEKKSVRKEKGAYKPVEEWVKVEDTHEAIIDKETFFEVQNLRKEKGNIQREKYNLYTKTETADNKYKGLLICKHCGRLLKMRYRNISNEYYFFCRGEDCLFESKVHCKIRESEIDKILFHTVKESIGSLSPKDDWKNKLEYFYKCQLKDMENKLKKLQGKKEHKLSELQRKYEEYVKGELLLENYQKEKADIQRQICSVEKESGIYLEKQKTAKQKRRELECFINSLFDIKSKDTDSIDEEFIRKIIDFITISKDRKVIIHFKFDIVEEMELLGGLGYE

SEQ ID NO: 693 - protein, 468 aa, synthetic construct
MVTYARVSMDRSGVGKSVEQQVDALQAEALAHGWTLGPVVKDVGIGASRFSTKDRPGYAQLKTILESGDILAVWETSRATRRTDEWAALTELCRARGVRLFTGTRLLDLDDPDDEQQANQSHVAAVYETAKTRKRVKRDVDARAKLGKVHAQLGFGYRRVFDPATGDKTWELDPVAADAIREAVDGLLAGTTTIYRIVKRWNDSGLTTSTGKPWQTRTLRQMLLRESLAGIRVLRGQKLDGPAVWEPIITESQHRQLVARYGNQADPNPRRGLEVKHLLTGIATCYKCGQTVNWQNRPDKVPQYRCPTGHVSRQAEEVDKLAVRHLRRLIEQWRVDGFFAEAEPDAAHEHLEEAARLEKLLADVDAAYSRGDISIDRLAAQETALRPRIEAARERAASVATNPILYALAFDSAVTWESADVPQRRSFVRACLRIEIQPTGRGQRVFDPASVAFWDISRGASSILLLKE

SEQ ID NO: 694 - protein, 532 aa, synthetic construct
MNGQTAISGSLALNSTPHVIMIPASGPVRTRKLRVAAYARVSSNSEDQLHSFATQNAYYTELITGNPEWEFVDVYADEGITGTSAEKRDDFQRLLKDCRRGRIDKVLTKSTARFARNTSESLMAVRELRDLGVGVCFEEQGIDTAQMSGELLTAIFSMMAQKESETISENIRWTYQKKMKKGRFITCKAPFGYRLVGGGLEIIEAEAEIIRLIFQRYLNGRSMEDIAKEITRYGIPTRDKTPYWQTTSIQYVLHNEKYAGDSLAQKTYTTRTLPHRKKRNQGEYDQYFVPGSHPAIIDREVFDQAQALLKQKGMVIRPKSGVTYPWTGTVICGNCGSIFKRKKCRETAYWTCRLHDKSPDKCQITQIPEAEFEHAFLRLYYKLRHRGMPILSQLLTDLQTVQNGKLLWSLDIVEANKQIADIVRQERLLAELKQQGLVDPDIYITRSNTLAEQLRTAKLEKERFLESEEDQTIRQTQVLLEILETGPEFLEAFDEELFSELVAKIIVENNECLRFRLINGLELTEAIERTVR

SEQ ID NO: 695 - protein, 531 aa, synthetic construct
MIAVYCRVSTEDQQERKTIENQIDFAQKYCDLHELKIFKIYREDGVSGTIPLEDRPQGKQLIKDAKNNKFDTLLLYKLDRLGRSARITLNSIHMLEELNVQIKSMTEPFDTSSPSGRFMITMLAGVADLERSTILERMWLGANRAAKEGKWLGGIVPYGYFVNEDKYLEVNNNIIPGLNLSEANVVKLIFSLATENNMSCIKIADYLNSLNIPPSYKKDNRKILKGKRKVNVSGIWSPSSILRMLHNKTYMGIHEYGKRSKKKREIITREVPAIITEDTWNKAQGVIKDNIIEATRNRKRNYLLKGLIKCGKCGCNYVGAKYKHRNYYYVCGGKIKYNGPFGKCISKNLNGEYIESVVWKDITNFVNNPGETIEILKNNLKNKHDSKLDLLNQKKLLENNMHDKEDEKQSILDLFRKGIINPHDLELQINKINAEYNNIKNNLNSLITELGTLTNIEDYTKVEEMLREMKIKINNPNITFEDKREIVKTLVDKITVNTIEKNNTKSASLDIKYSFIKVENHTFKDSYLKLT

SEQ ID NO: 696 - protein, 560 aa, synthetic construct
MTKLYSYIRFSSMRQGEGSSYERQIKMAKEIADRYGLELVNDYQDLGVSAFKGANSKTGALSRFLDEIGRSIPVGSWLFIENLDRLSRQDIISAQELFLSIIRRGITIVTGMDNKIYSIETVTANPMDLMFSILLFIRGNEESQTKRNRTNSSALLKIKAHQQNPQSPAVAIEEIGKNMWWTDTTSGYVLPHPVYFPILQKIVKMKQEGHSTGSVLDYLNEHHEPPAPTSNKQHRKWSIAMVSRLFKTKALIGVKEVTVDGVQYELKDYYPRVLSDSEYYFLKNNLIKKAWSFGHAQEKTIPLLSGIGLLKCAHCGSPMVKRKAANGKVEQYRYTCDGEGSGRTDCLYPNWGFRASSLEGAVLQLLADKVWVAEDKANPIPEIQVQIDEISRKIDNLINLSAMTGATKELANQITDLNTQREALHEEIRLFEREMYSVDSQGWEKLAQFDLSDVQNEERLQIRLKIKGALRSIECARIDRNKNLFVLVYLDGLRQRIVIENNRGIRKGQIFVDLKTINDRQILESAGMVLHDHIDILIDEKAFYDGLPKEEDGPLSKFGI

SEQ ID NO: 697 - protein, 471 aa, synthetic construct
MDCVIYTRVSIDRTGEALAVTRQEQECRALADRLGLKVMAVHSDNDISATSGKARPGFEAMLKTKPTAIIAWHQDRLLRLTRDLERVITLNVPVYTVTAGTLDLTTPAGRAVARTVAAWSQYEGEQKATRQVAANVQRAANGVRTGRVGYGYRRAGTTVVLDDAEAATIRSAVRRVLHGESLRAICKDLDAQGIPTPGRGAKWNSTTLKQLLLRPSLAGLTVHRGQVVGRTPDDSPRVIDEDTHERLKAALTDPVRRTAPVGRAPKYLLGGIARCGRPTGTLDDKGEPVLCGGVMVRAVGRKTTTKSGGTKRQPPSYVCSACYRVRRIQDLVDKMVEGIVVGRLEMPDAAQLFATGDPVALQEARDSIEAIDARLTNAADMFAAGTIDAAQLTRITERLRADRAQAATALDAALPPAIPADLIGANAGEVWHGLSMDVKRAVMDTLVTVTILPSGSGKAFDPDTVQVVWRS

SEQ ID NO: 698 - protein, 596 aa, synthetic construct
MRSKALVGKRVSVYTDRKVSHDAQGVTTHDWCKRADADVVADFEDLGVSAIKVNTFDRPDLGSWLTEDRAEEWDTIAWAKVDRAWRSMRDGLNFMHWAEDHRKRVVFVDDGLEFDYRNGRKKGDFQSAVSDMFMLLLSMFAQIEGERFIQRSLDAHGVLKNTDRWAGGAAPFGFAIVDHPSGGRRLAKDADQQEVLHKLAGLFVNNGWSYSRLAGWLNDSGVLSNQAAARQKGGKSVSTRPWQDVTVKRLLTSPATQGLKVVNMQPDPEKRQKWVDTDYQVATDPTTGEPIRMADATFDAETWAKIQARVAERTIAPRRRTEWTNRIAGIVACDCGAAFSRSPGGGEDYYYYRCSRGRGHACKGRTVRNDILDSAVRDFFLEGHLASRAVTHRRWVPGSDRSEEYEQVQESIRAMRRNSEKGYYKGDEAEYEAKMDALIAKREQIESEGIVAKGQYVTEDTGKTWGDLFRESEDWAVVQKAITDAGIRLIIEGTYPLIVRVDDPSERDGIPYFSVEMERRKSDSRSQSGRVWQAITDDPGATDKALAERLGVTAVTVGRWRRKMPATPVEPTRKWNAWLEPHPVGPEMGDTSTLVA

SEQ ID NO: 699 - protein, 531 aa, synthetic construct
MIKLPPGNYCSYLRKSRADLEAEASGEEDTYKRHDRILLDLAKRHGVVIKETYREKPISGERISERPEMIRLLEDVEEEKWDGVFTVEVERLARGDTMDQGLVAQAFKYSQTLIVTPMRIFDPNDPNDEEYFEFNLFMSRREFKTINRRLQGGRISAVEEGRYIGSVAPYGYIKYKLPGKGFSLQYHPEQAPIVQLIFSLYTDPDPEKRMGTTSIADYLNNELKVPTARDAQWTEATLNNILRNPTYLGNVRWGFRPVVKKKNTKSRPRRSRKDSNEHKGLHEPLIDLETFELAWKIRESNSNSKGPKAQISNPLAGLVRCGMCGGPILYRPYGGKSPDALICPQKGCPNVSSYLHLVEERLVQSLGIWLNGLKSQLNTQRDTQSNRQEDAKINALLSVQRELKKQLEEVKKQQNNIHDYLEQQVYTIEMFKERSKILVERYEEIKKAFDETEAELASLRRRVEAQYETIPKLEKCIDGYQMAKTPEEKNALLKQVIESVIYTKKVGGRWSGAIDQFDLKIVPKISAKKTP

SEQ ID NO: 700 - protein, 479 aa, synthetic construct
MAKAKTAGQRIGVGSAAIYARISADVEGTGLGVARQLEDCRKLAADRGWPVGAEYVDNDVSAFSGKPRREYARMLADLGSGACDAVIVYNLDRLHRRPVELEEFVALCESVGVRDVATVTADIDLGNDDGLFMARIFAAFAAKESGRKSARIRRKMLQNAEQGLPHGSVRPFGYEDDKITLRNSEAAVVREMVDRYLAGQSLLSLTVWLNDSGVSPAVAKSWQTSAVRQILCSGRIAGLREHRGEVIGPAKWPAIITPAERDRILARIAARAVTKTRAARTYVLSGMLRCGRCGNRLYSQARHSNPGHRVRRYVCLKGPDHGGCGRLTVVAEPVEALLTDAVLTRLDSRDLAKVLAGKASPNHDVAALAAAVEADQTRLDELAGLYADGAISAREWIAARDPITSRIQQARRDIAEATDTSEVYELAGTGGALRVRWPDLDVERQRSIVKSILDHAVIAPGTPGSRSLDINRVQPHWRI

SEQ ID NO: 701 - protein, 494 aa, synthetic construct
MPLAALYARQSKENDEGIDRQVRRTRALAEARDWQIAAEYSDNDVSASKPRGPKSGWAAMLAAAEAGAFTHVVAVDLDRLVRSQADLIRLMELKLAVVTVDGEIDLSTADGEFRASLGASLARFEVRRKGERTRRANEDRRLKGRLTPGRRLYGYETDGTTPRDAEAAIVRRVYEHVAEGRSVYGIAKALRDEGVPFTTGSAESWLPARVRDMILNRRYSGQVFAPVGTTEDLKGWQRVQQRRDPTAWIAGNVPALVDDTTAEQARAVLSDPTRRTTPGPARRHLLSGIAVCGECGAGLKQVHGDYRCSVASAHPTIRAAMLETFVRAEVVYAMAAGGPGIVQGAADASGLTQAVAAWRDNEARQTEVQERERMGLLSKAVAVQELIALREERDALTVTLERLRTEQSAAGVLVGLATELLDGLPAAYAALGRQGADIRQQVAERFDALDLDQQREVVRAAVTVQVDRGRGTGRVRVQHLLAEQFNPSDAVVGN

SEQ ID NO: 702 - protein, 519 aa, synthetic construct
MPIDPEYLHAVHKGPFTACLYCRASRDPKKKGRSVTAQLKEGRELCARFGWPVVDEFKDIGISASRHARVARDEFEAMLDGIRAGRYRIVVAFEASRYYRDLEAYVRLRSACHDAGVLLYYKGQVYDLSKSADRKATAQDAVQAESEAEDIRDRNLRTARQAAEAGKPWGPVPDGYKRRYDPDSGDLIEQYEHPVQGPLVRRIWEEAESGKSLRSIARDLNEGGHLTQKGKPWQDWHVRTLLTNPQYMGRRKFQGQDYRQGTWPALVTPERYEAVQAILSMEGRAWATDLTPVHLLSGIGLCGGHPELQATNSEPVLRGYVNRTYPSLKCSERAHVTISEPRMNAYVEEGLLAYLSRDENRDVFRKANDDGGEVSAARARLQALERQLEEAHEAAATFDRDGVPTLSIAGLSALEARLTPLIATAKAASRPRVVPAVLMDLLESDDPEVLWGRYDLQQQRAVVRLCVTVRLHAASHKGARTLEPGRITMSWYGQPGFMGGRPRGRALPELPEQRLPGEL

SEQ ID NO: 703 - protein, 603 aa, synthetic construct
MVASVLVKPGTESNSDIPPLPTAGMTTASTRNPLAGTVYTETLRGVRCVRLSVLTDETTSPERQREAGDIAAAALNIDFGSGDQLREAVDLDVSASAFGPFERPELGGWLNRPDEYDALVWWRFDRAIRSMGHMHELAKWAKQHRKMLVFAEGIGGGRLVFDFRNPMDPTSELMMMMLAFAAQVESQSIKDRVTGAMAAIRRMTLRWRGGGKPPYGYMPAEMPDEHGGKGWTLVPDPDAVKVIERIVKELLGGVTASMIAAGLNADGIPSPRDHWALKMKRKTGGKTGGAKGEKGVTRERWSWNPAVITRMLRNPTLLGWKMHNGKPVRDDQGNPIMSTAEPIMTREEFDRIGAVLDERSINNSVRNDTDALLLRVVHCAHCGHRMYKSQQEGRNPFYKCNSHARGELCEQPANVRADWTDDYVSAEFLRLVGSVQTTHVVTIPGYDPEPELRATVAEYAEHQEQKGRQKSKHAAAEWQRRADALDARIADLETREARPEQRIVTLTGRTIADEWAASDTAGRRALLIEAGARLEVTRGTRGGWRKLDVRRVSFTVNGAFDPAAETVTTAAEDVASVERGDHPAPGSAARLAEPEPVRELVAA

SEQ ID NO: 704 - protein, 471 aa, synthetic construct
MRKVAIYSRVSTINQAEEGYSIQGQIEALTKYCEAMEWKIYKNYSDAGFSGGKLERPAITELIEDGKNNKFDTILVYKLDRLSRNVKDTLYLVKDVFTANNIHFVSLKENIDTSSAMGNLFLTLLSAIAEFEREQIKERMQFGVMNRAKSGKTTAWKTPPYGYRYNKDEKTLSVNELEAANVRQMFNMIISGCSIMSITNYARDNFVGNTWTHVKVKRILENETYKGLVKYREQTFSGDHQAIIDEKTYNKAQIALAHRTDTKTNTRPFQGKYMLSHIAKCGYCGAPLKVCTGRAKNDGTRRQTYVCVNKTESLARRSVNNYNNQKICNTGRYEKKHIEKYVIDVLYKLQHDKEYLKKIKKDDNIIDITPLKKEIEIIDKKINRLNDLYINDLIDLPKLKKDIEELNHLKDDYNKAIKLNYLDKKNEDSLGMLMDNIDIRKSSYDVQSRIVKQLIDRVEVTMDNIDIIFKF

SEQ ID NO: 705 - protein, 581 aa, synthetic construct
MNVRSMTPTGVAYSYIRMSTDQQIKGDSLRRQLDLSRQWAEQNGLVLDETLRDIGVSAYKGKNRREGALGKFLAMVEMGRVKPGSYLLVESLDRLSRDQVLEALSLFLEILRAGIVIVTLADDQTYSQETVGNDWSKLIISLTIMARAHEESLRKSQRVAQSYEARRARAASEGYTISSMTPGWIDAKRVGRGKIEFTLNQHAATVRRIFEMAAEGASQFAITRTLNSEKVPSVTGGDAAWTQAYVGVILRSRAAVGEYQAYRRVGNRQKEPAGDPIPDYFPAVISDDVWLRARDLKRKTVHERSGRKGEGFGNLFTGLCRCAACGGRMMFQACSREGTPKYAYLNCSNRRRGVGCPVPMHNFRYYEFERGVLDNVREFMLSDIMRIKRAQTPLDAIEEQIASLRVKLEDIGRRETSLMNQLEAADDLAPMILARLRERKDERAETENRLQAYERQKAEAELAINNSVDEGEIERMRQQWEATDNMEERYNLRAKVHAALRTFIDFISFNPEDKTATVTVLAGVRAYRFKHGELIDKYDLTQQIGSRADGMINADVFVTDGASREVDAQRLAALNKLRSHL

SEQ ID NO: 706 - protein, 561 aa, synthetic construct
MKCKVAIYTRVSTKEQLKQGYSIQQQADLLIKKAKQIFPDDEYEIYSDEGISGKNIEARPGMKRLLEDIENRQIKVVMSWKLNRLSRSNRDIQNIIYEFRRGGAYYISISENIDTSTQNGEMMIGAFGLVAQIERETIVSNVKMGMNAKAKQGEAITGRVLGYILKPNPLTGKNELVIDEFEANIVRQIFDLYLNQNKGLKAIANYLNKQGYHTINKKPFSVYGVKYILNNPVYKGYVRFNNYQNWAVERRSGKNDKSKVILVQGKHKAIIDEEIFDKTHEKLAAKSFKPGRPIGGDFWLRGLIKCPECGNNMVCRRTYYNTKKSNERTIKRYYICSLFNRSGSTACHSNAIKAEVVESVVYFHLRRILSQPHVVETIATQVIDAMEKKKANQTKMSIDTKSLENQKKKLQKRKERLIDLYLDEEIDKETMQNKQDKLNVQIEKIDEQLKQAEAMNKVSQDIAIPNYKKIKGQLYVMLYRFTGYMKKANPEAKNKLMHMLIDSIEITTDKQVKLIKYKIDESLLPQSIKKDCGNFFMPKFNFVINVTNENRIENLSLLPLF

SEQ ID NO: 707 - protein, 540 aa, synthetic construct
MKTIAIYARKSLFTGKGDSIGAQVDTCKRFIDYKFGNEDYEIRTFKDEGWSGKTTDRPDFTNMVNLIKSKKIDYVITYKLDRIGRTARDLHNFLYELDNLGIVYLSATEPYDTTTSAGRFMISILAAMAQMERERLAERVKSGMIQIAKKGRWLGGQCPLGFDSKREIYIDDMGKERQMMKLTPNKEEIKIVKLIYDKYLEMGSMSQVRKYCLENSIRGKNGGDFSTNTLKQLLASPIYVKSSDNIFKYLESQNINVFGTPNGNGMLTFNKTKEIRIERDKSEWIAAVGKHKGIIDDNKWLQIQQQLQQQSEKQIKSSGRQGTTSTGLLSGIIKCEKCGSNLLIKTGHKSKKNPGTTYSYYVCGKKDNSYGHKCDNKNVRTDEADSAVITQLKLYNKKLLIKNLKEALIKNEKANTDNIEILESKLKEKEKAVSNLVKKLSLVDDENISNIILNEITNINKEINDIKLQLSNETLKINEVTQATLDTEIYIKILENFNKKIDDITDPIEKRNLLKSALESVEWNGDSGEFKINLIGSKKK

SEQ ID NO: 708 - protein, 555 aa, synthetic construct
MSRRLKREGTDPLTRKAVSYSRYSTDLQNERSIEDQEALIRRYAAINGLTLDRCYSDAAQSGASILGRDSLLQLLSDAKAGAFEVVIVEELDRLSRDMEDLAGIHKRLSFAGVEIMAVHEGVASTVTVGLRGLVGQLFREDNARKIRRGLSGRVSQGLSAGGRAFGYRPHPNEKGRLLIQEEEAVVIRRIFREFSEGRSPIDIAVNLTRDGCPMPRSATAWQSSTIYGWAERRSGILRNDLYAGRIVWNKSKMVKDPETGRRVSRPNQQCDWQITDAPDLRIIEQDLWEKVQAMIEPKPHATQSDRAKMRRPVRPLSGLLRCGACGGGMSAKGKDKSGRTRIECTRHSSSRSCPAPRTWYLDLVEEAVIGLLRRELDKPDLLKLYVAEYNRARAEFAAANVQRRGKMERRIHQLDSEISRLVQFVTRGIGDTDRIAHEYEAKCAELTDAKLELSLEPPPLSAVTLHPMAMEGYRKDLLTLAPIMGADHSGGSASFASTLRKLIESVTVSETAAGQMEVIVTGHLRALIDAPRMSRKHSGGTMVAEEGFEPPTQGL

SEQ ID NO: 709 - protein, 538 aa, synthetic construct
MTQTLFFDNFAKGKKEHKVLKSSKDCVIYTRVSSSQQADNLSLATQLKACTLYAEKMGYEIAATFGGTYESAETDERKQFTAMISFVKKYRGKISYILVYSLERFSRNDNSIWLTNELRRLGIEIVSVTQPIDTSNASGQMQQKMLFLFGEFDNQLRRQKCMAGTREMLLRGDWPTQPPMGFEVVRQNGKRRIVINAKGRLLRQAFHWKAFDNVSIETIRERLAQKGLKICHQHMSKILRNPFYCGMMAHNMLEGKVVKGNQEELVTKEVFLKVNGLLRENAQGYRIVEENAQIPLKRFMVCGHCGKPMRGYIVKKKNLYYYKCSTKACNNNKSANALNTHFERILHTFKVEGDKGITKVINQQAIARFNEQTSGEQAEYKALQEQHADIIKKIDRLEERYIEEEIGSDLYSKYRGRYKAEKEEIEKNLMKLARQVSNLDNGVGFATKFALELPLKWVSADYNTKKRIQFLLFPEGITYSKKTDECRTPRINSVFLYIAYFQQITSNKKRGIPELGLDFASFATLVAGSRIELPTSGL

SEQ ID NO: 710 - protein, 509 aa, synthetic construct
MDAKAITRSPESETAALIYTRASMDRHYLMRSTDDQETDCRSWCDQQGWRVARVITDANRSASQWRTREREGFEEALQLIASKEYAAFVTWEPSRAGRELAAYIQLRAACQAAGVLYLTKGRVYDFARSDDAFMMGLEFLTAEKDAAVIRERQLRTVRLNAQKGRPHGRLPYGYRRVYDENTGVLLRQEIDPEKAAIITTAVDEILHGVPVNRIITRLNRDGIPTPMKPLSDKTRGWMNATLVQIIRSPTIAGLRKYQGEVIGEADWPAIIPIEKWEKVNRVLADKARRTRYVEEDNHSHPKWLLSFVARCGFCGRFLARVLNVVPRKNGKPRNNYVCQHIGCRRISIDVERTDAYVLEALLSWLSTPESLAVLAGSDDNWNDRVREAEEQAVALRDRLDQAAEQYAEGKISLAMLANVEQRLTPQIEQAAREAVPPVADATVLDLINANDIRTAWELLDLLEQRRLLKMLLDIRIEKSQLMGGIFDYSRIKIAPRFVAPETYQWRSVA

SEQ ID NO: 711 - protein, 555 aa, synthetic construct
MAVRKKQVPDLEEYRAMAYYRLSKDDKNEDRGRDSDGEISDSILNQRKLVHAYLKNHPNITLIDEAYDDGYSGTNYDRPGFRSVLEKVQSGSINCVIVKDLSRLGREYIETGKYLEMIFPSFGIRFIAINDDVDSEHSTAGDDIIIPIKNIMNESYCRELSKKLRNQFRIQRGNGEFLGAFASYGYCKSPDDKHKLIVDEYAAEVVRGIFSMKIKGHSQSVIADFLDHEQILPPSEYKKSLGMKYKTGFQASSQSKWSVVTINRILTNPIYIGTLVQGKRGTPNYKIKKMKVRSEDDWVVVENNHPAIIDPLMFSTVQKMMERDTRRPPKKDTLLPLAGILFCPDCGRTLQRRTVTRGKRKHYYYVCATYKDGKGCSSHSFEQKKLEETVLHAVSNQIQMVVELNQLVQDIGLNNIDQIRQGRIDVMIVKKEQDLDRDKEFRMKLYEALNEDLIDRDEYNKMRMKYSKQIEDTEKAIRKLQLQREEISSGSSADNNWIMQFIKFKGISELTREVVVTLVDRIYVYEDKRIRIEFNYRNEIAAYQEIFQERAKEVV

SEQ ID NO: 712 - protein, 528 aa, synthetic construct
METTTRRRAVTYQRFSSVRQVGNSSLERQNEETKNWLLRNPDVEVIDSFVDQAMSGWSGKHLKDGSLGQLMKAVDDGIITSGTLILVEHFSRLSRQNITDAEKLMHRIWDAGITLVTVRDGTEYTPAAANDMVLRIRLLVEMEQAFKESEWRSAKVKASYTNRENKAKEGIVPKMRKPFWLNSDGTLNELHEAVKDMFSLYKDGNGQQRIVVALREKYSDTAIQKLNPSTVMRWIQADITRGYWRGNRIYEAAIDDETFFEVQTIHKNRLYENVKPDRNWPLSGLMKCGVCGRGMSIQKSGTSNPVVRCSSKQRDKSCNRKTTFPYFIVHQYMMSIVKKYALRKYTNVTSNKELRHELLVVERDLLKARQELSELKAFYKQQKAEGKKTLATLEILEEEYENVENLQNKEKELKSSLEAFANGGASIESRKLVLDGRNFNLEMHKLNFKIVVGEEEVSAEGFDEKLPTLKYLGYSRKTRSYEWTQGSHRLIQRWPSSSITDEILMLDDYRQNLYAKNFIEKQLSRHES

SEQ ID NO: 713 - protein, 452 aa, synthetic construct
MLRVALYIRVSTEEQALNGDSIRTQIEALEQYSKENDFNIVGKYIDEGCSATNLKRPNLQRLLRDVEKDKVDLVLMTKIDRLSRGVKNYYKIMETFEKHKCDWKTILENYDSSTAAGRLHINIMLSVAENEAAQTSERIKFVFQDKLRRKEVISGTIPIGYKIENKHLVIDKEKKYIVKAIFDEYEKSGSVRTLIETINNLHGELYSYNKIKNILRNELYIGIYNKRGFYVEDYCEPIISKKQFKQIQRILEKNKKTTPNKNIHYHIFSGLLKCKECGYTLKGNSSNVGEKLYLSYRCSTFYLNKNCVHNVTHNEKHIENYLLTNLKPQLHKHMVKLEAQNEKIRQNKKSNKKDEKKKIMKKLDKIKDLYLEDLIDKETYRKDYEKLQSQLDNITEEQESQIIDTSHIKKFLDIDINEMYSDLSRVERRRFWLSIIDYIEIDNNKNITINFI

SEQ ID NO: 714 - protein, 545 aa, synthetic construct
MKPLRCAVYTRKSTENGLEQEFNSLDAQREACEAYILSQRHEGWLPVSEHYDDGGYSGGNMERPGLKALLDDVDAGRVDVIVVYKVDRLTRSLADFAKIVERLDAKAASFVSITQAFNTTTSMGRLTLNVLLSFAQFEREVTGERIRDKIAASKRKGIWMGGPVPLGYEVVERKLVVVPEEAERVRYIMQCYLEQRAAPQLLERLAREKIVTKIQNRVSGPHRGGIPFARGSLFHLLHNPIYRGKIVHKGQVYDGEHQPIVDEELWNAVQAKLKEKAPPRKRDTNDSQPALLRGLLIDPQGRPIVGTYTSRGTRRYAHYETRKDLARPDHPPSTRFRRGQLDQHVIEHLLTLLMDDHALRRISGLTEGDPLRRLFATARELCTRLEQRPCIEDTVRSLITRIQVHADALEIAINCKALGIDHPATLSWSIPRPARKPFREAKLRIDGVPGSKDANRPLIELLAQASEVQQLVMASPELALHQLAKQEGRCRKQMTKLLRLSYLSPRIVEVILEGSQPKAITRKQLLETDLPIIWAQQEQLFGLTA

SEQ ID NO: 715 - protein, 451 aa, synthetic construct
MVIVGYARVSSIAQAEDSDALKQQIDRLKKAGIEQLYIDIQSGRSDSRKEFNRLIGDVKRGLITEIIVTRIDRLGRTMLSVCKAIEIIKSKNVKLTILDSPIDINNPFGILSFQQMSAMAEFESSLLSQRVQHGQRFFRQQQKIYKACFGYKKNSEGKLEPDNTVVKEGITKWLIAREIINKLLSGESANNCSAYLLAEYGISFCDSSIGKWLNLPALLGHTSYFHQKRAKGGHKELIYDTHIPLLTETEREQIRQNLNKNRCNFQKNTPGNYPLVGLMRCGVCGATMYRQVNSKGIQYARCNRHAKQKELCSNSKCNHLLKIQDFVIVEITRQAKTLIPRILEQSKKEETESQEVRALRGELDELRQIKSSNPIIQNAIANLEVELQHAIARPKHQITVVSDDLLDLINRASYTEFWESLTDDLLKDVFGQLVSSVIVDEFGEILVKLRF

SEQ ID NO: 716 - protein, 467 aa, synthetic construct
MTELASDVRTPAAQYIRMSTEHQRYSLDNQCAAIAEYAERRGFAVVKTYADAGKSGLSLKGRDGLKQLLTDVVSGQPSYSAILVLDVSRWGRFQDTDQAAHYEFICRDAGVNVHYCGEPFENDGSVVTSIVKTLKRVMAAEYSRELSSKICRAHIQQARLGFKQGGPALYGIRRFLVSQDGTPRFLLGPGERKGLNSDRVIFMPGPQNELKILRRVFRMFVVQKRSIADIAKRLNDEKIPSTDGALWSRARVKSVLRSELMIGYYVFNRTNHKMKKPVSRNPQDLWVRTRVMEPIVNPKIFARAQRLLRLRRGYHLREPDMIASLKRLFREKRRLSQAMINECPYTPSSHAYWAHFGSLPALYRTVGFMCPPTGQRGKYYSDDELLNGIRRLHAKFGYVTMALINSASGLPKYKFFTKRFGSIVNAYGLAGFPTTKSERIAAARQRASARRENKKVAAVSGEEARRP

SEQ ID NO: 717 - protein, 507 aa, synthetic construct
MKRVISYIRFSSERQAKGDSLRRQSKMVNDWLKAHPEYYLDQDLSFRDLGVSGFTGKHLKGGLGDFLTAIEKGLVKAGDTLLIESLDRLSRQDVDQASELLRNILRSGVDVVTLSDGEHYTKESLRDPLSLIKSILIMQRAHEESLRKAERIQAAWDAKKEAAKAGIKISRRCPAWLKLNDDRKSFSVIPEKVETVKRCFQLRLEGKSIWEIVRTLNAEGHQTLNQYKAGKFGQTSVQDLLKNRSVIGYFTPKGCEEISGYYPAIIDETTFYKVQQLSYARYGRKPASDKPMAVNLFKGVIRCSECGHALIITGFSDTRNGIYRCPLRNENRCSAKGLSRKQTDGTLLALLSRLDRFDSDTTNTIDTLKLHREHISSNIEKLVQLSLEIEDLSAITSKLRQLKNELSQVDADIEKETQRLKSIDVGCLSDCDLTTKAGRIEAQLIIKSAVKEVVLNTAKRRCKVTFHNGKVIDLPITENPSDNVTEAIQSLSEVTERGLIDVDEVII

SEQ ID NO: 718 - protein, 542 aa, synthetic construct
MQQLKQKRVGIYVRVSTEMQSAEGYSIDGQINQIKEYCNFHHFEVKDIYADRGISGKSMNRPALQRMLHDANKGHIDCVMVYKTNRLARNTSDLLKIVEDLHKQNVEFFSLSERMEVNTSSGKLMLQILASFSEFERNTILENIYTGQHQRALEGYYQGNLPLGYNNIPDNKKDLMINQHEANIVKYIFESYAKGHGYRKIANALNHKGYVTKKGNPFSISAVTYILSNPFYIGKIQFAKYKDWNDKRRKGLNDKPVIAEGKHAPIIGKDLWDKVQARKKQVSEKPQVHGKGTNILTGLISCPQCSASMSASTTVNTLKDGTKKRIRYYSCSNFRNKGSKVCSANSVRADVIEKYVMDQILEIVKSDKVIKQVVERVNQEHQIDMAALNHDIAYKQQQYDEVQIKLDNLIKTLEDNPDLTSVLKNTIHQYEKQLNDITTQINQLKQQQNQEKPSYDTKQIAALLQQIFQNVESMDKVQLKALYLTVIDRIDIRKDGNHKKQFYVTLKLNNEIIKQLFNDTPLDEVLLSTSSLFLPQTLFLQI

SEQ ID NO: 719 - protein, 530 aa, synthetic construct
MLHVDRSQFIADLEAVTQPRVYSYTRFSTPEQAQGDSYRRQTEAAEKWAARKGLILDTALAIFDEGVSAYRGSNTDEDRGLGQFIFACRSGLVPVGSYLVVESLDRISRMIPRRVQRLVSDIVDCGVTIVTLSDGQEYSADRLDNDPMALMIALMVSWRANEESKTKGRRVAAAWAEKRRKVTAGEAVKLTSKAPAWLYWNPEGWAIDPAKGEIVRRVFSLTLAGYGEHRIAQTFNQERVPVMGRGKMWHRSAIAKLLRNPATIGTLTPGRIEYVGDKRSRVMEAPIPEAYPAVIDMADWLTVRALKDGDSIAVRGRGAKAPLANVLSGLARCPDCGAAMTRVHKGNTAKGGKPKLVCTRAKAGAEKHYHSVPLEPVEEAVLRAWPKLIADVPAGSLHTELDQNQRSAEGTLSALEDHLVDLMEAIERQPSSSLAASIRRVEQEARTMRELLHDIEEQRANADGGVIHMRLDSLADALGEGQEETEVILERVNAALRVLFSGVVVNHHRGTLDFHWKQGGTTSVMYAWID

SEQ ID NO: 720 - protein, 519 aa, synthetic construct
MKKITKIDTVAQVKPAKLKVAAYARVSTSSEEQLLSLENQKLHYEQRILANSNWEFVEMYFDEGISGTKIDKRNGLKRLLQDCETGKVDFILTKSISRFSRNALDCLEIVRRLIDLNIFIEFEKENINTQTMDGELMLSILSSLAESESRSLSQNTKWSIEKRFQNGTYKIGYPPFGYDWVDGVMVINKEQAVVVRDIFADVLKGTSTGDIAEKLNQQGVTTKRRKTWHGTTIRGIIKNEKYIGDALFGKTFTDDSFKRKVNRGDKNQYFMEGHHSAIIDKETFDQAQQMLVQNAKSKNIVQEDDKYQNRYSFSGILKCGECGGTFKRRIQTKNKNEKYVAWACTTHLKDKHSCSMKFIKDEQIKLAFITMMNKLVFSHQILLKPLLADVRSTTYTVDNTQIVVLDDELEKLKQQQDNLVQFVANGYIDRPTFVKEQNQLTKQMDDLENKRKMLTVAISKGFDNLESLEELVKYTKQDQMLTSFEDTHFVIFVDEVVILSRTELVFKLKCGLKLKERLV

SEQ ID NO: 721 - protein, 561 aa, synthetic construct
MRKNHIYRAYAYLRLSVEDGDQIESDSIKNQRVIVQRYCGGQQEIQIIGEAVDDGYTGTNFNRPGFKKILNLIKSGEIDCIIVKDLSRLGRDFTEVLRYVQRRFPEWGVRFIAIDDNYDSEAESCKEDFLTLPIKSLLNESYPANTSISIRNTLKAMREQGLFVGAYAYYGYQKDPNDHHRLILDPIASEVVRDIFRWKLCGLSQDAIATRLDSLGILPPADYKVSQGVRYRTTFKKYERSHWTAVAVGRILNNTAYLGILIQGKTTTPNFKVKKIIYKSEEEWAVVEGAMPPLVSWIDFMIVNHLLEHDTRTAPGQETVYLFSGLLECIDCHQSLVRKSTKAGGKEYGYYVCSTNRENSRTCSPHRVSESKLKKNILLLIQYHISVLTDLKSILSYVDTIPFSDRRVQKESSRMEMLKKDYQRNMKLAASLYGDYQDELLTREEYLQLKKQYSSRCTELEKLIEQQKVENDNIFRNICGKNAWIDHFLQFGQVKELDRRLVVSCIKSIQVSEKGNLEITFWFKDEFRKVIAKIRQICTELPNQKMETFLESLGEGGVMCG

SEQ ID NO: 722 - protein, 537 aa, synthetic construct
MKKRVCAYCRVSTDKDDQINSFNSQKQFFEEYIKQNDEWELVDIYADEGITGTSTEKRTEFLRMIDDVQYKKIDLILTKEISRFARNTLDSIYYTRKLKSMGVGVIFINDGINTLDEDAELRLTIMASIAQEESRKISQRVKWGQKRQMEKGVVFGRELLGYNLRNGVLTINEQEAEIVRMIFHKFTNEGKGTHVIARELYEAGIKTKRGNLNWSNTMILKVLRNEKYVGDLCQKKTITPDFLTHKKKYNKGQEEMIYIKNHHEPIISRELWEATQKELKKRTTSREQKSKYSNRYWCSGKIFCGLCGSRFVGRLKKLKNGDTYRAWRCQKAAEHGREKIDKWGNTIGCNQESINHVVLGKIIGYILKNIIVENKEEIINDLKELIKKYEKPVKVLNTDSLLKQIESINIKKQKLIDSMLEGIISKQDVAMMNEKYDKEIEELKQKVKEIEEANINNQKQADMLKSYIDRINEMVNALEYQSADELYKKMVDKVVVHKGKILEVYLNCLFNPIKVRYNATGKLDYKIEVDWLNSEQF

SEQ ID NO: 723 - protein, 463 aa, synthetic construct
MTSANAIIYARISKDRTGAGLGVERQAEDCRALAERLGWTVLRVESDNDISAYSGKRRPGYERTLAALESGEASAVIAWHSDRLHRRNTELEPFLDIVERTGAQVATVQSGPVDLASPSGRMTARILGAVAQQEVEHTTARIKAQKAQTAAAGGYRGGMRPFGYERDGMTIREHEAAIIRRAIADVTAGKTISAVRRELNAAEIRTSSGREWSLPGVRNVLTRWRNAGKVEREGEPVADAQWPAIVTVDELLAVRAVLANPARRVSPGNQRRWQGAGVYIDAYTGDPMVCTKSSGTNPTPVYRPAARTAGCASVVAVDLDEYVSAAVCARLGQPDARELLAAPEVDTRGLSGQREALDARLREAASLFSSGAITGAQLTEITADLRAQLDTIDAQLDAATADPELAELLRADDIRAAWDGPNGLHVDTRARLIKSLARVTVHKMTVKGVKRTFKPECVDIEWL

SEQ ID NO: 724 - protein, 584 aa, synthetic construct
MTKAYSYIRFSTPEQAQGDSLRRQVAKAEAWANGRGLVLDDSHRDLGISAYHGANRTNGALRSFLQMVEDGKIERDSYLIVESLDRLSRETVIDAATQLFALIQAGVVVVTLSDGQEYSATRLRQDWTPLVISLAVMARAHDESRVKSERVGEAWRQKKAAARAGGKPITPRCPEWLEVRDGKFIERPDRVEIVHRIFRETIEGFGRREIVCRLNGEGKLPFKADEKRKKPSTGWQTSSVAKIVQNRAVMGEYQPHTGTHKARNRKPEGDPIKDYYPRIVEDDVFWRAQASVENRRQQTGGRRGNNGAHILQGLAKCAACGGPMHVMNKGKPPKGGIYLVCSANRRNTGCDNSRAWRVDKLEEAVLLCLTSFKTQSFESLNGTVVNQGQRVDALRAELDDLNRRNKVLMRLAESEDEQAEARFLENAKEIKAKKTELTAAEAELATHQSDPGDAVRLAEILQLSTDFFRTEGEERLESRIRLSSLIRRIVDLIECDPVRGAYMVLPIDTKIWRVNAPTEGAFAYQLDLQPRAIDAPPPRFLFLLLKNPNDEARDAFYQGKGGQVMAADGIKGFPSPHAFKSREK

SEQ ID NO: 725 - protein, 612 aa, synthetic construct
MHTVVIYCRASSSEQTVSCGDQLKALKAEAKKKGYKVLRDYIDDGLSGSKQIEKRVAFHQMIEDSSAREFTHILVYDSSRFGRLDALAAAQHKLTLRKNGVQGLISLGEGELLWTSSMGRMMDALTSEANHETALKISRASIRGRVEQLLERKVYPHGQIPYGYAKVYRGDGQEIRLGRDARFHKPRHWTRELVVDEAEVAVVKRIFALYTGKAQSIRQITATLNAEQAPSWDKNGWSWNSVSKVLTSKAYLGYGMIHGSKKVCKEAHNRCETIEVPGVLPAVVDQDTFELAQRLHSRSTISRFRSDKDNRTLSGIVRCGHCGYALVSKQRKREGRAGGVFYSCVGGLKYSTGCPQYQAYESDLLPSIIKELVKAVDAEVLAQLAPREEAPAADDPSAGLAKQVEKLREQVRRATLRAAAADDDMLAEYDEAARELKGQLRAAEERLRVTKHVQQEGGPALWTEWWREVRPDVIGAANDPALATELTEAIFREYPALRSVPTGGTVTEYLARARETLSRLAKDGNTDPLATLLPDLLGERTTGTVVDSNTLKATLRRMGCEVSVWWRTAERKRRNEPLHVLDKAKLVISWSGHSAPSSRGTGDSARGTLRGS

SEQ ID NO: 726 - protein, 576 aa, synthetic construct
METLKIDRSKPLAIAYVRWSSTVQGGDDKDSYDRQTSPLEFFTSSTGVPVVETIIDPGQSAFTGENSKKGKLKGILDRIESGEIRKGDFLVVESIDRITRMRVLDGVALIQDGILKKGVKLYTTTDNKIYSYEDPDKDFENLLMISLIAKRANEESEIKSKRRRSAWNKAKTKATEGVPFNAHNPPYGLRYDPDGNCFEIVEDEAVEIKKIFEGLKYEGVSNTLKKVNLTSKRKWSRKTVHLMLTSRYPIGTLMSQKREGKTKVFERFIENYYPAILTHKEFQDALQAMKQRGKVKDYGRNTEGYLNIFKHCVKCAVCGQSLMFEKSINQKGIKYGYFHCWTRKETLSHCNLPRFRFDFAFGTLLQLVKQLTCDEDYDVHPWASEMPSDYNSTMADDENDIENFENQFLSLFSKSTATEAIKTDFYKAENELAKAKTIYENLTASFSQFSDGRIPSFFIQQMSEAEQAYEKAKADVDALGAQIDNAENSLEIYSYKDIIELYSTDEGRLKLNHFFKSNGFKFIFNYEPKTRTVFMTVKDKVDAEIYRVGKKFTLHNPLKEFGIDNLNEQMNSVLKV

SEQ ID NO: 727 - protein, 497 aa, synthetic construct
MSEPMCTPVRMRALIYARVSLDQAEGRSVVEQETECRAWAAREGWTVTRVITETGSASRYARSTGARTRWPDLVAAVASGEHDILLTWEASRATRQLGEYAQLRNLCDLHGVLWGYSGRTYDLRNPSDRFATGLDALMSEDASARTSERVQRAVRARAREGRPHGKLPYGYRREYDPTTGRLLQQVPDEDQAPVVREIYARVLAGDSLYGIANDLTARQVTPPRPPTKRHDRKQEWLSITLRRIATSPTYAARRTHRGVVVGDADWEPLVPLEDWERAVAILTDPARATRTGDSTSRHLLAGIARCGKTDEVGAQCGAELRHLRNRGRWGTYGCARQGCYGVAIAAPHLDAFVRDVVLTLLEQHRDALAAGVADTGHDTELHTARTQLQDLRARLAGFVTEAGAGRLSPATLSAVEADLAPRIATAERDVRRLLLPRTLPDLTEADPATWWDSPCTDIVARRQLVRELVTVTVRPAGRGNWGKRGLDDTRVDVTPRW

SEQ ID NO: 728 - protein, 660 aa, synthetic construct
MESEKERGRNRINNATGVDDAHIPGDPREGLDFSGEKRVNPEDLIGGNPMEPALAPAPANSLDGLEYLFKDTPGATPASTEVGDSVVYLRVSTPRQLHTAADLDRDGNSIATQRVETLRKVREMRSTVAREFIEPGQSAQTISKRAEFKKMLRYIDEHPNVKYVVIYMRSRVFRNFTDAAITKRELLAKGVRLVSAKEEFGDGYMADAMEAITDVMNEVQVRMNGEDVKVKMAHKVEQGGSIGVAKLGYLNVRKDFSGRLVNTIELDPERAPLVAWAFEQYATGQYSIAQLTKLMQDQGLTMRASPSKPERPINKSSMANMLRNPYYTGVMRYKGRLYVGRHEAIVSKEVFLKVQEILDARNRDGDRDMTHRHYLKGLLACGQCIDEGRRSRLVYSQAQGNGGLYEYYICSARTRVRCGTTGFRVELLEDEIVTMMAAEKFDVQTIDDLTSLIRETVDELLTVEKETKAGLARQLRQLEAQEERLIDLAASGAFAIPRLRAKLEETTLEKGLVQEKLERSSDRLRYGAETALAYLQLLRNPGELYRNAPDDVRRDLLEAFFNHLRVYEDGEGIRVEAERTDVGQAFHDAAATVRSARRVASEKKGTPRRSAGSSGNLEKPVHLALGLNKSIMAGVPGLEPRTTEPETAVLPITPYPKGET

SEQ ID NO: 729 - protein, 542 aa, synthetic construct
MSNKSKLIDELGIKNVVNYLRRSRQDEEREKRTGEDTLSEQKKLMDRVLAEYGTPYDQKLEIGSGDKISTRPIFQGIINDLEINKYDAIAIKDITRMGRGSYTDMGVIYDLLVSKRIYIITPWRIYDPSNPADLRQIRFELFMSREEFEMNRERLNGGRYNSALEGKWVSGPAPFGFDYNEKTGKLMINEPQAEMVRNIYDYYANGIILANGKRKLVQFRALASYLKRVGIKTPSGKDEWSPPFLKTFLEHDRYIGVLRQNTTKTMPTGKKVPRPKEEHIIIEDAHPPIIDMETWTRVQDRIQNRDVSNNTKLDFEPNVLAGLCVCKKCGRKFIRRCGKKDYIKKDGSVSTYEKNMLFCGTNGCTYVKFNPIHDDIIETLKHLSDLDNDVLKAYLKQTIKVEEPKDNKVEFARRIQIRRSELERRMKFIFDKYESGIYTDEMFIERKNEIDKLINDLDSIEIDSTATNQDKEEYDPNIAKENINSVLSAYQSAATPSEKNKVLHSIFSHINIEILEKGHGRIPAVHQIEPYLKSSIIKKSLI

SEQ ID NO: 730 - protein, 564 aa, synthetic construct
MARKSRASAIAADTMPVQQLEKVYSTGIYVRLSVEDNNRKEDGDSIEMQKYMLQKYVNGQPDMRIYSLYCDNGRTGTNFERPEFERLMEDVRAGKVDCIVVKDLSRLGRNYIETGHYMEKIFPFLGVRFIAVNDDYDSLTGQNGNDLIVSLKNLINDIYAKDISKKSGSALAVKQRNGEFIGAFPPYGYLKDKDDNHRLVPDPDTAHIARQIFLWKAEGIGINTIARRLNEKGISSPAKYRYLSGIFKKEPTGSGAIWQGQAIKLITSNLMYAGHMAQGKSRRSLYDGLPTTMIPHSDWVVVRDTHEPIIDEDTFSKVQKIKEEQNRLRVSLNGKYADISNKENVFRGLLYCDDCKTKMVRYKGVSKAGSVSYSFICRVYAQNLSLTCTNKSVREKLLFEWVHSAIQKQIDLTVDMEKVLERLNRQNSFQTAKKEIEGRIAAARQKLKRISTLKGSLFESYTDHLLSEDEYLYSKKSYDEDIQRLQTKLDALEREGMRYEKTLTPQNEWIQAFQKYEDKTSITREMALELIQCIWVSDYNSIEIVWNYRDEYKKILPYKEGACL

SEQ ID NO: 731 - protein, 407 aa, synthetic construct
MMRRVDAGDFDVIVARHMDRLLRRLSEFESVLERCQKVGAAIVTAADGVDTSTDGGRLVARILSSVAQGEVERKGARQRSAAVQAAQQGRWVGGRRAFGYEQDGVTIRDSEADLIRVGFADVMAGESLGEIARRWTASGLPTSQGRETWSRGAVKDVLTNPRCAGLRRYRSVEDRAAIRQNPELGITGTAEWPAIVDEATWRAAVRILCDPGRYRPAKWGKGLLTGVAVCGECGAAVHRGGGYSREVPTYRCTSGKHFARKADPVDEYITMITIGRLTEPDAAALWSADLPDAADLMAQADILRRRRDDIALDYADGVMDRQQFRAANERVLTKLADVERQIAAAGTSSPLSIVAADDVAATWDTLSVAQRRGIVAALMTPVLHRPGRGARDFRPETVDIRWKGQNR

SEQ ID NO: 732 - protein, 528 aa, synthetic construct
MPYCLYVRKSRADAEAEARGEGETLARHIHALLDLAKRRHFDVTQIYKEIVSGETIAARPVMQQLLADVEQGMWDGVLVMEVERLARGDTVDQGIVAQTFKFSDTKIITPMKDYNPNNEFDEEYFEFGLFMSRREYKTINRRLQRGRMASVQEGKYVCSQSPYGYDRQKLENDKGYTLTPKPEEADTVRMIFDWYTKGEPQEDGSFRRLGVSLIARRLNELHIPPRKSEHWVPATVRDMLTNPVYVGMIRWNWRKGEKRMQNGKVTASRPRSSPEDCILVKGLHPPLVDRETFDTAQQFMSQNPPHPIPEHSKVMNPLSGLVVCAKCGKRMVRRPYNNRTKEDTLICPYTHCDNVGSFLSAVERRILASLNEWIEEYRVGFESSEEETKSKAALDAKEKNLRRLTTEYATLNKQLDTAHDLLEQGVYTTEQFLDRSRKLSDRIKQNDTERVALDKDIALDRQRETARREIIPKVEHLLLVYHTLDSPKAKNEMLKEVIERVTYLKTQSGRWHGSPDDFEIALFPRIPK

SEQ ID NO: 733 - protein, 593 aa, synthetic construct
MTKPKLRVAIYARFSTDKQRDASIEDQIESCRDLAAREGWEVAATYHDRATSGASMFRPGIEALQREARAGKFDIVLAEAMDRLSRKLADIAKFHERMEHLGIRIHTLTEGEITEMLIGMKGTMNQILLRDIGIKTHRGQKGRVRAGKLAGGNAYGYDVLPGVTVNGKSEHGDRAINRAEAEVVRRIFRDYAQGTSAGKIAEALNIERIPGPRGGWWGTSTILGNRERGTGILNNELYVGRLVWNRLHFSKDPDTGKRNSRLNPEDRVTAVDVPHLRIIDEALWDQVKARQGAMKTKNTDVPIWDRRRPKFLFSGLMTCGCCGGGFSKVSKDGFGCSTARKKGAAACTNMAVIKQGDLERRVLHALDHHLMDEEAVRIFCEEYAAERNRLQAAREASRIELERELKQISTDHKKLVDAIIAGVPAEQVKDRMIELDARRKDLERQLAASPAPDPIRIHPGMATTYRARIGQLIRGLSENDRMEEAKEALRALVEKIVLVPVPPEESGSGKSDGRPGLAIHLHGALASLLRLACGLPVHEVVGAVAQTQKAPRRAGRGGSNSVQSAEAHLQSSDIAEELVLVAGAGFEPAAFRL

SEQ ID NO: 734 - protein, 508 aa, synthetic construct
MTVYAYSYVRFSSKQQATGASLRRQVEASEAFCNQHNLTLAPLSFHDLGVSAYKKKIRASLNELFLAIESGRIAPGSYVLIEAIDRLSRKGFDDTHNMLRQILLKGVNVAFVGTDAKSLAGVILTRESLNDTMSIIQVAISADLAHKESQRKSKLVRDAKKRAKDDVQAGKIAKRRLPFWLSLKDDESGYEFNDRVEVVKLIVKMRQQGLGKHKIAQTLNEKDIKSSLGKQWSNQTVKHLLTHPALYGAHQLTEVIEDEKVNSKIVENVYPPVINKKEFFLIQFDEKRTTSGRTSSNFPFKGVVRCICGATIVYGPRKLNKKVYHYYYCSGAKDGTCDQKKLIPNLSDILKRIIDRVTISHVIKDKTDVIKQEIQTKREKLGGIQVKLLEMTDPPLSMFEILRSMEKEIESLEEQLKTESLNKVGVSASDVKKLGTITDPVEYNIQVKRIVKQIIVWRPNDKQSWYRVKINKLDGNFQGFMVIKGEIRMFSDLEAIKNMVREPDADDE

SEQ ID NO: 735 - protein, 509 aa, synthetic construct
MSKPRAYSYLRFSTPEQLKGDSYRRQTTMALEYATRKGLALDQDLTFEDLGVSAFRGTNAEAGRLAEFLEAVRAGLVPRGSYLLVEALDRLSRLSPRKAVRVLEDIVEEGITVVTLNDGREYTSANLDDDPTSLLIAIVLFMRANEESATKSRRLSAAWEGKRQRVEDRPLTAITPAWVSLNEASGKLELVPERAAIVQRIFDMYAAGIGYALIAETFNREGIPCFGRARHWHRTYIRKILVNDAVIGIFTPHRIVHEGGKKIRLPLEKVPGYFPSVISEDLFTKAQSQLNGNAGPAPKHRGAVISNLIAGLARCPICGSTMTRVMKGAGPKSGKPKLVCTKAKASAGCQYHAVPLDSVETAVISNASYVTGTVPSGRDGLDSDLDAAEVRIEATQDEIENLLRALAVTPSTAIAERIKDLEVSLEALRTERDGLADQLMAANGPLLAKRVEELRQALEAAPLDRAKANAALRVLLSSVTVDYDSGKLLFQWKHGGETEVIYSMPREVR

SEQ ID NO: 736 - protein, 514 aa, synthetic construct
MCVYIRRSTDDEHQPFSLDAQRAALEKYVASQPDWTIVAEYEDDASGATTERPGLKKALRAAKAGLYDVLLVYRLDRFSRSVADLLDLITILEASNVRFSSATEPVDTGGPFGRMMLQLLAVFAEFERNIIIDRVKSGMTAKASKGKWAGGTRPYGYLVDPDHRLVPHPGEAPILRDIFRLYTRDRAGTRAIATALNERGIPNRTGKKWSGHTINRILDNPAYVGDIAYRDVYVPDAHEPLIDRATFQRAQDIANARGDTQTQRAMSDSDYYLTGLLTCPQCGQRYIGTSANGRTRRYRYYTCFTRSRYGKHATCTAPRLPADDLDQLVLQALHDFYATAEPVLAAMIERAHAQRDTTSDDRRAELGATAHQITTIEAAISRYHTAFENGTMDDATAGPRIRELRQRLAQLHTRHAELEADLATQPAPPPPATITRIREHLTTIMASGTPTERKAAIETLIAEVRLTDQGIVPVFKIPTDTTMPPPDPDGGTHDEPPVRTMVRSVGRLGLEPRT

SEQ ID NO: 737 - protein, 521 aa, synthetic construct
MFLFFLIFCLVLIINLFLNILTYINIYVMLNLQGDDLIMNKTLKSVCAYIRVSTDDQVELSPDSQRQKIKEYCQKNGYILSDVFEDLGISGKSADKRPGFRQMIAMCKAKEHPFDAIIVWKFSRFARNQEESIVYKSMLRKIGVEVISISEPISEGIGGKLTEAILEIMDEYYSINLSQEVMRGMTEGARRGKIMSVAPFGYTAKNHQYYPDENANTVRAIFDMFVNQGYGLMSIAYRLNQQGVKTRRGSTWENRSIKYIIQNPVYIGKIRWNYATHNGKPGTVSINDEADWIIVDGTHEPIIDDDTFKKAQEKIAQFKKQTTRRVAQKHWLSGVLVCCKCGAGMAYHREDEKKHTAPYFVCPNRTRGRCPGQSTKAEWIERDFFNGLVESIESDNYHRTERESVVIDVSFEIKRQLSENDKKLERVKEAYRNGIDTLDEYKANKQLIENERLLLLSRLDKCSSKPRELTKDELLLRARSTIAILQSDECDVQQKADALRAMVDKVVYSKESGIMDFYFLN

SEQ ID NO: 738 - protein, 472 aa, synthetic construct
MKCAIYRRVSTDIQAEKGFSLEAQKMRLEAYAQSQGWDIIGDYMDDGYSAKDMNRPELQRLLTDMKEQRFDVILVYKLDRLCRSVRDLNDMIEDFEKYHIKFKSSTEALDTTTATGRMMINMIGTLAQWEREQTAERVTENMYKRAELGLFNGGVIPFGYTKNNDSIIVNEDESVIIKEMFELALSNGFLAVSLKLNERGYKTKSGHKWHKEAVKRILTNPIYCGYRRYGVQGNDSKEVVISKFNAKDFKPIISKEMFDECQKIFENRKTNAPKPRYGEYNYFSGIFVCPNCGQRLSAVTYMIKGKKYKYYKCAKKAQGFCMGYNVSLETLETAFLKTLNLTLDNIEINISDKIDLDSIKKELDNLAKKKERVKNLYLDNVIDRDEMKEKIDIINEKEKELYTLLSQEEETISVEVVKETLENLIYNWKIISDETKMYAIRSIFDSIEFKEINKANGRWKKAAIEITGYKLR

SEQ ID NO: 739 - protein, 554 aa, synthetic construct
MTRVAAYCRVSTDKDDQAGSLESQKRYFAEYIGRNPEWELAEVYADEGVTGTSTKKRAAFNRMIADAQARRFDLVVTKEISRFARNTLDSILYTRKLKGLGVGVIFMNDNINTLDPDAELRLTIMSSIAQEESRKTSDRVKWGQKRRMEQGVVFGRDLLGYDVRDGKLYRNEAGAKTVRLIFHKFVQEGKGAHTIARELQEGGIPTATYMKQWSGTVVLRILRNEKYCGDLIQKKTITPNYLTHEKKYNRGEEEFVVLRDHHEPIISRELFGQAQQELARRSPSGSQKAKHSNRYCFSGKVKCGLCGSSYVARTKKRRDGSVYKAWRCSRSASHGRCKTDPAGNAVGCDGRAVSEDCLRLVLRQVVKNLPLDKAALAATLGRIIRPAMKPGGEGCRPEKLAGKLQRLAEKRQSLLELYLNQDISKAEFQRMAARCDAEAAGLAAEQEALARRGAQDGCTDAPYGQAEAYIRALMSGDVWDDAFYRRLLDRITVLPGGVLEIRLQMLPQSARYLVADPQALQKGWDAAPPEAKAAARGHFASSVGTEELAHELYQ

SEQ ID NO: 740 - protein, 524 aa, synthetic construct
MAQACIYLRLSRDDGDNVESNSIINQRSLLRDYARNHEFTILEEFVDDGISGLTFNRPDFNRMMAMVNDKVIDTIIVKDLSRFGRDYIETGKYLQRIFPAMGVRFISVNDHYDSLTADTNETHLVMPIKSLINDSYCRDISTKVRSTQKAKRQKGEYIGAFAPYGYRKDDKQRNHLVVDETIRPTIEKIFALKLDGYSSNAIAGFLNQAGVETPLKRKKACQEKIKGFHGHNYKWDTKMVNRILINRVYTGTLEQGKQTKLNYKSKKSVAVNPADWVRVDDTHEAIISKSTFELANNLLLRDVKHGKKLPDLFAGLLFCSDCQAQLVQRKLRYKDKETVQYICSTYNNGRGCGRHAIKQERLLDLVSTFIHQYLDWKSYLIKAVPDYLNQEQFLEVDFTSLLANRKKYEQLLQSLYLDLDDGLINDTEYQEFQRSYRQKLNQIEDTIIQKKALAQTLYDKLQDKKKWLKQLSEIQKDKELNRLTLVTLLDRIVIHENQELTLVFHDVAELEILQQFSHRETEVV

SEQ ID NO: 741 - protein, 402 aa, synthetic construct
MKQIKTIQAQKVTAIKRLKVAAYTRVSHTSLLQSLSNQVSHYSQLIQANPEWDYVGVYSDSAISGRSQAYRRDFQQLLEDCRKGKIDLILTKSISRFGRNTVELLETVRELKRLGISVRFEKEKIDTLTAEGELLLTLLASMAQEESQSISQNIRWRVKKRFEEGKPYIPQDIFGYRWNGDEYVIEPHEASIVRQVFEWYMEGLSAPKIAKRLDDRGERTRLGNRFTKRVIYNMFDQEAYCGRLILQKTFRDQFGSRSILNDGQMAKYIVENAHEAIVTPEYFQLVNQEKKRRARRRVSKHDALAKLQGKVYCEHCGLDMVLTLETKFNQEKRVRYYCRTRDAKGVETCLGRTVTEEQLFQAFGESINTEDIHHISFNSVTNEAKAIYRNGEEKHVIIQKGR

SEQ ID NO: 742 - protein, 463 aa, synthetic construct
MKVAIYARVSTDEQAKEGFSIPAQRERLRAFCASQGWEIVQEYIEEGWSAKDLERPQMKQLLKDIKKGNIDIVLVYRLDRLTRSVLDLYLLLQTFEKYNVAFRSATEVYDTSTAMGRLFITLVAALAQWERENLAERVRFGIEQMIDEGKKPGGHSPYGYKFDKDFHCTIIEEEAEVVRMIYRLYCDGYGYRSIADRLNELGVKPRIAKEWNHNSIRDILTNDIYIGTYRWGNKVVPNNHPPIISETLFKKVQKEKENRSVDRKRVGKFIFTGLLYCGNCNENKMQGFFDKREQKTYYRCLKCNRITNEKNITASLIAEVQHLITSKEYFMSKFSHQFAEPKAIDVSALTKELEKIKRQKEKWYDLYMDDENPIPKEELFAKINELNDREREIYDILSEFELEDNESLEEKYNRLSKMTDFKQQFEQADDFTKKELLFSIFERIVIYREKGKGKKLTLDYALK

SEQ ID NO: 743 - protein, 678 aa, synthetic construct
MATRNTRNSQSPQRQSLSSHGPNMPPSDTPLGSEPFRSKLALVYLRVSTARQAKRDGEVEGYSIPAQRTSCHKRAHELDAAVEEFVDAGASARSADRPGLQALLARLADPSQPPVDYVIVHKLDRLARDRADDVAILLAIRQAGATLVSVSEMVDETPAGTLMHGIVASFAEYYSRNLSTEAKKGMSEKVKRGGTPGQAPIGYLNVVHRVDGTDIKSVVIDEVRGHHMAWAFEQYATGDWSIAALRDELEARGLRSRPTKKYVGTPLSRAQLHRLLSNPYYKGLIRFKGVLFEGKHPPLVDEITWQRVQDVLAGRRIAGDRSWKHGHYLKGSLRCERCGGRIGYGWSRGKGGRYDYFFCLGRHTGRSTCDLPYIPAGAIEDRVAERWSRIRFSDSEIADTRTQILSDAQVLRDQHTQLAEQQRRHLIQLERQKTKLIDAYMADAIPVEDLKTRQAAVMAEIADARRLIATADIELNELNTRLDVVLGLLTHARTLYDRADGTARQLLNSAMFAWLTIDSHDVLDASTRATGSSGWTPQEPELAGGELSEVVGAVLRYHPDVSGTTDTPQIHNNPHLGGLGTFRRALSAQPHHGDGMASGAATRPGGRTATGRDHGAVLAPETGTTRRNGQKYGNKAGHDETPAKLVFDRGSNVYYLAVAEGFEPSEGGTPHTLSRRAP

SEQ ID NO: 744 - protein, 551 aa, synthetic construct
MDTSKYMPACYCRVSTVHQIDKESIPAQVHMLTNYCVGMLQCKKSDIEFYIDAGYSGKNTKRPQFEKMMDDVESGKRNIVLAFKIDRISRNLLDFARFLEVLKSHNADFVSLSESFDTSSVMGQGMLKLVCLFGEMERGITRERVMAVSKDIISRGGHLGAPTPLGYNYDKGTKKYSINESEAKTIKLMFKMVQDGYSTNYIANHLNDNHITSKRGGLWTSTTVNHILHNPAFKGLYIWNRKTSGRQKVKDKKEWMYQKDVYPVIIPEKDWQAVQDLLKNRKTGRAFMQSTAPHFFSNLIICGECGRLLRYRSDRPRRSGFTPTIYTCPGHTFHWGCPNSAYLSDIVLAPFVLRYISNMYKLSWITDSVQSSQQLKSILLEGMPSNCRLANLSTIYGLFTRANTEPVPGDVAIIKAAANNAKVEREKELAKYYKALDRLKDLYLYGDSDLSKENYVAERKKIELKIASIMGKTQKEEKQVSPKLSIDSSKYETILSMLPDAADYMQILEKCGHKLLADFFHDCIKSIVTSNRQVMRITFCNGVSHNFIYEN

SEQ ID NO: 745 - protein, 515 aa, synthetic construct
MHSTMPTPTDWACCAYLRKSREDEEREKLGAYKTLERHQAIIEGLAEDNGHKIAKWYREVVSGETISGRPDVKQLLADIASNTWDAVYAVEASRLGRGGGSDQEKIVNAFRYTNTWLLTEEKNYDPNSKSDMKQLKNDLRNSEDELDSITSRLTRGKVSSAKEGRWQATGRTPYGWRAVRIKGLWQLEPDENHGNMLRIYDLLESDVGCNAIATMYSNEGIRTARGGHHWTAAAIRAIALNVANCGYVTYGKNVTKRVFDPETFETRKVRAQNQNPICVKGLHYGKGGISEERFKKITGKLVESAHLRKGLQLKNPLSQLLKCGKCGYAMDHHQMSSGKSQAYFFVHKRPKAMTRPCDGCRGARETLVMDVLVTALRKLLADVEFHVGEIDKTSEYTIHLNALKSELIKAGAARSRAMEAYEAGAYTIEEFKVRKEAIDNHIEEVEQAIADAKPPEYSEATVASLRGCIEALLDDDLSAKAKNDVLRGIIKRIDYYNDTAPYVPDNKVRLVIFLR

SEQ ID NO: 746 - protein, 539 aa, synthetic construct
MQTFTNNAKPHMKYFMYARKSTDSEDRQVASIDSQIGELLKIAGRDDLDIVERFAESKSAKAPGRPVFNQMIKRIDRGEAQGIICWKLDRLARNPIDGGTISWMLQRGKLLHIQTYDRAYLPTDNVLMMSVEFGMANQYVRDLATNVKRELRRKAEMGWRPGQAPTGYLNSPDKEKGKRIITPDPNLFPALRRMIGMILARTHTLPQVHALATNQWCLRNRNGRKIALSTFYRMLSLPFYYGAYEYPGGSGIWHHGNHEPLLTKAEFDKLQAIIKSETTTRPKSYFFAYRGLLHCAQCGALVTAENKHKRTSSGRLIDYIYYHCTRRKDPNCRQKCIEEKDLEKQAKELLERIEIPQDFCDWAVQKLRGECGRETEMRANIIDQQRKAYDQCVQKLDKLLELRLSGEIDEDQFLAKKEELIKEKARLTELLRDSDNRVDAWLIQAEKALNFAQTARESFESGDDTVKREILAALGTNWTLKDGKLDVLIEEPLRHIGNCAKMVRTLQETSKSGFEPEKNAARRRETSGSAYECLKILRD

SEQ ID NO: 747 - protein, 577 aa, synthetic construct
MDNLSVFNHFAPKATDNSELAKTAVIYTRVSHSSQEDNTSLESQRKRCEEYASANGYSVVEYFGGTHESAKTDDRKEFNRMLTFVKRNKRVNYILVYSYERFSRTGADGMKIAQDLQKQYKVTTLSVSQGIDPSTITGEFQRNIMLLFGHLDNQMRKDKTVSGMRELVEKGYTPYSIPKGYVNLNKGSKAVDQKIVLNDEGKLLRKAFIWKADKQMRNCEIIQRLNALGLKLDDRRLCEILANPYYCGIMVSKLVPNKAIEGKHEPMISREIFLKVNLIVADNRTHPVSHKAEDENLPLKRFSHCSECNAPMTGYIVRKKNLWYYKCRTKGCNTNKSAKQLHDHFKTLISEFEVNPQQTELIQLGIASMYCVFFEEINENQKLYNSKISELKNKIESAEEKLVTGVIDRPMFDKFKAKFSDEMNKVEDLLAQIKRGSSNLEKCLKLVVKYCQKPLLWWENASIGDRMIFQNIVFPDGIIYDRKKDRILTPRVNSYFKPIPQLEGVIKGKKNGDSIKFDAIPACVTSSGFKPETSTAVMWCSIQLSYEALIAGTKIAAFFVSASYFLKLFNLSSDPSV

SEQ ID NO: 748 - protein, 515 aa, synthetic construct
MNKKVKAGIYIRVSTEEQKQGHSLEAQESMLKEFADRKGYEIYDVYNDGGYSGKNFNRPEIQRLLRDLKDDKIDVILVWKVDRLSRNNTDVMSLIDTELTPRKKNLIITSIDMDSSSPTGHMFISLLSTFARYERATIIDRVKAGMQKRAEKGYWNGGSILGYDSVDKKLIINENESEIVREIFQLRAEGKGYKFIVNILNDKGVKTKTGKNFSIPAIKVIVNNHIYNGKMVWKKHQDWNTRRRTGKSEPIIVEGIHDAIIDEGLWTRVQKVNELQKNSFSSNRNFNGNFLLTGILKCPKCGAGTVMSKTKKRNSDDYHLYYMCQAYHNKGSSVCSANLIRKDQVEQQVLNIISLLVNENDIINALIDELNSDNNKTNESHIAHIKMLKKQLGKAYDKRKKLDNDYFEGNIEGSTYNRLMNELQLDINKLKRNVRESESEIIKNDSTINKEEVIYALENFNKLFKIVNDEEKKLLIRSLIREVQMEANRKDVKEITFWFLPSGVLPSNKVRRTVS

SEQ ID NO: 749 - protein, 476 aa, synthetic construct
MIKKVAIYLRKSRNEDSISDAEALENHRETLTALADSNEWSYNVYAEIGSSMKESRPELNKLLKNVSSFDAVLVMDIDRLSRDRYHSAQIMQMFKENHVKIVTADGRITDLNNDQEEIMTGMQEVFANYEYNMIKKRLQRGKQAAAKKGNWATGRVPLGYEYDRETKRLKVREEESKIVVLIFQLFNDGYSAEKVSIELNRQGYKGKNGKSFVPSNVLRILRNDVYRGHTTMLEHRVLNTHEAIIEAPLWESVHRRVAVVRGKGSRVAHELSGILKCGYCGKTLAINIQPTNGVKMVKGCHRRDVDTGVLCRNRGFKYEEVYAGLTQEIKYYRHKLVQDVSLMMQRESNLGRAHDGKVKSLEEQLNKVSQAISRLNRAFVNGDLTDDEFSALKEEKVKERVNIEERLQKLKDTNGMSLVEEIECMVSNLDKLLGANDKPLSVKALNEILKSVILEAHLCFMPDIDLEPKLKITWRK

SEQ ID NO: 750 - protein, 517 aa, synthetic construct
MPAATYGRFSTDRQRETSIHDQDRTCAARAAALGVSVDFRYSDEGVSGSTPVMLREGGRALMADAMAGRWNVLLVEGLDRLSRDMVEQETIIRRLEHRGVRIIGVSDGYDSASKTRKLHRGMRGIINEVYLDDLREKTHRGLAGQVARGMHGGGLSYGYRSIPVDGGNQLQVNEEQAEWVRWIFARYGEGWSCQRIAHELNRLEVPSLRGGTWAVSAIYGNPTRLSGVLNNELYIGRYIWNRGRWEKDPDTGRRIRIERPREEWSVMEMPQLRIVDDMAWHAARNRMARGRIGTGKSHGGKPSTLFGGILRCQHCGGPVIAVSKDLYGCSIKKDRGTCQGVYAMRNATDECLVRIVRDDLLSPEALDEMQRQAKTMANKQRQGNARKADAERQRLADLDREIASLMDVLAKMGYSDSIVGRLRSMEAEKNQLLAPKPETEHQPDYQAVIANYRKMLESLDAALMDDVSTAREILREILGNPVVGQDEGGSFLTLKSKTSLESFESSDVAECGCGGRI

SEQ ID NO: 751 - protein, 404 aa, synthetic construct
MKDIKTEYKGKWKGSERKARKEARKAKIRESYANPGDVEVIPALSELEPEKPVILRVAAYCRVSTDQESQADSYESQVQHYTKYISSRPDWEYVGTYADEGRSGTNVLKRTHFLEMIEDCRAGKIDLIITKDIRRFARNTLDCLRYVRELKGLDPPVGIYFEDEHLNTLDRGNEAILALLSSVAQGESENKSEAIKWSYRRRFENGNPVCPTWALLGYTTDEDGNMQIVPSEAEIVKYIYESYLEGWSGIEIAAKLTEAGIPTVKGLPVWPAGSVYNILRNEKYCGDALMQKTYTPDFLTHKAYKNRGQERQYRKRDHHPAIVDRRTWEEVQEELSAHRHHRHGRKPQRTISKVKLRIYKRGKLKGFVIFDPEWTKKDRPHIMEKVGITETRKVDENAEELHCD

SEQ ID NO: 752 - protein, 629 aa, synthetic construct
MSASHDHTETESTIPEKQLALAAIQRIQQLSTQTGDNATNPSNAETGLIYLRVSTKEQARTGGGAEGYSIPAQREACHARAAQMGVTILDEYVDAGESARSAQRDDLQRMLSDIKKTHPTYVYVHKIDRLARNREDDIAINLLLRKHGVKLISCTENVDDTPSGKLLYGLMAEIAQFYSANLAQEVMKGLVRKAEEGGTPYRAPLGYINRREIRDGVQFSWVDLDTERAEIIRWCFEAYSTGEWSAIDLTLAARAKGLTSRPTPARPSKPIALTTMYHILANPYYMGLVPYQGIHYEGKHATLVEPDVWLAVQHTLAAHNQTGERDRIHNHYLRSTIYCSECGGRLVYSRNKGNGGTYVYYFCVKKKTKANNCIRPGVRLERIEDGIAAFYSQFRIRPEHAEQIQASVYEELTAQRQEANRGLARANKRKDLLTDERQKLLHAHYAGAIPQDLLGSEMKRLTRALTEAETEIKAAKTTATDTEATLTRALAAASHCEKAYLGAPSNIRRQINRGFFEKLYIGADGAVEGVELTEPFAALLEVGTMVHLPNTSAEEATSPAQTAAEARHLPARTGSAQLTEARRAAFKTRTNITERAQRNTPSELSLVGRGLDRTCLVPRTGIEPALCRF

SEQ ID NO: 753 - protein, 553 aa, synthetic construct
MQNNANEMAVFNTAIYVRLSKEDIVAAQSGRESNSITNQKQLILDFLKDKPEFNIVSIRIDDGYTGTNFDRPAFQRMLNDIKAGRINCVVVKDLSRFGREYINSGKYIHRLFPVLGVRLIAINDNIDTITRDESSEFSITLKNLMNDNYSRDISVKVRSQLQVKRKHGDFICPFAPYGYQKCEGNHNRIEPDPYAATVVQDIFNWKIQGMTNNGIAIRLAESGILAPLEYKRHKGEPLFSGFKMKERCEWTAQAVERILTNPIYIGTLRQGFRRRPNYKIKKSIPTEENEWVVIHDAHEPVVTKRTFYLAQKALLIDTRAAPRATTVYPLSGLLECGECGNAVTRSTINNGYKLYSYFRCSVRTKEDRCELKQVPEAQVEAAVLQLLQEHISAVVELDRCLSEIQQVPYQKINVAKCEQRREKLAAEIARYRDLKASLYEDMKEGLISKTDFCDIRGQYDARIADALIAQEQIDRELSIYLSGEQSLNNWMKTFTEHRGLKSLTRAVVLECIEKVVIHKDEKLEIIFEHSEDYARLVSSLQEYAARGILEEAM

SEQ ID NO: 754 - protein, 521 aa, synthetic construct
MLTATIYKRQSTLRQHAKGDSNTRQTNSSDEYCTRNNLQVTEVLSDAGISGFTGENFATGELGFFIERVQAGEYQQGHTLVLEHLDRFSRADVDVAINRLTSITTAGVDIAITGLGKEERLLKKGMPLTDMLVVLLEFAQANDESAKKSERLKSVWVTKKQQAQQGIIITKRYPHWLDTKDGNFIIKEANAALVKEMFSLYISGESFMSIARILTDKDQDGSLIKFYPRSTTFKSTSVGAILKNHSVYGRLDTMDVNDYYPVIVSKEDFDLVQSIRYKKTNNQHTNNKYTIKSAAKKGVIKHLFSGLYICNTCNSSLQYNEGERAKLKTNPNWESLYRLRCMSAQLKSNGRCSGSYTLKARVIEQMLWEQMDNLMLYDAADEINTQQSIKKLGNEMASYDETFNTYNFMITSKYPVPTELAVDYKTASERVDLINQEIRTLEQQLKNTNNKSLLTYKELNSNDKRKQARRLVEHTIKSITVNWNKKPDAEFLVTLNNNQRYIIVNVDGKYKTVAKGLLLGF

SEQ ID NO: 755 - protein, 523 aa, synthetic construct
MSQDKPDPVRCAIYTRKSTDENLDLDFNSLDAQRDSGEAYIRSQKHEGWICLDERYDDAGFSGGNTDRPAFQRLMNDIAEGKIDCIIVYKIDRLSRSLMDFAKIMESLDAQKVSVVSVTQQFNTTSSMGRLTLNILLSFAQFEREIISERTRDKIAAARRKGKWTGGPPILGYDRVRDKRGTRILVNDEEAKRVRSIYQMYLKNGSMLPTLRAIKKRGWKTKQYETLKGTMRGGAEYDKSALQKVLTNVVYLGKITYKSEIHDGEHEAIIDEDLFARVQGLLRRNRNSGGKHSRNKHGALLKGLVRCKACGCAMSHHFATRGSKRYRYYVCIKAQKKGWDECPAPSLPAKQLEDFVVEQIKNLGQDQDILHDALCTTQAHLQDEITKHEKQRTDVEKTIKQLSGQIGELSARAGYDERATRQLDQLQSRIHEQQEIIQEINAQIVAIRHRMLNPDELTGAIESFHPVWETMSPADKAKLVHLLIERIEYDGKDETIALTYHAAGISTLSPENQRSTDVQHCFA

SEQ ID NO: 756 - protein, 502 aa, synthetic construct
MLDGMTPTRSDAGAPLRALVYVRISQDRTGAHLGVDRQREDCQALAERNGWEIVDTYVDNDLSAYSGKPRKGYRQLLADLDAGRATVVIAWHTDRLHRSPTELEEYIDISDRRGVSTHTCQAGIIDLSTPSGRMTARILGAVARHESEHKAERVARARLQAAKAGKWSGGLRPFGWGMPTGETRTVKDAETGAETEAPVLDMDQAVPDEARCVLDSVDALLGGASLRSRVKHLNDKGVLTTAGNAWTHQSWRDVLLRPRNAGIAVYRGEEIGAGNWQAIVPEEKWRAVVALLTDPGRRTTPGGQVRWLGSLLYRCGVPGCGCPGPMVCSMSGGASRPSYRCRLGHVSRRADKLDEHVTDVILERMSRPDAAELLLPAAENVDVAALQAEAGQIQQRLGDLSGLFGAGQIDAAQLASGSEVAKRQLDGVRRQLADAAVRDPLAVVVGTPDPRAAWKGLGLEEQREILAALVTVTVRKGRPGRMPGGAYTDLDSVDFDWKRGRR

SEQ ID NO: 757 - protein, 594 aa, synthetic construct
MASEFPGPLAYSYIRMSTDIQLRGDSLRRQEQASKRYAEQHGLQLVEDFKLEDIGVSAFKGANVSSGALGRFLDRVKAGEIIKGSYLLVESLDRISRQQILDSVPVFFDLVKSGINVVTLADNHVYRAGDTNVADVIYSVVVLGRAYEESKTKSMRVGAAWENKRKNAASRKLTKVAPAWLSLQEDRKSFDPISERVDVVRQIFQMADAGHGSFTIARRLNQSGVPTFTKSHGWHESYVTKILNNRAALGEFQPHRYDDHGDRVPHGEPVSDYFPRIIEEDQFHRVQASRRRRLVEGAGRKGPEYRNLFTKIAKCEYCGAPMRFVHKGRPPKGSQALKCTNAVRGLGCESISWRYSDFETSFLYFVKEIDLTATLRAAAENSERASVEQRISALEEKIRQLSAKRERIFELLTEPGSSTAFIKGKLDECEASIAAEEALITQLREQRSIATMLPTISADELRSLIASVQDMSAPGIFERRAAVANRLSILVTSLRIAADGRRPKMKGIRTFLESQELNAEERDRLLEHIERSNEVGQRYNRSFTVVLADGISRKIVLNNDDPTDFVAEVTVDAAGNPAGTDRGKDLQTLFSLNP

SEQ ID NO: 758 - protein, 564 aa, synthetic construct
MARKKRNGTNVPIEENGSLTYKAGLYRRLSDEDKADMEDNSIENQSKICLDYLKDKEDIHLISTYTDNGFTGTNFNRAGFIEMMNDIEAGKINCIIVKDLSRLGREYIEASELVERFFPANGIRFIAVNNHYDSINAGTTSGGIAIPITNIANDYYSKDTSRKIRGAIQAKIVCGEFMPSSGSVPYGYLRGENCFEVDEETRDIIIRIYKLRNEGMAFNAIARRLNEEMIASPGKLRYLRGLTKAPKYENAVWDRKTVRKILNDPVYLGHRIHGKVRREKLGAPKKKTDPSTWQYAYHVHEPIIEQELYDDVQKVNALELEQRGTYKSSGRLEEDYRDILLKKLYCGDCKRKMSSLKRNQRSTSKLPPVINYQCSQYLRYNGLNDCFNHYIPETVVIESIKNALNIRLSLALEAEQMIQAVERNQKKTGEKRALSNLQLKLKECERKKERLWEDYANQLLDREEYLFAKGKYDEEYQLLLKEEEKAISDLDKEAATISAASSWILHMKKFNKMKKLDKQLISVFVDKIYVYGDRRVEIVMNFKEDTLWELYNKVVSEGVEQYAG

SEQ ID NO: 759 - protein, 525 aa, synthetic construct
MLDPNGIYFAYLRKSREDREAELHGYGETLKRHQRMLEDLAKYHKIKIAKFYSEVVSGETIASRPQMLAMLDDIESLSPDGVLVVEIERLARGDTRDQGLVLETFKYSGTRIITPMKIYDPTDERDEEYAEFGLFMSRREYKTINRRLRDGKIASFNEGKWTGNKAPFGYERVKLAGEKGFTLKIVPEDADVVRLIFQLFIYGSNASNNIPVGTSKICRILDNLHISPPIGETWQPCTIRQILSNPTYIGKVHMGRRSTQKKTLNGVVKISRPINKNAKIADGLHPAIIDDALFLKAQEKRKANYQKPFFEGIKNPLAGLIYCSVCGKSMYRRPAGKRCKEDMIQCTTHGCPTSASYYHYIEEKLLVSLNKWLEDYRIQVKDISPENYAQQLNLLQSQLNAAQNESETSKKQLSKAMDLLEKDIYSVEMFQQRASELNEKIALSSRSISDLSVKIDSIRTKAVQKEEVIARWERILSLYPQVDDPAVKNALMKELLTRIEYSKPHKGNRQNGGMDQFTLKLFPRL

SEQ ID NO: 760 - protein, 499 aa, synthetic construct
MIGIYARVSTEEQLKGFSINGQIEECIQLAGNEEYLKYVDEGITGEIMNRPALTRLQDDIENGLIHKVICYDPDRLSRKLLVQLMITETLQKNNVELQFVRSDYKNDAEGQLYFQVRGAFSEFDKAKIKHNTMTGRYRKAKSGKVVKNNHLYGYHYNKEKETYEINEEEAKVVRMIFDYYTNPNSKFQGINGIALHLTDISIPTKRGAKVWHRQVVRQILMNDAYTGNYYQNKYDTVGNYVKKQAGEKVEYGKIRPKEEWLKTEIPAIISLEQFEYAQSLLEQGRRRQTKVSFHQYLLSGLVRCDRCGGTMTGKKTKSHGKDFFIYTCRKNYAGSKSKGCGKQISENKLNKYVWDTIVDLLSDPKKIAEFREQDEKTYLKEEMEYVLAEIEKAKKGRKRLFQLVSLSEDDDMDLEEIKEQIRNLQLKEKKLQDKYNEMLNENEVAAGKEPSVVALESAINMFMKNKKNEFTFEHKQEILRRVIKEVIVVDSETINIQIF

SEQ ID NO: 761 - protein, 520 aa, synthetic construct
MMTKSLPKIYLYSRISSLSQQSGTGLQQQRNQQPLLSELSHRYSLPISNETFEDIGVSAYKGNHLQASFGKILDAISSGRIAKGSILVVFSLDRISRQQVNLAMELFLSVINKGVSIYTTSDNMLYDHNDEHISQNIILSVLTMQRAHEESRTKSKRTRGNALTIIKGIEANDPAYFQDGYTRAIKSVGSHPWWLDISSGYVKPHPKYFPIARAIVKRIINLESTITIFRWLEKNYDAPPRSRGKWNPVLIDKMTANTMLTGKRILTIDGSDYNLPNYAPAVCSEKDFDLLRATRSGKYKKDNVTKPKVTGLLNGINTLKCGICGGGMSCNRSGKYYRYACINAANGTAKHPQWGTPIEPIENYITQQARLRAFNNIAQPASDNLKSLLQNQSDLTSQLEQLEIEYQEYRADGLRPPRVLVAELSDLESQLEQIQESIDAERITTAKGTLPNVWRSLFTDYAEADFLDKQQVDLRLQFRNVLRHMIDRIEAKPTGRKDGNRNIIEYVVKWSNGDTTVTSL

SEQ ID NO: 762 - protein, 535 aa, synthetic construct
MIDLIPAHINGRRLEVLTDPKDTLEQKGVPIGGYIRISTRKDSQLSSIENQKKLLAQWAEVNGYNLVRTYTDIKSGEFSYLRNEMNQLREDIRQGRIKGVVTKEISRTSRDIMDILELKREIASYGGFFISIKENYDSRMDDDEFLLVLHGALAQKERKTTASRVKVTQIIKAKEGKTNVPQPAFGYKLSEDGQHLEVNPETVPTYRFIVEKFLEGWGQAKIAKYLNEQGIPSKRGCRWCMNAVKTILSNPVYLGITIYNTTTLVRDPNGRMKRVVRPREEWIIREGTHEPLITPDEFERIQQIINRRKEMDKKEWTCDRKYLGSSILRCAECGAKIFGSRYPKKVNGKKAKGQYLYRYRCLGTNGKCSPPMKYWDMEKVDYNIMELFKKIFADKEKLMQAVREQTSLFDQDNETLAVEREEARRRLEQLDKALRKQQVAYEEDVINLEEYRQRVAELREEKHVLTQKLESLNEKLVRADNVMDRLNAIYEKIAKKLDRIHDLPFEEKIAYVTTTFEAIYLQEDYTILDVIFKLG

SEQ ID NO: 763 - protein, 516 aa, synthetic construct
MQYCIYLRKSRSDEEAEQRGEGETLARHEKILLDLARKLKLNITKIYKEVVSGETISSRPIMQQLLSEVEEKLWSGVLVVEVERLARGDTIDQGTVSQAFKYSNTKIITPVKTYDPNNEFDEEYFEFGLFMSRREYKTINRRLQRGRLESVKEGKYVGNTPPYGYVRKKLEKEKGYTLEPHPEQSDIVKLIYKLYTEENIGVSLIVRRLEELKIPTAKGGYWSTSTLRGILNNPVYIGKIRWKHRPQVKKVKDGEIIKERPRSNDVVIVDGLHEAIIDEETFNKAQEILSENSSVPVPTKYTIKNSLAGIVKCGKCGRNMNRRPYGERQPATLMCPVPQCSNVSSQLHLVEQKLLESLEKWLDKYKLKINSNTDNNNLSLELDVVKKSIQTINEELETLNTQSDKLHDLLEQGIYSTEKFLERSKIISEKISKLKDNKSNLEKELNQNRLKEESDRTIIPKIERILKTYNTLETPDQKNELLKEVLTEVEYNKEVGGRWHAKPDDFKLVVHPKIPK

SEQ ID NO: 764 - protein, 472 aa, synthetic construct
MRVLGRVRLSRLTEESTSVERQRELIKKWSEMNDHTIVGWAEDIDVSGSVDPFEAPQLGPWFKEDKRGDWDVLVAWKLDRIGRRAIPLNKVFGWMLEHEKTLVCVSDNIDLSTWVGRLVANVIAGVAEGELEAIRERTKASRKKLLESGRWTGGPVPYWLIPEKLPEGGWVLSLNTETAPVLRRAIDEVLDGTAVHTVAERLNDQGVPSPGGKKWTSQTLWRILQHKYLKGHSTDRGKTVRDSSGVPISNCEALLTPSEWDRLQAVLAQWKLPETSNRVKNTSPLLGVVVCYICDKPLYYRSYTRNYGKGLYRSYYCRNHRTPGIKADMLDEYLEENLMREVGDKNVLERYFVPAENHQIELDEAIRATEELTALLGTMTSATMRSSLTAQLAALDSRIASLEKLPTSESRWEYRELPRTYREMWESDDDPQFRRELLLKSGITLAATMTGGQKLHLHIPDDILERMALKGE

SEQ ID NO: 765 - protein, 541 aa, synthetic construct
MEKDKKATALYCRLSKDDGSNSESLSIRTQKAMLMEYATRNGFGNCQYYVDDGYSGTNSDRPAFQELLDDIREGKVATVITKDQSRLGRNHIETGTYMEIFFPEHGVRYIAINDGYDSNEQSQMDIAPFRNIINEMYAKDTSRKIKSALRTRKKSGKYISSGAPFGYQKDPADHNHLVIDPNTAPVVEYIYSMAEEGLGLHRIAKRLHDEKVLKPCYYKKEMFGRFIDDEKMYDWDSAYISQVLHSPVYAGHIIYEAKPTVSMKSKKRRYIPFEERAIVPNTHEAIIPQDRWENVQRILYSRSGCFMCDKTDYDNIFKGIVRCADCGRTMLVKVEHRRKRNSVLDQTFYCCSTYRKYGAKACDSHNLEARVLHEAVFADIQAHAKAAVSNREALVKKIANQMHLRVSSDRAQHKRDLKQCKARIAEIEDLYAKLYEDVSKGLLPEKRFQMLADRYDKEQAELTEKIEQYEREGRAEHDQLDKIQDFIDEVSKYAGITELNYKILHQLIDKILVSKAEKVDGEYVQKIQIFYRFIGPLDAIE

SEQ ID NO: 766 - protein, 481 aa, synthetic construct
MAALPKAAGIYCRLSYAPDGSLEKVERQEADCREVAARLGWPVSEEHIFPDNNRSAWQRNRKRPQWDRMLAAIEAGEIDAIVVYHGDRLIRQPYDLEKLLNITDSKGVRIASPSGTRNLDNSDDRFVLRIEAAQACRASDDTSRRVLRGLESRAKKGKAKPGGKRAFGFEADAETRRESECEVIAESVDRLMSGQSRGGILRWMNSVSCTTEGNEWTLRGLTNVWKASRIAGLVYQSGVYYRAVWEPIISPETWEALKLLLAQSAEDYPAPGRERKYLLTGVATCETKHRLFPKPAGGRNRKTTRLYYCRVKGCPTSVGRNIALLDAYVEGRVLALLNDPDFIEEIMTAAPSVAKEIAELEVRKAAVVTQIEDLVDHPDLDAGLLMKSLAGFNRKVKQLQDSAAMSERRRLLRRVAGISRDEWDELPIDVRTSVVRATYKVTVLPTTKRGPGFDTSAVRMERVPVADEAAKPKKAKRTKTK

SEQ ID NO: 767 - protein, 563 aa, synthetic construct
MGNWLVVPKGTGLARRTRARRAAQYVRMSRELQRYSIKNQMAAIATYAEANALTIVRTYSDEGRSGLRIKGRPGLIELIEDVQSGHADFDHILVYDVSRWGRFQDVDESAYYEFLCKRNGVQVEYCAELFKNDGTFVSGIAKSLKRGMAAEWSRELSVKVHAGHCRVASLGYRVGAPVGYGLRRLMVDESEHPKGFLEKGQFKALQSDRVRLQPGSAEEAAVVRIIFDQFVNGRKSYSDIRRQLNDAGIANHNGRPWTDGMIPTILANENYIGKTIYNRTSRRLGQKLVKNPDHAWVRGAAAIEPIVDPGIFARAQKLLAERRVEVSEDEMLLRLRLALRRRGKLNSRIINTTLGLNHVSSYVKHFGSLRKAYALIGYVSSRDCDWIDTREFWAAEQARHATELAEVLRNDLGLRPELAPDGIGVDVERRRVVSFLVARRLARRGEDHAAQWKAYRRQISSGLLAVMRLDAANREIEDYVLLPASLRSGRYVWLASGSLRRHRGALYRERGTLFAAIKATLAKTTRAAPTSSAPPKKRSRSGQPKAKGFGGRRSRCGGTKSHR

SEQ ID NO: 768 - protein, 479 aa, synthetic construct
MSRRRPAATPDRPERVALYVRVSAVMGRAGDDFHSPEIQVAAMRRVTANMEEVALIDDDIDQTGRTFSRAGIEKIRKLAEAGSIDAVAVYNISRFGRNVLESLQFLTWLADRGVTILSATEHIDTSTPSGRWMLTNLLAIAEMRSDEIGNEWRSAIHHRTKAGRPHGKIPVGYERGEDGRLTPHPTHGPAVARAFADFAEGASVRQVARDLRAVTGLRMSGATARMVLRNRAYRGEVRAGGASRPDAHEPLVDPATWTRVEARLRETAVMPSRLAEPKYALSGLLWCGVCGGRGNHRPQDQRTRTYCRRQVEEEGCVGFGTPDAAKLAAGVLEKVRAKAAELRGDIAGAAVDQSGAHNDAARAAALSEKLAETRRAMVRAAEGWSRGRMDDRTYDATMAALERDEREQQGALDQITIAPVRLRRGEMVSLADRLLLLWPRMNELQRNRALKDVVKAVTVLPVKPYARTPAVDRIRVDWL

SEQ ID NO: 769 - protein, 692 aa, synthetic construct
MTNADRLPAPLLQRKAVVYVRQSTQAQVQMNLESQRRQYELVGEAKRRGFRDIEVIDDDLGRSASGTVARPGFERLVALLCAGEVGAVLCLDASRLARNGRDWHHLLELCGLVEARVIDLDGVYDPCRPNDRLLLGMKGSISEFELNVLRTRMLDAARSKAQRGELRISVPIGYLWHRDVGLGLDPNQRLQEVIRMIFTRFRELGSARQAFLSLQAEQIHFPRPTDGRTLTHFDWTLIRYRNVISVLRNPFYAGAYAYGKSGKQTTIVDGRAHKTYKHRKPFEEWEVLLKEHHEGYIDWAEFERNQKLLAANAYGKAGDVKSGRGGRALLAGLLGCARCGRRLSVAYTGRTPRPVYRCYRFDLPPKCMSFGGSRIDAAIARELMRVVEPVAIEAALQAEQMLMDTLSEQRRIIELELQQAQYEATLAERRYAACDPDNRLIAAQLEKNWEAALRRVQACQARLETTRTSAAPIAAPDFTKLAEDLDAAWNAPGVTMRMRQQLVRVLIVDIVADVNESTREVILTIHWQGGQHSQVRIRKPKTGEHGCSTSDEALAVMRSMATRWSDQDIAASLNRMGIRTGQGKTWTAHRVSSVRRVRNIYAYKSAEKDGDWLTMSEAAKALGVTHYMIRRLINDKVLPAEQVMPDAPWQIRASDLRSEAVTAALTRKHRPCRNDVEGQLPMFTEVSEGGAQ

SEQ ID NO: 770 - protein, 693 aa, synthetic construct
MSTERYQKVTHDHLRRDAFLYVRQSSLRQVFENTESTKRQYALRERAVSLGWPIERIHVIDTDLGLSGASAEHRDGFQQLVSEVAIGHAGIVLGLEVSRLARNNADWHRLIELAALTHTLILDEDGVYDPAYFNDRLLLGLKGTMSEAELHVLNARLQGGMRNKARRGELELPLPVGLVYHPNGSVVLDPDQQIHASLRLLFDTYRQTHSASMVVRRFRREGWSFPRRIRRGIGKGEVHWGALNTSRVLQILHNPRYAGAFVYGRTRIGRKADLTSTQLKVAQSDWQVLIRDAHIGYIDWDEFERNQVTLRQSANGFGSLVRGTVPREGDGLLQGRVICGICGNRMRVRYQKVSDRMEPYYVCHDVAAHDAGKPCQSIRGRAIDDAISALLLETVGPATIEVALAVEDEIAGRIEQADSMRLKQLERARYEAELARRRYMNVDPANRMVADALEADWNDRLRRLDVLQQEHDRQRRSDQDLLGDEARARIRALADDFAAVWNDRRVESIERKRMLGLLIEDVTLVKSEKVSIHVRFRGGRTTSLAVDNPRPMALVRKTLPAVVTVIDELLETCTDQQVATRLNELGYTNWQQQAFTARKVALVRTTYGLPSRFERLRSRGLLTGAELAAQFKVSQTTIHQWGRQGLLRRQVYGHDHRCLYEPPGNVLLVRGAGGRKATQATFIAAPTTGQGAM

SEQ ID NO: 771 - protein, 494 aa, synthetic construct
MATTVEQIRTGREYLRVSVRSQCSIDEQAQVNRADAATMGVTLGKAYVDNGFSASSYRTREREDYGELIADLESGQFSEDALFIWETSRGSREVEEWGKLLRLLAKHGKYIRVSNQHRYYDPSNHHDRRWMYDEAIRAEAVSDQIRDGVLRSIDGRLGEGKGLGASPYGYESVHESVSGRRRVVRRNIVKDEADRIKELFEHLDTDGANGSFGELARQWDGKVYTRTGKPFTAQALRNVALNPAYAGFIRHPKSGELIESTQWEPIVDYDVWLRVQNRLSDPSRRTRRPGPARYPFAGVFLCDVCGSGLTVGYARHDGEQGPAYYRCRERGCVSGVDQQELDDLVDRVVVAYLSRPDVVDELTRTTGGDEAALREIRTEMTRLENDLRELGDAVARGRTSMHFAMSAEEGLNRQLKAAQERERELSTPSPLRSMVTSGNLAQWWKDADVRPKREAARVLLSEAYLGEVRIGRKRARNRAETLGQRLRGRWAQLA

SEQ ID NO: 772 - protein, 499 aa, synthetic construct
MIGIYARVSTEEQARTGFSLQDQIKECKKKARTNEVIEYIDDGFSGEFLDRPALTKLRNDVKEGIISKVICLDPDRLSRKLMNQLIITDEFDRLDVELIFVNGEYAKTAEGQLFYSMRGAIAEFEKAKINERMSRGRREKARQGRVVRDYQIYGYDYDKETEQFIINESEAEIVRLIFDLFTKPNDLVRGINGIAKYLTEKGVPTKRGANVWHRQVVRQMLMNRAYIGKFYQNRWNTEGMLGNKHKPKDERIPMKERPREEWIPVPCPAIIDRQTFDHAQNLLSESRRRWTKQSKRRYLLSGLLRCAKCGNTMTGRKHRNWGADVFIYTDEKNYSGAKHPGCGMRVRCEKLDKDVWDKISHWLNNPDEIATVEDETDEVDFEQAEIIRLETEIKKAKEGRKRLLNLFAEGLEIGQEEIRESLKGLKRKEEHLTEELEELKKRYSELSNKQYSANLIKEAAAYYLNHGKEELSFDDKQALIRYVVKEIRVYKDGIEIYTF

SEQ ID NO: 773 - protein, 579 aa, synthetic construct
MTTAPLRLRPLEEQPASAGRRKRGLIYVRVSKARDDMISPELQVGHALALARSENIDVIADPIMDLGESGRRFEERRIEEIKQMARDKQFDVLILWIWSRFGRNLRESLQHLDALMDYGVEVRAAKEDFDGKTTIGRFAIAQMLNIAELESNQKADSWRDTFERRRNKGLPHSNRGRFGYYRCETCPKWEFGKKLETCPKCRNGILKIDPVTGPVLAQLYRDYAAGISVRKLVADLNRRGIRTFTGKPFASGDLHAVLDSGFGLGYVRYLIPELSHQVVTNDDGSTKRKRVNRQRDVTAFLYYGGAHDAVIGDPSECERIWDAYAKRRMAQSGQSFFSNRPRYSLSRHLRCSGCGGRMQTALRNKKYRRPLVDGLPNPLDVTFRCANHIDSKSCPVNGTYISLAVAEKWFLEWLDREAQMSEREAEALAARTAALRTQNNGDQALLRRLEDVQSQLQGLRTKDDKLTDAVLAELVSEDSARRKRTELDAQRQALIREQTELRTKLKEVPMQQPRPPQGDLLTARKIYLAAGQADRRELVSKLVREIRVNKGRSGPEKLHVYPLWEAPPPWVPREPSSDS

SEQ ID NO: 774 - protein, 449 aa, synthetic construct
MKQVIGYLRQSTMKQQSLAAQKQAIEAIAEKHHIQHINFYSDKQSGRKDNRSGYRQITQLIQQGQCDILCCYRLNRLHRNLKNALKLIKLCQTYHVHILSVHDGYFDMDQAFDRLKLNIFISLAELESDNIGEQVRNGLQEKAKQGRLITTHAPFGYEYHNGTFIINQNESPTVKAVFNYYIKGHGYKKIAQLLEEDNTYINRQPYQVRNIIINPNYCGRVNNQYGQFDNMFPSIVSTSIYEQAQRLRLQKQTKQTPSDNQLKQKIKCPCCNATLTNMTIRKKNHTLRYYVCPKNMNASRFVCDFKGINAQTLEDKVLEVCRDFYQNQRIYTKIKSAIDKRIKRQRNIEKHHTLTQEQLIEKLAQGIIDAETFREQTQSLRQQPQRTTSINGHQIQHIIQNIIQKRFTLNILYPYIETIHITKDKNLIGIYFKNEPLNIVNQTLQSSIA

SEQ ID NO: 775 - protein, 626 aa, synthetic construct
MKEKPRLYSYVRFSSERQATGNSLERQKDSIANMVKQVAIDHDLEIFEEYEDFGVSAFKGKNISEGGALAEFIKHVDSGKVPKGSFLLIESLDRFSRANAMLAVNLFTSLLLKGIVVVTGIDKQVYQQTEVNNDTMQQLMFSVMLFSRANEESSTKSKRTISSALAKIKRHQKRKPGDPVVAITELGTDKFWTDSSSGYVEPHPVFYPIAQHMIQMKRDGWSNRMMLRYLKDNYPAPKKLTKLSKGEWNIQHCSRILSPAIYGQKIISVNEQEFVLDDYYPAIITKAEYEDLSVQVGNRGFTKDKNPDIPLLSGIGILYCGHCGTHMYKMKSSIAKQPNAYRYVCGSRDYHLNCSKWGFRADTLESALLQLIADRVFVQNDKPKHSGVENQISELDEQIANYLVAIGTAKSPAMINNLTALIDKLENEKAELVKQKRLHDESIVRMNLEGWDKFRDFDVSDIYNIERLKIRASIKTVVQRIECKRLPDPKHTLFNVLYRDQRTQRIVIKANTSYKSGCVYVDATTINDRQFMESWGLIMHSFIDVLIDPEGFARKCEELQERVRNTRTIISELEDEDGEPEPRPAFTGIVKPVSVGESFATIDGIQYKVDSMEHLEELLKEKGVLS

SEQ ID NO: 776 - protein, 496 aa, synthetic construct
MYGYNLKPCLTRRNTLKRMEQITPPPISAAPLVKVAAYARISMETERTPLSLSTQVSYYQQLIHDTPGWTFAGVFADSGISGTTTNRPQFQELLALARKGAIDLILTKSISRFARNTVDLLETVRELKDLGVEVRFEKENISSTSADGELMLTLLASFAQAESEQISQNVKWRIWKGFEEGKANGFHLYGYTDSADGTDVQIIEEEAAVVRWIFAQYMKKTSCEKMAAQLIAEGRVPHLADNKMPGEWVRHILKNPHYTGDLLLGRWSTPEGRPGRAVRNTGQLPQYLVENAIPAIIDRDTFTAVQTEIARRRELGARANWSIETVALTSKIKCVSCDCSFVRNVRNPKTQNSISTEHWICTERKKGRKTGCGTCEISDTALKGFIARVLGIDTFDQEVFNERIDHIEVQGKDHYTFHYTDGTSSSHTWRPNLKKSSWTPARKAAWGELLRARWAEAKRLGLNNPRQAPTPPEALAKYRAVAKAEAERLRAERGER

SEQ ID NO: 777 - protein, 512 aa, synthetic construct
MKRAAAYARFSSENQTDDSIEAQLRAITEYAEKNGYEIVEKYIDRARSAKSDDRPEFQRMVKDAKSKKFDAVIIHKIDRFARNIKDAAWYKAELNQYGVDLLSVSEDLTGTSGDLIFNIMASVADWYLKNLKNEINTKVRITAEKAYFLGGIPPYGYDVEETYEEITFGDRVKKIPRKKYVINEREAEVVKLMFELAAKGYSSIKIEEYLNKNGYTNRRGNKWSYSTIYDILRNPKYKGTYVWARGNHRTSHIKRDDAVVVNNAIPAIISEELWNKAHAEMKKKRKIRKSKHKYLLKGLIYCGVCGAHMTPYGGTYPRYVCSEWQKAKNNREKGDHFTSISKQKVENFVIDFLLNDVFGILNSEELLERIKAMMQLKEQKHKDEILEEKKKINVLKEKKKRLEESFIDAVENGVNPESIKSRIKKLDDEIKSLKLRIKRYNEEVIEIDDITIKNMVDTAISILNSDDQVLLEDFLHQVIDRIEIRPSGRSNKNYVAIKLRGLSKYISKLQNI

SEQ ID NO: 778 - protein, 484 aa, synthetic construct
MKKAAAYARVSTTEQSKTSIDGQLDTIRNFAKFNDIKIVEEFWDKESGGKMSRPNFDIMIENAFAGKYDLILVEKIDRFAREDIEATLLIKQLEDAGIFVMSVLEPADVTTPSGRFQRWIMLGFGKLEREIIADRTKRRMRDTAKRGYWMGGIPPYGYKTVEVKDNEERIRKKLEIVEEEAKVIRKIFELHADGKGLAAIADYLNNKNILTRKGKTWAKTTIYDILRNKKYIGIYEYGRGTKKNHHAKNTKPLIIENVIPPIIDDELWEKSKSQFRTPVRISMIRNYLLRGKIYCAECGAPLVGNGGKKSMYVCSNWKSRKGDHYVGISKNKIEKHVFLHLKHLLIDNKPDFREIANTFNYLYQTKKQSKNKKIKYVENMLNEKYEQRKNIIDAIKKGVMVESLTEEAENIEKEIKRLKLELERLMQNEYFEITEEELEHRWNNLTEMILSDDEDTLKELYDLLIERIEVASDGYIRIINKELL

SEQ ID NO: 779 - protein, 499 aa, synthetic construct
MIGIYVRISTEDQRKGYSIDGQIHDCKEKAETNEVMEYIDDGISGAVLDRPALTRLREDIQQGLIEKVICYDPDRLSRKLVHQLIITEEIEKKASIEYVNGEFARTPEGMLFYQMRGAIAEFEKEKINERMSRGRVNKAKKGKVVKNSHILGYEYDKENGMYVIDEEEAKVVQMIFSLFVNPPSHIQGMNSIANYLNEMGIPTKKRVGMWHRNVVRQILINETYTGEYHQNKWNTEDMLGNKYRDAEDRISISVRPREEWITTEVPAIVDQETFNRAQQKLETIRRRSAKQGKRKYMLSGLCRCHKCGNTITGRYSKNWNKYRREYTCMKNSVGAKSKGCTPAMRIPSDRLESEVWAKVEAWLNDPSEISAASDDDFETPNHEEAEIARINEEIEKLRIARKRLLELFSADLDISTDEMRDQLNDNSKREKSLQAKLEELEQKNEDLQAHEANEALIEEAADYYFEKGGHLSFDEKQELLNKIVKEIIINGEDVHIYSF

SEQ ID NO: 780 - protein, 638 aa, synthetic construct
MKPKLYSYVRFSSVKQREGNSLERQQDTALKIAARYNLELDTTAFHDLGMSAFKGKNAHEGKLSEFIKQIGAKVPVGSWLVVENLDRISRDDAWSALDIFKNILSRGIVVVTGMDEKVYKYADVKNNPTDLIISLLMFTRAHDESLTKKNRVEAQARSLIRQNLTRKSGTPAKAIESVGQNVWWVDTKSGYVTPHPIYFTAAQKIIELKQNGETLLGIQRYLNEHYPAPKKRVYKDQTGQALPPKTEQWGKHLIRTFLNPTVHGQKTFTLDKRDESGVIIYDSESDEPLKETFIIPDYYPALMSEVDYLTLSKLDRHRAITRNSSKYPAGNPEPEIPLLSGIGILFCGKCGSFMFKSGSSENKYRYICGSKIVQGKPCGKKGFTSYQLEHTVLQLIADHVWNNHQEDKTAWYESEIEKASEAVKKLLKLATLTDELEELADQINANNQKKITLEREFQQYKIRRSEIQTTGWDQFRNFDVHDTKNPDRKRIRLKIKQAIKRIDCYDIDGRHSHFEVTFADETKQRIVIKFNRNRSPGVSYVEAQTVNDHDLLKMQGLVLHSFIDELISPEKFAQHIKDKHEVSILNPTFITKLEDGVNQDEGNGLAIKVDSTTSKSYATVNGIKYEINSLEDLKKLSQ

SEQ ID NO: 781 - protein, 540 aa, synthetic construct
MPKAISYIRFSTKIQSVGDSTKRQSKYINDWLKRNPDYYLDESLRFQDLGISGFSGANAKSGAFGEFLAAVESGYIEAGSVLLVESLDRVSRQDIDTAGEQLRKILRSGVEVVTLVDNEWYTKESLKDSLSMIKAMLVMERAHEESAMKSTRLRSVWAAKRERAAKGEIMSKRCAAWLKVSEDRSRFEFIPENVKAVQRVFQLRLEGLSHVKIAKQMNDEGFSTLNQFKSVTGGWSQSSVTELLSNRSVIGFKVPSKSMAVKGVSEIPNYYPSIITDEQFYAVQQLKQGSGRKPSSDLPLLTNLFKGVLRCSECGFIVVVAGVSAKRSGIYKCSMKSEGRCNSVGFSRLQTDRALVQGLLYNANRLFLNRDNGSAIGALQGELEQLQKQRERLIKLAMLADDTESMAKDLKALNSQIKDAEKAVSEVHQREQSSQLETISHLDLTVKKDRIEAQIIIKRIVKEIRLNTAEKKCDVLLHNGLRLLNFPLDMVVDGAQWLEILPLIDGDEFDFEGFSTKPRHLAFEEAPEWVKELEFNSKIQ

SEQ ID NO: 782 - protein, 451 aa, synthetic construct
MSEILKRRMRCAVYTRKSTDEGLDQEYNSIDAQRDAGHAYIASQRAEGWIPVGDDYDDPAFSGGNMERPALRRLMADIEAGKIDVVVIYKIDRLTRSLADFSKMVEVFERYGVSFVSVTQQFNTTTSMGRLMLNILLSFAQFEREVTGERIRDKIAASKRKGMWMGGVPPLGYDVENRRLVPNEREAKLIRHIFQRFVELGSSTMLFKELKLDGVTSKAWTTQDGKTRDGKPIDKGLIYKLLNNRTYLGELRHKEQWYQAEHPPIIDRELWDKVHAILATNGRVRGNATRATVPYLLKGIVFGNDGRALSPFHTTKKNGRRYRYYVPQRENKEHAGASGLPRLPAAELESAVLDQLRAVLRSPDLLGEVLPRAIELDPSLDEAKVTVAMTRLDTIWDQLFPTEQTRIVKLLVEKVIVSPNDLEVRLRANGIERLVLELQPAGATHPEEALA

SEQ ID NO: 783 - protein, 465 aa, synthetic construct
MKTALYLRVSTQEQATTGYSITGQEEKLRAYAKAKGFGNIKVFTDAGYSGSNTKRPALELLIKEVEQGKISNILIYKLDRLSRSQKDTLYLIEEKFLKNDVPLISLSESFDTSTPFGRAMVGMLSVFAQLERENIKERMIMGREQRLKKGLWHGAGGGSGRVAGYDYKDGKLVINEYEALFVRRMFQLYVEGEGYFNIYKKLSKEMPGVIKEPSNISKLLKNPVYIGMIDYNGEIYKGIHEPIIDEHTFNTVQKLRQTRTTNRDMSITRYLLPKLLKCGYCGENMIGKTGSKKKDGTYYTYYCCYSKEIKRRKKHVDSNFSLECESVYHTAQLVEDKVINEVMNLDSTQIIREYETKNDDHIIYEKQIKDIDAKIEKLMNLYIDSNIDKKTLDVKHKELEDEKRLIEKTMRDSKVDVNKEVVLKHLSNFKDIDWVDDREALKNSLHILIKDIRIYNDSMKVNFNI

SEQ ID NO: 784 - protein, 411 aa, synthetic construct
MRTVRRIQPIKSPCKPRFKVAAYARVSDSRLHHSLSTQISYYNRLIQAHPDWELVGIYYDEGISGKEQSNRQGFLNLIKDCEDGKIDRIITKSIARFGRNTVELLTTVRQLRLKNIGVTFEKENIDSLSSEGELMLTLLASVAQEESQNLSENIRWRVQKKFEKGIPHTPQDMYGYRWDGEQYRIEPNEAKVIRKVFKWYLEGDSVQQIVDKLNQEQVLTRLGNPFNVASIREFFKQEAYFGRLVLQKTYRESFSRNPKRNKGQRNKYIIENAHEPIVTKEYFDLVLHEKERRYQLMSQESHLNKGIFRDKISCSECGCLMIVKVDSKQVNKTIRYYCRTRNRFGASSCSCRTLGEKRLLASFKSKLGIVPDKEWVENNIKHIDYDFGQRIIWVIPVKGRKYPIEIREGRY

SEQ ID NO: 785 - protein, 418 aa, synthetic construct
MQRTIKKVNMAAVQQVPKQKRVAAYARVSCGKDAMLHSLSAQVSYYSALIQKTPGWEYAGVYADEALSGTKDTRGQFQKLLADCRAGDIDLIITKSISRFARNTVTTLQTVRELRLIGVDVYFEEQNIHTLGEDGEFLLTLLAAYAEEEARSVSENIRWHVQSNFRQGLAWSVEMYGYRQENNRLVIVPEEAELLRMAAAMYLQGARPIEIERAFAKAGAVGTRGAALTGYHIIKLLCNEKIAGDMVLQKTFVDDPIAKNNRKNDGERPQFYVENSHEAILDRETYEKVLAEYARRKEEGPLGKYPFSHRIVCGKCGARYVHRLRGKEVYAWLCCTYNRKGKAHCDAKIIQEQKLEAIAAEVLGLPEFDGDIFQEKVKEIQVWENRILAFIFYDGHIIERPWENADRRYGRRSKSCQQ

SEQ ID NO: 786 - protein, 476 aa, synthetic construct
MADLVTCGIYARISSDISGLALGVQRQIADCTTDAERRGWKVTETYVDNDVSATRSKVRPGYQKMIADIKRGHISGLVVWDVDRLTRTPRELEDIIDLADHHGLALASVGGDIDLATPQGRMTARIKGTVARHETEQQSRRLKRKLQERAESGKPHGAVAYGYRRVVEFDERGHQGGVHEELVPEQAEVIRKTARLLLGGQSLRSVVAQLNADGARTPRGLPWVSTTLRQIMLRDRNAGLRTHLGQVIGDGAWPAVYDKGTHDRVVALLTDPGRRSQKGSPRRHLLTGIARCGRDGCEGTMVVNKGRLQADGRRQPPAYTCAVCTRVRRKQAAVDKFVESVMIARLGMADALRVLATGDPAEVETARTTALDLEARLDLAADQYADGVLTGEQLRRITERLRPRIETAKSVVNTSMPAVWAQDMAGPRAEKHWAEASLDIKRTLIDMLCTITVLPTGSGRLFNPSDIRIEWREAEA

SEQ ID NO: 787 - protein, 546 aa, synthetic construct
MTITDRPANPRPGRATRTVVYPAFTQTGPEEPVEGTRGIYLYLRLSKYHRDGADAIERQRLDLLRKLNTEGGWTVLGEYIDNDSASASAVRNRKGWRQLNQDIQAGKVEAVAFWKLDRTNRVASKCIEWIGQCQKAGVYLVSHQDSDQELNTATAGAKLITGIKALMAEVETDSMSERQLAAKRHLAEAGFHHGGRPPLGWIPGPRVTDEQGRTGVRLVPHPVEHPALKRAVELVLDGVSLARIADYWKAEYGITTAKGAPIYEATIYRALVSPRMVGYRMRQVPEHQRGVKLNLLDYIARDAKGDPVISQEPVCDWVTWLRVKKRLEESKTSRTRRPWGSHEWLLTGLVFCQCGDRLYGHNKTRRRASGEKYQQYAYRCMANRKRGRGHCDIACVIDAAQGEAHVLGWFFAQLTDESVARARAQRRAANSDQALKSLFTSLEEARAERDELLARQGSQEFKGNMVRLLVSLLGDVEARIETLQQQIDAMDQDPTVIDDPAGLVASWNERSLSQRRSLLRRLIRRIDIAPGPGPASERMTITPVDT

SEQ ID NO: 788 - protein, 499 aa, synthetic construct
MLQPRDLKGRNAISYARWSSGRQAKGDSLRRQTENAREFCATYGLSLDLALVDDGVSAFKGANLEASLGKFVIDVKSGKIAKDVVLIVENIDRITRVKPTQAIRYFLGLLDTGLTLVTLTDQRVHTAEGYDDNFANLMMSLMAMQAAYEYSAKISFRVGSSWVGRVKAAKEGGRVRVSKVPFWIDQKTQQFNDRVEDARLVFKLAKQGVGQTAITNRLNEQHIPSSRGGTWGKSMVQDVLKSPAAYGSLVLKGEEIRDYFPALISETEWLAIQHQHRSRHRNSQADSTRNLFPRLLRCGRCGSAMNMTSSRFSGKVFSYLVCSGKALRRTSCNQPNVKYDELEGVLVEQLGFLAVMERNEAKASTAGSPASEIEDAIKALEFKQRNVLDGIAEADTPEVRRVLLAQADAISKNIGLKKKELTSARETAARYASVADATPEELDAYAEEIQRLAKVDRKEARRLIGDVLERIDLDTDDEGTLHVSISFFNKHASVDVASE

SEQ ID NO: 789 - protein, 649 aa, synthetic construct
MAKDDALPTRKILYKYIRFSSIQQAKGSSFARQNARLEKYAEENGFEIDDSLDLKDFAKSGFHGFNTDVDQGLGRFLLAIDKGLIPTDGTAYLAVEQFDRLSREDIDKAQDLFKKILRKNVNVITLMDNRIYTKKSLSNFMEVLYSLFLMEQAHQESLKKSDRIKGAYATKIKNLKELALEQKKTLADWEKNRVGQKPVLEPLINQIQFSSQVPFWIDQKVEVISGRKFRKFVISEEKAEIIRYALSLLNDDNGYMNVAATLNREGIPRIDFAANRKKSTRKDIWTNRAVNEFVNSDAIFGDLALYDNFYVEKEFEYEEVMVKKKVGKRTHVENIPNYYPAVIDKKVVMGLRARANAKKKGRVAGRTTNTNLFQNLMFCGKCGDSMHLIQSKRTTKKGTYQRFYLVCYAARHKACDAKMIPYHELERELVKYLVMPSNEAHLSDASKIINESRNEKILELEGEIKSIEDHIEAYRKEMRINKSLKPSIALSFLSELESDKDFKFHQLKELQLQRDKTIEYMESEDVSSFDISTDEGRVAFKVAVKQRYAGFFIFTEDHIVMSVEKTGGAGFFKIKIMNRRNKVIKPVRTADSMTLFQEKLNHLKEISTNYKEGKLYEIVKAFKMSDIEVFEEEYINRGLPQPETYQRGE

SEQ ID NO: 790 - protein, 447 aa, synthetic construct
MMHEKIGPHHLERKAILYVRQSSAHQVLHNRESSALQYAMRDRLAALGWSQIETVDDDLGRSAAGGVTRAGFDRMVAEVCLGKVGAVAAREVSRFARNSRDWQQLIEMCRVVDTVLVDQEAVYAPRQGNDRLLLGLKGSLNECELDLLRQRSLSARYEKARRGELVVTVPAGFVKAGDRIEKDPDRRIQEAIALVFNKVTELGSARQALLWFLEQGLDLPVRCANGDVIWRRPNYATIHRMIANPIYGGAYAYGKSRSVPGYDGRSGIRRKARDEWVALIPDAHEGYISWERAEEIRKMVSDNVPSSRHHGAPKHGDALLAGLFRCKRCGRKLTVRYTGANHNIPRYSCWRGLLDNGEPRCIAFGGLRVDDAIEEALLCVVEPGAIAAAVEAERNMASQRDQVQDALLRDLEAARYVADRAFRQYDAADPENRLVTSELEARWNKAH

SEQ ID NO: 791 - protein, 475 aa, synthetic construct
MTTCAVYLRISKDKGLGTDDEGLAVDRQRKDIHKLLKSKGWNVGTEYLDNDVSASGKVKRPAYERMLADFEAGSIDAIAAWDLDRLWRVPMEFEHLLNLSEKQGLKLATVGGDADLATDSGQLFARIKVAVAQSELTRRSARQKAKFAQDREAGKDHWRKRRPFGLTLEGKLVPEEAEALKDIAEIILSDGTITAGVSLLKERGLKTTFGQEWQRQPLRRTLLNPRIAGFLEHEGEIVKAQWEAVLERDTWEAVVAKLNTKNRPKPKTTKHEYMLSGLLTCGECGDKCYGRQTKRKRKSGVTKIGYIYRCNNLCTSKELKKTDDLVILRTLEAVLTTDHQEIQQDKGTLQSLREARAHELKRWADWLEQAAEQDLRPSEIKPHRAKHESKLRDIENQIAQLEKVTLVRLPTLDEALESTADDQGEIVRVFNWDALSLEKRRHLVSLMWDSVTLKRTGRGARWSDDNIVFVERKAV

SEQ ID NO: 792 - protein, 601 aa, synthetic construct
MRVAIYIRVSTKLQEDRYSLSSQKLELTRYALEQKWTIVDIFKDVDSGGKLHKVGLEALLDCVDEGKVDVVLCVDQDRLSRLDTIEWEYLKQALRENNVKIAEPGNVTDLSNEDDEFISDIKNLIAKREKRSIVRRMMRGLRQYTREGKVWGKQPDEYHYDVNTKELTINEEYAWIIPRIDQLYLEEQMGLHRIAEYLNSVVKTSSNRKWTAVQVRNKLINPCYHGILRREFPNETIEVEGVYPPLRTKETFERIQATLQKRHMVYPSSDFHFLRNISIKCADCNHILSVRKGSTHGDSSKYYLKHAVEYVNNKCSANPSINTDRIKRPLIAALQDILKSEETAQKYFQTEYNEEDVHLIEKEVKHLKKKLLDTNSKLDNLLDLYLDGTWSKEKLDERKLSFEQEIKGLQEQLKNRENKLKLIREQRLNYNTVIQYFVIIKDMDRLLDEGDKQRLLGALFPTATYRPQTNELILHAIVNGKITLDITIAIDDKDVIYEERLVETYRKRYNETQQLLSENKWITFKELTRISPYNAKTLRKDEQLFGPYQYLMPAKGSKELAEYKRQRIVEYIDLNGKKSITRIAKDLGYSRKTVSELLNML

SEQ ID NO: 793 - protein, 427 aa, synthetic construct
MEKNIIAIYLRESTKEQEDKGFNIHMQKRKIMEYIKLYDLDGKVEIYQDGFSAKTTNRPNMNRLKEDIRKGQVKTVIVYSLDRLVRRLVGLQEFLELFNSFDVDFISMSENINTKTASGVMVANIIITIAQWEQDTIGERTNNGLVEGAKHGYYMKGQKPFGYNKVSCGDHVKLVLNKEEKRIIHKMRDMLRKGYSMFAIKMSLKEEPYLKSKKIDYCENMLIRILKQKINIGIMELKGVEYKLEVETVFNEEEYAEVLHLLSERTKTSKYNYLFAGKVRNNKGMASLLKSTVKPNNVYLYYYDDISKKRINENYILDKVLLSLKENQTVYKLVRGCTYEKDLYRLTSRKKELKKLLNLVLITSEDYKSELLKVEAEERKVKRYYDKYVLNIHNTFRNMSEEKQETFVWKYVNYINIDYDTKEVMVS

SEQ ID NO: 794 - protein, 514 aa, synthetic construct
MAKELTKTASVAAYLRKSREDADQEDTLARHRKQLIDLVKQRGFENVDWYEEIGSADSIKNRPVFSDLLKKIENDEYDAVCVVAYDRLSRGNQIESGIISKAFKDTETLLITPTRTYDWSIEGDEMLSEFESMIARSEYRVIKKRLKQGKINAVRNGRLHSGNVPYGYKWDKNDKTAKIDKEKHEIYRLMVKWFLDEEYSATEIADKLNELGIPSPSGGSTWYSEVVADILTNDFHRGLVWYGKYRARKNGIGIEKNPDSSSIIMHKGNHEPMKSDEEHGAIIRRISKLRTFKPGRKLNKNTFKLSGLVRCPYCGKVQVVHTPKNRNPHVRKCLKKSKTRTTECNNTTGIPEEALYKAIVMKIREYNEVLFSKESSEKKDEEARTYMNQILSLHEKAISKSNKRIEKIKEMYMDEIIDKDEFKSRIDKEKKSIQEAENEIRKLKESADYHDEIEHEQRKIKWNHEKVQEFIESDQGFTPSEINLILKLIISHVSYTMVKNEYGEFDVDLRVNFN

SEQ ID NO: 795 - protein, 475 aa, synthetic construct
MRVAIYIRVSTEEQAQHGYSIDAQKDRLIAYCTSQGWSDYKIYIDDGYTGTKMIRPALNRLIRHIEDGKIDLVVVYKLDRLSRKQLDVLYLLEEVFEKHNVGFKSATEPFETTTPFGKAMIGILAVFAQLERDMIVERTTIGRRQRVSKGEWYGGRIPFGYKMNRETKQLEIVPEEAKIIKEIYKMYLQGNSRLSIAEWAAERTKARVIDHSVIRNILSRPVYMGKLSNAGNVVDGKHEAIIDEKTWHAVQKETKERKEGATPLGEYLLTGLLKCGVCGGPIVHVKRITRKYGKEYLYELYACKNQHVRKKDRNNNCTLGYIRREKVEKFVIEQIKSYTTDDLLIKQIANEKNKFKDNDESALSNLESQLKKVLTGLENLYDAIESGEIKASSISDRIRKLEEQRDVLENHIDEIKDNTPQNDLNIQEFDIFIKEIGEAWDYLTEDEQKAMIRKAFCSVTLHKDKYIEVEWNFAP

SEQ ID NO: 796 - protein, 502 aa, synthetic construct
MIAIYARQSVDKKDSISIESQIDFCKKEVGEEDYKVYKDKGYSGKNIDRPAFKEMMRDIKKNAITKVVAYKLDRISRSILDFNNLLEEFKKHNIEFVSVTEKFDTSTPMGKAMVNIVVTFAQLEREQIAQRVKDNYYERGKTGRFLGGKVPLGYTNTKVEIQGKKVPTLVINKEEALLIEKMFNMYAYQDISLSKISDYLNEQGLKSAKGTAWDSGKISRIIKNALYVKADVNVYNYYKNLGVEINNPIEDFIGTNGCFVYGKRDRNENRYTNLKDHKLSIGLHEGIIDADTFLKCQYKLSQNQQITRSGSGKHTWLTGLTKCGYCGYSMSAVVNSSGKYFNCRGKTNMKICNGHSRTIKVEEIENIVETEILNRLEELSKVKIKMENSNSKKIKSIETEIKILDENIEKLLDKILESNDITIKYINKKVEELDNKKTELRNELNRITLEGSNNSSLEEVLKDANKIKNLSFDKKKSIAKSLIDKVLIRDNEIDIQWKVFNQ

SEQ ID NO: 797 - protein, 532 aa, synthetic construct
MSRVVSVIPAKPMQVIRGLDIAAKKRVCAYCRVSTDSEEQISSYETQVSYYEEHIKKRPEWEFAGIYADEGITGTNTKKRTDFHRMIDDCLLGKIDMIITKSISRFARNTLDCLQYVRMLKDKGIGVYFEKENIDTLDAKGEVLLTILSSLAQDESRSISENTRWGITRRFQQGKVRVNHKKFMGFDKDENGELIVDEQEAAHLQRIVKEYLVDGKGLRQIKKGLEADGILTATGNTVWHESAIKKMLQNEKLAGDALLQKTITVDFLTHKRVKNEGQAPQYFVENSHPAIISKETFQAVQREIERRSQLAGGDKDRSRYTNKYPFSGKIICGGCGKKFTRTYWGTGKYKKPVWICRTRSQDGKRGCSLPTLDDDKLQEAFVRVVNRLLADKDTLISCMLENIEKVFREQTSTVDLAVIDGELQERQGELAALVKLNLKTGIDDTIYSDEYNRIASRMEELKTKRSSVTVAEISRQETLGRMRDITEALRSMDTIGEFDEDLFGMLIEQVKVIDLVRVEFVLRSGIGIIEII

SEQ ID NO: 798 - protein, 669 aa, synthetic construct
MKLSAIAQTNEFIRPVVITYTRFSTSIQKDGLSEFRQDELTQRYVLDFCEEHGVPVEDIISLKDRGVSAYRGKNMTKGSLSEIIAKFKSDELPKVYNEKGEINTFLFIESLDRLSRADLHTANKLFLDLVEYCNIVVVAENEKKIYSLNSLKTDMGMLDLFSALLTLSRSHNESRMKEMRHRANWSNKRQSVIDYFELSKEEREGVEYPQNPTRTCPWWLKPKDDNRGFEFIEEHRKAMMFFLNRMLDGYGLTSCIRRLNDKIESGEFKVEFSDRQKNAQGFQTHTFYQLLNNDNNDSIIGDLILHQDYYPTEKDVQQGFYEKKQLGKKVRIPVYTAKGYYPALLTEVEYLRLRQQMKQRKQTQTKPNKKVANITQGLLKCPLCGYSYTYVADNRAGRHHNLVCALSRAKKCKASTFRYKWFENNLLNYCRNLDMNRVMGLKTVDKNKAKIEEYELDIGTLEYEILCLNNELEQLVSNLSKISITSLLEKAQERYVLMENDIKVKSYELEQIQIELRSLKKTSSHQRNVNEKIYELIDSVQLKDDVQLRERLNIELKKVIKSLHIYHKNNENNFLNRNLIAVKFMDDYIRFIPLDRELGREELYDILPTIDSKKVIDFSKHNILPFDYLEGFEAGIYPEYQFIAKYYQENPDVLQKVIKELEDADEVFV

SEQ ID NO: 799 - protein, 497 aa, synthetic construct
MDAIYARQSIDKKDSISIETQINFCKRESTSPDGYKIFRDKGFSGKNMKRPDFQRMLTEIRSGIIKRVIVYKMDRFSRSILDFSETWNILQEFGVEFISMNEKFDTTTPMGRAMLYIIMVFAQLERETISERCTDNYYERIKNGVWPGGPAPFGFKNAEIINEGYRMSTLNSDSDLEIMIDNFQEYEKEGMSLGKLAKKRTQQNLKTNKDIVWNNISLSRLFRNPVYVKADILVYMYLKEKGYSFSNPVEEWDGTKAAHVVGKKQYISNGNRINTKAPRQTVSLLNIPGTIDSSLWLACNRKLDHNAQIKNSGAGKHTWLTGLIKCGQCGYALRITTYKNKENKIMKYLMCSGHSNLHCCDVKKFDLLVEDLEELVAEELNKAIEETKVEQIEMTDQTMDNDKKIRLAEIEEKIDRLIQAISEASDITMKYLNKEIEKLDSEKKQIMGNLEGHVQKRDRIKPIVFSELDFEGKKQIAQNYIRKILVYKDKMDIIWKV

SEQ ID NO: 800 - protein, 587 aa, synthetic construct
MNKGLVFSYSRFSSAAQSAGTSLARQAEYAKAYAEKHGLTLDSGLSMKDEGLSAFHGKHISKGALGLFLKAIEAGKVPPGSVLIVEQLDRLSRAAPIQAQALLSQIITSGVTVITAIDNKVYNEATLKASPMDLVYSLLVLIRSHEESSAKSDRVKSAMIARAKQWQAGTYRKPIAPGVSDPGWVRRVGDTYELIPERAEAMRAMIDLYKSGWGALRVVQELDRRGLSIGGGANGVDRVAQLIRKRSLLGERIVTVDEQQFVLSDYYPKLVTEAEFAELQVLASERGRRPGRGRIPGIFTGMKLAVCGYCGSWLVSSVSHDKPARRDGAIRDSSRRVVCTAVKNGSRCPVGGSSQIAPIENAIMRYCSDQINLTRLLQGNSAEKALLSELALARVGAAATQAQIDKLMSVLLDDSSAAPAAFAVKVRELEARMKTERAEVERLELELAATASETPATADTWKALADGVASLDADARIKVRQLVADSFSRILLYRIGYPSYGGFGPRIAIELHGKRGSHHVIEIDRETGELIAREDIHEPILAHEYPRYLGRGMPTDPAFYDFLVGAKMQVDEDWLNSLPEKIAKIKK

SEQ ID NO: 801 - protein, 523 aa, synthetic construct
MNTYGYIRVSTEEQKKSEKTGVQRQLKFINECAKSLGCDNPIIIDDTGMSAHASSSKKKTNITHGKLRKFLDDVAKGKHDGDVFIVEDMDRLSRDNDAGTLALIQMRQGGVTVHTKDGVQGKELVSSLLTTVKLALAQQESDAKSHKIKGAYREKIRRAKAGEKTPFNQIPHYYYWDSVKKDYFYHDYYKQAVNRAVDLYLDGHGYGYIAKVLQEEGYKGSTRKSSEWLGSHVSTLLHHKSLHGDFHINGETIVNMFPKMMSDEKYTKLKLALSQREKFGRGGQKFGQTLITALGGITRCGDCHGAVVKNRDRFGRYVLKCPVCSRGASKEGRKASALLHFIEEKAFSVLAFDFKPHMNKTDSDVDNRINSVLVDIKAKESSIQTYFDMMENDPSLAAMVSERVGKLNNEINSLKRGLSKLELEKSAEDIDDDVYMKLIELEADIFDKKCQESIALARTYISKLVSRIEVFFNGHADYKNTVTVTVELKDNTTFEIEICRKKKDAVSLIVRNEMLNNGMVKLM

SEQ ID NO: 802 - protein, 480 aa, synthetic construct
MTKRAAIYIRQSQTSDDTISPELQEKNVRRFIEQQGWTVVGDPYSDIDISGLTEAKRPDFLKLKKDFAAGKFDIAVADDFSRFSRNKADAMALLGSMNIATAKEGVADADDDFMPAMYFLLADKFSKDMSKRWRHALMHRLSKGLPASGNRQFGYDKQGKEAYVINPVEAAILREAYDRYTKGEGVRTICEDFNKRNLPAPGSNGWYSTGMFDLLDKVFYAGKVSYDGQEFPGAHEPILTKAQWAAYRKARESRKKQDRPRNPKWMLHGLVFCGHCGGKMLSHMARGVPNLLCATYNSKGKKACPGTFRKRAVVQTAVWWWLGSHLDEWASAMPTNDEARIAAEKAVADAEAELESANQVYMDFQKYAFENKLRPELSALQLAQYSEAIDKAQATLDDALAELGSFTPASDVHEQISQGSLLMGFEADPEAEPSEAATAQFREALSKIIAKVIIHPATGNSPRDPNRNALEEIEVVPVGK

SEQ ID NO: 803 - protein, 497 aa, synthetic construct
MKRAVLYLRLSSVSEDSTSIERQRADLQGLAEREGWDVVDTLTDDGISGRKARANAAEALRMLRDGEADVLAVWKLDRWTRQGLGAIGALADTLDATPGATFVAMQDGLRSDQPAWRLIAAVLSEVARTEADNTAKRVASSIAHRRTVAHRYTGGATIPFGFDSVPAPDGVGRVLVHDPEEVVVVREIARRLLESDVSLTKLAIEFTARGVPTSRSPKRRARKLGKPDAGLDAGLWRAHTVKDLVTQDLALGRVTHRGALVRDEDGLPATVWEPLLDRASVEHLRARFDGTKRGPGTNVPRKARLLSGVAFCAHCDRKLWVSSQGGRPIYQCSTPREHGECTGSPRVDAVNLERLVVSEWLRNVGPLDERREEDTVETTGDVADLQDVDSALQEATSALLEDDADPAALMRRIDALKVRRTELRASAASATVTTRIVRTGRTNAEAWESDENLDRRRGLLLFALDHVAVLRSTSADRRSRALDPDRVVFRWNDFFAD

SEQ ID NO: 804 - protein, 429 aa, synthetic construct
MRVRIIEPTLKVQNQKKRVCAYARVSTDSEKQEESLENQIQYYENLILANPDYEFIGVFADRGITGTTEERPEFQKMLQIARNGKVDLIITKSISRFARNTTIVLKTVRQLKDIGVEVKFEKENIETLSGDGELMLTVLSSFSQEESKNVSDNIKWRMRKKFQQGEMIINTKRFLGYDKDEYGDLVINPKEAEVVKRIFNEYLSGKGCFTIAKGLREEGVPTVAGGTWRDSTILRILKNEKYKGDALLQKYYTSDHLRKKKVKNNGEVESYYIEDDHVPIVSREAWETVQEEIKKRAKKKGIISGDTKKYKRRYPLTGMLYCSKCGSTLRRRTWNTKHSCKKIVWQCSNYVKNGKNACMGTSIDDEVISKLNIKEETVVKEEFRNGKKYYSYTSKIQQNQHSTSSKVTEKENGCILQGINRPSRTVIKL

SEQ ID NO: 805 - protein, 526 aa, synthetic construct
MPPQLAALPVEPIPAIGYVRVSMLREEMISPELQRAAITEWARRNGREVTEWIEDLDKTGRNFKRKVQRAVAGVRDGRAREIIVWKFSRFGRQRLGWAVHLDLVESAGGDLISATEEVDARTASGRFARGMLAEVAAFESDRASEQWMEALDYRVKRGLPGNGTRRWGYIRRGRIPHPTEPHLYIADPSDPLGERYEPDPDFEEPYASLYEQYVAGINDRRLAKWLNDHELYAPDGGLWTGRQVLRILDSGFAAGYLREHSKECRCKQRGRCTNVVYRKGTHRPVIGEDLWQAYLERRAANRRPGQGSKEPKYPLSGLMRDPGCKAVLTAQHGGAPYGAGYAFRCNAYGESAQCQRPWVRRTVAEERVLGQLAEWAAEIDALALQLEPQIVPEPKTSAKNDVASLKTQIAKLDRALVKLTTMRAMDDDESPEAEAEFRRSRDELRSRRRKREEKLQAAEAVQEPPPSKADFGPVIQGLLAEWDVLTVDEKQRLLRSLIRVIWVHRTGHGRGSLPRLEIVPVWAPAS

SEQ ID NO: 806 - protein, 595 aa, synthetic construct
MMTIPSIVSDTPLKTAIAYLRVSTKEQAEKGGQIEGFSIPAQREALQRKAQGIGAVIVAEFIDAGESAKSADRPDLKRMLTYLLGNRVDFVLVHKVDRLARNRVDDVEITMAIRKAGATLVSATENIDETPSGMLLHGIMSSIAEFYSRNLATEVLKGMGQKAKTGGTPGKAPLGYRNVGRRTPEGREERTVEIDPERHEHIRWVFQAYATGEWTLRSMADELEVRGFTTRRTPKMAPRPIRPNVLHSVLTNPYYKGDVVYQGIAHEGHHERLVDPATWQRVQDVLAAHLVGEKQRDHPHYLKSSVYCGDCGSRLIITNAKNRHGVIYPYFVCLGRHQKTTSCTRKALLISKIEKMVEDYWATIQLDPQLREAVEDGLQAELAVQRKEAEDERRHLNSEKTKLTGQRKKLMDAIYSGAVPLELIAGEQERITSQLATVEERLNAAAAESEKIEVNLARALGLTQDCHAAYLTANPSLRRLFNQAFFTHLMIDEDSVQGEYAEPFDVLLGPDVIQAGHAVQADREAGLVTMADVLRRSAESLGNDKTPRALRAAGGLTWEPSIPSYGVEGSNVTILVPPAGLEPAAKCLEGTCSIH

SEQ ID NO: 807 - protein, 461 aa, synthetic construct
MKVAIYTRVSTLEQKEKGHSIEEQERKLRAYSDINDWKIYKVYTDAGYSGAKKDRPALQEMLNEIDNFDLVLVYKLDRLTRSVKDLLEILELFENKNVSFRSATEVYDTTSAMGRLFVTLVGAMAEWERTTIQERTAMGRRASARKGLAKTVPPFYYDRVNDKFVPNEYKKVLRFAVEEAKKGTSLRGITMKLNNSKYKAPLGKNWHRSVIRNALLSPVARGHLVFGDIFVENTHEAIISEEEYKEIKQRISEKTNSTIVKHNAIFRSKLLCPNCNQKLTLNTVKHTPKNKEVWYSKLYFCVNCKNTKNKNACNIDEGEVLKQFYNYLKQFDLTSYKIKNQPKETEDVGIDIEKLRKERARCQTLFIEGMMNKDEAFPIISRIDQEIRDYENRKSDDKSKSFDYEKIKNFKYSLVNGWELMEDELKAEFIKMAIKNIHFEYVRGIKGKRQNSLRITGIEFY

SEQ ID NO: 808 - protein, 537 aa, synthetic construct
MRIPVLYIRVSSQRQVLEGGGLADQLEVGRTYIKGKPDLDLSRLQVIRDEGISSYKGANLIDGMPLKDFVDARVANQDGNNYALIVISVDRISRMNPWASSQFIGTTIMTGVHIHDISSGQVLKQDDHIGAIISTLNLMRANNESAVKSERRLLSIESALAHSLQTGEALKGKLPKWLRIEDKKYVVDWSIAGLIVEAVDLYIAGQTSGQIVKSFNNAGKLYGKTIWSSQVLLKIMRSKTIMGTYTRVKDGQIEEYENFYPAIVPAEKYTHLKQLISAMGKHITKHRVDKGRVTNLFSGFMVCHDCGGVMSVNRHTSTLKYFDCATARRRRTCDAKKGNYLTVERAVLQHVKGLDLSSLLNNDTMDHSYIDSQILELKNHISSLESSMKKRKQAGKLVPVEMLDSLGDAREQLLELREQIPAENLITDVQIGDVEEVIDDMHPSRGLIHRSLSDIVQKIGVKRVGGFCLIFIRYKRIDDIHVLMCDNTTGEVYTALSQSEDVIELYGMEDSKKLYGEFIEKLPNEYMRYRRKKEIDK

SEQ ID NO: 809 - protein, 520 aa, synthetic construct
MKKITKIEANQKEGSILRVAAYARVSTDEEAQLVSLKTQKAHYEKIISENKSYAFAGLYFDEGITGTKKECRDGLLKMLNDCEDGKIDFILTKSISRLARNTTDCLEIVRRLLDLNIGIYFEKENIDTRTMESELMLSILSSLAESESRSISENNKWSIKKRFQNGTFIISSPPYGYENIDGKMVVNEEEGKIIKEIFEKYLSGKGTHKIAEDLNKRKIKGQKGSNWHGSTINGILKNEKYIGDVIYQKTYTDDTYKRHKNKGEEDQYKIIDNHEAIVSREDFEKVQDLIKIRAIAKGNGKDTKRYQNRYSLSGKIKCGECGSSFKRRHHYNGKDKYIAWTCSEHLKDINKCSMKFIKDKDIKLAFVTLVNKLIFGKDSIFTPLLESLKRVDSKEEVEKIEKIEESLEKLKERKEVLSKLITSGVLDASIYAKESSEISSEESYLLREKERSKKVILGNDEEIRELEKLIGILGKSEMIDRFEDDLFEEIIAHIQVVNRVTLDFHLKCGLVLREEVKEDV

SEQ ID NO: 810 - protein, 460 aa, synthetic construct
MTTALYLRQSFDRSRDEAAIDRQRAECRALAERKGWKKLVEYVDNDRSATNVRKPRPAYEQMLADMAAGRITAVVAWDLDRLHRRPIELEAFMPLADSMKIKLATVSGETDLSTAQGRLTARIKGDVAAHECEHKAARQRAAAKQMAERGIPKWPVVPFGYTADCQPHPVEAELVRKGYETILGGGSLSGLAREWNKGGYYGRNGKPWTASTMSLFIRAPRNAALRAHNNVIVGPGTWPPLVDETTWRATQSLLDDPARKPGPKTVRRHFLTGVLRCGKCEDGGRISGYHGPKGQERYRCWKCLGVAISKPETEETIRGIVCARLARPDATKLLIDRDAPNLDKLTAEANTIRARRIELATVFADGELTAAELRAARERLNAKLDAIEAKMSDAAAKRVFADVPLGTDRVQAALDKLDLDRQRVIINVMMTATIMPVGKGHRPRDGERFDPERIAIEWRR

SEQ ID NO: 811 - protein, 532 aa, synthetic construct
MKAAIYSRKSRFTGKGDSIENQIQLCIDYAKSIGIKDFLIYEDEGFSGSNIDRPQFKKMMQDAKDKKFNYLVCYRLDRISRNVSDFSTLIEKLNELNISFISIKEQFDTSTPMGRAMMFISSVFAQLERETIAERIKDNMYELARSGRWLGGNTPHGFNSEKITFLDENLKERSMYKLQVNDEQMEVVKLIYNKYLELRSLSKLYKYIYNNGIRGPRGGKFDPSSLSRILRNPAYVKANDEILEYLKNNGMDIVGTPDKKCGVLTYAKNTTNSIAAIAKHHGVIEPEIWLEVQNQLDKNRDKTPRIATGKTALLSGFIKCGKCGSNMRITYKGRKTDKDLKYYYICGTKKTLGADNCNCKNLNGPLVESLIIDKIKNCKEESIISTFNNNNIKTGNIFNVLKSETNLLKNQILDKEKLIKNLVIELAKNTDSIASDYIVSQIENLNSEINILKDKLNTLESSNANISSDSINLDIIVSNLKRFNDEVDNASLDDKRLLLSTIINSIVWDSNLGNLNIIYMGAEMDNSVSLSN

SEQ ID NO: 812 - protein, 587 aa, synthetic construct
MPRSRKALATAAQIGATARVYSYLRFSDIRQKAGTSVERQEEYAVKWAREHAMELDTNLTLRDEGLSAFHQKHVTQGALGVFLKAVNDGTVPAGSVLIVESLDRLSRADPIIAQSQLNSIVIAGVEVVTASDGMRYSLKTVKENSGILFMALGVMLRANEESATKSKRVRAAAHKRCQNWIDGKSRERIAVGKNPGWVEFDEKANEFRLVPEFVTPLMALVGYFRAGYSLRRCFDQLHAAGIPLPPEKADKYGKVKHGGMSNTTRLYEIIQNRALVGEKVVEIDGTEYPLPDYYPPLMTEAEFAELQYLRKQRGRVVGTKSEIVSFLTGMRLTYCTKCGRAMANQNMMNRSRRDDGLPQDGHRRLYCTGRTFSNTDRCTAPSVSIVPVERAVMDFCSDQMNLTSLFAEQHDKTRNLNGQLALARAQVAKTEAALKRFFEMMEVAGDDTPTMLLSQMRSLQRRLEGEETRVANVEFELAALHRNSTPAMAEIWAALRDGVVQLDPAARIKARQLVADTFKSIEIEKVTWHGDELIYLRLTSKRGVIRQLHVDRKTGERRDIVVETDQTLKPRRKPAKTRNASEPATAV

SEQ ID NO: 813 - protein, 472 aa, synthetic construct
MKAALYPRVSTEEQSKEGYSLAAQLDKMRAYCFSQGWTIYKEYVEEGRSAKDMERPQLQSLLSDIPHFDVVLVYKLDRLSRNVSDINILLNTFEKNKVAFKSVTEPYDTTTAQGKLLINIFASLAQFEREQLAERTYMGMARKHEEGSRNGGRAPFGYYLDDQGKLAIDEVEAKWVRWMFEAFHTKGKKMITEELNKNGIRTRTGAHWNHSAVDYVVTNPVYYGALRWNYRTKQGNRTYEEVIVEGNHPAIITKEVYEEIKKTRKDRKNTGWKSRTVYPFSSVLRCARCGHSMSGGKRNRADGTVHRFYKCSGRFEYKICDMPVIAEDTIEQEFIKSLEYLPVETDAPDQQEVDIKEIKKELKRIEERKARWKELYVDGDLTKKDYKEKMDAEIEKENELTRSLEINQETPTSEVINTIIENIKTKWQDISLENRKRILTTIFDTVQIECLKSHSGGLGERPVIEIKETTFK

SEQ ID NO: 814 - protein, 503 aa, synthetic construct
MTDFIVYGRVSSKTQLNDGKLGRNIQQSAINNTIKAHSGNVLNEYFDAGKSAYKGEHMADGGALREIYEDIQNDTYKPGTVLLMYSLDRFSRQEPFQAMHYFTGILAKGVSIWTCIKGVEKFETQKSIFPIITASIGFGTSNEESEKKSSRLKDTWLEKYDFLARGQAVKMTSYPFWITFNENHMRYDFNDFAPIAKGILNDYLNGVGRSLIVKRLNEAKTPFYTKLKKPTKPQVWTSDHLKKLFNNHAIYGRFDSKRNNVQIENAFPALITKDQFEIIQSMKRKRKGKQSDDYPNLFNGLLKCGYCSGSLTRSKSQSGSYSYYCTSAERCNTKKSLAAKTFDPVVLTFLKDLDWSFMHEETQENKPLLEARITELREAVSIMDNALDKRFDHRTFERRQNIVVQIEQLERDLLGLQTVHERYSFAVETLLSADNETRLKANKTLMFLIDKIEVFVKGLDGNGSENPFLPYAKLSFNKYKHDRQEFRLVYLNHSIAIDSHMIG

SEQ ID NO: 815 - protein, 475 aa, synthetic construct
MRVAIYTRVSSDRQAEEGFSLEAQYEQLIEHIKIRKWELVRVFTDPGISAKDLKRPGVQEMIADLKNRKFDAVLVHKLDRLTRNIGNLHDLIDMFNNLNVKLISLSENIDISTAAGKVFVHFLGLLAQYYRENLGEEVLKGLRKSAMSGNRINLKPVFGYDVVDHKLIVNKDQAEIVKLIFDLYVNKGKGHNYIAKYLNSHNYISNFGRWYDVTVAYILRNLTYIGKNHYTPQGIQEKLIVRDGDHDPIIAQDLFDLAQAKSKKVSEGMISSSSYEYPYSTILKCGVCGSSFSARVKKSKYNDVEQIYRNYRCYGKDKRHVCTVPDISERKVEKLLFENLQIEVDNDIPIEDVVAAEAKNLEKERARLEKELSKSAKRRENWQYAFGDGKLPYSDYVKLIDTEMQRAQDLQVELDRLPVRIEQKPSKHQVLEQIKELKESWEFIPVSNRKNIIQTMFSGIELTYNDGAWAITAIE

SEQ ID NO: 816 - protein, 499 aa, synthetic construct
MAIAYSYIRFSSKAQAEGDSLRRQLQKTKEWCRNNDVELSDKNFQDLGISAFKEKTRPSLDDLFTAIQTGSIIEGDYIILENLDRLSRQGIDHTQEMLRKILRSGVNVVDLTNGLELNKTSLNDLVSVIRIALAADLAYQESKKKSERVLAAKATQRKLVREGKVINKRLPFWVTNSDGYQLNDKAQIVRDIIKQRTSGVGFHRIAMNLNNVYEAPKAKHWSDTTIRDIVKSRALYGSMVDKDGEVENVFPALISFTEWQAIQAEHVSSAGGYTQHNHLARLVKCECGSAMSKKIQKSKTKTKTHEYNTWKCIAATSGGCGHKGVIRDLDLDVFKSLNHLKINKSKSSSLLNKINQQIEKKTLRQQELEQALLEDDAPIAALTKAIKKTNEELKQLRSERDLLSVRTDSKLLIELQNNAVEFNIELRKLIEKIVVIPVSSNQFRIKIHQHNGHIVNCVKTRTSQRSEWTRLFGKTEEILKIATEDDGIPYTDWGETDEL

SEQ ID NO: 817 - protein, 506 aa, synthetic construct
MKKTVTYYRNSADFQENSIEMQQIKAFEYSVKHQLAIDEEYIDKDTSARKNTLMQRLNMRRLINDIEAGIVGSIIVYKRDRLARKLKEHMQLYHLFQKHGIEVHFSSDSEVKMYYSPIGEYVEAILGSICENEGSLIAQRIQETKIAKFLSGKYAGNLPYGYECGDPDPEDGKVTILSIPHKKTMVKAIFNMLVNKKYESLKELCDDVNQIQKTKTQDQDDKPWDQSRIIKLISNPIYYGLRVMKFGDETYKKAYKNTKIIEKEEWDVANEKLNQIVVKRESNTEKVRFLLENILYCYQCQKPLITKTRMKQYKPYNVYECKEHDVCVEANYIEEEILKHAKQFFNRLLDTNFDKLYERSKYQNIQRIQKLIRSQEKTVENYEKKVGKCVDTWLSCQRRMREYESNKCEKCKNDQHKQEIKETNEALKKEKKKLKHLKLRLHEIRNFREKAKEWMAHLECPADLLLLEKEHRVHFYREMIHCIHVDTWEYHIVFKHPFMLIQEVHQ

SEQ ID NO: 818 - protein, 581 aa, synthetic construct
MTTQTPAGYAYIRHSTKRQGGDDKDSVTRQKESIRALAEHHKVEIPDENFFYENGVSAYSGKNLTHGKLKDLIDQIASLRIRPGDYVFVESIDRLSRQRLLQAKELVNGILEKGIILVTTIDNQRYEKASDINGIDDLSQDILLSVISKRAHEESRTKSIRRKSAWAKAKNSADETQKIFNKNRPPFGVQYNPITDRFEPHPEQAAELNRVFESLRLQGVTATIKEINKTSSVKWTQNRVKDILEKKYPLGYMYSQVKKDGKMVFDKYIENYYPQIISFELFEQARQAMKSRKVNRRVGRASQDNSNIFRHTARCGICGESMFFMNNFGNKTKRYFYMSCRSNFEQENKCKNRFRYDSAVAVLLHIIGSTFFWDYLSKKPALFEAAKKADFYVSNAEGWKKESPQEMDNYSRLGQQFMKFLEGNNENKITHKEKVEKEIIYSKKKMTLENLEKSVESITDGTVPALIMKMLMKAEEDVAKAKEELEILTVNSVDTSAKLAVKTVDDFIDLFKTEHGRLEIINFLASNGMTFFFEFEKSTKNLKTNVAVHKEVMATYNMKTDIDALQQYGFGNLGEEFKLMV

SEQ ID NO: 819 - protein, 530 aa, synthetic construct
MNKTKVYSYIRFSTSRQESGDSVRRQLEIARNYSEKVGGVYQDRSFSDMGISAFKQKERDGLQMMLDMVEDGSIEKGSHIVIERLDRLSRQGISVTQQLITQIVQHGVLLYVAGDNMLLERDSLNDLSIVIRVAVAADLAYKESLQKSQRIKASKIAKKKDGLDGRVTKKVCPFWLKFDEKKQEYVFSDKLPTIQRIIELRQQGFGENKMAQHLNDENVPPPRAAKWSPTSLRKLYTHPAIYGAWQTTEKTEDGKYINSDLIENYYPALLTYEEFMLMNPKSKATTAKDSGLNPFKGLLRCAKCGATMSRQTSKMRTGEKYVAYRCTNAGKGIYCDAVGYRDMDKYLVTACKRLKIKKTLSSDNREKESQLRALEAKLESLQQAILTQTDITALISTSQIVERQINELKATIKPAATVTVDELYSHRDNPQSFNLLARSLIQRVDVEVKAKNRHTKTLLAKFYQHNGYVITLTVLPSGDAFYSTTDLSPIIDNEDYEEPESTEIEEYDDSIANPDYDSSSWSNPITQRNQ

SEQ ID NO: 820 - protein, 597 aa, synthetic construct
MKQKLYSYQRWSSAVQSDGTTKARQTFAAEEYAKRNDLEVVEIVDAGISGFKSDNSKSGALAKFLAAVDEGLIPNNAYLFVESLDRITRDEIDVALELFMGILRRGITIVTGMDNKVYTRAGIKGNPIDLLTSILLFTRAHEESKTKQNRTNGNALAMIRRFQSGLPTTIKAVGSHPWWIDCSTDKFEAVRRHPTLWQPAQDAINMFMEGVSVFKVVEYLDKTYPHMYKGKAWKTANIRKLRFNKAVYGLREITVDGKDYALPNYFPALITEGQFLRLEKIRETTKYIGKVGEGKTVTDEEGNSKVIAERNNINLLAGMKLFRCGHCNSTMMAMRHGDTIRYLCEKGRGHQNDCKTWSLPGLLVEHTLMLVTTIAYINIQRKGGVEKEDYTAQIASTEQLIEDISKKISNSTKLVLAGLDDVDEVIEQIQELKDSRSNLVLELEVLQRKQLLAQDSTFDSLMMDFFNYAQYGVLQDPVHEYRSKLRDIVYSSIGEVKAWKVERRLMISFQIKGDEDYYTFSAGDEPYNYIFYYGSPVQLGEDLAPQGNYELPEEIKRRIRDHSDVYGARMDVLKTARDLLSVVNYPDLDGRLFWPRK

SEQ ID NO: 821 - protein, 501 aa, synthetic construct
MTDSRKAPRAVLYLRLSAVVDDSTSLDRQEADLRDYADRQGWDVTHVLVDEGMSGRKARAKATEAVHLIRDGEADVLAVWKLDRFTRQGWDGLGELSRALDARALANKPALFVALRDGLDSDQSAFRMIAGVLSEVARAEADNAATRIKHSIAYRKTSTNKYTGGAAVPFGYRSVPAPDGVGRVLVLDEEEAAIVREISGRLLAGIEPLSRICADLQAREIPTSKSPARRALRKGEPADGLDRGFWRASTLRSLFTSDLLMGRVRHHGDLVRDADGLPASVWPPVVDLATLEGLRVRLGHAPSRGGPAPAQPRKGRAARLLSGIAFCAECDSKMYVTSSSGYPIYSCGSSWNGGSCPSPKIKAEALENFVVEHVLKIQGNAPELELIQEADTATRDAALREVEAALREAFALLDEDDADDIALSARIRTLKARRKELREIPVATSSRVVPTGRTLAEAWEAEDDLDWRRSILDWGLDHVTVGPGTTRAGIDPSRVRFYWPN

SEQ ID NO: 822 - protein, 466 aa, synthetic construct
MKKAGLYIRVSTPQQEKEGYSIEAQTEKLNAYALAKDYKVFKTYTDAAFSGAKLERPALNEMIEDIENNKIDVVIVYKLDRLSRSQKNTMYLIEDVFLKNNVDFISMQESFDTTTSFGRAMIGILSVFAQLERDNITERMSMGKLERVKRGYYMGGGNVPFGYEYNQITGELEIQETQALAVKRMFELFLSGQAINKIVSILKKEFPVFEDSFMDSTVRRRLQSHYYCGKQKYQNKIYDAKHEPIVSTKDFNKVQRLISNRPHSNAFNHSYLFSGLIICHKCGKPYNGYESVRTANGKQYKHKYYRCSCRTYKHKQKYGWTCSGKSYRCDFLDAAIMSEIKKRAENSKFALKEDNNEVDNKPIIREIARLNAQQSKLLDLYLSDKISTNILDNKTDELKEKIEKLELQLNQTVSKKDKEEFEKSLEELVDKFEELDFSTRRSLIENIIEKIEVVDNEVNIYFYVTI

SEQ ID NO: 823 - protein, 465 aa, synthetic construct
MSGSVDPFDTPQLGPWLGERAPEWDALVAWKLDRLGRNAIQLSKLFGWAQEHGKTVVSCSESIDLTTWAGRMLASVIAGLAEGELEAIRERQKSSRAKLRQTARWPGGKPPYGYAAIKGDAGWTLVVDEEAAAVVRRVVGEVIDGKGLASIAKQLTAEGYLIPSRYYETVKAGTPTIRVDGGDSGTWRTTALRNMLRSRALRGFAHHNGETVRDADGAPVELAPALITGDEWQLLQGALDRIQEAKSRPRPEASPLSGVVFCLDCGGPLHHDRTSVKRENRTYVYRYYRSACGHTPMLRADDLEQQVEDAFLHTLGDVLIRERVWVPGDAREADRREAIEALDDLAEALSRAASETTRQRLQMQIEKVDRRLAELDSQPAREARWEYRPTGGTYGSAWKAADAAGRRQLLIRSGITIAARQLETAIRVPPEIWDMAGIDGTEVMARREAAASVERVEAGVPDPFV

SEQ ID NO: 824 - protein, 544 aa, synthetic construct
MIIVKKTLRAVAYPRYSSDNQREESIDAQMQAIQEYCDRKGYTLVGSYPDEARSATTDNRPNFQRMIADSEKDLFDVVLVHKLDRFARDRYDSAYYKRQLRKNGVRLESVLEHLDNSPESIILESVLEGMAEYYSKNLARESRKGMLQNASKAIHAGGRPPYGYRINPETLKLEVDAQAAKAVLIYFQGVAEGRSTTAIADTLNELGYRTQTGRRFTRNSFDGWARNKKYIGIYTWDIKSSKDEDGRRNNHRYKPEEEQIQVPGAVPAIIPVELFEKVNELMETRKLKPGRLKAKQVYLLAGKIVCGQCGMLYRGESYRNSKSSQGTILKFYKCGGRCGNTNLRKSTIEESIIQNLVANVFSEDAIKNIVVKVKELYQKERESDGLDLQPIRNELNEINRKLENWVDALGEGDVVKDLISQRIREATNRKKVLESELERISMMATTLDINEELILEVLTSKKNALFSLNEEEQKQVVQEFVDRIVILPSKSIDDFEAEVTYKFFEGKNGSTTGKNPSPVGDRFFNGGGEGTPTVTLLEEFSFVI

SEQ ID NO: 825 - protein, 487 aa, synthetic construct
MVIYARISDDREGRQNGVDRQERQCRALADKNGDEIIAVFTDDDRSAYSGKPRPDYLKMLAFLRAGHAEGAYALAPTRFYRRLDDGLEFFKLIAEKALEVETVKAGRYNLATADGRRDALRAAVDAQHEAEQISERVRDAKADNLAKGEYRGGPRPFGYEGDGVTVREDEARHVRAATDAVIAGDSLRSICRTLAEQGARTVPRRYKQPDGSRGEPESREWTASELRKMLLRPRNAGLMEHRGEIVGKAAWDPLVPEETWRACKAVLERAERRTTTGNARTWLGSGLYRCGVDECPETVRCSTSGKGSRNHHVPAYRCRTGKHVTRVAGPLDEHVTNLVLVRLSRPDAASALLPPPRAAESREDLAATANALRAKLDTFVADYAADLITRQQMLDGTALTRQRLEQIEAKMAAQAQQSVLAGLPLGTPKVVEEWTSYHLDKQRAIVDALMTVYILPARRGRPAGFQPGVTKTYFNPDAVRIEWKQQG

SEQ ID NO: 826 - protein, 525 aa, synthetic construct
MAYYGLLKGSNMKAYIYSRISSAIQKKGHGLDRQQDIALTYATQLGFDISEEVLQDVASGYHGKQMEGRLGVFLEGIKRGKIESPAALIVESLDRLGREHTMDALPRFIDIVNHGVEIHEVSTGIVYNREETHKIHIAIAIMERAHNESLMKSKRARAAANKRLQRAQQGENVVINVNLPCWIRSQDGKLELVPEYAVVIRRIFELYLEGKGSNKVAQILREENHPYFTSNIHSKKIRSRVWTDQRVMDIIKKDSTCGVFRSTANPDTVIDGYYPAAIDKATFERAQVLRMSRVRTAKKSKKGLNILSGLLRCGHCGSSLQYTRSYSNKKKTRMYENLRCRDRAARMNCDSRSVPLRPLEKLVLGWVGTIPLFDIKAASNDELEQKKAELTQLEQQAENLVELLATGLTRVKDKYLQLEQQIDSVKKEISSLSVTNSSSVDKIDYFQAIDLENEEYREQVQQELALIIDRVSVKCDGEDAEIDIFLNSKIHNHQRFIGKKKQLDKARQTIRTLRPCAAHVDSFVD

SEQ ID NO: 827 - protein, 490 aa, synthetic construct
MVMRVALYIRVSTEEQAKEGHSIGAQQDRLLDYVRSQGWEVAEVYIDDGYSAKDLHRPAMQRLLKDCEQKKFDVLLIYRLDRMVRNVIDLYSVMEHLDKHSVMFKSATEVYDTTSAMGRFFITLVAAIAQWERENLGERVKMGMEKNFRKGGWNGGEPPYGYRLEDGKLVIHEPEAAIVKRIFELYKTKGQREISRIFNQEGLRTRNDALWAGYTVRYILENPVYMGKMRWMYRQGGGKKTNQEIMIDGDHESIISEEDFNAVAILTKKRLIYREKTNVCFPFTGILKCARCGSPLQGGEKKQKLQNYRFYRCSGRFAQGICDIPLIAEDTVEKLMLEQIDFIIDGSWQKEIDIINDNQVATESPDHIQLERELNEIQKRKKKWQLAFANDVINLDDLRIRMQEENEREEIVRAQLISEPFAEKPLSKLTKQDVMAFAKNIKESWYHLELEHKKVIMQTVFERIIIDTYGEAVGGPGRRVPCKIISFETN

SEQ ID NO: 828 - protein, 546 aa, synthetic construct
MKKRMIPMAVSSADFDPSMNMVDPMEASAFGVIYARYSSHSQRDVSIEQQVKDCMAYAARNNIYIVACYADRHMTGRTDRRPEFHRMLRDAEAGSWSFVLTWKNDRFARNRYDAAIYKAKLKKCGVRCLFSQEYIPAGPEGILLEAMLEGDAEFRSAQMAVDIKRGLAYNAEHCMVTGAIPFGYRRTKDYTLELDPDRAPLVKEIYDRFLAGWKIIDIANDLNRRGITTASGKPWGRNSFHSMLSNERYTGVYIYGDIRTPGGLPAIIDRDTWLAVQRRLHTKKNPVGRSRSYGDYLLTGKLFCGHCQRPMVGVSGKTRPGKPLYYYYVCQGRRLSHDCQKQNVRRDWLEEKVCAMVAGLVMQDNVVEWMADCVVDYQRRHKEDGTLQALASQLKQTRAAIGNVMAAIEAGIITATTKDRLLELEAQEQKLAQALETEKALRPTYTRERVIFWLEQFRAGDLTDLAFRLRLVTTFVNAIYLYDDHLKVVLNYTGRNSSVDFPLVEDALDSGAVDGGPYSVETGPPKIRPSAFGRWPYFWASLARLA

SEQ ID NO: 829 - protein, 575 aa, synthetic construct
MKVAIYSRKSKFTGKGDSIENQIEMCKNFITSKYNKKVEFLVYEDEGFSGGTINRPQFKKLIKDVELDKLDVLVCYRLDRISRNVSDFSNTLDTLQEHHVDFISISEQFDTSTPMGRAMVYIASVFAQLERETIAERVKDNMIEMAKNGRWTGGKIPLGFNSKRIKYIDENGLEREIPVLEINKEESKFVTSLYEKYLELGSLHKLEVYITQNEIKSRNGILFEKSSLKIILQNPIYVKSSYDVLKYLKNNEWKVYGNPDGAHSLLTYNKTEQTLRKGKHIKVDRPKEDRFAAISNILGFIEPELWLEVQKQFDKNRTSFPRLGKTHNALLTGKIKCGKCKKYMLIQHGRISKKTGEKAFYYVCSLKQKSHKKLCNNSNIRTDKIENLVLDSLKNFAKSKKEIMEALKRENNYKLKNNNSDIKLELNSALSERKKQIDRLTNALANGTGVEDILINKIKLIKKECIKIENKLSEIENNHEKSKSNKINLDIINSMLDSCKIIDTLSMQEQKRIIDTLIDNIYWFGENHKEGKISIEFLGSGMDATYKSHLYEAIDLDTNSNGKKAALLDTLQMPN

SEQ ID NO: 830 - protein, 627 aa, synthetic construct
MPVATRRCFSYARVSSGHQAQLGEGLQRQLAQAEAWAAAHDLVLDDTLDLIDPGRSASKGHHIREGAALHRFLAAAKAGTLGSSPVLLIEDFTRLSRLEPLDALDQIVSPLVRSGVEIVTLEDGASYTLDRLNRDPACLLILVVKAQSAAEYARRLSSYITQRRAANRADILDGKPVCTGWAPSWIEWNAEGQRWQFTPYASTVRRLVELSWEHGTTVVCRTLNAEGHRSPDGLPWSQMPIRAILRNPALHGARRTAAPGHAAAVKAWRAECSRLIKQHGSDVTLPPKPKRTYALCPDTFPAILTADEHEALLAVIKARAVSPQEKGRRDRTHYIGQQLTTCLCGAPVGARSVKPRKHSGLPGDQRYIYLVCRGRERKQTDCQAPPIRVEPIHAALLTRLQGDALAQLQESGGDGPLAALLVRQGHLIHELTQAESRHNNAAAALRDRAMAGAAVIEVYEQAVTEAAAVVAATREALAGVAAEIRAIQNQPSAGAAAEQVQALLQTFARGEDTPDQRRAINSLLRRLQVRIYLDTEAQRLGLAVGDAEPRWQPLAPGLAQKALEQGRVGTGYLTATITPEDLQRAAEQAEGSGLESVQVPAEFFGQLDQDIPAEGNKGEADFELQQG

SEQ ID NO: 831 - protein, 550 aa, synthetic construct
MEGTVTPDIPATFRGSPTDEDGEPWLGYIRVSTWKEEKISPELQKTAVEAWAARTGKRIIGWIEDLDATGRNFKRKIVNGIARVERREAIGIACWKYSRFGRTRDGVAVNLKRLEDAGGQLASATEEVDARTATGRLQRGILFEFAAYESDVRGEQWRETHDHRRDKLHLPATGRQRFGYIWHPRRLPDPERPGYWLLQEERYEANQHTGPVMADRYRQFIDGDAFYALVGELNTGGHRTTRGGLWTEQTLIRYMDSGFCAGLLRVHNPKCNTCNPEKRGHCPNTIFIPGAQEELISAEIWQTYLEHRAERRATPPRARRGTYEGSGLMRHGSCRGTLVPNNAQRLVDGQMAKIRGYAYRCGRRATTGPLGCEGVWATRHEVEGEVFKWLKREAASGIDAAPSTPEDLAAPRNQRAAAARDRARLEAEADKLSTALTNLRIDRAANPDDYKPGEYEAARDKIRRKQEATTAAMERLAVVESTPHRSDYEQLIIGTAAEWRTLEARERNGMLRQLARRVVVDRQDGNITVTVHPVWEPDPWEVEQSDVRAG

SEQ ID NO: 832 - protein, 556 aa, synthetic construct
MFRQLNKVNTHMVSTGNRITALYCRLSRDDELSGDSNSIKNQKAILQKYADDNGLKNTVFYIDDGFSGTTFDRPDFNRMINDIEAGKVETVIIKDMSRFGRDYLKVGYYTEIIFPEADVRFIAINNGIDSANQEDSDFTPFLNIINEWYAKDTSKKIKAVFKAKGEAGKPLATNPPYGYLKSSEDKNKWIVDEEAAEVIIEIFKLCMSGFGPTQIARKLEEKSICVPSVHIRNMGFKHPARPPKNPYAWNARSVADILSRIEYLGHTANFKTSKKSYKSNVTIDNDPEDWLIFENTHEAIIDESTWKTVQKIREGKRRPSRLGEMGILSGMMFCADCGKKLYQVRGKTIPKEREHFVCSTYRKVKGGCSSHQIRNIIVEELLLEDLQKIVAFAKNHEAEFVKLVMHKTEKNLLKEQRQNQKELDEAVNRISALDTIIGKLYEDHVFGKLTEDRFIKMSSDYEKEQEELKEKVEFLSEGLKAVKDQALNTDNFLKLVKKYTEIKKLDAEIIREFVDKIIVFKAEKINGKRQQKIRIYYNCIGAIDIPNTESKTAQPI

SEQ ID NO: 833 - protein, 497 aa, synthetic construct
MSTEHQQYSTENQADAIRQYADDHGFEIVRTYRDDGKSGLRLDGRKALQNLLDDVQSGRADFSIVLVYDVSRWGRFQNPDEGAYYELCCDLAGIAVHYCAEQFDNDGSPFSHIIKALKRTMAGEYCRELSVKVFTGQRRLITLGYRQGGPAGFGLRRQLIDHTGTQKNVLDRGEQKSIQTDRVILIPGPPEEIEVVRSIYRAFVVDGKSEREIALALNGRGIATDLGRPWTRGTVHQVLINEKYIGNNVWNRRSFKLKKKRVENAPDDWVRADAVFSPIIDHALFDAAQTIIRGRSQRLSSEEMLELLRELLERRGFLSGIMIDEADHCPSSSAYQSRFGSLLRAYELVGFTPDRDYRYIEINRLLRRMHPQVLADTVAGIEQTGGRVEQDPVTDLLTINREFTASLVIVRCQETPAGSLRWHIRLDTGLCPDITIAVRMDPANAQARDYYLLPNRDMTGPRLRLGEHNGIALDSFRFDTLEPLFGMAARIGLLEVA

SEQ ID NO: 834 - protein, 633 aa, synthetic construct
MKRADLYIRVSTDEQADKGYSQRDQEERLRRYCSSHNISVGQIIYEDHSAKTFNRPEWAKLLISLKKKSSKTNLILFTKWDRFSRNAGDAYQMINILTKLGIEPQAVEQPLDLSIPENKMMLAIYLAAPEVENDRRALNTFYGMRRAKKEGRVLGNAPFGYINRSREDGSKYIAIKEPEASTMRMAFEEILKGIFAPDQIRQKIERSGKKILSRASFHTAIRNPVYCGKVFVAKYGDEEAVTVKGQHEAIISEELFYNVQDILHGNKRATVHSTKILSDVNLPLRGYLVCPDCGRNLTGSASKGRNTRYYYYHCIASCGYRQKAEKANEIFEQGLAQFELNEANKDILKKMVLLNYNQVIKENPRMDKRKIVLEIDKLNEKLSVAREKLLSNIMDDDEYVELKKEYKEKIDKLEEQLARDDTPDSNEMSIQRKLNKALDIVQNISKLYIRGEIETKRTLIGSIFPEKLEFDGTQYRTARINSVIATIFQINNELCNKKNRKSDKNNHFSCVVPSAGIEPARLAALEFESSASTNSANWATRNCECKYRHIFVSEKSFFKKLKNNFLPVKSQLDVRWKFPIHFIVKTNMMAQVGEVCLLRLKLLDKFQNLGQNKMCRMGAILSQAVNDKIIQIS

SEQ ID NO: 835 - protein, 463 aa, synthetic construct
MRAAVYLRISEDRSGEQLGVARQREDCLKLCGQRKWVPVEYLDNDVSASTGKRRPAYEQMLADITAGKIAAVVAWDLDRLHRRPIELEAFMSLADEKRLALATVAGDVDLATPQGRLVARLKGSVAAHETEHKKARQRRAARQKAERGHPNWSKAFGYLPGPNGPEPDPRTAPLVKQAYADILAGASLGDVCRQWNDAGAFTITGRPWTTTTLSKFLRKPRNAGLRAYKGARYGPVDRDAIVGKAQWSPLVDEATFWAAQAVLDAPGRAPGRKSVRRHLLTGLAGCGKCGNHLAGSYRTDGQVVYVCKACHGVAILADNIEPILYHIVAERLAMPDAVDLLRREIHDAAEAETIRLELETLYGELDRLALERAEGLLTARQVKISTDIVNAKITKLQARQQDQERLRVFDGIPLGTPQVAGMIAELSPDRFRAVLDVLAEVVVQPVGKSGRIFNPERVQVNWR

SEQ ID NO: 836 - protein, 498 aa, synthetic construct
MKAIYARVSTEESAQKGYSIAHQIEEAKKKAKTDDVMIYTDEGFSGEFLERPGLERLRNDIRNGMIDTVIVYDPDRLARNLMHQLLLDDEFRKYNVELLFVNGEYANTPEGKLFFSMRGAISEFEKAKIRERTMAGRKRKAKEGKVVKNDKIYGYDYDKKTGQLIVNESEAEIVRFIFDSFTQGRFKGINGIALHLTERNIPTKMGKSVWHRQVVRQILMNETYVGKKPQNKWNTEGMLANKYRNEKVPMRLRNKDEWIYVDVPAIVSAEQFQQAQMLLEQARRRYTKASKRQYLLSGLIRCAQCGNTMTGRWMKNWGKYHREYTDRKNTAGAKHRGCGMVVRADEIEQEVWDYLLDLFNHPERIQEFQPVADAENSYEKKELERLEKEIDRARKGRKRLLSLVTMSDDDELDLEEVKEEIRNLQQREKELIEQYNQLEQQLKEIQESKPNEHILQAAIDFFLNHKEQLDFEIKQTLIRKVVKEIRVIDKENIEIHLF

SEQ ID NO: 837 - protein, 523 aa, synthetic construct
MIVDIYLRKSRSDEELEKTLGNGETLARHRKALLRYAKENGFTILNIHEELVSGEELFFRPAMLATLKDVESGACDGVLVMDIQRLGRGDMEEQGLILKAFKKSNTKIITPKKIYDLNDEFDEEYSEFEAFMSRKEYKMINRRMQRGRINSVEEGNYIATRPPYGYDILRIDKNTRTLTPNAEQAEVVKMIFNWYINENMGCSKIANELNQLGIKSYTGVKWEKSTITNFIKNPIYIGKVVWKKKCIRKSKEYGKKRDTYTRPVDEWIVCNGKHEAIIEESIYQKAQEILAQKYHVPYQLQNGITNPLAGIVICGICGCKMIQRPVINKDSRIMCPKNCGQKSNKFITVEALLIDKLENYYSNMLLSAKKTPHKRDATKSLLIEKNIISLENELKKLEQQKVKTFDLLEQGVYEIDTFTERTNYILGKINQINSSILESKKHLKEIDLAFTTNQDYIINLRSVLDAYKKIDSPSDKNLLIKLVLDKVVYNKSHDAKADDFKIALHPKIQCPTFHAIAQKLEAP

SEQ ID NO: 838 - protein, 552 aa, synthetic construct
MKRAALYARYSTDMQNERSVEDQFELCRAYAVREGLRVVSRFSDKARSGGSMFERGDLLALLAQAQAPDRPFDVLIVEALDRLSRDMEDLAGIHKRLTFHGVEIRAVHEGVASTVLVGLRGLVGQLFREDGAKKIKRCLSGVVRSGRIAGGLAYGYRVVPGKPGEREIDPDQAAIVVRIYEEYASGRVPRRIAAALNKERIAPPRGSLWNASTLNGSSARGNGILNNEHYAGRIVWNKVSKARNPYTGKRVPRINPSAEREAVEVPTLRIVNAELWDRVQAIRGQRSVSHPHISRRPTHLLSGLLRCGCCGSGYTVHDRDKTGKVRIRCSAQRESGSCDNRRIVYLPSMEAAVIDGMREHLRDPRLIEVFVKRYNAERKRLASTADRDRGRIAARLDGCRRAYDRLLAAFAKGFLSEDDAEATLPKLREERAALEAELAQIEESPQVIALHPTLIAEYLRHVEVLHETLSIYGREEGEAGEKLVRSFRSLIETVTIHPGLPRQGFDVEVRGRLSELIGEPAFPSGRYSGGLLVPQEGFEPPTPSLRMRCSTS

SEQ ID NO: 839 - protein, 501 aa, synthetic construct
MTTRAAVYLRISRDDQATGLAVERQRADCLAIITARGWELVGEYVDNAVSASKRTTKRPDYDRMVAAYEAGAFEALVCYDLDRLTRQPRQLEDWIDAAEERGLVLVTASGEADLATDNGRMFARMKATIARAEIERKGARQRRANLQRIESGKPAPGRRRYGYELDGVNPRPAEAAVVRRMFEHVAAGGSLRSIARALEDEAVDPAPGRSWSTGRIRYILKNPTYSGEVHSFGSALPSDVLVPIIERTLAEEVRAILADESRLTTPGPAPRHLGSGLASCGVCGGLMFNLAKAYRCKADSAHPTITKERLDTRLRGEVALAFLASGGSLSEERSDTTVAPLVAALEKNDRAARATAEDRDEGLLSPKAARARLIELRVERVAIEQRLSSARVERSASSVLADVAHELLAGDDMTPAKFFGDMTAAVAARFETLDLDRQRDTVRALLDVTVNPGRDPRRVVVWHKVVTKLNPESALAVDIVGEGESRGPGDRSNRRPARATV

SEQ ID NO: 840 - protein, 598 aa, synthetic construct
MTKAYSYIRISSKKQVEGHGIARQLEKTHEYARQNGLTLDTELRDVGSGYHGKHVRFGALGGFLRLVEQGKIPVGSTLIVESLDRLSREDVLTAQSQFIDILRAGITIVTLIDRQVYSRDRDFTQLIMSLSIMQRANDESQTKHERSVFNVRKNRLEALEGKPRQVQTLVRWIDQRKIDGTRRDFQFTLNDNAKTVKTIFELRDIGMGARSIAKYLNDRNVPVLKPGASQTHKWKDPIIRLILKNEVAIGTYHVFETVDGKRVQLGEPIRNYFPAAVDEDLFWRVQGKNKQLTTRGAKGRVHTNLFTGLSCCATCGNRMRIKHSGGIRKEGDDPRYRLYQCLGYETMGKTVCNTKRKSVPYEPLEKAVLDHATEFYMASDLAGNRAYRESDLQRLISVLSENIRQNEKKRSNFIAAVGSAEDSEERLAYQMQASAVRQQIEADKSQLAEYEIALRELSNQEIERSNVAEMIAMERLRWRTASDEEVMQSRSRVTLALRKFISRVEVNLERQETIVFVAGGMKGYRFDTAGNLTGQYDLSPSFQTMNGETSYTLEHLSNHMNSLGFDEGEKATATEAATQILSLAGIKPEAKPKALSTK

SEQ ID NO: 841 - protein, 565 aa, synthetic construct
MPRAPAIYARISLDRTGEALGVQRQIEACRKRCKALGWPEPRVYSDNDISARLGKRRPGFEELLADIEAGYVDGLVAWHLDRVLRRVVDLERVLDAIESQRSPVPVVFLQAGEIDLTTPSGRLLARILAAVAANESDLKSERLSAQRAQAAQSGKAHGPLGYGYDENQHIIPAEADVIREVARRIIDGDSLYSIATDLNARLIPTPGSGKWDARRVERAVGRDERSGLVALINAARASEPTRAAEFARHLRRAGAGINVATAAWVREQAWAEHVLSDDHGLNDSTIAKVLSSAEIPADRSYWRAANVRAMVRRGSLCGWREFSPGKRGGYGELTAPGTWTPILSKETVEAIREVTDRPGSRRGREPKYLMAGILKCGKCGSSLAGSPISGGYRYACSKQPGRTHTCGGLTIAGPQTDTVISMAIIDALADAKVREGSARRRKSNSGAEKQAEATIAEIARLRDTYTTEFAEGRLHQDEFDVMREVWARRQREAERVLGTWVPNLHAVLSDVPKGRPDIEKWWAGASVRRRREITKALIEKIDIEPVGKRSNKFDDSRIGEPLWRF

SEQ ID NO: 842 - protein, 546 aa, synthetic construct
MHEPVRAAIYARFSTELQNERSTEDQFDLCVAYARRENFRVVASFEDKARSGGSMHGRDGLREMLHAARAGEFEVIIVESLDRISRDMEDMSGIHKRLLFAGVKIIQVHGGEANTLTVGLRAVIGQVFREDTVHKVRRGMTGLIKQGLTAGGRAYGYRPDPANPGKPVIVEEEASTVLLIFQEYERGTSPKAISRRLNAAYIKPPRGALWSPSALIGSEERGSGILRNPIYAGRIVWNKVRMEKDPDTGKRVSRPNPSSEWQTAEAPELRIVSDELFESVQRQMQSRSYTKQEGNMAVQRRPKRLLSGLLLCAACGSGMSVAGVDKSGKTRLRCSAHTNSGACPDPKSFYLQDVEEMVISSLTKELASPDQIFSYAKAYMEKRHAEAVHENRRRTEIEARVKGIEKDNDRLLDWMLKGVGDGDALAAKMKAQGEEKKRLQVELQSMPEASKVVVHPAAISSFAQRLQAHRPKLEMALHMLDDMGELSRLIREVIKSITLDKSEDGAIKLAVEGWLTPFLESDDSRMKRGAVPLVAGEGLEPPTRGL

SEQ ID NO: 843 - protein, 617 aa, synthetic construct
MRVIPYLRWSSDKQNSGSTIPRQTQTITAYAAEKGWQLPPAEEWLRDEGVSGFKGHNLAITGELGKFTDKICREGGRDVVLLVEQLDRLSRKTSGEVLEWFFKVTNAGLTVAVCDNKIIVDQASLRNQNDQLRALLNDSERANHESARKVVLLQQAWAAIRDGMDVSVERPGTAIEVDYLASASNPVDVGIDITIKTRRSTDTYELSTLADGFTPTAGDFLEIKTLLGRVARKVHTSSTCPAWLELSPCRRFFEPNPARVGVVERIFTLYASGVAKVAIARILNGDSVPTFRGGDGWGASSVKALIDSRAVIGEYQHKSRAQDRTFGDPIPNYFPAIISNQLWQEAHAPRSGHKREGRGRSILVRNLFADIARCESCGAKMYFLRKPRKKSGTDDAYLQCATYFMNKTNADGSPRCTDKMMWHYRPIVDALLDTLLASALDDQHFSNDAEIAAINARMADQRRVVEDLGTQLDNMAGNMAGSLSERLRVRFDALEKQEADAKTDLVNLEEQMAIARGKVDPAIHVKRVAAIRGEIDQDNDDGLKARITIKNALNGLIAKMQFDAGAGFVNIALLASQRYIAIGSDGQVAVDMDLTGREPTAAEKPFLDAYKRRKANA

SEQ ID NO: 844 - protein, 535 aa, synthetic construct
MTRSNPIRAYAYLRLSVDKEDGTPQSIQAQRSSINDYARKNGITIVEEFADAGFSGQNDRRPEFRRMVAQAIADDHPVDAVLMFMLSRMARSARLFFEVTGKLEDAGVEVISITENFGTGRGRRIGRAITAVINEEQALDAAILTRKSRRENARQGFYNGGPIPFGYETYVARTDGEKERKKLAIVLAEAEIVKRIFEWADSGRGGRWIVRALNNGAYSLRGARFTNGNIAGILANEAYTGTYHDRTADDDGVRPDIEDAIPVACPAIVSREQFDRVASTRASRNPRALAPHVAAGTTLLTGLARCGGPGCTSGLTIATGKGGRYAYYRCNDRLNRGGSCSTRPIRREELDGIVVDAIERRVLAPERLRELLAGVLDLSAERHVARQAELRHLRAEKTRTETAMNKLLILVEDEIMSPRDPVFASRMAENKAKLASVSARIDVVEAQLVRGARQIDEHTVAKFGELLSAKLRDDDLTLRAQYLKLFVAEVRVSDTLIEIIGPTAALEAGVATGMPVKAEVPSFDREWCRLQDSNL

SEQ ID NO: 845 - protein, 509 aa, synthetic construct
MSTPTPRRAAIYVRISRAVKGTDKVGGQLAECRELAERQGYEVVPGAIYEDDGISATSGKTRPGWEQLLTDVEAGQYDVLLAVEESRFHRGVGDQQRLVVACLGADVTWHTVRDGIVNPADAAGEFLATLRAAMARQEVRRKSERQASGIRAAREAGKLVGGGVRPFGYLKQKKDRTKAHPVEGPEVTWAYAHVVAGGSLGSVARRWNDRGIKTSRGNRWGARNVQQVLLRVNNCGRYSDGHGRIREGVVGGWDALVDVETWEAVHARLHDSTRRLVPLSDPVWLLSGIARCVCGETMRTGNIKTASGDHPTYRCNLTKVTGAPGRHTTARCRELDALVRDELVRAVRDAATSAVGNVADGSPARLQALLETRRGQIRARLVELGDDLADVAIPRAMTRDAIAKLTAEQDDVDTQLRDLRAQSAHAFLVADLHAKLWGRADGRVSLMDAADVTRVLGERFDALELRQRQELVKAFLWVTVLPGRTPDRLVVKRLADLQPGETPEVLSYP

SEQ ID NO: 846 - protein, 474 aa, synthetic construct
MRVIGYARISRAMDDSTSLAKQRQIIERAAESRGWALVGIAEDEDVSATKSRLNRPGLTEARDAIASGKADAVLCWRLDRVARSVVDMGQLLDEGIEIVSATEPLDTTSPMGRAMVQIIQVFAELESSTTGERARATKAYLRSMRRWGGGPRPYGYRPEPSPDGVGKVLRVDEDEAAVIRRIFSDLLEGVPANRLARTLNAEGVPTATGREWKPASVLNIARALHVSGYLTERVAEGSRSRRPVVDESGSPVIAWTPLVDAATADAVRALVTSEALDEARSAATKAGLEGPRSLLYGLAFCPCGEALIRRVRKGTAYYGCRGIGEGSHVLVDAEKVDAEAVTQFLASFSGVEVVERVVEVSVSEALAEIETALAAASAETTSTATADLPTLFERIAALSAEKDRLTASEDRVTTRRTHTAYGEAWEGWTVEERREHMAALGVRVDVLPARRRGAWDPERVRVEADADYLTGQTD

SEQ ID NO: 847 - protein, 516 aa, synthetic construct
MYRPESLDVFIYLRKSRKDVEEERRALEEGNSYNALERHRKRLFAIAKAESHNIIDVFEEVASGESIQERPEMQKLLRKLEGNEADGVLVIDLDRLGRGDMLDAGMIDRAFRYSSTKIITPTDVYDPDDESWELVFGIKSLISRQELKSITKRLQSGRIDSVKEGKHIGKKPPYGYLKDENLKLYPDPERAWIVKKIFELMYNGKGRQAIAAELDRLGIEPPVTKRGAWDASTITSIIKNEVYTGVIIWGKFKHKKRNGKYTRHKVPEEKWIVYENAHEPIVPKELFDAANKAHSGRQRTSVISDKHLTNPLAGILKCKLCGYTMLIQTRKDRPHNYIRCNNPTCRGKQKQSVFYLVEEKILEALQQVIDEFQAKKKERVEIDETNLVSFKEKAIHLKEKELQELQGQKGNLHDLLEKGVYTVEIFLERQKNLVERISSIENDITMLREEIESEKMKEQNKTEFIPALKTVIEAYDKTPNIELKNQLLKTILEKVTYYRNPDWKTNEFEIQVYFKI

SEQ ID NO: 848 - protein, 537 aa, synthetic construct
MSKRKPKESAPAAPSKRAAIYTRKSTGKGLDRDFNSLDAQREACEQYIKSQAHQGWQLVETHYDDGGFTGANIDRPAFARLLRDVDAGRIDVVVVYKADRLSRSLLDFANVISRFNKTDTAFVAVTQNFSTADAIGRLTLNILMSFAEFEREMISERTRDKVAGSRKRGKWTGGPLPVGYASRDKKLVVVEREARIVREIFARYLRGDSVFEIARYLNESGRRKPVRTSRTGHVLAKREWDKGSVLRALKNPVYAGFMRFGGELFEGEHKAIIDRESFEQAAARLAANCVSSVPKVPRDDYVLSGRLFCVLCGSAMTPKSTTKRRTGKLYRYYQCVVKDKSGHDACRARPLPAAGIEAYVVERIRVVTAGGALARDVAARVEAHAARRRAELVAERTARASEIAARSADGRALLDTLAGLDASARRLVEERLGEIGRAVAEAERELAEAERALLALDEQQSEAQWTASTLEHFADVWKVMTPGNRIRLVQALVRRIEVNEPRQEIRVVLHDLEFEHSEDEHAEAGTAGAAQLAEVPA

SEQ ID NO: 849 - protein, 474 aa, synthetic construct
MKCIVYVRVSTDEQAKHGFSIAAQIEKLEAYCISQGWELVDKYIDEGYSAKDLQRPAFEKMMDTLKQGNIDVLLVYRLDRLTRSVMDLYKILKILDDNNCMFKSATEVYDTTNAMGRLFITLVAAIAQWERENLGERVRLGMEKKTKLGMWKGGMAPYGYKIVEKKLVVNDKEKAVVQEIFKQTTTFGFYTLAKHLTNKGFSTRKGGEWHVDSVRDIANNPVYAGYLTFNQNSKDYKKPPREQTLYEGSHEPIISKEEFWALQDLLDKRRNGGGKKHTSNYYFSTLLKCARCGHSLSGHKSAGKKTYRCSGKKAGKNCTSHIILEDNLTKTIFSMFDKLVGNIYNSTDSSNYSDEKINELTNELKNLEKLLDKQKKMYENDIIDIDELIKKSNQLREREKEINKELKSINRSSKTANEETKYIISNIDTVWEYSTDHERKQLMNSIFTQIVIDTKEEYKRGTGKPREIIIVSAK

SEQ ID NO: 850 - protein, 478 aa, synthetic construct
MTRAALYLRISLDQTGEGLGVQRQREDGERIAAARKWTIVETYIDNSISASKRTVRRPEYDRMVQDFEAGRFDALIVWDLDRLTRQPRQLEDWIDAAEERGLLIVTSNGEADLSTDGGRMYARVKAAVARGEIERTSARQTRASLQRSEQGKLPRGVRLTGYSTRGEVIEEEATVVRRIFSSFNSGDSIKGIADALTAEGVSPRHSSSTWHSSSVRTILTNAAYAGHVVYRGARTGQKGTWTPLVSEAAFDAAQRRLEDPRRKLNREGTARKHLGSGLFICGECKRPLQSNGPRYWCRLGGHITRSMAPIDQHVRNIISERLSQPDAASLFVTTDDHAARGLDAEVEALRGRLATIEDDYDSGTIDGRRYGVASAKVTAKLEDAERRRAALLEDDTLRSILGTQSPAEAFLTAPLDVQRAIIAALVFVRILPAPQGRRGFDPSTVMVLWRRTRFDQDPEHGTPVITEEAQRVLESLSS

SEQ ID NO: 851 - protein, 553 aa, synthetic construct
MKVALYARYSSDNQRDASIADQLRMCRLRAEKEGWTVVEEYTDHAISGASMILRPGVQALISDSLRGRFDMIMAEAMDRLSRDQEDIAGIFKRMTYADVKMFTLSEGEITHLHVGLKGTMNALFLKDLADKTRRGLRGRVEDGKSGGGLCYGYDVVKKFDDRGEAIRGDRTINETEAGIVRRIFAGYLDGKSSRTIAMSLNHEGVAGPQGSEWGPSTIHGNPKRGTGILNNELYIGKLVWNRLRYIKDPDTGRRVSRLNPESEWVVHEVPELRLIDQNIWDAVKARQSRLAYDVVETSPNPLNDRRRPKHLFAGLVKCGCCGGGYTMISKDLLGCATARNKGTCNNRLNIRRDALEASILNGLRKHLMDPALFKEFCTEFTREVNRLRIERGADLEGWKRELERTDRELDKIVDAILEGFPPAKLKDKAEKLEARKAELAEKLANADEPPPLLHPNMAALYAQRIGQLYENLQDVDGRGRAAETFRSLVDQITLMPDNGELAIVLRGDLGAILRFAAGKKNPDFLAEAEALDNLLSPGSLVAGVGFEPTTFRL

SEQ ID NO: 852 - protein, 568 aa, synthetic construct
MNAAIYVRKSTAQTGMSEDARSVERQKARAIEYAGRHGWTVQPHHIFEDDGISGAEFERRPGFQRLKETLRHRPPFRYLIVMDESRLGRESIETAHVLKQLSLAGVRIFAYLDDREVLVDGLMDKMRLAFTGLMDEGERYRAQQRTFDAMKRKALLGHVTGGRVYGYDNVEIASSTLDAYGRPKRDHVERRINDEQAAVVRRVFRLCADGKGMVSIARQLNDEGLPAPRNSQGRTVSWSPSSVRSLLFRRLYLGEVIWNKTKKRNPWGMQQQRKRPETDWLKISMPQLQIISEADWKAAHDRLAGTRAVYLRGTKGELWGRPASNLESKYLLTGLAKCGQCGGSLYVRSSSRKGGRALFYGCMTYHLRGKSACTNNLLTPMDQANEQVLAALERNVLHPEVTKTVVRKALQKFRTAEQGWKDRRDALLKRISAVDAENKRLVSAISAGGDIPALVEALKAANERKDGLVRELAEVNSYQHSEADYDELEKELQAHFEASWKTILTRQVGPSRQILRKLFDGARLPFTPTIDAEGSRYDFHGTASIGRLLPDRAKKVVSPTGFEPVLPA

SEQ ID NO: 853 - protein, 535 aa, synthetic construct
MQGTVVRDHRAGAGGDLPQARLSSYTLGMTHALPQRAGLYCRLSYAPDGSLEKVERQEADCRELSQRLSWPVSESHVFVDNSRSAWQRNRKRPAWDAMLQALDAGEIDAIIVYHGDRLMRQPYDLEKLLSVAERKGIRLASPSGVRDLDSPDDRFILRIEVAQACRESDNTSRRVIRALRARAEKGLTQVGGSRPFGYGLQVATRTVADQETGAAKEVPVYDTTQQVPEEAKLLKDAVDRLLAGQTQIGVVKWLNTQCTTTEGNTWTTKTFRDLLLRPRIAGLIEQDGLFMDAAWDGIITAERWQDVKALYQRNGEKYRYAGRDRVHLLSTVAECGGCATVMRGRPVGGKDKPRRRTRYMQYYCPGCKKVSRKTDAVDAYVQGRVLSLLQDGRFVAELRAAMETGAPGISAQITELEERKRKRTAELEELADDPDLDPVLAMRALASFDRRLAALRAQLTVSVEQRTVQRCVGMTREEWMAEPVDVRATVVKSLFRVVILPTSRRGPGFDPSSVRLTRRSLEAPAETGDQAASRG

SEQ ID NO: 854 - protein, 531 aa, synthetic construct
MSQFAIIYARFSTSEQRGFSLERQRKLGTDFATEHGWTVEKTIIDEGRSAFHGANRYEGASLHEFEIEARNGLHTGKVLVVENIDRLSRQGAKAAAQLIWGLNENGVDVATYHDAHIYRAAASGEMLDIFKLVIIAQQAHEESSKKSKRTTATWQKRMDAISQGAKNIPVPNMPLWVDRIGGKMVLNEQRAKVLNEIYDLYIDGVGIHKIVTILHARDEPSWTPPEQRRGNNGWFYSYIYRLLTKRTVLGEYVTNKGEILAVDFFPQAITTEKWNRAQAALAMRKGNQTTTKANYNRNLLQGIIVCGECGGGAHFRHQIDKGQTYTKKNGEVMTYKRNDHRRLRCDRARRKHNCSNGTILSYDVVEATVLNELLPQLVAKRTEAAAVATLREQLAEIVRLRDADQNRLDNLIGVLEEGGPKAIVQRVAALQQQIEDRSKSIDLAQKALGIEMSKPSTESDAASLRALEADLDSELDEVRTYARGRANMSLRRLLKRIVIMPTDCFRIEPDDFSWWLFDAKGTMIEGSYVLE

SEQ ID NO: 855 - protein, 490 aa, synthetic construct
MRAIIYTRVSSDPKGDGRSVESQESECRAICERNGWEVAEVLVDNDLGASRHSAKDRPQYKRLLNVLKPGDVLVTWEASRAQRDLATYVELREICAERGVLWSYSGRTYDLRQGDARFSTGLDALLAEREAEQIRDRVLRGKRAAALAGRPGGRPAWGYKRAINPNTGATDGWVIDTEAEPLVREVFDRVLAGESLWAITRDFTARGLKPPQLQRNARQEWKPQALRVTISSPTYAGWRTHQGEPLIDADGNRVRGRWQPYITHAQHERLLALFSDPVRRATSHRGHEPRHLLTGIARCGVCGSGMRYSNPPSHRSRAGRYLCEKRTCVGRRADAVDLLVEETILERLGRPDARKLFADAGNDAAVQALEEADTLRKRLASFLDEAADGKISAASLAALEAKLLPQIAAAEAKARATSSSPLVVKVAGPEAREQWQQFSVKDRRAVIASLLDITINRAVYGNTRRFDPRDLDIRFKRPRSAHRTDHAVKL

SEQ ID NO: 856 - protein, 492 aa, synthetic construct
MIYIYARQSIDKKDSISIETQIEYAKREVFNEEFKIYEDKGYSGKNTNRPAFEQMMKDMDIEEVSKVVVYRLDRVSRSIVDFGDFINSLEEKGISFVSATEKFDTSTPMGRAMLYIVIVFAQLERETIAERVKDNYYARVRKGAWGGGPAAYGFNLVRTVIDGKKATSYQPNEQLANVVKIFELYRQQYTSLADVQRFLVSEGILSAGGVNFDSAKLSSILKNPAYVKADIAIYNFYKSKGAIMANDVEEFDGVHGCILVGKRDGNERKYKDVSEHLLAIGTHDGIIDSQTFLACQTKLASNRQIKNTYKGKYSWLTGLVKCGYCGYSFSVRFGAVKEGRIPYFACSGRYLHKSCDAIQTHRVYDVEAFVENQLVNEAENIRLRNENTENHNQKDQNKKLMLIEEKINNLILSLENASSVTAEYINSRIEALHQEKQDIMKSFTHIPQKQNEIANFSDFDWENLSIEEKNKVARSFIEKVILTKNNVEIVFK

SEQ ID NO: 857 - protein, 496 aa, synthetic construct
MNNWWEVPDDLSDKDTGHIKAVAYYRHSAQDRQENSIPIQQDQVRDWAKNHGVEIIEEFADHGRSGLTSEGRPAFTDMMENWVKKRNDFQYILCLDVSRWGRFQDIDLSAQFSAECKKAGKQVIYTTIGKPREDDPLYPVYVQFERFRAAQYSKELSDKVWRGCVKISEQGYWAGGPPPYGLDRLLLDESKHPLHPLAPGQRKSIQNQRVTLTPSASDEARIVARIFDDFVNQGHSERQIAKALNREGILSPGGMGWSKSSVKSILQNEKYVGTIVYNRTTQKLKTPRRENPEEKWVRTPGAFDGIIESELFLKAQEIFQRRRDKYESENMLAGLQKVFENNDFLRPSLMRAAELPSAACYGQKFGSLDFAFQQLFTPLRNEARRDVEAKLQTVLGEVLSYADFLVLDRKLTLSLQPVVPTPHGYAAYWPLRRDSRAVIDLTLGVLLAEPAQLRILGYIALPKWIQTDRSFRVFCSSQNIELLGHRNLDFLTNLVQ

SEQ ID NO: 858 - protein, 517 aa, synthetic construct
MKSLIVREYLRVSKDSKGTGKSPDQQHDENVNAFDRQGWLLHPDPPYRDTDRSASRFARRGREDFKRLITDLEEDTFDADVLAIWESSRGSRRVGEWVDLVELCKERTVCIWVTTHGRLYDPSNARDRRSLLEDAVDAEYESDKSSERIQRDVRAAAEGGRPHGKNIYGYHRVYDQKTGELERIEPHPEQGPIVQEAARRILEGQSFYAVAKDFNERGVERRRPTRKQHRSNLGWTAPAVKQMLTMPAYAGKRQHRGEILGHVEAMWPALIDFDTWLKLQVIMSPPERKRTNDWPARYLLTGIAVCGVCGAPARIGKQNAGRRKDKVTGEPLPKPVDEHGNELPYPHYNSYVCVGVPGKTGFHVAMRQEHLDEVVTGLLLARLARPDFLTGGGEPGKDTDAERQAVLAKIAGYQKYLDDVRMEAAEKLRFDLLLDQEARIQPKIKAAQKRLEQLSEMDPLVLRLVQGGAILRGWDALELADKRRVIRAVVTPRINRVGPDSKGQRGINRDRVDPIWR

SEQ ID NO: 859 - protein, 573 aa, synthetic construct
MSIATIERPATRRENPGTSHVPGIDLTQFIDDVAGCRPEDLADIYVRRSKPKEDLATLTKHAWDMVEAAHREDRKVRAVWWEQRSASKTYVRRNELEAAMRAVLEGHSKTLYVRKLDRFDRRGMGTVGSMLDELDKRRARLRVVKEGLDSSVPGQRIIFAVLAERAREEAQDIAWRTQEGKDAHKALGEWQGGVVPYGLERDPDHKGRIRHRCDEYLVAREKIAVPLLNGESARRVAHRLNAEGIRTRNGKMWTATTVAKLAHSPLWAGLLPDRERIMDEHGNPTGRWKHHGRPYVDDKGQTVSVGSGVITKGERVIIEAKLASRTRPEGRGKRPPEYILTDTLRCGRCNGPMEGGGMLGRGGRYHCRMWSRQGKAACLGVITLRVRVDEAVTAMWWSHVSALEPGDAALDAIARRWVSIKDPEKDARRKEIVAELDAVKARISKLDHDHYVRGKLSEERYASLSEQQGRMQAALEAEQEELAKGSDLTALMADPETLREIWEASPLAERRELIRCALPRVTIAPAQRQGDRTPILKRLTPHWVDGPSTTTGKVAKVQVVRGEVTTEELGTAA

SEQ ID NO: 860 - protein, 573 aa, synthetic construct
MTKAYSYLRISSKEQIRGGGIERQLESTRRYAAENGLVLDDELRDIGKSGYHSAHVKDGALGLFLELVKTGKIDRGSVLIVESLDRLSRADVITAQSQLLQLLSADIDVVTLMDNQRYTRESDFTQLIISLTIMSRAHEESRTKAERTKAARARSKQMAIDAGGGVYVHNAPYWIDQIKQNDGTYRFKLNDKANVVRQIFNYYDNGLGATAICRMLNQNGIKTFKRNAVWSEPVIFKILRNETAIGSLTIGSKVLPGYFPACVDEVVYWRVQDLHKQRSESSPRKGRKGERFTNLYQGFVCCHHCGGPIATKRKGVGSHLQYYQCNTQFLNGDCRRDTKRKLMRLELIEKAILDNVLVYHLDNALSTNTGNVEKERSALVDDVTKFEKQISNSLVMAEMAENPEDIAVIMGRVNGLRQSVRSSKARIDELDRLMRETDADVNDRQAINQSIQDEIAKWPSLDKEALYISRSKVSHSLRKLVTAIRLDFDNQTAIVAVGGFIRFWVIQVDGTVKTDGDWSMLPFDILVHRAKEFFGDKIDITSMKSVYDRIDIERPPVALWDSERAAKGIAQNP

SEQ ID NO: 861 - protein, 577 aa, synthetic construct
MQVRGVTPFVSAVGAEKLDTVRVGVYARQSKARPDSSEASPEAQLAAGQMLAASRGWEVVHTFKDVGRSGWDPNAVRPEFEALMEAVRAGEVDVVIVNELSRLTRKGAHDALEIDKEFKEYGVRFVSVLEPFLDTSNPIGVAIFALIAALAKQDSDIKAERLRGAKDEIAAVGGRHSSSPPFGMRAVREKIGSLVVSVLEPDEDNPDHVALVKRMAAMSADGISDNKIATTFTEEEIPAPGEAERRATPKRMESIKRRRVSDKERPIQWRAQTVKWILSHPAIGGFASERVKRGKAYENVIARNLVGKPLAPHRGIIPGAQWLDLQEKRKAGTQPGRKSGGNAVPTLLSGWRFATCGVCDGALGQTPGNGDGSYMCANPKGHGGLGIKRSELDDYVARRVWARLENSDMDDPEDRVWVEAAAQRFALQKDLSSAQEERRETELHLDHVRQSIAELQEDRKRGLYRGRDELNTWRATLEQYRAYEDQCVARLTELEEEASATIRIPVEWTEPGEDPIGKGSPWASWDIFERRAFLDLFLSGVSVGRGRDPETRKYIAVEDRVTLHWRPLPADDETDED

SEQ ID NO: 862 - protein, 468 aa, synthetic construct
MAKTITVIPAKHKGSEGQSTVAKKRVAAYCRVSTDHAEQLSSYEAQVNYYTDHIENHPEYDLAGIYADEGISGTSTKKREQFNKMIEDCHQGKIDRIITKSISRFARNTLDCLNYVRQLKDLGVGIIFEKENIDTLDAKGEVLLSILSSLAQDESRSISENASWGIRRRFESGQAQINHARFLGYEKNSDGELIIIESEADTVKRIYYDFLDGKGSVQIAEELKEEGVPGWNGESKWRASTIERMLENEKYKGDVLMQKTYTVDFLTRKRMKNEGELPMYLIEDNHPAIIERDTWEAVQLEKQRRIAFVEETGSKKMTYNGDDYVFFGKVICGHCDSAFGRRTWHANDPNARRHVWLCKNRYVKGENRCRVKNHHVNDLDLAPAFMEALNELLSQNNIKKWTEAEEQADPLLAYKLDQFIDLARNQKGVVDYQPELVRRFLERVVVEDKQTLRFHFLDGSVVSPVTCS

SEQ ID NO: 863 - protein, 505 aa, synthetic construct
MRAAEYVRMSTEHQQYSTENQRDRIRDYAVRRGLEIVRTYADEGKSGLRIDGRQALQQLIQDVESGKADFQVILVYDVSRWGRFQDADESAYYEYICRRAGIHVAYCAEQFENDGSPVSTIVKGVKRAMAGEYSRELSAKVFAGQCRLIELGFRQGGPAGYGLRRILVDQHGLMKGELQRGEHKCLQTDRVILMPGPDSEVRTVNLIYNWFIDESLNEYEIAARLNGMNVQTDLGRPWTRATIREVLTNEKYIGNNVYNRVSFKLKKSRVTNPPEMWIRKEGAFESIVPSETFYTAQGIMRARARRYSDEELIERLRNLYRSRGFLSGVVIDETEGMPSTSVYVYRFGSLIRAYQTVGFTPGRDYRYIETNRFLRQLHPEIVAETEKKIADLGGSVSRDPATDLLTVNREFTACIVLSRCQAHDTGRNRWKVRFDTSLLPDITVAVRLDRSNSTALDYYLLPRLDFGQPRIQLADQNPIEFESYRFDTLDYLYGMAQRARLRRAA

SEQ ID NO: 864 - protein, 495 aa, synthetic construct
MPTIRSTTPRVAIYVRQSVDEEQGIGQQLDDCRAECQRRGWQIAGEFQDNDTSASKERGPKTAWAAMLKAFDSGEFDTIIVTETSRITRSLIDVLDIRPPRRDIRVVVIREAIDTEHDDFMLKQLVLLAEREVKIKGARAARYAATRRAAGHPTPGKPPHGYRWVPQIERDSTGIRYRIDDAEAEDVRQIFREFLAGAPLGQIARDLSEAGRLTRRGSRWSSSTVRRVLLNPVYAALLAPAQPSGKYDATAIDLEACTPGSWGAIVERDHLVAARSRLIGVAPNHSGTARKWLLSGLAVCAVCSTPVRSARGETHPTARIDGSGAAQTLRYHAYRCVKGHFMRNGDIIDEFVSEVCIARLSAPDALQLVSPRADRADIGVLHATREGLKTRRQSIARFVARGLMTDLEADDSLREIADEMRSISEEIARAIREDPLAELAEVDDVRAWWSDATLARRRLIVETLMTVKIHPVGHGRRVTNLDSAAETVTVEWSRK

SEQ ID NO: 865 - protein, 460 aa, synthetic construct
MVHVKAAVYLRQSVDKLADERAIDRQRKDCLALCAKRGWTPVEYVDNDTSASSRKPRPAYQQMLADIESGDIGAVVVWHLDRLHRKPAELEHFVDLADRHHLALATVTGDVDLSTAQGRLHARIMGAVARNEVEQKSARQIAAMRQLAESSRPNKTARPFGYTKDRQQLVEAEAVAVREGYAMVLAGVALYSIARQWNDAGVKSTYGNPWSGRTVREALLNPRYAALRSYKGEVLEGVSATWPAVVSEDVWRSAVAILTDPNRPGGARPRRHLLSGLAVCGKCRGLLSSGVKGRGDGGVYVCKHCFGVYRKADLIDPLVVDLVVGFLASPGAAELLIDRKRADLNDLRQQERALLQQLDQLAVDYDEGNLTGRQVKIATERKQQRLEAVRAEMRDANKSRVFDGLIGVANVRKVWDNLSLDRQRAVVSTLMEVTIKPIGSGRYHFDPDKHVGIRWLTGDE

SEQ ID NO: 866 - protein, 559 aa, synthetic construct
MKIAIYSRKSIFTGKGESIENQIKLCKEYCDIHYKNENLEYIIYEDEGFSGKNIKRPQFQNLLNDVKSKQINILICYRLDRISRNVADFSSILELLEKYNVDFISINERFDTSTPTGRAMVYISSVFAQLERETIAERVKDNMIQLAKMGKWSGGQLPLGYTSEKVHYMNEEMKEKTFIKLVPVDNELDTIQFIYNNFLTKGSILNVTKELNSHGYKTKTGIDFEITGVKRILRSALYVKSSEFVHEYLKSKKYNVFGEANGNGYLGYNKRTDKDNIIIAVSNHKAVISSTDWLSVQKKLDANIKRSKETSNRNGTGCNDTLFSGLLKCGKCGSNMVIKYNGKNKDGISYIYYTCSNKEKKYLTNRCDIPNLRSDLVDPIIVNNIKIYNKDILIKEYKNKLSELLENSDKQIINDLKSQINDKEKQARNLVTELSKTESEDVKVLYRAQIDEIIKEINKLKSIISSSEETQLQLKDTIMNIKHLIQSFIDFNNYFDNAIDINIKRTLLRNIVEKVTYDADKKDFNVNFFRIDSMQLDSASEPLDCNLYTSKRRRNCRFT

SEQ ID NO: 867 - protein, 601 aa, synthetic construct
MQAMTVAAPATVKYAFYGRVSTEDAQDPSLSIPRQLAACRRAIEATSGEVVAYYWDIESGRKELAQRGRGADGTPFGVAVPRDGGLADLRARVGNGCGFDAVIVESIDRLSRMTADATRIERELEQLDIGLFAADEPMVANATAILTRRVKQGVAEWYVRDLIEKSRRGMEESVRQGWHTGGPVPYGFALEPHEHPNPHKAREGKLKHKLVIDPIRGPIVLMVYEDYCVHGLGLGEIVDKLNRDLDRYPPPQRNRKDDNGLAQTWSRSQVRSMLRNPKYTGYNVWNRHDKRKGRPLIRAREQWIWSPLPTHEALVTRELFEAVEERARRNAIAARAPDQARPYSGRPRRAGRFYVLRGHVRCGMCGRRMEGSHQKGSNWYRCQYVTRRGSVAADIAGHPRVLGIKEDKVLDAVLDFLSERIFGPGRLRLLRAELASAASDSWREHDAELERLERERTDVDRSLRRQVLRLEEHDDPNHPVIALATRRIEELSARATAISEATTVLRAKRPAGASPDEIETMLDAIPDMRDALATADESELAEIFEAFDVTATYDKANARLELAATVTPELVEDQEKATAPRGRSRDFGIAGAGFEPATFGL

SEQ ID NO: 868 - protein, 496 aa, synthetic construct
MTRRSKSTPEPTSTRLLAYVRVSTQQQVDDGFSLAGQKAELQKWAAYQNLPLDENLIFEDAGISGRHNLRPGLEAMLSTLKPGDTVATYALSRLARGGAMQTLALVERIHDAGARIVFLKEQIDTTSPYGRIMLVVLSEIALLEIEQMRERSEMGRLQAANEGRIPLGSSSRPYGLEIDDDGYPVWDEERARTIRRLFDLRNQKLSLRAVAKALEEEGHPTRRGKKASWESGVVHLILRNPVYKGELIYRQDRERIVIPVPPLVSPEDWQRAQGGYAGQRSHVNPEKFPLTGHLVCTCGSALVGQFAPRAKAHYTPHLYYACLPEVRHTEHCPTNGKRRRLWRTDELERAYVEALAALLENPHDPLRIQAAFGAPLPEDPHVQERQDVNAMLEELLDLRLKGQVTRAAYERQFEILSDRLKRLNAPAPLPIRAPDVPDLSHLAQLVRGAKGRDLAEFLDELGVVGQARGESRGLSRSRDLPRPEITVEIIDFQPLA

SEQ ID NO: 869 - protein, 460 aa, synthetic construct
MKVAIYTRVSSAEQANEGYSIHEQKKKLISYCEIHDWNEYKVFTDAGISGGSMKRPALQKLMKHLSSFDLVLVYKLDRLTRNVRDLLDMLEEFEQYNVSFKSATEVFDTTSAIGKLFITMVGAMAEWERETIRERSLFGSRAAVREGNYIREAPFCYDNIEGKLHPNEYAKVIDLIVSMFKKGISANEIARRLNSSKVHVPNKKSWNRNSLIRLMRSPVLRGHTKYGDMLIENTHEPVLSEHDYNAINNAISSKTHKSKVKHHAIFRGALVCPQCNRRLHLYAGTVKDRKGYKYDVRRYKCETCSKNKDVKNVSFNESEVENKFVNLLKSYELNKFHIRKVEPVKKIEYDIDKINKQKINYTRSWSLGYIEDDEYFELMEEINATKKMIEEQTTENKQSVSKEQIQSINNFILKGWEELTIKDKEELILSTVDKIEFNFIPKDKKHKTNTLDINNIHFKF

SEQ ID NO: 870 - protein, 450 aa, synthetic construct
MEIHSIVPWMIEDSNIYIENLSVINTYLKSKRNSIDFKKYGSIIESFFYYSFVNTLLISFPFSYNKDADFWKGGKMVRRSSKKLTKKQERIRNAFESERTVEVIPAVVQNVSSGQQKTRVAAYCRVSTFDESQSGSFELQKQTYLERIQNTPNWELAGIYADQGASGTTIKHREQFQKMLEDCRQGKIDLILVKSISRFARNQLDFISIYRELKALPHPVGILIEDINLNTLDTKGELVLGVMSIVAQGESEQKSASITWSIIERFKRGIPIIPTHNLLGYTKDKYGQIVIDDSEAKVVRYIYDSYMNGRTAHEIADALMEHHIPTVTGLENWSTLAVNNILRNEKYKGEIIMQKTYTVDCFSHKTRKNNGERPKYRLRNGIPSIISDSDWSLVQELLSQPRRRTKSAKVALVPKLYVKRVKSGILKDFIVLDSSWKKKEIQTVFKGEKP

SEQ ID NO: 871 - protein, 476 aa, synthetic construct
MRAAIYARISADIDGNSVGVDRQMAACQALAKKAKHRVTETFTDNDISAYSGKVRPGFEKLLAAMARSEFDVLIVWHVDRLYRSMKDLERIIDAAESGAVQIQTVESGNIDLTTSAGKMVARILGSVARQESEHHAERRRIANKDRALEGEWRREGSRPFGYLNDGTPLEPEASMIRLAATEILGGKSLHAVAREWNDSGVTTVRGARWTNLHVRRVLTNARVAGLRVHRGEIVGTGKWESLIPETTWRGLVAFLSSPERKNAVSFERRYLLSGVARCGVCKKPLYAAYPHGRDRAMIYVCKSGSHVGRNGADLDEFIERTVVAYLGGEGVGRDLRNAENNVDIAELREKRDALVATKDQLATLLRKGILDMAAVERESAVLTADIEAVNRQMADAVEIHPVAALLAADGEEPGDLDGAKLIERWKAATPDRKGKIIKALLLIEVNPTKRGGRVFDPDSVDVEWVDYSPKAAVSAG

SEQ ID NO: 872 - protein, 563 aa, synthetic construct
MSSTSEKLRVLGRLRLSRSTEESTSIDRQRETIQQWADAHGHTVVGWAEDVDVSGSIDPFETPQLGPWLNDRPHEWDVLAAWKLDRLGRNAIQLSRLFGWVMEHDKTLVSCSESIDLSTWAGRMLANVIAGLAEGELEAIRERQRGSRHKLRNSARWGGGKPPFGYIAVKNPQGEGWALEVDPVASKLIRRIVDDTIAGKPSTQIAAELNREGYLTPSQYYRARSAGYSTLLRSELPADLDVNPKQEPGKVRRRKVRTENPWTQTPIRNMLRSDAIRGYVHHKGELVRDDDGMPIQLAEPLVTLDEWELIQSTLDRRRDTNRAKRRVKLSPLAGVAVCLGCGYTLHHTRKVARGIEYRYYRCENKDISDIRADFLEDLVGELVVDEIGDVEILERVWVPGDSRETELREAIAAVDDLVRALSGATSSTVRDRIQKQISALDAKISELEATPARESRWEYKPTGGVYRDVWESSDLAGRRELLRRSGITVAVSLTGIDGKRSGDNSGTFEYRVDFPAELMANLGHPKDDEQLWKKISGSFIPVFERRSAADIVRTEATPSRDGA

SEQ ID NO: 873 - protein, 567 aa, synthetic construct
MDAKDELRVAKLRGEGFGYKSIAKEVGVTVDQVKYYCRKNDLTGNRSKIDVDEFAEINEIKKSEMNYRLSKMMVDYLYQTKVISTRERTNAIKRLLAYYEPIVDSWRQTMARNKEVIKINAHRYPKMKEVQQKTGKLRVAAYARVSTELDNQTHSLIAQKRYYSKLIKENEDWEFAGLFADEGLSGTSFNKRFAFLEMVEKAEQGEIDFIITKSISRFARNTVDTLTTTRKLKALGVGIWFEKENVNTLDSKGEFIITLMSSLAQEESRSISENVTWGQRKRFAYGKATMPFSRCMGYDRGPNGEFVVNQEQAKVVKAMFAMAVLGMTTAEIKKKLNDLGIPTAQGNKWDVTSGIKNILLNEKYVGDALLQKSFTVDYLSKKKKKNEGELPKYYVRDHHEAIVSREVFDYVGHHLPNQVVRRSNVPLSAKMFCEICGNYYGPRTWHAYKGSKERERVWQCQKRTACGTPHVYDELLGDGTRCSGEEFLDKRQDIIEVLEDFLGIQIGQYIGDVSSDRNDMAMIIEKIIVRKNRWLDFTFIDGSRFEYELGVWTPKGSPAGSPERAKK

SEQ ID NO: 874 - protein, 508 aa, synthetic construct
MKKAIAYMRFSSPGQMSGDSLNRQRRLIAEWLKVNSDYYLDTITYEDLGLSAFKGKHAQSGAFSEFLDAIEHGYILPGTTLLVESLDRLSREKVGEAIERLKLILNHGIDVITLCDNTVYNIDSLNEPYSLIKAILIAQRANEESEIKSSRVKLSWKKKRQDALESGTIMTASCPRWLSLDDKRTAFVPDPDRVKTIELIFKLRMERRSLNAIAKYLNDHAVKNFSGKESAWGPSVIEKLLANKALIGICVPSYRARGKGISEIAGYYPRVISDDLFYAVQEIRLAPFGISNSSKNPMLINLLRTVMKCEACGNTMIVHAVSGSLHGYYVCPMRRLHRCDRPSIKRDLVDYNIINELLFNCSKIQPVENKKDANETLELKIIELQMKINNLIVALSVAPEVTAIAEKIRLLDKELRRASVSLKTLKSKGVNSFSDFYAIDLTSKNGRELCRTLAYKTFEKIIINTDNKTCDIYFMNGIVFKHYPLMKVISAQQAISALKYMVDGEIYF

SEQ ID NO: 875 - protein, 465 aa, synthetic construct
MIAIYCRTSLDANENKVSRKIQLDEVLKTLKNQGITEPYEVFEEIASAKDIKHRPVLRSVLENIQGSKYTQFWSMSLDRISRKLVDLLYIFEVCKENNVLVNTVKEPLDQQNLMMRDLQIQMIGAVREYQRETIGEYLEIANKVKSEKGLWLNGSAPYGYSYSKGKVTVVKSEAKVVKKIFELYIAGMGYQKIASYLNESGIQYRKQKSFERYHIRNILKNEKYVGKIVNRFGEFNGQHEAIISDHMFNKAKKIRETKRNTYRKKIDYLGLTCICPHCGRRLSQVQKNENRYYYCSSEQLTNAHERYYVNATSLENKVKNALLDWIGQKDRLAKMKHDYRQKFVEFDSRNKNKLRYLESQKEAIYTKYYQDKVTVEELALTIEKLDKEIVSIEHNENLKQMELSSSQEVLRELAENIQNYFSENDWVNLVDKVELTTEKEVSEIYAHGIPLLDKSNSQFILSSKI

SEQ ID NO: 876 - protein, 455 aa, synthetic construct
MANEIKRVALYIRVSTEQQAKHGDSLDEQQHTLNEYVRQQGNMKVFKTYIDDGISGQKLYRDEFQKLLDDVKKGRIDTILFTKLDRWFRNLRHYLNIQEILDKNNVTWLAVTQPFFNTETAMGRSFVNQSMGFAELEAQLTSERIRAVFDNKIRKGEVVSGKVPLGYEIKDKHLVPNEKAEIVKEIFQYYLETGSMRATVRHLENHFNMTRDYQSVRQMLTNRKYIGELRDNKNFCEPIIDRDVFERVQLQLSKNIRMNKKRDYMFTGLLVCSECGCNYSATAVISRYVRKDGTTNPNERHLYRCTKNRNNAKKCSNKKGIYETTLEKFLLENIEKQAEELSVKMQQEPDVKKTKNTNDKIKKKIDRLKKAYLNEVISLEEYKKDREELEALLIPEPNNKIAKIDLNLLHNYSTAEFRDGYKQLTISEKSSLWRQVIKNIVVYPDGNLKINFLGY

SEQ ID NO: 877 - protein, 526 aa, synthetic construct
MQGRRVTTIPAVRDRFTAQPIHQTQKRRVAAYARVSTDHEEQLTSYEAQVDYYTGYIKSREDWEFVHVYTDEGISATGIAKREGFRKMVEDALAGSIDLIVTKSVSRFARNTVDSLSTILKLKEKGCECYFEKENIWTFDSKGELLITIMSSLAQEESRSISENVTWGQRKRFSDGKVCVPYSHFLGYDKGEDGGMVLNEEEAKIVRRIYGLFLQGHSPYAIARRLTEEGVRTPAGKEKWHSCTVKSILVNEKYKGDALLQKSYTVDFLTKKTKINEGEVPQYYVENSHEAIISPAVFDEVQHQMAVRHPGKNRLSYTGAFSSGIKCGDCGGWYGSKVWHSNDKYRKVVWQCNHKFDGGEKCTTPHLDETAVKALFLKAANAIFDERDTIRGDYETVKERLYDTSELEAERIQLQEEMNIVAEMIQQCVNENAHIALDQTEYQKKYDGLADRFDRIKERLEAVGFAITERVAKREKTERFLAELEKRDASLTEFNEEDWYSLVEYVTVYSREDIRFTFKNGMEIKA

SEQ ID NO: 878 - protein, 540 aa, synthetic construct
MTRQTTQKLITALYPRLSHEDTLQGESNSISNQKRILEAYAKQNGFSNLKWYTDDGFSGANFQRPGFQSMLADIEAGLVGTVIVKDMSRLGRNYLQVGMYTEMIFPQKDVRFIAINDGVDSAQGENDFAPLRNIFNEWLVRDTSKKIRAVKRSKGMSGKPVTSKPVYGYLMDEDENFIIDEEAAPVVKQIYSLCLAGNGPTKIARMLTEQEIPTPGTLEYCRTGSTRRYHPGYECKWAANTVVHILENREYTGCLVNFKTTTQSYKCSKIIYNSEDKQAIFENHHEQIIDKDTWERVQELRKQRKRPNRYDEVGLFSGILFCADCGSVMYQQRYQTDKRKQDCYICGSYKKRTADCTAHFIRTDLLTEGVTENLRKVTSYAAKHEARFMKLLTEQTEDGSKRRNAAKKKELEAAEKRIAELSAIFKRLYEDSVTGRISDERFTELSADYEAEQKELKEKAAALQSELSKTLEATANAEKFMKVVRKYTSFEELTPTLLREFVEKIVIHESEALDGKRRGKLRRQEIEIYYSFVGKVELPD

SEQ ID NO: 879 - protein, 506 aa, synthetic construct
MYKPFSQADYKPSDKPKALYLRKSKKSKGKTEAETVESQLKRLTEFCKEQGWNNYVIYNDYVAKSTDVNREEYRKMLKACLDGKHDLIIVVEESRLYRTVNEQTNVYEELKGTDIAILSIREGYIFPNDRNQFLTNIIRGAMNQQELENFAYRMNVKVLASAKEGVYVNKTPFGYFKDKDKLIPHPMESKTFRFIVDKVLEGYVIAEIIGQLNQLGYPTKSNKKWKDVGTITRMLANRVYLGESHYYSKMFDEDVIVRDTHQPLLTIEEFQKISNMIRSRSRNPQGIRYTKVNTVLDRLVVCGICGSRLPLHKSWTNKEGITSFQIGKCQKVIGEYNEKKCPNKSMSLNELLPHFYNAIESYKDSLREEIEGVEIDTTNDKKITVMNQIKDIKIRIAEIQTEIQNAKSYLIKGILSEADYVGLVPPLEKDIKELNETLEDNERLLTSLTDYDRSAVIQNAVDSLNNIENESIENQNRIYRLLFEHLELVNTVNEFEIRLTEKDVSN

SEQ ID NO: 880 - protein, 464 aa, synthetic construct
MKRAALYIRVSTMEQAKEGYSIPAQTDKLKAFAKAKDMAVAKVYTDPGFSGAKMERPALQEMISDIQNKKIDVVLVYKLDRLSRSQKNTLYLIEDVFLKNNVDFISMQESFDTSTPFGRATIGMLSVFAQLERDTITERMHMGRTERAKQGYYHGSGIVPLGYDYVDGELIINDYEAQIIQEIYDLYVNQGKGQQYITKRMVAKYPDKVKTLTIVKYALTNPLYIGKISWDGKVYDGHHTPIIDKSMYDKAQEIIARKAQKGGEQHGNQLGLLLGITYCGKCGAKVFRYVSGGKKYRYNYYMCRSVKKMLPSLVKDWNCKQPSLRQEVVEKKVIDSLKSLDFKKIERELKQVENKTKSKITTINNQISKKHNEKQKILDLYQYGTFDVTMLNERMKKIDNEINALTANIANLEGIKSESLINKLETLKTFNWETETTENKILIIKEFVERIELFDDEVIIKYKF

SEQ ID NO: 881 - protein, 429 aa, synthetic construct
MTTRAAIYLRISLDAAMDGLAIDRQRQDCEALAEQRGWDVVHTYVDQSISASKKDVDRPDYDAMVASFERGEIDAIICWDLDRLTRQPAQLEEWIDRAEEQGLKLVTANGDVDLATDGGRMYARITAAVARGEIERKSMRQSRAQQQRAEQGRWYSGGVRPIGYTSTGEIIPSEAAAVLGMFRAVERGNSMRDIARALSGVDQPGLPDIPTTPRHMHTVVTERNARRRAAGQEEKSVPDAQPWAYTSLHSILRNPVYAGYSTYKKAKRKGVKNKYRRVTHIVRDPDTGEPVKGQWEPIVTPDLWWRVQNVLDDPDRLTNKERRNTRRHLGSGLYVCDECGNPVHTHTDRYRCAACGLVRTHSVDDFVLAVIRARLGRDDLADLLPTADDDEVDAIDDELAELRAKLARVQADYDEELIEARDLKRAKPL

SEQ ID NO: 882 - protein, 481 aa, synthetic construct
MVHLRVAVYIRVSTQEQAQEGYSIKAQRKKLEAYALSQEWEIVQFYVDEGLSAKDMNRPELQRLLNNMEEGAFDCVLVYRLDRLTRSVLDLYEMIKKFEKHDIKFKSATEVYDTTTATGRLFVTIIASLAQWERENLGERVRFGLEQKAKEGKWALSTPPYGYDIENGYLKINDGEANTVKYIFDQYLKGRGMNQIVTDLNDNGTKTKSNSNWHQGSIRYILTNPAYIGTMRYNFRTNKENYFEVEDAIPPIIDKDLYETVQEIRNTRAQLHPRAANSDYVFSGIAKCKRCGAPLFGKTSKKVKGDKTYLSKSYKCSNVRRGMCDQPTITDSFLEEQFHKILSIWDFSKNIKKIQGTDLNTELDEQKLIRRQLSDVNKRRSKWQYAWVNNMISDEDLSKRLQEETQKEEELNQKLELIQGMNNNSKGPSKQFINDMVYTWNKLTAKDKKKLLHLTVKEFKVDKISKKRLPTSVEVSDIIFN

SEQ ID NO: 883 - protein, 529 aa, synthetic construct
MYQAGIYCRISIEEQNKEGEYSNSIHSQIQMARDYIAENKDIAEKKVYVDDGASGSNFERTEFRRMLADIELGVINMVIFKDVSRLGREHIDTNYYLGKYFPEKQIRIVSILDNYDSAVGTYDEMLEIKTLLNDMYLRDTSRKIKTTIQTKRSMGEYTPKQPPFGYVKSKTIHNHLEIDPYAAEVVRRIYRMYQNGFGCTVICRTLNEDEIPCPAKYKKEVLKTNYVWDSGKGLWTSSTVSGILKNPVYTGAVVIRKHERPSYKLKYKKAIPLEEMELVPDAHEAIISKEEFDRVQQIRKGRRVSYFDKNNEPHKYVGLLFCGKCKTAMRKRYLASHKDYDGYMCGFHQKQGQNYCELNHITFEKLDELVVFAINQQLKQMKMDMKNLETQIRQKQPELDGKIAKLQAKIERNLEYRKRAYEQFMDEVLSKEEYLELKQMYETENQKYQKELSELNHEEQRQRAAVNETKIWLEHFNRRRITVKQLTREALVELVDKIYVYPEQKIDIYFKFASVESSPDRILEKDGVI

SEQ ID NO: 884 - protein, 512 aa, synthetic construct
MRTNEHNFHNIEEEIKHVAVYLRLSRGEDESELDNHKTRLLNRCELNNWSYELYKEIGSGSTIDDRPVMQKLLTDVEKNLYDAVLVVDLDRLSRGNGTDNDRILYSMKVSETLIVVESPYQVLDANNESDEEIILFKGFFARFEFKQINKRMREGKKLAQSRGQWVNSVTPYGYIVNKTTKKLTPSEEEAKVVIMIKDFFFEGKSTSDIAWELNKRKIKPRRATEWRSSSIANILQNEVYVGNIVYNKSVGNKKPSKSKTRVTTPYRRLPEEEWRRVYNAHQPLYSKEEFDRIKQYFECNVKSHKGSEVRTYALTGLCKTPDGKTMRVTQGKKGTDDDLYLFPKKNKHGDSSIYKGISYNVVYETLKEVILQVKDYLDSVLDQNENKDLVEELKEELMKKEDELETIQKAKNRIVQGFLIGLYDEQDSIELKVEKEKEIDEKEKEIEAIKMKIDNAKTVNNSIKKTKIERLLSDVQSAESEKEINRFYKTLIKEIIVDRTDENEAKIKVNFL

SEQ ID NO: 885 - protein, 587 aa, synthetic construct
MKKKKGVIYVRISTDKDEQKSSLEIQEESLKNICESKNIEIIETYADKASGTRIRKRNGFIEMLYDGGIDFKIRNDRSADDFTINKDRKPRFDYIICKDIFRFGRNSNEAMQVIKELKDNGVIVYFINSAVDTSADDYKMRLELLFTIAENESHNTSRRIRFSKRHLAQNGKYSPARLPYGYKRIIDKNGEKQIVIDEEQATIVKLIFNKYYEMGGNKLSNLLNNEGVLTQQGHQWSNDKITRIINNTCYYGSPIVQKWTKADVTDMYFHKADVSHHIQLDNVIPAIITKNEFEVIQSIKKSRTNSNSNKGKYNGKDDIFYEKVFCIQCGSRFVRHMGYKNKTTYMCQKRRKYSVKSCDCKGIAYNNLVNFVNQSQIRINDLRHGGQLMHLNKNIKKAILERKLVIEDIQQKIIQIKNKIEAITDSFIDANSTMRKSLNKKMEQCESEIVGLSNQIEQLNITDIEQIKQNVQQKEIVINKLRKKKEYSFDEKIKLLKKIEVGADFIEVIFISPDYDDEIERFNQLFRGTELEIKLCEPIFLGETIIRNKQLIEEQRESILNYEEAPFEEILFRKEVAKHEERIKEKS

SEQ ID NO: 886 - protein, 541 aa, synthetic construct
MQSPKVYSYFRFSDPRQAAGSSADRQLAYASAWASKHGMELDATLTLRDEGLSAYHETHVKQGALGAFLRAVDEGRIPAGSVLIVEGLDRLSRAEPLLAQAQLGQIVNAGITVVTASDGREYNREGLKAEPMNLVYSLLVMIRAHEESDTKSKRVKAAVRRQCEAWVAGSYRGRIVSGKDPQWLTWGGDSWQFIPERVEAVRFALDAYRSGIGAARLVRLMHEKGMVLSDWGIAAQQVYRLVRLPALRGAKRISIDGEDFMLEDYYPRLLSDEEFSELETLVGQRYRRRGKDEIVGIVTGIGITRCGYCGTALVAQNLMQRVKADGSLADGHRRLHCVSYSKNGGCNAGSCSSVPIEHAVLAYCSDQMNLQRLLEPSSADEELRPRLAEAQQRVAEVERQLQRVTDALVADDSGAAPLSFVRKARELEEELERRRSAVRVLERELVAMASSVPVAEASKWAELAEQAKSVSNVEAREQARQLVMDTFERIVVYMRGVVPEGRRSKYIDVLLVSRAGQSRWLRVGRRTGTWSAGGDWNGSAP

SEQ ID NO: 887 - protein, 463 aa, synthetic construct
MKVAIYTRVSSAEQANEGYSIHEQKRKLISFCEVNDWDRYEVFSDPGVSGGSMKRPSLQKLFDRLEEFDLVLVYKLDRLTRNVRDLLEMLEVFEKNNIAFKSATELFDTTSAIGKLFITMVGAMAEWERETIRERSLIGARAAVRSGKYIKVQPFCYDLVDQKLKPNQYAEYIRFIVDKLLSGKSANEVVRLLESKKKPPGITKWNRKTVLGWMRNPILRGHTKHGDLLIKNTHEPIISEDEHSKMLDIIDKRTHKSKTKHNSIFRGVIECPQCQNKLYLVSSIQKRANGGSYEVRRYTCATCHKNKEVKDVSFNESEIEREFINTLLKKGTDNFMVNIPKPKDYDIENNKEKILEQRANYTRAWSLGYIKDEEYFVLMDETDKLLKDIEEKESPRINIELNEQQIRSVKNLLIKGFKMATAENKEELITSTVDLIKIDFIPRRLNKEGNINTVKINEIHFKY

SEQ ID NO: 888 - protein, 497 aa, synthetic construct
MSKIALYIRLSVEDQMKKDESESIINQRQYLNDYLNRNEEFKSFQREEYIDDGYTGTNEKRPSFQRMLEEVKFGKINAIIVKDLSRFMRDYIALGDYLENIFPFLGIRFIAINDGYDSAKEKGNGTDLDIQFKGLLYDFYTKDISQKIKSVSTELKKQGKFLAWSPPLGYMKDPADKHNIIIDEKTAWIVRKVFDLALSGMATRKIAAVMNAENIPTPNERKKELTNMDYEYNIVYSGNRKNPTWTNGTVTDMLSNENYTGTYVFNMQEKSVLTPGSFKFHPKEEWGRVYNHHEAIISQEEFDNVQTIKESRRFIKGKNTDYPWRQHSPLQGFAKCPTCNHVLGFVQSKRPRLDGSVRVHKYFHCRICKCNNVEHKNSRAEKLEERVLALIKERYGEVKLEQKDKTSIKDLEKQVARLKAKKTSDFEKYKLGKMTKLKFIESKKSIDKELESLSERIDELSKQVEVVKDNELTRELMEKYIDSVLCEGSIVQKIIWK

SEQ ID NO: 889 - protein, 506 aa, synthetic construct
MSRRTLPNLRVVTAPLRAALYGRASSDPKKRGRSIKDQFEVGELECEDRGWLVVDRYEDRDRSASRKARRDREDYLRLVADAEAGLFDVIVYADSSRASRNMRSSIDLRELCEKTGILLCYGSRVYDMTVAADRKEFSRDALQSEEEAEAIIVRAQRTARLNAHRGSPHGKIPFGFIRRYDPESGHLIGQAPHPEHADVVVELFARAAARESLDSLTTELRKYVPDASRAGLRYLLRNRAYIGVRAHHGQDMAKCTWDPIVEEGIFLDVQDVLADPTRRTQRDSRVRHLLSGIAECAVCLAAGTEDATLRVKSISGALRYRCATGSHVTVRKEMFEAYVEAALWRWLSSAAAVAAFSARSDGAQAEKLRTKIKNMNKQLDTAREQAGEIDDFGVPALSIESLAATERLLLPKVAEADELLRALTSAQDPLIARLVGAPHEDISEAWNEEMTLSQQRHVLRRVVNVELRKASTRGVQRLEAGRIGLTFAGEEGFRARLQRGSAAPVR

SEQ ID NO: 890 - protein, 485 aa, synthetic construct
MTSSSLPRNVVVLCRISDDKAEEQKGVGRQEDDCRERAARLGWNITEVVVENDTSAFKRRRIKLLDGTTALRVIRPGFRRVLDLLASGEADALIAYDLDRVARDPRDLEDLIDIVEARKAPVESVTGSLRLSNDAEVTMARVMVAIANKSSRDTSRRVARTHQQLAAEGKPGGGGLRPYGYQPDRLTVVEAEAEIIREIAASILADKTLYAIVHDLNDRGVPSATGGVWTSRSITSVVTKARVAGLRATGTGAATQIVGPAVWPAILDREAWEAVCATLATRGKGSQNVLKRWLNGCFWCSLCGAQLHGWQGGTRPRYWCATPRGGCGKIAIDALHAEEAIGQQLIDYLSHTEVLTRLRSLTDSDGAKTARQELAADEAQLKEMAGAYAQRLFTLAEYIEARKIVESRVKSARALLVAAAPRILRSLLAKDVAAGWEELDPAEKREVALAVLPDGWEVTPFAPAPGQRRIFDGSRIRKRELTTGA

SEQ ID NO: 891 - protein, 521 aa, synthetic construct
MSRTVTAIPATKKLRSAAVSSGVPARRWVAAYARVSTEMEEQTSSYEAQIDYYTTYIRSRSDWQFAGMYSDEGISGTSMKRREGFQTMIDDALAGKIDLILTKSVSRFARNTVDSLTTVRKLKDAGVEVYFEKENIWTFDSKGELLITIMSSLAQEESRSISENVTWGHRKRFADGKIMVPYASLLGYKKGEEGNLAIDETQAPIVRRIYARFLEGATPQTIAKELTADQILTPRGKQIWSPSTVRSILTNEKYKGDALLQKSFTTDFLTKTMKVNEGEVPQYYVTGNHEPIITPATWDVVQAELASRAGKGTSNTHPFANKITCSECGGSFGRKVWHSTSKYRRYIWRCNNKYKKIHRCATPHVTEEQIKNAFVAALAERVTNTDVLDDTMCLLDETVYDTHELETQQATLGERIEETITLMNQLITTAAATAHDPDDYDRRYHQLETRHRQLETEHQHITDKIDDLRHRRAQAIKVHVYLATLPPLAYSDQAWNTLVDHAIINANGAISVIFKDEQSAS

SEQ ID NO: 892 - protein, 475 aa, synthetic construct
MSVAIYVRVSTLEQAESGYSIGEQTEKLKSYCKIKDWDIAKIYTDPGYSGSSLDRPAIQALISDCKAGFFDAVLVYKLDRLSRSQKDTLYLIEDVFNANNIHFMSLSENFDTSTPFGKAMIGLLSVFAQLEREQIKERMQMGKLGRAKAGKISAWANVPFGYVKNKDTYDIDPLRSGIVKRIYKDYLSGKSITRIMQDLNQEGHIGKDALWSYRTVRQVLDNETYTGRTKYRGQVFNGLHKSIITKDDWDEVQRLLKIRQLDQAKKSNNPRPFQARYMLSGLLKCAYCGSTLAIAKSHTKDGPLWRYVCPSHNVRKYRNGGSAAHYRIAPINCKFKFKYMSELESAVIHEVKKIALNPSAVISSQDDQPEIDKAAIKAQLKKINRQQDKLVDLYLLSDDLDVDQLHKRADQLKEQAAALRAQLKPSDKNLESFKKTVKDAKEIEKLDYEHQKTIVKMLIDHVNVGNDGINIFWKI

SEQ ID NO: 893 - protein, 540 aa, synthetic construct
MKAAIYSRKSVFTGKGESVENQVQMCKEYAQRNLNIDEFIIYEDEGFSGGNTNRPKFQELILDVKKKKFDVLICYRLDRISRNVADFSSTLELLQDNNISFVSIKEQFDTSTPMGKAMVYIASVFAQLERETIAERIRDNMLELSKTGRWLGGQTPLGFDSEKITYFDNEMKERSFNKLSPVDKELNIVKLIYNKYLEAGSIHLTLKYLLSNNIKGKNGGDFASTSINDILRNPVYVQSNDLVFEYLKSKGINISGNPNGNGILIYNKRNSKFKHKSMELWIAAVSNHAGIIPANRWLAVQHFLDKNSKKESPRKGTSQKALLSGILKCAKCGAPMRVSYGKARKDGTRNYYYICTLKAHSGKTRCDNPNVRGDHLENEVIKYIKTLNTDFIIQELTAYKKEVAATETTSVLKNIKNDIKIKKNDMNTLLNQLSKTESSVASEFILKKIDELGKEIKDLEAKAQNADNEKKENDLSILNIDIVLDSLKEFNMFFDNINDLKNDDYTIRRKRYLLEKIIDKITFNGDTQEISIDLWGSKKK

SEQ ID NO: 894 - protein, 472 aa, synthetic construct
MTIGIYIRVSTLEQAKEGYSISAQKERLMAFCSAQGWENYKFYVDEGVSGKDTKRPQLQSLMEDMEEGNLEMILVYRLDRFTRSVLDLHKMLELMDKHNCVFKSATEPYDTSTAMGRMFITIVAAMAQWEIENSSERIKMALEEKVAEGQRVGNVPYGFDLTSEEKLIANDKAPVVLDIIDKIKSGWSATSVAEFLNKTNNDRVWRPTTVLRVLKNPALYGATRWNDKLYEDTHEGLITKSDFMKIQQMLDDRSIHHRRNVKNEYLFQGVLSCPTCDRFLSVNRYIRKRRDGTEYQGAIYRCQDCRKKKGKFNKSPGENRFLDALYRYMKSIKIDHLDSAAPEENKNDMIKSQLQQIERKREKYQRAWASDLMDDDEFKKLMDETKEPYEDLKKKLSETDQPALIDKDKVKEIIFTFNENFELLTQEEKKAFISSFVRRIDFKVIPQPPKDPAKTKSKYGKDLIEITEVVFY

SEQ ID NO: 895 - protein, 540 aa, synthetic construct
MNLPAPRRENSTAHALRIVGALRISRYTDASTSPEVQEETVTATGTRMGGTFVGWAKDLDVSALKTTPWEREELRYWLDRPDEWDVLIWQRMDRAVRSMADMADLGRYAKQHGKRLVFASGPGGDKLELDFSSPMSELIMLILAFAAQLEGQTIMERNQGAAAHLQSLGRWPGGVVPYGYKPGRRTFADDNEGWWLFVHEDPEDPAKSTADIRRSMVARAIAGRNYSEILRWLEGMEAITPKNHRAMLATPPRKADPESTWQLTVVRDMLLSPVMRGHLVKRDGTVVRNADGSPVLQGEALIDDDTWYRLQDALKTLATGSSAPRRKDGHPLLGVLVCGVCEQNMFVNWYREKKGSRAGVKKEVFRCHGKQHAKGVPALSIQAAGVNAYVEEQFLAHMGPFRRTQVVRVPGVDHRAEIADLAADVEELASRLGHLRGPAADVVMKQLQARSDRLEELERLPVVPAQEKVVELDTTWADDWHETHDRMARRSMLQEAGVRVTVWPPERWRAPVEERLTFEIGIHVDPEADALEDAAYQARL

SEQ ID NO: 896 - protein, 575 aa, synthetic construct
MPNAVRYHRFSTKRQDKGSSIDRQNELTHALCERKKWNVVETLEDKGQSAWKGDNLRVGELGKFKDRVDAGEYETGTRLVIENLDRLSRQEVKFARRWIEDITDKGIVVAVCTPEIEIDSDSLSGSNLVSMIQYLLEAQRSTGESARKSEMSKKTVANGLKLARKGIVYSPKAPEWLRGIKGDKFEVIEERAAIVRQIYEWSASGLGYTAIASRLTATVEPWTKPSKRGHHWKLGYIRDILTLPLVEGEYHPKTGNDKTPTGEVILNYYPRIVDADLVQRARAAIRRRDGTGGAGRREARNLFAGTVKCGHCGDAMVRIVQRNQQKTLYEYLKCTRFNAAGAPKPEDDAETRAKRCTNTTMFRYDLFEKAALQEILHLALDNSFFVKTEDISPLAGKVADLTKAVELLERERANLMGFIRKYGEDADTERDVNEVRSKLNKARVDLETAQAALDEAKGKVSPDEHLRRVLEVREAIHSKDQEEQEQARRKVRDAIQAIVTIVMCRSSAPLPGKKIPQRKIEMTLAGGYMAYEFDGEGKLLQKVSLQGIPDMMQGIAATDGGALVETIRNRRIQNA

SEQ ID NO: 897 - protein, 505 aa, synthetic construct
MSVRPLRLPSRAGNRAVLYLRQSTYREESISLEVQEHSAREHCARQGYEVVRVEADPGISGRSWKQRKGVQAALGAIEAGEADVIVVWRWSRLSRSRRDWAVAADQADLAGGRIESATEPNDQTAAGRFARGVMTELAAFESERIGEQWSEARAHRVARGLPSTGGPRFGYRIVDRAYVPDPVTGPVLAELYALYLGGQGSSQLTRMLNDRGIPHGRTEGRRWAYQDTLRVLDAGFAAGLLVKTAPRPRGQSNVGQKHLPVWEREFRPGAHEPLIDRATWDAYVAARRARTKTRVRRGAPMLSGLLVCLDCGGPMHGNTYQGRQLYVCSRGSTFSGHRQVSIFGSMIEPGVEAWLFEMADDLSTRAAAVEQTAAHAERVDMTARRAQQQLAKIDERLLQLTLRLADGTITESAYRLAAEALEVERADATDRLHRSRRNPVREAAPAGVSRDLVRQWPSMTSEVRNAVLRPLIARIEVRPALHRGERAQRWRIVPAFEADVEADSQ

SEQ ID NO: 898 - protein, 441 aa, synthetic construct
MEMKNARLYARVSTDEQRKKEQSVPDQLEALKEYCQEHNYNIKGIYHDDGISAATIDKRKDFCRMLDDLQQNEVILFTKLDRFSRDLLDGNLLLKRFAPLNVSFKAILEPDIDVTTADGKFRFDLMVSLAERERKIDSERILFSFERKVARGEFLGGRLPIGYIKDNKRAVIDPEKAAFVKDIFETMEIEQNTFRVMKAMNHKYGLNKDKKYYYRKLIDQRYTGVYRGKTNVFPQIISPNQYDNVQSILQGRYIKRGPSRRDYIFSGLLLCSQCGRKLAGSATSGKYKIYKCSNLQKGEKMHCCFAEKKLEKKILPKIMPLLQKYLLDLEASEAKVSQNRDIIQISKQKINRLQDLYIDGKIDKDTFDRKYADLNEIISAEEQKSNIVSIQEAKQRYTQLLDMDIENIYSTLNDNEKRKLWHSFIDRIVIKSYDEIDIFLL

SEQ ID NO: 899 - protein, 449 aa, synthetic construct
MKAALYIRVSTQEQVENYSIESQRERLKAHCVSKDWSVYDTYVDGGYSGATTERPALQKMLKDLDKFDAVVVYKLDRLSRSQRDTLELIEEYFLKNNVEFVSVTETLDTSTPFGKAMIGILSVFAQLERETIAERMRIGHIKRAEAGLRVMGGDYDPAGFKRHNGDLIPIEVEKKHIQDAFNLYEELHSITKVQGELKRLGYDVWRFRRYRDILSNPLYAGYVTFAGKTYKGQHEQFISEEQFQRVQTLLSRHKGHNAHKAKKSLLSGLIVCKKCGENYHTYQSNDKGRTYRYYICRARRFPSEYENKCMNKTWNYKKLESLILDQIHNLSYTKQLVKIATPKINYDKQLKKLDSKIEKLIDLYSEDKIAKEILDKQIDKIDLEKRQIYEAINAQDRLFENEISAEQLNEYFIDLTTSDFEKKQAIIEKLIKQISIDGDNVDITWNFNL

SEQ ID NO: 900 - protein, 489 aa, synthetic construct
MLKGVTYNRFSSNMQREESIDAQIRFNHDYAKRNNIEVMKDYIDEAISGKTDDRPGFQKMLEDAKLGMFDVVICHKVDRFARNRIESAINKYNLRKCNIKVLFSGQAIDDSPEGQLMEGILESFAEYYSLNLAKETMKGLRENAYKCKFNGGYVPFGFSIDPETKKYLINTNEAPYVQMIFKMFVNGTKYKDIIKTLDDLGITTRFGRKFTEPTLHDLLCNEKYAGIYTFNKRTSRSIDGKRNGRLKKSDEEIISIPGGIPQIIDTDTFIQAQEKLCLKKRTTRAKEIYLLSGLIYCGSCGKPYCGNRKHNGFGKIYTMYRCNGRCENKEIDKDFLEEMVFTNLINNIFSKKALKELSKKLNEYLKSKRQSENKKLEVLSSKLKEISFEQNNIVNAIAKGYDNPIFKKRLSELDAESKNIKYEYDILKIKLDSQAITPNRIDKILQDQRTYVLNKNLVEVKKFIASYVDSIIVYENDIEINLKFDSIPI

SEQ ID NO: 901 - protein, 536 aa, synthetic construct
MTRAALYARFSSDQQKDRSIADQISLCRDLCAREGMTVISTFEDRAISGSAAVNRPGFQALMQAAESRLFDVIVAEDMDRIFRDQADYHNVRKRLDFLGITLHTATGKIGTIDGALRALMSEQFIENLRVHTRRGLEGVLRDGRHAGGRAYGYRAIKDKPGELEIVEDEAEIVRQIFSDYVAGKTPRQIAHDLNNRSVRPPRGRLWNGSTINGNVARGGGMILNDLYAGRIVWNKVRMVKDPATGKRLSRPNPKEQYRIVEAPHLRIIDDATFKAAQGIKAERRRDATPASAQRARAPKRVFSGLIRCGSCGGGMSSIGSDRKGLRLQCSAHRESGSCDNGRRIYLSDIEALAIKGLRQHLAHPEVIAEFVDAYNAERKRLKKEASTERARLERRLGEIEREMRRIVDSIVVTGMPPEQFVARMQELEAEKTKVMAGLERAKETDNVIALHPKALDRYKDAVVELADELKRGTPTEFATVRELVTAIIVHASPSRPGGAGTRANAEDDRNVRIDIKGRLAALCGNPALFPNMAMSG

SEQ ID NO: 902 - protein, 493 aa, synthetic construct
MGESLRALVGARVSVLRGEQKVSHIAQKETGTKWVTDRGHTIVGTFEDLDVSASISPFNRRDLGPWLTAEREHEWDVVVFSKIDRMFRSTRDCVRFAEWAEEHKKILVFAEDGMTLNYRDKDASGSIESMMSELFIYIGSFFAQLELNRFKSRTSDSHRVLRTTARWAGGTAPLGYQVVDHPDGKGKVLDTDPDGKALLHDIAGKLFDGWSLIRIAQWLNDTGVPSNRDKARIVNGKEAKERPWAVSTLTRTLTSYKTQGFKMHRQKPLLDASGEMIRMAPPTFDDDTWKKIQEAIALRQATKSRTNSPNPMLGIGYCDICGASLAQKFRRKGDVAYRYYRCGRSPVQCPGVNIRADEADETLENSFIANYGNENTSHKVFVPGEDNSHDLEQVRATIERLRRESDMGLVVTPEDEEIYLQRMKSLIERRTVLEATPVRPAGWATVVSDKTYADAWETEDHHKLLVDRGVKYFLISGTPRRFRLYVPELEGAT

SEQ ID NO: 903 - protein, 524 aa, synthetic construct
MGNGRRAAIYARVSSEQQERDGTSLDTQLAACRQYAAAHGYEVVAEYREVFTGVNLWDRRELTALREAMRRKEFDVVIAYAIDRLSRDPVHLGVILSEADHHGAAVEFVTEPLDNSPEGQLIRFVRGYAAKVEHEKFRERAMRGRRARAETGKLIHGPRPLYGYQWADADKTRLVVNPETAPIVQRIFREAAEGRPLRAIARGLTDDGIPTPTGKPTWSMTTVSKILKHPHYTGDARAWTWQSRNGYVRNHEAGLPLPEGTVPPLVDRATFELVQEQFARNQARAARNNRNPEAALLRGGYVRCGYCGRAMHVHKNSGKPAYRCNGREYRRGSCPMPVIAAHVLDAAVWERVEAILTRPEIVAEELARLQTDDPTAADLAAVDRLLQQVDRQRANLTQAIGLTDDPDAVAALMAELERVAARRRQLEAEREGILHRREAWEAARANLADLMSWCERVAERLGELTYEQRRLALDALGISVQVYRASDPDYPRYVITAKLPLDEVVFPSRVHYWPRSRWRRPRRR

SEQ ID NO: 904 - protein, 460 aa, synthetic construct
MDAVIYCRISQDREDGAAGIDRQEQDCLALAAEHGWNVIKVYRENNTSASAARRRPEFQAMLKHLATGTVGGLLFYHPDRAYRKLDDLVDLTSVCIKLKIQIHTVKAGRVDLSTATGIAVAEMSAVFAKLETARMGERIKRSKQQTAAEGRYRGGARPFGYKDGGMELEPHEADAIRTASTDLLSGTSLTRISRNWNDAGLRTARGGTWQATNLRKVLQRPRNAGLVEMDGNIIGPAAWPAIVTEDQLRAVTSLLSDPSRRTTTTYERKHMGRGIFLCGKCGASMRVFKLKTPTYRCVDQPHLSIQKSLADSVVSNVIIAAFNEQGVQNLIRRSAYPAVDVDALTAERADVSAKIDERTDMFDNGEMTRDSYRKSTARFRERLTAIERELASATVPEQLEDADQFDDFRDYWESISPDRQGKIIDRLLTVTILPVGSGAQTSAAKIERIQIEWKDQPTSA

SEQ ID NO: 905 - protein, 553 aa, synthetic construct
MKTNQQIAVIYCRVSSTAQTKRGDGLGSQKARCTEYANARGYTVVETFMDDITGKAVERRGMKAMLAFLKKNRSASPIVLIDDISRLAREVKAHIELRAAISLAGGTLESPSVEFGDDADSELQEYILATVAQHQRRKNAEQTKNRMRARVLNGYWPFACPVGYRHQRVPGHGNMLVRNEPLASIVQEALEGYASGRFQLQAEVGRFLESFPEFPRDRKGNVRSQQVTDILTRPVYAGYVGAPNWDVPLRKGHHEALVSYETLMKIQERINGNTRAPARKDLNADFPLRGAVVCGDCGTPLTACWSKGRMSYHPYYLCRSRGCESYGKSIRRDVIEGQFVDLLKGMQPSANLLQAARAMFKDLWDHRLATGAARIKTLKTELAKVSEQVEQFLDRIADTTIPSVVAAYEKRIKGLEDRKIVLAENIAHCGRPLRSFDETLRTAFDFLASPCNLWTSDRLDDKRTVLKLAFADRLAYTKKEGFRTPHFSLPFKALADFERQDLRMARPTGIEPVSRASETLILSIELRAQRKEAVLYPVLRNLHEVDQFAGQTA

SEQ ID NO: 906 - protein, 492 aa, synthetic construct
MLFNNENIRHVAIYLRLSRDEENLGIEQILDNHRQTLIALCNENNWSHEIFEEVASSSTIIKREQMVKLLERVQQDYFDAVVVMDIDRLSRDEYDASDIKRILYQTETFIVTPYKMYDLSKDDDSLLLGITNLIASGEYKQILKRMRRGKEYAQKQGHWTNGIAPLGYTKDTKTKKLLPNERAKDIQFIFSEIIRGTTIPSLIRQLNNMGIKTRQGYDFKYNSIVRIVNNEAYKGTIAGNKTIGQYKPRPKEEWVMVHNVHPAIVDEATWDSANRIVNEYSFKAPRSKNRIYPTSNLIYCANCGKIQGCNNHKRLNKIYIKHCKCGNRSFYYNPVLAIIKEEVLGYKENILKALETLEEGKREDDSQYRKEKLFSQLNKSKRALNKINILFEEDEIDIITYRERKAKRQEEIRLIEEQMMALEREDKSVKIETLQEQIKSIEKLVDKWELLDGEGYSDEQVNRLLHGLISGILWSFKKGAESPTLTIIYNEG

SEQ ID NO: 907 - protein, 447 aa, synthetic construct
MIYGYARVSTVEQSLEYDALKQQINRLETAGAEVVLVDVESGRSDKRKEFNRLLKLIKEGKVREVIITRIDRLGRSDIDVIRTIQLFNDCGIILRILDAPIDVSSSFGRFSASQMAALADFESRLLSERTRHGMNYFRSQGKLQKACFGYQLNSDRKLEPHPTNFPIARKIIDLLLQGYSYGAISKLLFEEHGIEFSLSGLRHWVKNPAILGHTRYFTEMEYRRNPKNPRPPQITRNTHTAIATEAEINQIKRNTKTKPRLSGKKEKDYPLKGLLRCSHCGGGMYRVISRYKSGETHWMRCARHAQNVHFCPNKTNARLATLTQQVIERITQKSKEITEQSNVSDRNEESEALIDLKHQLAGLVALGSSNPAIVAAVQDIQAQIDAEEIRLRSASRIDADRLKLAWSYSQATFWESLDDSDLREAFRSFVEVVFVDSTGNVSSVEFA

SEQ ID NO: 908 - protein, 511 aa, synthetic construct
MESIAYLYARFSTKRQEDGDSLERQTLAAQEWCARNSVKLSDKTFEDLGVSAFKEGTRPALSEFIQATQTGRVHRGSFLLVEDDDRLSRRGWKVTQDLMHELVNLGITVVLLKTGRKYDADNIHDIGDNIILMVNADRAYKESERKSHLIRAQRKRARENRKVTGKLPAWIVRADTETGFDFNDKISVIRELIEVRSQGHSFQYVAKQLNAKNYTTGTGAKWSASGVRSIIQNHALYGAKAYFDTDKSSGRMNKHPIDIALDVFPLVINFEQWLSLQQKSKTGKGGRTSKRGAYSQLLRCGNCGSGMVQRTTTYKDQKRLYRKCISAVEGKCTQVEAVREPEIYLDKVLKDLTYKVIESGFVSKTPELKQQLETLEKTQDILIQNGMAEQLADLYVKMNEIKSLIDKSMEADRKSAEPVETSFSKILDIHDSTKRNIELRKLLDSVTFVLHAKVKTRSQWHVIIKQMNGYETSFLLDQKHGFGNTKIKFVANQEKLAKLESLIPEMEPWEQ

SEQ ID NO: 909 - protein, 528 aa, synthetic construct
MLDNSNVAPGKNKTLRCAIYTRKSHEEGLEQEFNSLDAQRESAEHYIESQRMRGWTALPDRYDDGGFSGGNMERPGLRRLLADIDAGKIDVIVVYKVDRLSRSLLDFMKMIDLFNEKGVSFVSVTQHFSTTDPTGRMFLGILITFAQYEREVIAERIRDKVAAAKRRGKYCGGVPILGYDVDRENKKLLVNPDEARTVQYIFRRFIQIGSAKKLGQELNEQGYRTKAWTTKKGKVREGSEWNTGHIYRLLNNRIYIGEIAHKDRSYPGEQDGIIDRATWDKVQASLADNKPVKISMARTKMVAPLKGVIRCGHCGCAMGPTYARKNGRHYTYYICQKDSKRTVSRCPLKRIPAGDIEQAVVEQLSAVFRTPTLVAKTYFAARDIEQVERERLFKQKAQLEMELSQAREQAIELMKPGSDQPGKAEMLTTVNRQAVELSKQLTHVSERCRAYRGNSITEQDVSEAFQNVEGFWEDLFPVERNRLIRLLVDKVEIRETGIDMELRTNGLTTLIAELAGLACEVTERRASR

SEQ ID NO: 910 - protein, 480 aa, synthetic construct
MQDLLPTAIYVRVSSEMQAGEDRYSIPEQIDRLHKYCDAQGWTIAKEYVDPGHSGSNLKRPAIQELISDAKNGFIRRVVVFKLDRLSRSQRDTMYLIEDVFKAHDVAFVSLSEMFDTSTPFGMAMIGILSVFAQLERENIKDRMSMGRLGRAKRGLWRGGSNTPVGYDFMDGQLVINEYEALQVREIFRLFIDEQLSFHAVSREMQSRFTNKYSTYNDSGSISTILRNRLYIGKIKYGTQEFDGQHQPIIDRETFERAQARIEEISRNTGEHWKNPYHGKHLLSGLIWCGNCGARYFCVTTKRKNGPQYRYYQCYTRNGSSDMRKADFCKNPNWRVEKLNAAVMEEIRRLCTDEKYFNRIARDGKKENNNAGKEKALQRELSSIEKQISRLVELYQMGVSVQDIATRIHDAQERKNKLTQELLSLNQQSPKNRRQEALTYIHELKWCLDADDVAAQRRLLDALVNKIVITEGGFEVDWKF

SEQ ID NO: 911 - protein, 554 aa, synthetic construct
MMNGFEYTGMDAILAGSFRAAIYCRLSKDDDLDGESASIANQRDMLETYCEKQGWEVVAVYQDDGYTGLNMERPDLKRMLKAIERRQINLVVTKDLSRLGRNYLQTGFLIEDFFPRHGVRYIAMNDGIDTMRDNNDIAPFKNILNEMYSKDISKKVHSSYLLKAQKGQFTGCLAPFGYQKDPEDKNHLLIDEETAPIVRRLFAWALEGHGPNYIRRRLEEEKIPCPTYWNRVRGLRNVSTKWEKKDPVNGRYIWDFSVIKDILMNPVYTGAIASQKKEYRFKIGTIGEKKPEEWIVVENQHEPLVDRKTFDIVQRKLKSRQRPRQTGEISLFAGLIKCGECGKSLTIRYTNDKHPKQIYSCKTYNAYGKQHCTQHRVEYDTLYSLVLNKIRECARAALMDGEAVAGKLTDTCEAEQKGQREALERSLTKDEERIDVLEKMVLRLYEDMVAGRISEANFNLLMEKTQAEQAELKAKVEEGRKKLADEIRLACDARQWVEAIQEYADITELDAATLNRLIKEIVVHESIDSDKTRHISIEIHFNLKPIPEVEQVTA

SEQ ID NO: 912 - protein, 597 aa, synthetic construct
MDATQSPKTAVLYLRVSTASQVNTDYDPEGLSIPTQRKICLAKAKQLGITIVDEYVELGRSGTKTVNRPEFQAMLERLHTRGDVDCVMVYKLSRLNRSRFDDAVTMMELRKANVTLISATENIDETPEGQLVHGMLAAVNEYRSAADGADIRIKLLRKIEQGGTIGPAPLGYLNIIETIEGRRINTIGLDPERAPLIRKAFELYATGDYSCEHLQQKLTDLGLTTRPSAKRPTPKPLAVSTIHRFLADPYYTGIVTFKGKQYPGRHKPLVSQELFDRVQEMRALRSNNTRDRVHFHYLKGGFLHCERCHRAGRRSRFVYTEAKGKGGTYAYYLCRGRQDGHCDMPYLPVSLVEDYVERHICTLSLDSDFTQRTEAEMTRALDDQQALIRQSNHAIARKLKDVAAKEGRLIDLVADGSLDTAAARRRLAELTQERQRLEQTKQTLDERLAIGRDVLTTSLHLLQDIGTLYRQSPDPVRGMLCQALFHTIYLDDTTVTTSTLKEPYSSLQAAATHDGRRSLTAPSSAGGGRAGQTKGTKANSGAPRRCKSQKQQHHTSVATTIPLPSDEHEQTLGSRITTEGSSKHEMAERGGFEPPVR

SEQ ID NO: 913 - protein, 505 aa, synthetic construct
MRCAIYLRKSRADEEAENKGEFETLSRHRSTLLKVAKEQQLNIVEIKEELVSGESIQYRPKMLELLDEVKQGLYDAVLVMDIDRLGRGNMQDQGLILETFKKSKTKIITPRKTYDLTNEFDEEYSEFEAFMARKELKLITRRMQRGRIKSVEDGKFIASKPPYGYKFVFNESGNKSMVIDQDKADVVKLIFNLYINGNGANKVANHLNALGLKTTTGRTWYDKGVRDIIKNKVYCGYVVWNRVERTKEYYRNRPAGEVLESKGIHEPIISEETWNKAQKMLKGNAISPTAVFKEITNPLAGLVVCKCCGHTMIARSASTTKTGYEKFLRCVNCSDNRGIKLDIVEEEIINNLNQFVINYKADFNGIEYSNSNNDNLASLNKILRTFENEASTLVSQKENLHNLLEQGVYDIDTYLDRSKVLSDKIEKNKTNINNIKNEILNEEESSLLIEGTIPLIEHVLELYYTETSFAQRNKLLKSIIDKVIYYRKPGSKKSKVEITIHPKIE

SEQ ID NO: 914 - protein, 430 aa, synthetic construct
MPVTITKNEPIPAIAKRERVAAYARVSCEKDAMLHSLSAQVNYYSQYIQQNPAWEYAGVYVDEALTGTKDSRPEFQRMLTDCKEGKIDRILTKSLSRFARNTVTVLESVRMLKSLGIDVYFEEGNIHSLGADSELILTLLASFAQEESLSVSENQKWRIRKAFEQGEVMCWRFMLGYRIEHGKVEIDPDGAEIVRDIFHRAIAEETYGSICRRLNAQGKTGALGKPFRSAHIRDILTNEKYTGNALLQKTFVRDHLSKRQVANKGELPQYYATETHPAIIDEATFEAAQAIVRQHAERRMDCARPQRSEFTTKIRCPICGQAYKRVTSNGTVGWNCSTYQDKGKRYCRGKKIPEAVLKALVADVLELPCYEAPEMEAQIDHIEVPADNHLTFFLKNGHIEERIWKDRSRRESWTPEMKEKARQNAMKRKR

SEQ ID NO: 915 - protein, 558 aa, synthetic construct
MLQTDKITALYCRLSQEDMQAGESESIQNQKLILQKYADEHHFFNTRFFVDDGFSGVSFEREGLQAMLHEVEAGNVATVITKDLSRLGRNYLKTGELIEIVFPEYEVRYIAINDGVDTAREDNEFTPLRNWFNEFYARDTSKKIRAVKQAKAQKGERVNGEAPYGYLIDPDNRNHLIPDPETAHVVKQIFAMYVRGDRMCEIQNWLRDNEILTVGELRYRRTGSKRHPRPQLNAWYNWPDKTLYDILTRKEYLGHTITGKTYKVSYKSKKTKKNPEEKRYFFPNTHEPLIDEETFELAQKRIATRQRPTKVDEIDLFSGLLFCGDCGYKMYAVRGAGTLERKHAYTCGNYRNRARNDMLCTTHYIRKSVLKELVLADLQRVTSYVKEHEQEFIETANECSAKAVQKTLTQQRKELDKAQNRINELNILFRKLYEDNALGKLSDEQFAFLTSGYDEEKKTLTRRIAELSQEIDNATERSADVKRFVALVRRYTAIEELTYENVHEFIDRILIHELDKETNTRKIEIFYSFVGRVDTGDKPTESISYFRQIGADVKSYAI

SEQ ID NO: 916 - protein, 553 aa, synthetic construct
MSTITKIQGYQHDVKQLRVAAYCRVSTDNFEQLESLENQRAHYQKYINNHPNWELAKIYYDEGISGTKMTKRNALKELLTDCHNHRIDLVVTKSISRLSRNTTDCLQIVRELQQLNIPIIFEKEHINTGAMASELFLSILSSIAQDESHSTAGNLRWAIRKRFASGKFHVSSAPYGYSIEDGNLVINHTEAKTVRQIFQRFLSGTSASQIAKELNQKQVSTKRGGQWRSNTVINILRNGNYTGDMLCQKTYRDDQYHRHFNQGELAQYLIEDHHPSLINHENFNRVQVLLKEAVKKRHIETGSHKYQQHYLFSGKIICGQCGTIFKRQTRPHKIYWACQQHLRSAQQCPTKAVSEASLKAAFCNMINKLVYSKKFLLQPLLEGLKEEANVNSDGQLISLTKQIKANDHKAETLTELMHAGLLDKAIYVNQTARLEQDTYQCQEKIKQLNGQNTDSANDFEDVRTLLRWCHQGKQLTEFDEGVFQEFVQQIVVNSSNKATFILKCGLKLPEKLNKNATIDGHFYRDIIKQRYNDPIKQAEYLYSIIESEGDLIG

SEQ ID NO: 917 - protein, 569 aa, synthetic construct
MDLYTVRKQLNMGMPLTSIKLRVTDYARVSTDHLEQKKSLQNQVEHFEQYIKENPNWTYVGGYVDDGITGTSDVKRDNFMKMIEDARSGKFDLIVTKEISRFSRNTLDSIKYTRELLSYGVAVLFVNDNINTVMPDSELRLTIMASMAQDEIRRLSERVKFGMNRAIERGEILGNDLLYGYKKDKDIGVLNIIEEEAKVVRRIYELYAVDELSLSKIVKTLNSEGLKTCQGKKWVISTISRMIENPKYKGYYCARKSEIVDYMTKKIKYFEKDDWIIYEDKTRIPPIIDEELWDRANTRLLKRKKTFSERKEDKSIYKNRYLYSAKIFCGQHNAVFHRREFRKNKKDITWVCSLYLKNGKTTCDSPNIRESELDAIFRDLISKLQIDLNEVIDILMNYYKHLEIDTGIDEEILSRERGINNLYDKKDKLLELSLQGSLSNTEFYERNNSFNEKIKVLENELDSLKNYKEKLKGTTDKTKELAENLKQKVKSKPTINKIISSLLERIVVSKICNNKNNMELNIYLSYKEDDEKKKLQPILRSSYEFKRGYDTRGTKRYKVYYQVNCYFCL

SEQ ID NO: 918 - protein, 546 aa, synthetic construct
MKIAIYSRKSKFTGKGDSIENQIQLCREYAYKHFNSSDDDIIIYEDEGFSGGNVDRPQFKLMMKDAKAKKFDTLVCYRLDRISRNIADFSTLIEDLQENNISFVSIREQFDTSTPMGRAMMFIASVFAQLERETIAERIRDNMMQLAKTGRWLGGVTPTGFDSKEVIYLDPSGKERKIFKLTPIPKEIQTIRLIYSKFLELDSLTQLETFCIQNGIKTKNDIYYSRFTLRNILANPVYAAADKDTYDYFTLNDYEVYTDLNEFTGKKGIMAYNKTIQKKNTSNKLRDSSEWIIAVGKHPGIIKGKDWVRVQNMIEKNKSKTFRKVKNSESLLSGILRCGNCDSFMRPKMGRVNKDGVQAFYYICELKEKSKREKCNMKNIKGNDLDNLVIEEIKKLSYKDSILSKKLENDNINISDSQSSLTSQIEELKANIENNDRAISNLVNSLSEGKDSGASKYIINQINELDAKNSKLKERLLDLKEKSDANIIKENNINLIDDIVERFADMIDTASVIEKRNLIRSIVDKVIWDGKDIDIIMFGASSRKKQ

SEQ ID NO: 919 - protein, 529 aa, synthetic construct; identical to SEQ ID NO: 191

SEQ ID NO: 920 - protein, 461 aa, synthetic construct
MNDKIKRAVIYIRVSTEEQVKHGYSLKAQKERLLEYCKERNYKVIDIYADEGKSARSNLRSRTELQRLIKDVEERKFDIIVFWRLDRWFRNISDYYKVQEILEKNKVDWECSDEEYNTTTSNGRLHLNIKLSIAQNESDQTSDRIKFNFANMVKNGKAICGTKSLPLGYMVVGEKGNKKIVKNENEIEIVEDMFRNIKITRSMRKTLFYMNNKYNLTMDSSTIKRYLKNQLYIGRYRDNYNYCEAYLTKNEFDEIQKIVTHNVKNNSRYDYIFSGLLVCKKCGRRLSGSSHLSYASIKSGRKRYMNRMYRCNRNNNDGLCDNTKSALENVVEKKIFEEVENFIKKYKIKNKKVEEKKERKKIDVKKVQQKIDRLNELYIEGKINKEKYDSSYNNYMTTIENASKKEKKTDFKHIEKLLDNDVKERYYALTNVEKRAFWGSFIDRIEIDKEHFDIFFVNYED

SEQ ID NO: 921 - protein, 547 aa, synthetic construct
MKTAVLYTRVSTDEQADKGYSLGVQKEQLEKYCESRNIEILKHYVDDHSAKSFDRPQFKEFLNYAKTNHKSIDYILFVSWDRFSRNAPDAYEMLGKLKKWNIEAQAIMQPIDFSVPQNKVMLSIYLTLPEVDNDIRSQKVRSGMRGANKLGRWVRNAPIGYKNRRDEANKPIIVPADNSHLLKEAFEEIAKGIRTLNDIRIEMGEKGFKVSRSNFCRMVRNPVYMGKILIPAFEDEPELIVDGLHDGIVSEELFYQVQIILAGKKKKLNKHSTICEREELPLRGFLSCSKCGNHVTGSASKGRNGSKHYYYHCMKCGKERYRADVANNEIEALISTIQIIEEVEALYNLILEKEMKGSTQNRAQQISILSQKLEKLEERKSNLQNTFIAGQITASDYTELKPMIETQIMEVKTELNKLKDGKNKFANELEEKISFLSNVAEWYRNGGLQQKKEILVSIFVGKFQFQNNEVRNTQLNEMVALILKHTGRFVEKKKGQTRYESCLSLLVTPFGFEPKTYCLEGSCSIQLSYGADNFILLSFLNKLRYSK

SEQ ID NO: 922 - protein, 560 aa, synthetic construct
MARKSRKNMMLQENTALPDKEKKVLFKAGLYARLSHEKEENIERGTIETQMELMKNYVKDHEDIVIEEEYYDASFTGTNFERPDFKRMLEDAKTGRINCIIVKDLSRLGRNYVEMGNYIERVFPFLNVRFIAVTDDFDSFRPGTDLMMPLKNIVNEFYAKDISKKVSTAHRRKWTTDEYMCGFAPYGYLKSKTEKNRIVVDEATAGNVRLIYKLFLDGKGYTPIAKYLNEQGIMSPLMYLKSLGYQQNVKTNGVWTKTTVKSILTNQAYIGSAVHGKVVIEKYNNIPLHATDPSEWVIVENTHEPLVDKETFEKAQERVKEISDAYFAKEFTKHPPNEKNLLKGKIVCGDCGKGMRLSPRTTKSYVYFCGTFSDGINPACSRHKINQEDVNNAVFAQISNHMRCCIDALRVIRELNARSSGLKKYDVYEKAITRQRRELEKVNRKFSELYGDYSEHLINESEYLTLKQQYLLKSEALKKEIDNLLISQNLYSKNYKIDADWENLINKYLKCRKLNKELADAFVDKVQVFEGGRISVNLVYDDCLEELLQVKNKREGDLNE

SEQ ID NO: 923 - protein, 499 aa, synthetic construct
MKRAALYARVSTEKQAEKELSIPAQLQELKEYAAKNGMEVVSVYTDEGVSAKTDDRPEFQKMIAEAKQDPRPFDTILYHKNDRFARNREDAIVYKSLLRRDCGIELIAIKEDFGDGPVAQMIEGILEVIAEFYSLNLAQEVKKGMREKAKQGKVLGETPLGYTIGPDGHLEIVEDEAEVVKYIFQEYTSTNKGLRSIAQDLKTKGKMLFGEAGTKYKWSGTGIGVIIKNRAYTGTMIWNQREAAKNNKKRSQDKWITVPNAHKPIIDKKTFIKAQEILNSKRNYRSDSKGYLLRGLVKCMDCGSNMSQYSDRWKRKDGTKGIKRKFRCSNYVHTGECYFNTVGMKELEKSLFSYFKRLRNRLRKGTFNLNNINISYIDSKPAKERLAAKEKELENMDRRFERQMMAFENGVIDLEHLRQFKDRLQEEKKQLQNEIKKLEKEITAERINTSLLAQKIDRVITTLEDEEKPLGKKQEILKEVLDYVEYSRDKEEMAVHIKY

SEQ ID NO: 924 - protein, 577 aa, synthetic construct
MKQAFVFVRFSTNEQRDGASTDRQLERTTAMAQAHGWDIIQTIKGEGESGFTGKHRVEGTQFATFEAEACAGVHAGKVLIVERLSRLSRENPHLSYDLMRALVAGGMTLAVCDGNKLYESINQIDFMATIEYFLKAQLANEESQAKRDFSKDKWTRRRAAARAGVIITKNTVPWVVAAPGGPYPLGDDRRWIVDGDRASLIHRIFREADAGDGALRIAKRFNQEGIPTWPRFKNREPKLWDRKFISRIIANPAVIGDLIANEENEDGKPIPSGDPIRGYYPRLIDPDLFARVNETAPARKAAMGGRKSVVANLVSGLVKCAQCKSPMEYVRARAAGTVIVRNGVPQAPLPNETAYLYCRDHHRGGECTNGAGVAYIGFERALLDTALHLALDDASFSRTDEVGRLSIQIADRRRDHDAMFANAHSLWKGFAERESAIAMNLASEAEAKAKQIMAEIEALEAAKRTAAGAATSAEHLSRLAEVRAHLNHPDLEVRKTHRLKVAAGLHSVIESIRCHPSKSATVHFKGSTLMATIRPGRGRAPATASVLDMVRKHDYKDHEPAVQALVKRVKADGKVRG

SEQ ID NO: 925 - protein, 567 aa, synthetic construct
MNEAIIYARFSKADQVKGHTVERQTDHARLVCTERNLTTTPSLIFIEKGKSAFSGANRAKGSLLANLEIEIKAGAHVGRTLVVEHLDRISRQGWQEVLDFLRSCSDNGVSVATWDGSRHYPAGQPVSMIEVIEIILKSELSHEESDKKSKRIRKSFAAKREAAEAGTGKLIASRPPSWIRRIPGGYELIEEHAAVLREAHRLCQAGHGTAMIAKIFNERGVPTWREESNGWHESYIGRMLTMRTAIGEYVSTNHGTRILDYYPRAITVEEYNRTQAARAKRAVPSARGRRGTAQTNLLQGIARCSHCGGMMNMKPGQAIGTKVKNRPGLNGTVRSYLKCVNSVRRLTDAQGERICTNGKGVRYERLEPAILDKIMTVALDNDRYNVSEISQTRIALAEAERQLGHHREALENIKENLKLKVSATLMAMLGEIEDKIEEATAERDKLAKALTREAGAQPSAAFLQRIKATRAAMSSPDHDTRRDARTMVHDSFKEVLTDVLCDEGGNSLVIVAHGLAAFRVTDAGAIDWQHDSSADAKAIVALTTEAFADNKGTVDGILARAQAAKAA

SEQ ID NO: 926 - protein, 509 aa, synthetic construct
MKIAIYSRKSKETDTGESIKNQISMCKDYFIRQLDDCIFETFEDEGFSGGNINRPSFQRMMQLAKHKQFDVVTCYKIDRISRNTLDFLTVYEELKSYGVKLVSVTEGFDPSTPAGKMMMSMISSMAEMERMNIAQRVKDNMLELGKMGRWSGGTPPTGYRSVSVVNESGKKETYLELIPDYIDKLNLIFNMIAEGYTPGQISKKIGLPNRTISNILTNPVHLAATEESKSYLESIGYKVYGELNGKGFMPYNRRPRVNGKALWNSKDMFVSTSKHEVAVEPTIWIKANQAFKSRGAEARPRISPNSFLSHMVKCKCGSSMFVFPGNPNKYGEVKYYFRCSDKKNKKSNCESKWLPVELVEEYLLKTLQDISLDKSILYSYLTSNEDVNYDKLIKETQKEIAKKNKDIETLTEKLILIEGPAVNIITNKINTISCEITNLNEELFILERKKIFQDQDKINIDTLHNLIVTAVSSFDVFTVERKRIEIKSFVQEIIYNGKNDIHIKFIGGV

SEQ ID NO: 927 - protein, 553 aa, synthetic construct
MSGSRPSPRVKVIPAKVRTDRNALNPDGKRKRVAAYARISTNEESQVGSYELQVAHYTDIIKSNPSWELVKVYADYGISGTSTKNRVEFQKLIQDSVDGKIDYIITKSISRFARNTLDCLRYIRELKALKIGIFFEKENIDTLDAKSELFLTILSSMAQEESRSISENTKWGVQKRFQRGIAHIPTTYFLGYDTDEEGNLVINEEQAAIVRRIYQEFLEGKGTATIAKGLMKDRILTARGRKTWTSDSVYKILTNEKFAGHALLQKTITVDFLTHKRIRNDGSERQYFIKNHHPAIISDEDWNAVQQEMKRRSKMLRDPDGKYAQVYSNVSYFSNILYCGECGSPVVRRRLTSERNGEKYLYTAWQCRVKIHPKKYNIQCCGRHIWESALEREFMDLLYEMKENREQVIKDATETIAEYDLSDLEKERLAVLDEKLETINERLVELTDNTDTSVGGVYEATIRHLYYEQEMLQAELDDLKEKQQESNHLAKKLTELLRYLDELDERTENQPFRADIFQQTVQRGIIYYSYEVTFEFKCGISRKVIATRVKEEE

SEQ ID NO: 928 - protein, 511 aa, synthetic construct
MIAIYARQSVDKKDSISIDSQIEFCKREVPEGEKIKVYKDKGYSGKNIDRPSFQQLLEDIKKGNITKIVIYRLDRMSRSLLDFAGLVETFNEYGVEFVSSTEKFDTSTPIGRAMLSIIMVFAQLERETIAGRIKDNYYERGKKGMFLGGNVPFGYDLSPHTIDGIKTNKLVPNSNAETVRKMYELYANGNMSLGQISKLLTEEGSLSLYDKAWDSAKISRTMKNPVYVKADADIYLYLQNLGCLIHNDITEFDGEYGLFLFGDKVKTGLKNHQNISGYTVSIGPHKGIIDSKTWLKCANKLITNKQIKNSGKSNYSWLSGLVSCGKCNYSMTISKANLSKKHGTYALYFKCSGRAMRRICDADSPRVEEIEKEVQEKMIKRLEQLKADMSNNIAETDNSDNNNTINDLKIRINVIENDIEKLLDSLLAANNVAMDYINKKITKLDEELRKLRLQLNQELTINKTNVTDLLELEYVLNRFDELDLDHKKEVAKLMIERVYIYDKKPQIVWND

SEQ ID NO: 929 - protein, 501 aa, synthetic construct
MYPIDALYARQSLDKKDSISIESQLDFCRYETHGNEYETFVDKGFSGKNTNRPDFERLIKAIKEGKIKRVIVYKLDRISRSILDFSNMMELFQKYNVEFVSSTEKFDTSTPMGRAMLNICIVFAQLERETIQKRVTDAYYSKSHRGYYMGGRIPYGFRLEEISIDGVLTSRFIPDPEEANRVKMIFDMYANQDATLGDIFRRLISDGSGDDKKWCTARISDIIRNPIYVRADIDIYNFFLSQGTNIISEAACFIGSNGAFMYKGKDKDRRKQSDLTDRDLVLAPHEGIIDSETWLKCRWKLLNNNQCARTKKGKRSWLTGKVKCKKCGYAYIVTKSNTTGLRYLQCSGMRYNIRCKGSEQTIYAHIFENHIYNEMREELKKFQYLSNEIEKSGNVSYSKYKMEMLEMDKEIDALLNKVSEASSTLMQYINMRIDQLDAEKKKLQEKIISLSANKPINNLEKINNHIEIWEELSIEDKQKIADILIKVIYIDNDTISIEWNI

SEQ ID NO: 930 - protein, 560 aa, synthetic construct
MNKQISNTKHFFVAMYLRLSRDDSDIGEAIGKCGISKAESNSISSQRELIRTFIREAENLELYDCYVDDGYSGSNFDRPEFKRMIKDIEAGRVNCVIVKDLSRLGRDYIETGRYLERIFPAFGVRFIALTDHYDSLSADAGERTIVLPVKNFINDSYCRDISTKVKSQLVVKRRAGEYLGAFALYGYRKDTGDKNRLVTDDYAADVVRKIFEWKIEGLAVSAIAEKLNDLGILSPKEYKKSLGQNYNGGFSGAKKSKWGSASIKRILTDETYLGHLLQGRTEKINYKIKKSMEKPKEDWIRVENTHEPIISQDDFCIVQNLLHTDGRISLEKRELNPFMGLLFCGDCKEQMVRRTVRYKDAKKVYNICSTKNRGEGCSRHSIQECVLKELVEIAVCRYVNSFMEQKRLFEQLGGQETNFETIISYNKEILRLKAEQDKYYTLCSGLYEDLKQGVVTRDEFERLHREFERKAEEYALAQEKQQQLIREMFKSGVLSAGRFQVFRDCMELQEIDRRTLVSLVKRIYVYENKQIEVEFYFLDQYHAMLDFNQQAEKEKLGRRA

SEQ ID NO: 931 - protein, 526 aa, synthetic construct
MNAAIYARYSSDNQREESIEAQIRAITEFCERNNYNIVKVYTDEAFSATTDNRPQFLKMISDSGKGLFDVIICHKLDRFARNRYDSAFYKKTLKDNGVKLISVLENLDDSPESIILESVLEGMAEYYSANLSREVKKGLNENALVCKHNGGKPPFGYDVDSDKNYIINKAESLAVIKVFEMAAAGHTNICNWLNSNGYRNKYGNLFKSAVVSDMIKNEKYKGVYVYNQYKREKVNGVYKNIKQHESEIVRVQGGIPAIVSEMLWEAANSMNKKVKKASRNNSKITYLLSGLIACGECGMSYAGDRAPARGNRKERIVYRCIGEKKNKTCKNKAIRKDTVEEIVINELDRLLSEEGIDQIIDVLYKELAKKMMDLPDVIKKVERELDKTVNDIDKLIDMALSTYFNDSIKNKIEQLEMKKSDLTSKIEFHKIELGKIILPPKEFLKEKLQNDIHIKEKSPDEQKRIIKTYIKKVLIYPDYIEIYADRGLNDGAEGNRTPVRKPIHCSISHYSQSFDIPSINRRLTGY

SEQ ID NO: 932 - protein, 559 aa, synthetic construct
MARVADRQTITKSAPKNKVWYVAFYIRLSREDKRGKDESESITNQRLILTDFLEQQDDGDEYIFVGEYVDDGVSGTTDEERENFQRLLSDIQKSKVNCVVVKNLARSFRNNGDQSYYLGDWFPRNDVRFISLYQQPIDTYKDPQNAQNIAVPVQGVLNEEHARGTSESIRRTFDKKREKGLHIGSFAAYGYMKDPEDKNALVIDGEAAENVKSIFAWFLEGMSKNAIVRKLNNSGILCPAAYKKSKGMKYQNPNATEGKSLWAAISITGILKNRIYVGDMVQGRYRIKSYKIHVQETVPEDEWYIVENTHEPIISREDFAKVQDLMKKDTRTAPQEKGLYLFSGFLRCADCGKAMTRSKVRANVYYYCRTYKDQSKTACTKHTIRHNHLEQGVLYAIRQQVYVAVAFSEIVSRINTAPLQKSQSIKLNELIAAKEKELSKITRYQQSIYQDWKDGEISHKQYRHMQEDYERQIEALNEVIDNLHEEKEELENGIDTENPFLATFRKYENIDKLTREVLIELVEQIKVYENGNISVSLKFANEYRRIAEYIEVNTHQNAV

SEQ ID NO: 933 - protein, 549 aa, synthetic construct
MNIIKACLYIRVSTDEQADKGFSQRDQAERLQAHCDQRGIEVVRIVFEDYSAKTFARPEWTKMLAELSKTRGKCYDQILFTKWDRFSRNTADAYHMIRVLREYVVEPLAIEQPLDFNIPESKTILAVYLSMPEVENDRRALNVVHGMRRAKKEGRWMGKALNGYKNRITEDGRKYIALVEPEASLMKWCFEQIAENVYATEHIWMMAKEKGMRIGRCGFWQCLRNPVYFGMIIVPKYKDEEEYWVKGAHEPLISESLYYKVQEVLELRSVKKVVRDVHGLKATTPDEFPLRGFMLCPKCGKALTGSGSLGCRQRYYYYHCRLKCRQRFRIEVVHRLFENELRKFVPRAGIPEIFRMVVEDTFSDESGYIKNERRDISNLILRQQERLTKSRGFLLSETITEAEYNEVKADAAFQIKRYEADLKAIEERVNHDFDVKNMVTNLLSHMENVVNLYINADTSGKRHIVSSMFSGKWVFDGETHRTIELNRAAGLIYALNNRLRHKKSGAKIEKNLNSAEVPKRRFELPHPYRRQPLKLVRLPISPPGFVLQI

SEQ ID NO: 934 - protein, 523 aa, synthetic construct
MPTAIPYLRFSSGRQAKGSSYERQSDMIADWLRRNPEYQLSTISFEDLGVSGYHGHHLKEESGFAKLRVAIADGVFGKGDCVIIEAIDRAGRLEPLQMLSLLGEILNAGVEIETLDDGVRYTRESVSNNHLFLLVAKVQQAHLYSQNLSRRLSAAWDSKRKAATSGKSIRRRLPLWFDQETGMLREDIAPLVKQAFEDYAAGFGNRRIYKRLAPLHPEIAAMTPEGMGEWFSNKTAIGYWNETPNVHPAVIDLDLWYRVQMLRESRKRTTIAAPSKHLLAGLVKCGSCGKNFTIKVNKGKSTSMVCKTKSRLGDKGCDNGKAFPTAVLDKIRIDTSLSLVQEAFSNQNLSSNRKRLIEIEGQLQDVAKGLTALGEAIAAAGNVSPFLDSLSSYKRKREELENEKTLLSRETEDKNILLSGVIDLEQDLLEDDQLKLNALLQSVGYKITVYSGGLMIVEGQEYPFLYKGYNRGRDGYVYMDMGEEKFIKRADQEQLEAFKALRKQAPEPDNILLKLIKRGNGRQ

SEQ ID NO: 935 - protein, 532 aa, synthetic construct
MAKNVAIIPAKTIQEVRGLPNQAKQRVCAYCRVSTDNEEQLSSYEAQVNHYTNYIKGKPEWEFAGLYADEGISGTNTKKRIEFNRMIEDCMAGKIDMVITKSVSRFARNTLDCLQYIRKLREKGIAVYFEKENINTLDSKGELLLVIMGSLAQEESRSLSSNTRWDITHQYQEGKVRITHTTFLGYIKDENGDLKIVPKEAKIIERIYKEYLQGKSVTRIAKDLEKDGIKTPTGRKKWWESTVTSILRNEKYMGDALLQKSLTVDFLTQKRVKNKGHAQQYYVEDSHPGIISKGMFQQVQEELKRRSGLRKKPTEVKTRFTSEYPFSEITYCGKCGMKFRRKRWGTKKYAQDVWMRMTRVDKGVEACDMSAAHEEKLKQAFVRAINKAINDKEAFLKKIVENVEKVVPAAEEELGIDEIEARLKELQQELMSLVRLNVNTGFDAEVYDGEYGRIAKEIEGLREKKQRIQEAKLDDTIRKNRAEQIAEIIKERDLVKGFDEELFREVIERVTVLSIVEVEFQFKSGLRVREIL

SEQ ID NO: 936 - protein, 547 aa, synthetic construct
MQALRKKNISIIPSNPAYDKTIKVQFKALRVAAYCRVSTLLEQQEGSYEAQVSYYTEKIQQNPNWKLAGIYADDGKSATNTKKRDDFNALVDDCMAGKIDLVLTKSVSRFARNTVDSLQTIRKLKEKNIGIIFEKEGINTLEGSGELLITILSSQAQEESRNLSENTRWGFERKFEKGVVMVNHKKFLGYTKDEYGELVIVPEQAQLVRRIYRLYLEGLSTQQIADTFMTEGIKTVTGNDKWHDTVIAKILQNEKYMGDVLQQKTYTVDFLTKKRVKNDGIVPQYYIEDNHEAIVPKEIFFQVQEERARRASLHKPAVTRRANKEKSKYSSKYVLSDILVCGECKHPYRRQTWSRNGVITPVWRCESRLASGTKNCKHSPTLKERPLHEAIMTAVNNVVENHREVVGAFRQNMIRIIGSYSTKNMESEFDGQIDILQKQLLELIEENAKQGAVDEDFDEKYKRIADEMQELKMKKLKQARERKMAGEYGQRLGGMDSCIGGASYDIRMFDEDLIRRLVLRIRVISESKIEIHFKAGFVMLQDVPLYE

SEQ ID NO: 937 - protein, 543 aa, synthetic construct
MPYYSLHHSRFPEGEYGMYLRKSRADLEAEAHGEGETLLRHERTLQKLAKTLNLRISKNHIYREVVSGETIAARPEVQRMLTDVATGALAGIFVMEIERLARGDTSDQGMVAKAFKQYDTLIITPTKTYNPANDADEEYFEFGLFMSRREFKTINRRLQSGRITAANEGRYIASTAPYGYERIKIKNDKGYTLKIIPEQAEVIRSIYEWYVTGRLQEDGTHNKLGAARIADQLNKMGVKPIRNDQWTRSSIIDILHNPVYAGKVRWGYKKEKKYLQDNKMRKQRNRSGAYSLVDGLHEAIISEEIFNTAQNLMSARRHAPVPGKDILKNPFTGILYCGKCGRMMTRQAKTTRTPYDVMKCPNTKCDNISTPLYLVEEIIISSLRQWLNEFKVEWGKEKLDRPYTTAIKLKSSTINQAKKDISKLTGQRERIYTLLEQGVYSTDIFIQRNKKISGEIEELEEALGRYGRELELLQRQAEYNDIFIPRAEYLIETYTDLDTAAAKNEVLKEILEKMEYVKNEPNRKGNRDNKNFTIELFPRVIKF

SEQ ID NO: 938 - protein, 549 aa, synthetic construct
MNMNNDNSNPRVRVIPAKQKVNISTPKSESQKLRVSAYARVSTLVGHQNSSYELQKQYYQEFINSKPNWELYKVYSDEGISGTSTNKRVGFLQMIQDAKDGKFDYIITKSISRFARNTLTCISVVRELKSLPKPVGVFFEKENIDTLDSKSEFLLAILSSIYQEESKNISDNTKWAYQKAFSQGRIFCPTTYFLGYDTDEDGNIFIDEEQAKVVRRIFSDFLKGKGSSTIANELMRDGVLTARNKPVWTSDSVRKILKNEKYMGHCLAQKTVTIDFLTHKRVKNDEHQPQFFVKNCLPQIISEKDWYKTQQELKRRNDMAHDPDNKFRTKFSSKSPFSNKLVCGECGRPVTRRRLTSRIDYKKYNFTAWHCRAASQRDPEFKDCKAKYVWEEELEKAFVKSLLEMKEKKKLIVKEVENVVKSRSLTKTEENRLKELEEQLENISIRISDLASREPSSNDSIYDATMRNLIYEQEIIQMEHEKLDKINQENLYLKSKLKDLIKYLDEPIEAFRDDIFLDTVEKIILNNNQNLCFVFKCGYKEYANATKRR

SEQ ID NO: 939 - protein, 456 aa, synthetic construct
MTDDAFIYCRISNDRTGEKAGVTRQETDCRAYAKQHNLNVLEVFTDNDVSAITGDRVAYRTMWERLAHHEAQHVIVWSSDRLYRRTVDLEQLVSVIEHTRTTLHTVTSGNIDLTTPQGRMIARQLATVATYEVEHTAERITAAHRHIRGQGRWTGGKPPTGYLNGGPAGLIPDPDRAPLIQEAAQWLLAGNALFSIAKRFTAEGHRTVRGGTITANVLARALRTPTVAGIVSHNGKEIGPAQWEPLISVEDYRTIQDILRDPTRRTTQSNERQWQGSGIYRCGECGSPLNTNKTNRNGKGRGYVCRECLKITRNQEKVDDLVSSLVCAYLETQELKPVSRNDNSQELVTERNRLSARLTSLTTMFTDDQINEIQLASGTKEINQKIKRIDQQLAAIREDNPITDLMLTGGNLRKVWDSKPADVRARIIDALMVVTILPVEKRGPGFDPSRIKVEWK

SEQ ID NO: 940 - protein, 510 aa, synthetic construct
MHTDSAADTPKRAAIYLRISEDKTGEERGVDRQLEDAHKLIKARGWIQVGDPYTDNSLSASKRNVRRPAYERMVADYQAGLFDAIVCYDLDRLTRQPRQLEDWIDAAQQSGLAIVTTNGEADLSTDGGQMFARIKAAVARSEIDRKGARHRRANEQRTKQGIPHAGRRRYGYEPDGCTPREEEAAVVRRCFEAVASGASVRSVVADLRRREVPPGTGAGWTNSRLRYMLLNPSYAGLLHVDGAAMPSDKITPIVSPELAEEVRAILMDEKRRTSPGPGRKHLASGFAACGVPDCPNTLRSHAGYYTCQVKTLNSASRFVEPEGSTRQHASIKVATLDARLREEMALALLTTSPAALRGDDSPSVAPLVARLDKLEAAARATMTDRDDEVITPHAARARLLEIRDERLEVEAALDAARASRTSSVALADMARELILSSGVPMGPTRVIREVAPQVVAAIEAMDIDRQRDALQQLLTVQVQPGRGPRRIHVWHLVADHLNPDLMPDNDEATA

SEQ ID NO: 941 - protein, 510 aa, synthetic construct
MNNLDAFAYLRKSRKDIEEEKKHAEAGHHYNTLDRHRSQLLELAKLKNIRIIEIFEEVVSGEFISERPEMQKMLREVELGSVDAILCMDLDRLGRGDMVDQGTIYRILKNSETVIITPTEIIDPQDENQELTFSIKSLIAREELKTIVKRMQRGRRQSAKEGKSISKRPPYGYLRDENLKLYPDPEKSWVVQMIFEKSAAGVGRRTIAEELDRLNIKPPNIAYWDPTTVTSILDNEAYIGNIVWGKVKYTKIDGKYKRKRLPREHWQITENAHEPIIDKDLFYKANDARRSRWRPHLKKGSSLTNPLAGLLFCEICGKAMVMQPRPDRPDNALRCMSHSCKGIQKGCNLGIAEQKILLALENLIDQFELPATAKKKIKSSINSKEKALIELTKEKKEVNTQNNNIHDLLEKGVYDIATFVQRQKVIKEKLDILEKKIQDIQEEISQEKQQQRATHNYVPKIRYALDAYFSTDDVEMKNRLLKSVIDKATYLRKKDWDLRDQFEIKLYTRL

SEQ ID NO: 942 - protein, 535 aa, synthetic construct
MKRAVLYLRLSVSDANDGVSDSIQRQESDLRAFAEAEGLEVVRVLTDDGLSGRRARENADEALRMLADGEAQTLVVWKLDRWSRQGISAMGRLVEVLDRTPRAEFIAWKDGIRSSQAGWRLTAAVLSEIARTEADNTAIRVSAAIRANQQAGRFKGGTVPYGSRPAPHPSGRGRTLVLDATEVATIKRMAAWVLEGRPINALTDLLVREGVPTTRSPYRLALIRGDDPTGLSRGVWSWPAVAAILTGDAVLGRVSVSRPVEGTRRKEWSLVLDGEGLPLQPFPAALDVETSARLRERIKSSKVPSGKPRRVPRKARLLSGLLYCGVCGSKLWVTVRSGRPTYTCSRKAGGTCPGPNMTAEFADKAITDAFLSERGHWPEATLEESVSRPEHVDELARVQAAIDQTASEMTRDDADVAKLATTLQTLKGRRTELQAAPATISRRWVPTGRTIAAAWEAGDDFARRDLLERFGLARVELLPSAVKGSNAFQPERLVPEWIDIDDPDALESVGRGLLVPRLSAPPLDDPAAYYAADHD

SEQ ID NO: 943 - protein, 453 aa, synthetic construct
MKAATYSRQSVEAEALIDVQLSRTRALVTARGWQLVGEYADNDTSASKQRGDGTDWARMLRDIENGTVEAVVAVDLDRLLRSTRDLNALIERGAKVVTVDGEIDLSTADGEFRATMLAGIARFEVRRKSERQVRANEARAARGEVVRGRRPFGYEADGRTVRVPEADAVRDGYRMLLGGAPLAEIARAWNERGLSTGQGGAWRHDNVRHVLLNPRYRGAVRRHGEIVSEAAVWPALVDADTFREAEALLSDPARRRGSASVKRLLSGIAECGVCESPIHAGGGARRGIANYRCQGALGHFARMAEPVEAYVIDVVTSFLANAKGEDGALVLPSILAGAEGDELAAEADRVRGRIERLRAAFLADDEGDADEYATTSRALRERLADIERRLLERMRAAELGDLLGNPDARAVWDALTLERQRRVLRALPLRVVVHAPGRGVRTFNPASVEVVPR

SEQ ID NO: 944 - protein, 454 aa, synthetic construct
MRAGVYTRISLDRYGDGSAVARQLQDARVLAKQRGWQLVQEYQDNDISAAGKRHRPAFEQLLADIKSGKLDAVIAWNFDRLARNRTDEVRFIEACQKAETTVSLVRGSDLDMSTPAGRLVADMMASTARHEIEVKSDRQQRANLQRAEAGAPHAARRAFGYASNGIDLVESEAALLRDAYSMVLAGASTRAVARKFNDAGATTTMGGQWLGNTARRTMLNPRYAGIRDYKGQRYPATWPAIVSEDVWQAARAVLTDPNRSTVQDRSIKFLLSSIAHCGRCGAKVGTSRTAKGRRVYKCGAQGDLTRDAERIDAYVEAVIISRLSQPDAADLLKPAQPDVDVAKLRMEVNAQRVKLHEAAQLFADDAIQAGQLATITKTAEARIQSLESEIAAATRRSPLVSLVGADDVAEAWAGLDVIVQRAILKLLFERVTLEGVRRGQRAFEPESVTLEWRQ

SEQ ID NO: 945 - protein, 467 aa, synthetic construct
MRAALYLRQSIAREDSISLELQEAACRAHCERRGYDVVMVEADPGISGRTFNRPAVRRVMQAVEDRSVDVVVLWKWSRLSRSRRDWAVAADAVDVAGGRIESATEDIDVSTSHGRLARGMLVEFAAFESERIGDQWKEAHARRVRKGLPATGKPRFGYRRAGEGFEPDPETGPLLAELYRRYIAGESTYQLVKWLNDQGSRTVAGYGTSGGDWSRRSVQRMLDSGFGAGFIRYHGELLPGVHQGVITVEEWEDYQAARRRRAITRGSERSQYLLSGLVRCSCGSTMNAGLFGWQRAPKYRCKAAQEKAAHTGGYVMAGVLETAVLDWMRGLVADLTAATNTTVEIEAKRERTQLNIGRLHAEVTAAEQAITRLTVQYAEGKIPEIAYTSALPELETKRDRLLARITAAEAEARTLPASVEQVSDLLAVWDILGVEQRREALRGLISHVKVFPGRPKSRVEVIPAWTG

SEQ ID NO: 946 - protein, 468 aa, synthetic construct
MYGFRRLRKIKEGRLLLFTKWDRFSRNTSEAYQMISNLNKLNITPQAIEQPLDLRVPENKLLLAIYLSTPEVENDRRAMNVTYGMRRAIKEGRMMGIAPYGYINRSKEDGRKYVAVKEPEASNIIWAFKQVAKGHLPTAVVLKEMNKREGRKLTKNSFMEALRNIVYTGKLLLKAYNDEEERIIEGKHDALISEDLFLKVQSILFRKSNKDDFLPAGRIINEERYPLRGLLLCPKCNKNLTASSAKGRSKHYYYYHCTVDCGFRHNSEIVNDLFVEELSKFSFNNGATKILKAIFIQNFAVASNSVGDERKVLQNKLNGIEQRIEKARDMFIEDKLDEEDFRSIKNKYKTEIENLKVKLSALKSSAENNNFEQRINKALDSITNISERYKNANTMDKRAIVGLIYPEKLIFDGENFQTTKINSFANGIFLIKKELGNKKNRQRSELSSNVGLVTSTGLFFTLIINVLN

SEQ ID NO: 947 - protein, 501 aa, synthetic construct
MTPRPAPIRAAIYARQSVSEPEGIERQIEACQQLAASRDYDVVEIFEDNAVSGYRERGVDTAFARMLEGARARRFDVLVVRKVDRLGRSLAALEALTRLRVQIVTTDGELDLSTSNGRLVANLITAVAANESDVKAERRVFANQERRQKGIPTSGRVPYGYKWIPTKERKDRENPDAAYELDAERAADVRRIFDAFLAGVPLGSIARDLNDAGKRTMPYKRRGVEVPGAKFTPTTLRRMLMSPYYAARLPIRSANGGAYDQSAITLDGTLKGKWPAIVSVEEWEAAKKRLQHPDRTTSPGPARRWLLSGLAVCGVDGCVDDDGRPRPIVAATAKGVRGYRCPSMRHFSRQGDPLDAYVERYAVEYIAKHRGALLAPRDRADAAAVNAELTRLDAALVELGEDRDAGIIDRAEYLRRRPRLISKRDSLRRDLAAGADRSVLEGIVDAGDILATWRGLSLGEKRTVLGDLFQIRVHSVGQGNRRNMPAHKFAKTVTITAAHGG

SEQ ID NO: 948 - protein, 490 aa, synthetic construct
MSPTSTFLPAHDADTAIYARLSRDRSGLSENVNIQIAEARDYADEQTWPVIGVFKDNDISASKYSTKPREDYNRLLGAIRRGQINIILITEMPRLYRRLEELLELIKLAETTKLRRIQTTDGISYDLSTAEGIHAAINAVNNAMLEAGRISKRVKRKQKARALAGKTHGGGRPYGYEKDGLTVRESEAAVIRECAERFIAGESIRDIVLDLNARGVRTATGCEWRIENLQRTIMKKRYIGVREYDGQEYPAVWPPILTREQWDRMEARRLSRKHRWPKGQTGVRKYLLTGFIYCGRCGGVMVGSGRTRQSGQPAQMRYRCRRTDNHGRVIGCGKSFRVAEPVELLVKEAVCHVFDDPKVAITLAPQVDEDKMRLLVMEYERRKAKLDQLVTDYATDVLSRDQFIQAKGIAEASVQEAREALAHYQDASAAARIPADQTIREAWDTSGLEWRRSVVQLVVEKVVVRPGHPGSKRWRGYRFNPEFIGIEWKR

SEQ ID NO: 949 - protein, 485 aa, synthetic construct
MENSELRRGLARVSSKEQAQSNALDNQIARLKAAGCEKIYCDIESGFKKGRSRSGFDSLMQDVEAHDEVAVTNLDRLSRQEVVSFMVFDQFEEKNVTLLSLDQPYLDLTNPDGRLLAGYSVLEARAYSARLSRRVKMGHKAHRDRNGAYVAPFGYRKVGESLVLNHDPFLCLLEDHKELSRAAIGRDLIEIFFKCRSMRQALATINQKYGITTHNRTGGGNKQPRGKFHFCPSGFAAWLNNPILRGHTCYGRSRRQRQCHKHLWDIRYNTHPNDKLMSEAEYREIEDILAHNARSGGYAFKSKVIHPLSGLIYCGECGGKCRAIAYRLRSDKSKKIYSYQCYNYHIHGCPQKKSIKEQVLENSLVDRLVTRAEGISQIAMSSDEIVESPQLVQLRSQLAGLEALGENPAFESAKIALKSQIQELLSRTSQDLTSANSMRELLLTHFSNPSFWRTLPSIDKQLVYRKLVSKIIIRDGEILEVILNV

SEQ ID NO: 950 - protein, 541 aa, synthetic construct
MDNLITTEEKITALYCRLSQEDEKEGDSNSIENQKAMLMKYAIENGFRNIEVFVDDGYSGVFFDRPAFQKILNLIEENKVDTLITKDLSRLGRNYISVGNYIEMEFPHRDVRYIAVNDNYDSQDMNSSSNELAPFKNLFNEWFARDTSKKIRAVIKSKAERGERIGSHIPYGYKKDPDRKGHLIINEETAKNVKLIFQLCATGMGPRNIAKILAEKKIPRPSVYRYENDGVIIQKTDITDRYSWATKTIVGMLENEVYLGHTVNCKTTTLSYKDRKKKVVPIENQFRFENTHEAIIDKETWDIVQKVREGRKRITKSGNINKYSGLLYCADCGARLTYNSGNKPKPKSYYFMCSSYRRHKDGDCILPHRIREIVLDEIVREEINQAIYYAVNEKNKFVECISKRSLSESRKKLSQKITELDRLNNRKNELNVIFRKLYEDNALGKIPDDQYRLLSDSYTAELHELKAKIPELQNQINEIKTEESNVDRFIALANKYIYIEELTPEILRTFVSKITMHENDKNTTGAKYEIDIFLTHIGKFW

SEQ ID NO: 951 - protein, 472 aa, synthetic construct
MNTALIYIRVSTREQAEEGYSIGEQEERLKKYCDAMNWNIGGIFIDPGFSGANINRPALQKMIKEIERGNGNIVLVDKLDRLSRSQYDTLFLINKVFSTHNCSFVSRAEAFDTSTPFGRAMVGILSVFAELERERIKERMSDGREGRAKEGKYRGGGHVPIGYDYDSKSGALKVNAYEAAQVKEIFTLFNSRCSPIQIAEILNQKGYTAKGTPWSYWKVRRCVENRTYIGKLKHNDNWYEGAHEAIVTEAEFDQAQSVLTEYREKNSAMGHRRTTALGGLVYCGNCGAKYHSVKAGANKYAYYICYSRSKSSYQKVNDPNCKNKTYRMADLENLVYSQIRDLKANKGYLSMLRSTVDSASQYDAILSRIKEVEKKIERYMDLYALGGIELSSIKSKIDPLMEEKKKLEAELEAKAEEKKSNATKEEIIGIIENLDQILSKNDPGQTHAALSILINKIVVNGDQVDVYWNFTK

SEQ ID NO: 952 - protein, 484 aa, synthetic construct
MRQGAVYIRVSTDDQTEYSPDAQLKRIKEYAQNHDILISQEYIYIENGVSGRTVAKREQFKKMIQKAKEKPKPFDVVLIHAYDRFARNVKESRIYKELLRDDLGIELISITEDFGSGKNSFLMEGIKDILNEYYSLNLRDEVLKGMYEKVSRGEVCGKAVLGYNLINKKLIINEEEAKTIKLIFDRYAYDNLGLLDIAKLVNQMGLRTKTGNKFENRTIKYILRNPIYIGKLRYSKKGRVDYHTYSVIKEEDLYDGIHERIIDEETWNTVQKRLDKNILFSVPHKIDTVNADYWLKGIVRCPYCNNTMIRHQKINLRCNGYGKGKCHNKTTINLKFLEKLVLNQMKQDFDGKKISLNTIKIKSNESNERDIIIRQINNTEAKFARIKEAYVDGIDTLEEYKKNKEIISREINILKEILDKIEKPKEVPKDNLKLKIKDIYDLLTNEKVEMSVKKNAAHMLINKIVVDEKNMKILLTYNESPFWN

SEQ ID NO: 953 - protein, 482 aa, synthetic construct
MLGGENLKKKIIAISPEEQKKKAKIAPIEKIKVAAYCRVSSETDEQLNSLSVQRKYFDELFAVHSDWTNAGIYYDEGISGLGMKRRAGFNKMVDDALAGKIDLIIVKSISRFARNTVDALKTIRNLKAKGIRIIFEKENIDTSDTKSEFILTIMSSLAQQESQSISENVKWGIRKSYVEGKVKIPGFLYGYKYGGKYIYQVDKEEAKIVCLIYKMFLERKARNQIGAYLDKNNVPTAMGLENAKWSRNVVNSILTNEKYCGDAILQKRYVQDYITKKQVINDGKLTKYYVKNNHEAIIPRATWELTQEIIKSKRYENRQNNLFSLMIKCSNCGGWYQCKTQTRDYFIRTFKFYQCENKLTKTKECKNSCDITQDQLEFLFHIATLQLYDVFPELADDLCSITEKIIIGKRKQNRLKKLFKERPNFKISEYEKRSWPVLVNYAEITQNTLTFHFLNKGLITESFVRWKPIEHFEKKPKSPPKQ

SEQ ID NO: 954 - protein, 571 aa, synthetic construct
MGRVSKRGNSLRKTAGVQTEQNVKVRRYRAGIYARLSADHDERKNESVEVQIEIARKYVEEFSLKNTEEIIDIIDCYTDLGKTGSNFEREGFLRLLQDIRLGEINCVIVKDLSRFGRNYLEAGNYIEKIFPFLGVRFIAVADGFDTGKEGNENKQMASEIKNLVNDMYAKDFSPKAKLHLKQRREEGSYVGGPPPYGYMAEWSGKRRRLIPDENTVDIVNFIFEKFVETESYTAVADELNHRQINPPSLYKKTKEVYYTPEAGTYKGWDKSAVERILKSETYTGTLVQEKTSITARDEKNRIHKPEDDWVITKDAHEPLVDRELYQKSVEIREKMKECKASYNHPTKGYPIGENIFDGVLYCGVCGRKMTRSSYVKHYADGEKARLDGYFCLNSGQTKIKVCPDSNRISKNELVDILLPLIRMEFAVFLNKPKHYMEYGKERIAEAVKKAEARLRETEAKLRRSQEEESCVYMDYRVGKIPQKEYVAFKMSQVDILEDLRKQQESQKQEIRALDKLSGKYMAAIKALLKLKSGKELTKDMIEAFILKIYVYPGKRIEVIFTFTADCMEGVK

SEQ ID NO: 955 - protein, 528 aa, synthetic construct
MRYVIYLRKSRADLEAEAHGEGETLSRHKTALLELARRMGITISATYEEIVSGETIAARPQMQRLLSEVGAGEWDGVLVMEIERLARGDTMDQGLVAQTFKYSGTKIITPLKTFDPQNEFDEEYFEFGLFMARREFTTTNRRLVRGREASAKEGKYVGSVPPYGYRKVKIPNDKGFTLEIVEEQAKVVRMIFEWYAEGAEVNDQKKRIGPYTIAVRLNELGIKSAGKKDYWTIYGVQNMLINPVYIGKIRWGYRKVKKTVTPEGMKKKSREFAQDGDYIVVDGLHEPILSEELFYKVQNLIAANPPTPIKYRHKNINPFAGLIFCAKCGHCMNYRRGYGRQPDYIGCYTAGCKNKASRFDLVEQRVLSILNSWVKDYSVDKAQIKHEADLNAELSNAISLAEKEIETLQDQLDKVYSFFERGTYTEKIFKQRSSAIEQQIMEIGEKIDRLKAEHQQVLERQNVQAEFVPSIKHLLEIYDTLEPVEKNKWLKQIIDRIVYEKNADGKYHNVDPGDFTIGILPRLPKRGS

SEQ ID NO: 956 - protein, 493 aa, synthetic construct
MPKTAVIYARFSCNKQREASIDDQLRICRQWCQRERYAIVAEYCDYAISGRTDDRPEFQRMVANAGESDIVLVYMMDRFSRGEYDAPIYKRELAQHGVKLVSALEQIPDSPEGIIYEKLLEGLAACESKKTAIRTRRGMEGNALKCKTNGVRVFGYASNEADEYVIDEDEAAFVREAFKRRIAKETTNSIARDFAARGVKTSQGNPCGYSMVERMVKNRKYTGRYEWGGVVKEGGMPAIIDEVTFMEAQGIRAAKERSAESWGDFALSGKAICAGCGRNLQGVSGRGRGNRKYEYYRCHDGCVKPVRREELEGEIVKALRALLQDREEALRIARMVAESSDGAEVAARRKQAAQSLSAAERGLKNILNAIEQGIIAPGAKERIAELEHQRDRAKLDLEAIRDDQIDPERLADFLQCGSALDDATLLKAFVYQASVSDEECIVTLNYDVENNEPARLDIQRVRTKCKWCTVCASPRTEVCAIGTIIFVRIPRAA

SEQ ID NO: 957 - protein, 503 aa, synthetic construct
MEITVEKVDVGVQKLGFQALSTLKTVRVAVYARVSTDQEIQLHSLEEQMKAFRAKIAQHPGWMLVDVYADEGISGTSVKKRKEFLRMMEDCEAGKVDYIMAKSISRFARNTVECLSYVRHLQSIGVQLYFEKEGLDTATSVSELILTVMAAFAQEESRSISENLKWGIRKRFESGESRWTKTYGYRKTKDGEIVIEPDEAAIVRMIFKMYQYGIPMTDILDELTFIQAPSARGKQTWNKTALKYLLENEKYIGDMRLQKWVSVDHISHRSVRNDSTVIPVYNVRNHHVPIIDRHTYQQVQRIMELKSPHGEYSRYPYFDTNIVCPLCGKKMIPRVMKVNSHKRILGCFDVDGCRGYAVKGYLVDAALLKAYNTLEIKEKKRTVAMQRMLEIKAESPKLDTVQYYWLDDLVGHIEFKQDTMRVFWKCGLESEVALNASKVEEPTHVAELYRNSLDRAQRSENKPVSVVRADKKSVNTREAQRNAAMQTAKNLRAKENGVAANDY

SEQ ID NO: 958 - protein, 494 aa, synthetic construct
MKYLIYARISERGSSFDHKAENSTTMQIEFCKKFVEMKGGEIVGVVKDEFLTGGNLNRAGIRQILKEVEAGHAAWDCLVTYNLSRLTREPRDLYKVMDILGSAGKRYSSASEPEFDAASITGEMMMGILTHIARYMRKSSAHTVRDRMMSIAARGEWPAGYPPYGYKRGAHKDNVLHVDERKAVIVRDIFELYASDKHTTREIVHKYKNELSKSKVLSLLRNPTYIGKIYYAGSIFNGKHERLISDDLFLQVQRKLPQLKKALRPKAYRYPFLLPGLLFCHCGCRLTPGTAKSGQYAYYTCTDPDCRTRVSAPKIEKYALEQIKAFKISDKAVKSAVEEVKKRNQEIREQHQPELDRLKKTRTSLVAERDKLVATCISNTLDDLLVAELNKRAARIRTDLETIDAQIAAIETIPSGDAEIERIALVFIGMLRNLQNLLEENATSDEIRSILPDFIKEIRLQEDKSYQIIFTNSESSTKGSKWCAHRDSNPGPND

SEQ ID NO: 959 - protein, 528 aa, synthetic construct
MYNRYTIDNTIFKIAIYIRLSREDGDDMESESVTNQRSLLNGYLKAQNLVAVDIYIDDGYTGTNFERPDFKRMLNDIEKGKINMVITKDLSRLGRDHIMTGYYVETYFPENDVRYIAVNDDIDTFYETSGSDMMPFKLSMNDMYAKDISKKVRSNLLQMKKDGKFCGSSAPYGYMRDPNNKHQLIPDPNTAPVVKRIFDLYVAGYGSSGIAEILTREELPTPIMFKYSGSKLNKFDHPEIWKHTSISNIIKNRVYIGDLIQHKFQKVNYKIKKRKSVPENEWCIKENAHEAIIDKKTFEIAQSIKDSSNTYNPERRNVEYVLSDLVYCKDCGARMSISYDKKRDRITMNCNNYRKFSKYDICFSHYINYTKLEKTVYDKLSNMANKYIEDKEEFESIIKSEYIDPRQDKLKKMEELNYKIEDLKRKQDSLYDDKFNNIISVETYTRLFNITEEEIKTANEKLEILKNEISSIEEDSNCYVEYLEIINKFLNMENPTKEIMNKLIDKIYVTKDKKLEIHYRIKKSEVLV

SEQ ID NO: 960 - protein, 514 aa, synthetic construct
MSGKCAFSVWLSMMSRVRTGEFSHLLVWKIDRISRNIIDFATMSEELKHLGVTFVSKNEQFDTSTAMGEAMLQIIMVFAQFERKQTSERVTAVMLSRAGNGQWNGGRVPYGYRWDKETASFPLDETEAGYVLRMAQLYEEHQSLLYVAKWFNDAGIKTRRGFAWTPTSIHVILTNPWYIGEYVYNVHSDGKAIEKRDESEWVRVDHHHEPILDEDQFYRIKFLLTRNRRGTPTPGKSYSRKHIHIFSGLMRCGICGSNMSASADRRRANGFRPSQYACSSRRRQGTTCTNKYISDLTVGSFVLNYAANIIRATRNSPADVQPDVLERKLLRGETFDDVESINSEAIQQLLSSFAEAGDAVEYRPQYAFTSASGEGRDIDNLRARKRKLETALSRLNALFLYDDEAMPEKDFIVERTNIERQLAETDKRIAELAATGLTSSEDSSDFLKKASYFIMVNKLIEDASVDYEKLVRTLDPAAIRDFVLSIVQEVEATDGKITAITFRNGTVHRFKYKA

SEQ ID NO: 961 - protein, 601 aa, synthetic construct
MKAVILTRVSTKEQEEGHSLPAQNTRLCGYAKRKGLTVIKTFQIIESSTRGKRKEFMQMIEFCKSQPEKIVIIADAVDRVQRSFKESVMLDDLIRQEKIELHFYRENMVIGKNSSSNDIMRWDFSVMGAKSYVLQLSENVRRSIDYKIKNGEFAGAAPTGYENFVAENGKNSIRPKEPDATKVRMLFERYALGGISVRELAHLADSYGLKSRTGCKINTSTMCYILDNPFYYGEMKSKDRQIKHIYEPLITKELFDKCHLMRLKGTGKPFKHGEIPFLYRGLITCMNSGKICPNEIKKKKFYYLVCYKENGSRLYVPERDITEQIAYILRGIHLPKQALDDLKEHLTNSKAAEIEYRNRELGRLNAEVNKAQQRQDMLLNMRLDGEINKEQYENKRAELQLTIERMRDKIKAHGKADDQFNDTLIGLFEIASAAGELFAKSNDDEQKRTLLRFIFETLKIKEGTIYYKLNFPFSEMSNFADSNPNHSEPRQNNDLTPKTGNFEICEDNSIRTVKNAVKTKACNNNLQACSNWLGRLDSNQRMSAPKADALPLGDAPTKSILTKQRALFINFSIFFYAIFFINASIFFKKSIIILHFGQQIV

SEQ ID NO: 962 - protein, 478 aa, synthetic construct
MIPAVGYCRFSSENQADGFSIEAQKNAISEFASRMGYDILRFYVDEAKSGTTTEGRTAFLDMLSDSKKHEFQAVIVHKLDRFARSRIDSAVSKKVLKDNGVRLISVLEQLDDSPESIILESVLEGMNEYYSKNLSRETKKGMKVAGAKGRILGTIPYGYIADKDNKFQIVNKEAENVRFIYDCFNKGMTFKALREELKKNNIQTRAGNWFNDSNLRQMLTNPTYMGDYHFGTAVYSGVVPPIVSRDLFDSVQVIIQKHKRVVPKDKGTAYLLTGLIFHYCGEAMVGYKSIKKGKAYYYYRCRKKEPKGYVYKQAIEDAVLAAVQNFFNDEKVITAYTKECNKALKNIKKSSDIASLRKRDNELKDQSSKLLDLYLTSVINQQLYLEKKERIDIESRLVESQIATCVQAFDLSPDIIRCAFADYADKIKNSLDNPKDTQAVLSTLIKSIKLYEDRFEIAFKFGDRQVAYNFSNAPPENP

SEQ ID NO: 963 - protein, 468 aa, synthetic construct
MSKMLKRAALYVRVSTDEQARYGLSLGEQRRDLEEYARRKGYIVAGIYADEGTSARKSLHRRRELQRLLADIRANKIDVVVVKDLERWMRSVRDFYKVQDILDAHNVGWECSQDRYNTTTANGKMQLNMRLAIAQDESDRDSERIRYVFEGKRKRKEVLSGAVPRGMSIVDKHIVFNEEADMMRAIFNHVYNGGSVRSCIALAKEEYGVELTYRIIRRSLANRAYIGELHGEPGYIESMIPLDVFNSVQDRLKKYSSSFRNKTTGSRIYLFTGLISCPHCGATLTGYRGDKKADGTYRTYWYRCSRANSNAGVGCNYTRCLYEWKVESFLLDNIQSLLSDHIYQIEQRRLAKQKIRSELTEENILAKLARLKDLYVDGLIDKPTYLHDYDKFQQQLLEIASDEVIPLTTIPPEAQNFVSSADFREVYQSLTQENKRDFWSSIIKRITYEDTPATHGRGGVYDFRVEFY

SEQ ID NO: 964 - protein, 536 aa, synthetic construct
MAKAKQKAATNDISKLAVIYARYSSHNQTEQSIEGQLAAGHRYADLKGYTVVHEYIDRAMTGRNDNRDDFQKMLSDTSKKQFGAIIVWKVDRFGRNREEITFNKYRCKKNGVRVEYVAENLPDSPEGVILESVLEGMAEYYSLQLSQNVQRGLLESAKKHQVIGGNVPLGLMMDAHKKYVPDPKTAPTVKLIFDMYAEGSTTSEIINHLNSIGMRTKAGKPFTKSSLTTVLKNEKYIGVYKYKDIIRDEGVIPPIVDKEIFYRVQELLKVNRRMPSHKWNYSDYILTDKLFCGKCGTAMVGESGFGKMGVKYSYYICAKRRKDKTCDKKPVRQEWIEEIVLQRVQGILQNEELLEFIAENTWQYYLAQDESMEKLKGLQTELDKVEKSAANLMKAIEAGIFNDMTKARMDELDDQRAVIKKAMAEIEIEKGFKLTKDHILYFLEQFKKLDYKDRDCQRRLIDVFVNSIFVYDDKLRIAFNFGGSDSTITLNEVDKADRGEGFVCCASCPAITITYEPNIMWFSHVFVVDMKIPEKQ

SEQ ID NO: 965 - protein, 438 aa, synthetic construct
MITKGGIIVQIEPVVFENKSIAKKKNVCAYARVSMNDDGMLHSLNNQILFYKEEILSHPDWNFVGVFHDKPTTGTKEDRPEFSKMLKLCEEGKIDMIITKTISRFARNTVTTLKWSRELRQRGIDIYFESENIHTISSNGELFLSLYAAIAQAESLSVSENCKWRIQKAFQEGILTPIKILGYDFENGSLKVNEKEALIVKEIFNLYLDGKGTNYIANELNQRGIKTKLGCEFTPKAIHVILINEKYCGNALLQKWYSKDHLTKEKVANNGEKDAYFVEESHQAIIDKETFEKVQIEMSKRAMKYAHECKCREYPFTKKLKCGICGKSYRRKIVHGKPVLICTTYDRKGKSMCPSKRIPEEILMKVSANILGIDEFDTDIFNDVVSFITVYNGNRLIFRFEDGTEQETYWKDKSRSESWTDEMREKARERQYAKCSNN

SEQ ID NO: 966 - protein, 550 aa, synthetic construct
MYYQPKINFSPNEVIAYLRKSRSDDPLLTVEEVLSKHETMLDEWAEKNLGATVPEENKFREVVSGETIAERPEINRVLRLIESPKYKAVAVVEPQRLTRGDLEDIGRIMKLLKHTSTLVITPQRIYDLRDEYDWDTFERELKRGNDYLEYTKKILNRGRLLSVSQGNYIGNVPPYGYSKTFVTEGKRRYPILVPNKEEADVVRMMFDLYVNKDMGCQNICNRFDEMGIKPPKGEHWSPSAMAKMLENIHYIGKVKWNYRKTLTIVEEGEFKKTRPIAKAGEYLIYDGKHEAIVSEELFNAAQAKKGKHTRQKPNTKIRNPFAGLLWCKCGRAMSLRAYKSNISAPRLLCDGQTHCKTGSCLYSEMNERVCSILTNCIHDFEIRLQNNEGDSVKQHMRLIKNLEVRQKELEEKELAQWEAQADPDPAKRMPQHVFQQLNERLLKEKEEVRQTLCKAYESMPEPVNYEEKIAQFTEALNALKNPEVDAATKNRLLKACIDRIEYHRDAPQRIRSQKVIYYDPEQKRTRCKSPLNVGGNWTAPEIILDVKLKV

SEQ ID NO: 967 - protein, 540 aa, synthetic construct
MATATRRVVRTMPQMFIDVADNQSERLQVAAYARVSTEKEEQEDSFERQVEHYKQLIYSKPEWQFVDVYADPGISGTRAEKRPDFLRMIEDCRAGKIQKVLVKSISRFARNTVDALQYIRELKDLGISVYFESENIDTLTPGGEVLLTILAAMAEQESRTISSNIKWAWQRKFQKGDIILNTGLMLGYRKIGKDDEGHDVYEINEEEAEIVRRIYREFIAGYSITQIAKRLQADGVKTKLGRESWRHNVIESILTNEKYTGNALLGKTFKPDVLTKYRQKNDGKKAPIYYVEGSHPAIIEKGLFDLAQQEMQRRRDANDNKVGGGRYSSRYPFSGMLVCGICGSKLRRQVRTMGSGKRTASWGCCNRINNGRAECDSHHVNEEVLEATYLTAMRRLVDSAEEVVEVVRDGTELALEPENKAAMERIDEETIQLQEAALALHKAKQRMEIGAVEYASRVKEYSERMKELEAERNELQGTAAKYAEVRMWLDTFIEQTMQSDTLTTVDGTTMKMLVDRIHVRNDGIVVEFKCGVAIEQEYVK

SEQ ID NO: 968 - protein, 496 aa, synthetic construct
MNAAIYARVSTDWQAEHGYSIETQLESCRAKAKEIGATVIKEYIDDGYSGGFLERPGLDALRDAVSDGLYDVVIFHDPDRMARKLIHQLIITEELEKAGVSPVFVLERFDSSPEGQMNYQMKGVFAEYERAKIRERTMRGKRAKLRAGKAICDSHIYGYDFDRASSSYVVNPAEAAVVRRVYHLYVVERVGGCETIAEILNADNIPSPTGRKWSPSSVRNMLSRPHYTGHYYANTTYHKKTGPRSEKRLPRPREEWIEMSCPQIIPAEMHEKALAIKAGQRTYKVWKRNEKVALLQGIAYCGSCGSRIYVSGGGKRGKRFYECGAARASSYCPARLMEVPVADDLFWNVLERICKSPAALEKYIGENVAEKGSRPAAAEKPEKIARRLEKIAGEKKAIMAWFSQSLLTQSEATERLSALKSEELRLQSELADLRARSSREPEKIAPSDICAAVAACSVDLAARRRVVLAVVERVDVLRRDFNYGHKYIVDFKIKFK

SEQ ID NO: 969 - protein, 527 aa, synthetic construct
MAKRIPVAASDCDGMIGVIYARYSSHSQREESIEDQLRECHEFAARNNIKIIAEYTDSALTGRTDSRPDFQKMIRDSARGKFQVVVTYKVDRFARDRYDSAIYKAKLRKNGVRVLYAKETIPDGPEGIILESVLEGYAEYYSAALSQNILRGLEGNAMKCKTNGVQVLGYYTGEDGCYEIDPDYASVVLSIFQKYDAGVPQKEIIDDLNARGFRTTRGFAFNKNSVTRILRNRKYIGEYSWGDVTVSGGMPQIVPLPLFDSVQRKLDRGSRAPAHKWKVADYILTSKLFCGHCGELMVGRAGTGKSGKKYDYYACVNRTRRHGCDKKPVKKEWIEDIVVKYTKEVVLAEDMIEQIADGVMDFLEREKKSNGELDALEASLKNVESSIRNMMQAIEQGIITKSTKQRLMELEEQRDQISTAIAREKIATPDIERDQIVYFLEKFKEGSLDDPDYRTKLVEAFVSSVYLWDDGRIVINYNYTGENNQLTLRQIKQELVDIDGAEGSPLDSSAPLLVIRRDLLEEWEDTL

SEQ ID NO: 970 - protein, 463 aa, synthetic construct
MARSVTVIPARNRQVSGYRAAPQKKIRVAAYCRVSTDQEDQLHSFEAQVDYYTKYINDHENYEMAGIYADEGISGTNTKKREQFKRMIADCGKGKIDLVITKSISRFARNTQDCLMYSRKLKNLGIGIIFEKENINTLDSTGELLFTILSSLAQDESRNISENCKWGIRTKFKNGEMHLNTFKFLGYDKDENGKLIINREQAKTVRRIYRDFLWGLNPAQIAKELEEEQVPGCLGQTKWYASTVIGILKQEKHMGDALLQKTYTADFLTKRQVKNNGEVAQVYVRDSHKGIVDKETWNAVQEEFERREKFMQKHGTDRYSYGSECYPFCEKIFCGECGSLFTRHSWKSRGIIQWQCKNHRKDGKVACTNAYVDNADLEKGFIKAFNRLVGEREKHIERWDSMKLDGTPLEKIRAGQMMEATESGQLQQYIPEAAQLVLEEITIFGAKKYEFAFLEGSRVKVSV

SEQ ID NO: 971 - protein, 521 aa, synthetic construct
MELIYLRKSQADNPNESVEEVLEKHEYQLQEYAMQELGYTIPEENIYREVVSGETIQDRVEIKKILQLIELEEITAVIVIEPQRLGRGDLEDCGRIVNAFRYTNTKIMTPVKTYDLQDKYDRKFFEMELQRGSDYLEYYKEIQARGRLASVKRGNYIGSTAPYGYNKIQITDENGKKCFTLQEIPEEAAALRKAYDLFVNEAYGFRKIATALDELGFKPRKIAHWSPSAIKDMLSNPVYIGKVRWNWRKGKKVIENGVVHISRPKAKDSDIYEGKHQGIIDEKTYYAALDRMGRNIRARENVKIRNPFAGLLYCKCGRAMTYRTYKTPDGQDRCEPRLLCDDQVHCHSVSCTYQEIEQRVIAILKDTIANFEVELDQFDEKSHRIQTSTLDGLKAKQNAVKKKEVSLWEKYTEDAMPKDVFDSLLRKITTEKAHLERSIQNLEKAKKDKKYFCDHLVTFRNALTALTDPAIPAEKKNAFLKECIERITYTRQKADRQSTCKDKGDSSKAKPVIHLEVTLHL

SEQ ID NO: 972 - protein, 438 aa, synthetic construct
MARTIQQISFPAPMRPSLKRVAAYARVSSGKDAMLHSLSAQVSYYSSLIQKHTGWLYCGVYADEAFTGTKDSRDGFQSLLAECRAGNIDMVITKSISRFARNTVTLLETVRELKTLGVDVYFEEQNIHTISTDGELMMTILASYAQEESRSASENQKWRIRRGFERGELVNLRFLFGYKIEKGRVTVDPEKAAVVREVFRRALEGESLTSLAIDLNRRGFTGVLGGKWNSVRIREMLSNEKYLGNALLQKQYRNNHLEKKEIPNRGELPQYYAEGTHEAIIDQATFDAAQELLTEITENSPVKRPRQRSAFTSMITCTVCGRNYKRCTGGKRHFWNCPTAVQTDLPSCGTSQIPEKLLYDLAAQVLGLAQFDEGVFLERVKGIDALPDKTLVFHFKDGSTAERHWEHISRAKSWTPEMKEIARQRALAQRRGEKWQEP

SEQ ID NO: 973 - protein, 442 aa, synthetic construct
MIAALMRVALIRVALYIRVSSEEQARHGLSLQEQRDALIRYAKANKMTVVGIYEDAGISARKPYKKRPALLRLLGDCKDGKIDMILFVKLDRWFRNVAGYYDVQTQLDQYGVTWQATEEDYETRTASGRLKVNIMLSVAQDEADRTSERIKFINDGKRAKGQPAGSKAPLGYVITDRQYQIDNGTVDAARDMFAAFIRLKSVLAVKRYMLDTWGIDRAYSKYVNYFRNRLYIGEVYGIENACPALVSKQDFDIVNDIIRQRSQRCAGVDTDRVYLFSGILHCKECGKTMQSETVKKTYTYYRCRTRMLDNTSCPHTKRIREDVLEDYLLHELAGIAERNNRYYKKAEKKPTQSADSIRKKMSKLKTLYLNDLIELDDYKAEYSILKRSLETVEEKPKTDLDALRNGLGEYGTYSREEKKEFWTRFIKRIDADNDGAFFVTPR

SEQ ID NO: 974 - protein, 535 aa, synthetic construct
MQCNKTLAFYIRLSAEDADLKSSGKAESNSVTNQRKLLRDYYEQHTELCEYEVVEFCDDGYTGTNFDRPQFMLMMEQIRRREIQAIMVKDLSRFGRDYLEVGAYLELILPLFGTRFISANDNFDSDNFIGTTGGLELALRNLINGLYSRDLSVKVRSANKTRSRRGEYWGGSAFYGYRLDPKDKHHLLVDQETAPVVVRIFEECIAGKTAAQIARALNDDGIPSPASYKEKNGEFYNGRILEEKPIWVACTVLRIIKDERYTGKMISNKRETVGISTGKMRALPQSEWIIVEDTHEAIISQSMFSEADVSRRSRIKTVNQNTAGERADNLFVCGYCGRKLQKSKGKVTHLFCLKAGVSSNADCTRLHEPIETLQSSVLEVVKMLAKTLAEKAVQVKANANREEPLLEKKATMLKRTLQRAQNSKLDLYEEYRNGRMTRDKFIAAQEERQTAIDSMRDELAATEATITKLRAGKEKAAVLEADAKGIQLLNEYRPKELRKLIEKVRVYENGRIEIDFRCHDDFTEKIIKAVAQLAG

SEQ ID NO: 975 - protein, 484 aa, synthetic construct
MAQNLRIGAAYIRVSTDDQAELSPDAQLRVILDEAKKDGFIIPPEYIFEEKKGISGRKAGNRPEFQKMIAVAKSQSPAPFERLYLWKFSRFARNQEESTFYKGVLRKKCGVEIKSVSEPIADGMFGRLIESIIEWFDEYYSYNLSGEVLRGMTEKALRNGYQVVPSLGYKAVGDGKPFVIDEEKYPIVEYIFQAYVSGLDMTGIARKCNERGWTSKRGTPFERRTVSRILHNKFYAGTVEWNGYSFQGTHEVRPSVTNCFESAQERLNQEYRPANRRDVSSCKHWLSGLLHCSICGASLSFNRAGRVKKRGDTFVCWKYAKGVHKGPASISANKAEAAVMASLHSVIESGTVEFEHIRKQPSEGTDEISILDAALARVAVKESRIRDAYESGIDTLEEYKDNKLRIANERQELLAEIERLKGLAASAPDDVPSEEEVLNRIKDVYGLLSDPDVSYDVKGAAVRSIISDIVVDQAQKEIHFHYYA

SEQ ID NO: 976 - protein, 541 aa, synthetic construct
MEEIKCAIYTRKSTDEGLEKEFNTLEAQREAGENYVKSQKHQGWILVDEHYDDGGFSGGNMKRPALQRLFKDIELGKINMIVVYKIDRLTRSLVDFSKMVDIFDKYHCSFVSVTQNFNTSDSMGRLTLNMLLSFAQFEREIGSERVRDKTAASRKKGMWTGGTVPFGYRSVNKKLEIEPNEAEAVKFMFEMYIKYKSAMAVCKLLTEKGYRAFRRDAVLRMLKNPIYEGKIKYKHELYDGQHQAIIRQKTFEAVQYILLNKDKRERTCLFNRNEVGILRGLLICGCCHAPMTPASCQSHGVRRYYYTSTKAKYYGYHHCSNGAVPVALMDECMTKIVTPLISDINVLNGLINKICPDKSAEIYKVMRNPEKIIERMTERDKLQLMKLLIKKIIVNYDTIEINWSDLALSLLPAYLRARTQNQITIIDYPFKRNKGALTLSLPEEVAPNINYNAELITALCKAFKYQKIMNKEKQSIIELAANENIDSGYLGRLIRLTCLAPDIIKRILEGTQPTTIYLKRLLREDIPPIWQDQRIKYGFVK

SEQ ID NO: 977 - protein, 503 aa, synthetic construct
MGGRAAIYARFSSHNQRGESIEIQVEKSRAYCAENDLRVVATYCDFAQTGTNTDRAEFQRMMADAKRGLFDFVVIYKVTRIMRNRDEMAMARIMLRRCRVEILYAGEDISDGSAGVLQLGMLEVLAEYESALDGERIRDGIQKNAERCMANGCVRYGWDIVDGRYVVNEEEAAAIRLGVRMVLSGKSVADVVRAWEPYRTKRGGKWRFQTVRRILMRRENGGEYRYAGVVVPGGMPAIVPMDDEERVIRMLEDSHRPRAKTEAWDFPLTGKLYDGRDGGLMTGTSGTGKSGRPYHYYRCRSCGRTVRRDVVEKRVADAVREALGSADSRERIARMLADAEEERADEKPLSETIKGELAKIETAFSNIWAAIESGIAPPGGKERIDALKQRQTLLKDELRTAEALEAARLDYDRALFWLEGMAAAEVDDAQLLRTFVARVVLGGPDDDDGLRVAFTFDDSAGLGDNPSLPGAIGPGGEVFDRMNASSTISNRQVDIRIYLPFYF

SEQ ID NO: 978 - protein, 499 aa, synthetic construct
MRGVIYARYSCDRQKETSVEDQIRDCQAFALANDIDVIDTYIDRAQSGRSDDRIAFQQMLTASDRGAFDCVIVWKLDRFARNRYDSAINKARLKRNGVRVLSAMERISDNPEGVLLESLLEGIAEYYSLDLREKTYRGMMGRALQCKHTGGKPALGYKVNADKNYEIDEAGAQIVRLIFDLYANGKSYREILHILNKQGAKTTSGRPFGTNSLHDLLINEKYIGVYTFSRTHRKDGGRNNHASDPEAIRIAGGVPAIVSQDIWNTVQERMAENKRAPARSKAKVDYLLTGKIFCGKCGGAMVGMSTCSGYAYYECSTRKRTKQCDKKSIRKEVIENTILRCTVSLLTDSVIDDIAEVVAALSRKECSENAELQSVEHALSDVEKRIENIASAIAQGIITPTTKHMLEQAENERAQLLHRKSELQSIGVYPITKEQVIFWLESFRNLDIDSIEDQHTIIDSLVNSVTVFEDGTLHIIYNSQGKNRTTKCLDLQRTGLPAP

SEQ ID NO: 979 - protein, 460 aa, synthetic construct
MKRKLNNDKTILRVAIYVRVSTEQQAEDGDSIRDQLNSCETYIKAHENMILAGEYIDGGISGQKTKREDFQKLLSDVRANLIDLIIFTRLDRWFRSLRHYLNTQEVLDKHNVSWTAIRQPFFDTSTAQGRTFVNTSMAFAELEAQNASERIKGVFKDKVSHSEAISGRTPIGYSIVDKHLVPDKDAPIVVAIFEHYQAHSSMGETLRYMQDAFGIVRSRSSLKRMLQNKKYIGIFRDNESYCEPIITKELFYDVQRLLKLNIKTCKNRHDYIFSGLIRCVDCGYVMSAASNHNHYVRKSGEEVDHFYSVYRCHANRLHRCVNNKVFFESSIEKELLKRVRPELEQYICDYKLETAPVVQNKARIHKLQTKLSKLKELYLNELITLEEFRTDKADFEHQIEELQKEEQKPVKDLSSLEEFLKLDFENIYSSFTAPEKRRVWRSIIKEIQVDHHKNINIVFL

SEQ ID NO: 980 - protein, 514 aa, synthetic construct
MRTEYAIYLRKSRADLEAEAHGEGDTLARHEHILMELAKSRALPIGAIYREIVSGERIANRPVMQQLLSEVEDGRWKGVLVTETSRLARGDTIDQGIVAQAFKFSGTLIVTPAKTYDPTQEADEEWMEFGLFMSRQEYRMIRRRQLAGTRASKKEGHYVPGRPPYGYERYKLDGRGWSLRPVEPQAGVIRTIYDMYLSGKGFSEIANELNAMKIRTPLDKKWVPATTRAILQNPHYAGFIPSAMKVNTKIVQKGKLITKRPVNKNCELYEGIHEAIIPRDVWYSVQQRMKDTVTPRVPRKYQQMNPLAGLVYCDQCGKLMSRHPYRREDKVRFGCENPSCSTVSSLFEDVENLVLQSLREFLHEIELSSPTLLDTKSEEIALQNIEKQLTDINHRLQRTYELLEDGVYSKETFLQRQSAISQDQTALLNTKHEIERKLHNKQTDIEAQKNSAPLIRHVLDVYPTLEDPKEQNLLLKQVIRRIDYHKTVRVYGKAKSDLHLTIHPQIAIPQTSNI

SEQ ID NO: 981 - protein, 520 aa, synthetic construct
MSRKLIRVAIYARFSCDKQRDASIEDQLYECNKYAERHGYTVVMQYCDYAMSGRSDDRPNFLRMIEDAKTGMFEIILVWKMDRFARNIEEQYYYEHVLRKNGGVTFESVKENIAGTSIEATSTKALNALFAEVRSRQSAEDTMRGMLGKARKCQYLGYPLYGYSHDGDKITLDPEKAPIAKRIHVDFLSGVAPKQILDWLLSIGVKTARGKDPGYGFVVSMLKNVRYAGVYMWGVKKDEAGNDVLDDLGRPVPLVYIEDGMPAIVSMSQKLSCIEKLGFRRRLKTNADYLLSGKLICSKCKEPMHGETAIGGSGIEYWRYSCRGKRKACLGSFNKETVEQGVVSGVREMLRDAALVDYLIDRHIQFRDERQSKATIEAVRKDIRAVKKQRDNLLSAVAEGLDFNHVKPKIAALDAQERALEKRIEELKREQNSVSREELRAFFSDMSKGALSDEQITLTFVSKVWLYESTAVAVMNFDSCESTQYEIELALKKHERPDQQAVRETSKWCPRRDSNARHPL

SEQ ID NO: 982 - protein, 495 aa, synthetic construct
MFNYMYLRKSRAEEGQSTEEVLAKHRAALEELADRLGLPVDGVYEEVASGEKLYARPEMLKLLERIRAGEVEAVLCMDIDRLGRGGMADQGTILDAFRESGTLIITPEKTYDLTNDVDIEMTEFKAFFARAEWRAIRKRMRRGLMQTIEAGGYTANAPYGYRRCRIGKLPSLEVIPEEARFVRYIYERYLAGIGAQTIAQELNAMGSCPRRGAEWNRNTVRHVLRNPTFAGKVAWNRVKHYRPGTHGKDKHHVVYTPEGEWLMVDGVHEAIIPWDTWLEAQERRKQRYIPPSNTGQRANPFAGIIRCAKCGNNMQRMGSSSGEPYLLCTTKGCTAGAKFEYVEERMVELLYDELARLRLLIDSGAAPNVDALEAALAAAQREQERVQARIPRLYEFLEDGTYDRSTFRSRLDAAEKELAELASKRADLERQIDERRRSDPRKAAAALENLVQLYPTMSPADKNSALKALGVEVTYTKEKKTKPRDFTLELQLRDF

SEQ ID NO: 983 - protein, 534 aa, synthetic construct
MKKEIKEEPKKKAVVYARYSSHRQGEQSIEGQLAEAYKYAAAHGIKIIHEYIDRAMTGRNDNREQFQKMLRDTAKKQFETIILWKIDRFGRNREEIAFNKYRCKKNGVKVVYVAESIPDSPEGVILESVLEGMAEYYSLQLSQNIRRGQRASAEKCQCTGGNRPLGYRTDPKTKKYVIDKETAPTVKMIFEMYANGIPLADVIRTVNNKGLRTLRGNKFNKNSFKRLLKNEKYIGVYKYKDDILVEGGIPAIIDKETFERVQEMLKKNQTARPAKGKKADFLLTDKIFCGRCGEPMIGESGVGKTGKVYYYYTCTDRKNKKQACKKKPVPKDKIEKLVIDKIAEILHNEDLLDMIIDKVYAVYREEHNNDDERIMLNKKLAEIHLAQENILKAIEQGMISPLFKDRTAELTAQQSEIESELASIEAQEKIQLTKEHIRFFLEDLASKDIDDTDVQKKLIDTFLNAVFVYDESVTFAFNYSNNGEKVTLSEVDNINGSGDFFECGYDGGDDETRTHYLYNANVALSQMSYAPKRL

SEQ ID NO: 984 - protein, 605 aa, synthetic construct
MNEERKVAGIYIRVSTEDQVREGFSLGEQEEKLKQLCKYKDYKIYKIYKDAGISAKNMSGRPAFQQMLEDMRAGKINYIVAYKLDRVTRSVRDLEVLISELEEHHCYLVCDRDDVNTSTANGRFFVRMLTVLSQLEIEIVSERTKFGLTGAIKSGHIPGTCPLGYKRDTSKKMVIDETTKDIVIRIFNLYLQGKSYQTIANILNEEKVLEPKKWDDSTIEKILNNKIYVGDYERFKRVAKEQGKEPVIYSNVVEPIITRAMFEDIQLQKEKNQRAYCRDRVYIFMQKMKCPKCGKLMGSKGTGGKKKKYMYYHCSDCKIYLREDLIEEQVMPMIMDLIEYDMTVKKYFYPVLADKKEKNTDKLDKEINTLRNQKSRIKEAYLKEIVDVEEFSKEYKAIDEKLELLEQKRIETIDLNKQSFSQQHLMADRDVEKEKLIRSNKFYDMLMTEWKSKDKEEKQEFISKFLESITVEKDSKGNYKLVNLKLRKTFINQIFKLMQNGMFDMTIADEKDKEVRTTVMMDKRELEEYIERLNEYYEVSYYEVARLDEQKKGYQKKYLTIDETNDNEEKLFKLVELVTDDKKYPQKKVNRIVGAIRVKEREKVS

SEQ ID NO: 985 - protein, 571 aa, synthetic construct
MRIRKVAIYARVSTEHEAQLSALENQVQYYDDLIDRHPDWVLYRRYIDEGITGTSIAKRKNFVRMMEDAKDGHFDLIVTREVSRFARNTVDTLQQTRLLKRMGIEVYFTEDGIWTMNDEDGELRLTIMATLAQNESKKTSMRVKAGQMVSFQNGVIYGTGNVLGYDKVGPEYVINEAQAKTVRKIFDMYLAGNGSQKIKKRLEKDGDLTAMGKSLWHYSTISHILKNRLYCGELEYRKEYVPDYLEQKRAKNNGELDRIIVEGKHQPIVTKEEFEKVQKLIEEKRPQMEKCRKNRGIHSDDLWRRKLRCQCGHAFAKTRWHSKSRDFTTYTYKCYDQTRTGTVPARLKNGLSIEGVCRVPLVQDWKIHTMAQKVLHAVFDDPEGTLREAAAVLGLGAAGVGQTEVLREKSIIEEKLKKEQGRYETLLDMRMNNEIPKEVFSRKQQEVEKRIAELEQQMMQYGDVKPATDADMGGKLENLRRLMEQPPMPEDGEFSEEDIDKYVFGVRVYEDRFEWLLNLSPEARGELDDAGSPVYFTKLTVTPDDERAWFKMHPQWSKSNKYAELEAWIYI

SEQ ID NO: 986 - protein, 513 aa, synthetic construct
MPVAKLIAPTTKQEIPKLRVAAYCRVSSNSADQRNSFATQEHVYTKYIAEKQEWELVDIFADEGLSGMKADNRPEFQRMIRMCELHQIDLILTKSVSRFARNVKEALNYTRKLKLLGIGVQFEEDGINTLAMADEMLLNTFAAIAQEESKSISQNQRLSIAKRMEKGEYVASKAPYGYRLVNKKLKIFKPEAEVVCWIFQAYLNGLSIKTIADTLTAQGVLTRSGQEQWKANTITYVLTNEKYIGDTLFQKYYGEMTVPFKKHRNYGEMDQYYAKDTHEPIVEKTIFYAVQSLLKNRQATFKQEKSKNRYPLTSRIRCSECGSFYHRKVRSGVIKWVCAKHAADTNACNSSYYSEERIYDGIITMINKLRFCEEDILGQTIQKLEFAAAAYKRNNRAASQLSQSIAELNAKLLALERLRSKGYLAADIYHTQAREIRQQLGKLKTERYSSFESRITTMLEDVRKLKSLIDELEQPLEVFDEKLFHEVVTDICINNRDEMTVTLLGGLKFTEQI

SEQ ID NO: 987 - protein, 503 aa, synthetic construct
MMSNNRLAVIYARFSSSSQREESIEGQLKACYDYAKREGYSVVGEYIDRALSGTDAEHRPDFQRMIGNSNEKLFSYVLVYQFDRFARNRYDSALYKRRLRDNGVQVISVKENVSNDPSGVMLEGILETLAEYYSADLALKIRRGQATNSEHCRFNGGSIPLGYRVNSDRKFEIDPSTAPLIKRVFEEVAEGRSMKELIAELNSEGLRNARGRPFNKNSFKRILRNRRYMGIYIFGDAIVPGGMPQIVQEDLFEKVQNRLDSRQHEADIQTDYMLTGKLFCGYCHDMMVGVSGTSVTGRTYRYYVCRNARKGACDKKSVRKELVEDFILEECRRQLTAERITEIAVEVAKLVQKDLGENTHLRRLEKRLEQVKKKIANLLDALETGAEADFILERIRERRDEKNTLEVEIAKEKVNRPTLDEDAILFFLDELREGNIRSKKYRTMLFNVFVNQVYLYEDRAVLFFNAGKQEIEITKQLREDVEGILENDSSTEGASAPPIVTSR

SEQ ID NO: 988 - protein, 461 aa, synthetic construct
MVNRNRFEHIAGLRTGAYIRVSHEEQVKHGYSLDAQRENLEQFIKENRLKLVDFYVDEGISARKNPQKRKEFKRMITDVEAGNLDLIIFIKLDRWFRNIQEYYIAQQILDKNNVQWVATMEDYDTTTASGRLNLNIRLSIAQDEADRTSERIKFVFENKLKNKEVITGACPLGYKIENKHYVIDEETAPIAMAVFKEYNNRQSKRKTMDAVYAQFGMKLCARTVDRIIKNRLYIGEYRGIPDFAPALIDKAFFDEVNALFEKRSIRNNRTGRIFIFSGIIICKECGRIMQGCTTSYYNQQGRREIISYKCGKHYLDNSCDNSKTVNEKKLEAFLLNNIRSLLEQHVNYLVTKAREAPANNDGAKIKRRMEKLKELYVADLIDIDDYRKDYGECQQALSEITAQKNKAQCPDKLNAAKQFLNMDFESIYDALSQDERQQFWRKVIDKIIFDPETRGFSIIFL

SEQ ID NO: 989 - protein, 543 aa, synthetic construct
MEVKKIPKKTVTLIEPKRSVLVDKEKYHQKRVAAYCRVSTDSEEQLTSYVNQKKFYTDMIARNTEWEFAGLYADEGISGTRADKRPEFNNMIKACLAGKIDYIITKSVSRFARNTVDCLDYVRLLRARGIGILFEEQNIDTLKSDSELYLVIYAGFAQSESESISKNITWSYRKNFEDGKPIFMFKKLLGYKKGEDGEPVIVPEEAEIVERIYTMYLSGMTVDVISRQLQSEHIVIPDKKFSFGKNMVMNILKNEKYCGDCILQKTVTVDCISKTRKKNEGEAPMYIVENSHPAIISREMFNRAQEELSKRKARSPQSQKTAITASGKYSKYALTDVLICAECGSRYKRVTWTSLGQKRIVWRCVNRLDNGKKYCQHSPTLSEPALQEAIVRALNKFNDEDTSTYLTLMKATIGEAIGANGGSDEIDLLERRIDALNSRMLKMVSESVERGADMEENEDEFKTISEQIEQLNRRIEAIRKSEGSDEDRQERLSLIQATIDQREAHRDTYDDAIVRQMIECVKVHEGGKLTIIFGGGYEIEEQI

SEQ ID NO: 990 - protein, 504 aa, synthetic construct
MTKDLQTGVIYARYSSDKQRDESIEGQIRECTEYAQREGILITKIYTDRALSARTDNRPEFLQMIRDSAHQSFNYVIVYQLDRFSRSREDSAKYKGILRRNGVRVLSAKEHITAEPAGIILESMLEGMAEYYSVELSQKVKRGMTENALKGKMNGSAVPLGYDLTESHHLAVNAHEAKAVRLIYDLYLKQHSIAKISDILHSKGYLTKRGRKISPSVIKTILSNEKYIGVYSWGDIRIEGSIPPIISKSVFDEVQVIMSTRIKNKGRRSEMYNLCGKLICGECGGHYMGSTATSRNKEKHYYYVCTNRRKYHTCTAPNIRRDELEDLVINRTLEILNQPPNIAHIVDLVMSGYNNTTQEAKVAIQGINNKIKAIDTELNNCMDAIKQGFITERLKGEIENLESERNNLLEQKANHESALIPIKFTADHIEYFLERMAKENPTTKAGRSRILDTFIKSVTIYSDRVEIVFNYKNELPAFNTQCATGSHFKVLVGPPGIEPGTDRL

SEQ ID NO: 991 - protein, 520 aa, synthetic construct
MVKCMKSVAERAIPAVIYARYSSSHQREESIEGQVRECREYAEREGYSVLQVYADRAITGRTDERPEFQRMLADASKGVFQAILIYKYDRFSRNRYSFAVWETKLKKHGVKVISARENVAEGAAGIVLKSVLQGMAEWYSVDLSEKVTRGMKENALKAKWTSGTVPFGYTRDAEQRLIIDPERGEFVRQIFEKVLAGEKYVDIASWLNMLGVRTARGAAWNKSSFTWMLKNVVYTGLFRWKDIEIKNAVPPIVSKELFEAVQRKLKTYGRRGINVQKSDKYLLTPNIICGECGGPMHGMSGKSRSGELYYYYACANKRAKRTSCSISPLNRDELEQAVYNCAREVLLHEENIKLIAEQAEAVAEAQVDNELAEMKAERSRVKKSIANYAAAIANGATSGTIIELINAAEAKAAALDEAIAERELVAAPPKVSKEAIEYFLRNIAAAPDDKMKEKVISTMVNSVVVERVPDEGTKKDSDEKYSITVRFNFTDTPQLSALQSFDVREKSKMVTSAGLEPATF

SEQ ID NO: 992 - protein, 561 aa, synthetic construct
MNVVIYARFSSHSQTEQSIEGQLKECYAYAQRNDYTVVGEYIDRALSGTTDHRPEFQRMIADSAKKTFQGVLVYQLDRFARNRYDSATYKAKLKKNGVRVLSARENISDDASGVLMEAVLEGMAEYYSVELAQKIKRGMDINAEKCLSTGGNLALGFKTEGKRIVVDPLTAPIVVKIFEMYVTGSTMADIIRYLNANQIKTSYGNEFNKNSINRILKNKRYIGIYTYRDKEIPDGLPRIVDDDIFWAAQRIMEKNKKAPARAKAKVDYLLTTKLFCGHCKAAMTGISGTSKTERKYHYYQCVTNRRDKSCDKKTVSKKYIEDLVVNKLRDFLTPENISTIAKEVVDLCERENNNGNAKRLQKLIADNEKATENLLKALENGQAVDIIADRITQKKKEHDELSLQLLLETSQHPVPSMKDIRFFLNQFRKGDINDPKYRQGLVEMLVNKIYLYDDKMTVLCNTQDGHFDVDLKDVSSLKGQLVEAGGVEPNNRFLNQLWCNRLLIRRSICVAFCVISVAHQYGAVVLPKHDASNRQRKDDRRAHILFHVQAKEIRPGDRHIL

SEQ ID NO: 993 - protein, 569 aa, synthetic construct
MKKKFSSVPDPDIQDAVIYARYSSHSQRDCSIEQQVADCELFAQQNGLRVVKIYADRHLSGTTDNRPEFQQMLKDAAHGHWPFVICWKIDRFARNRYDSATYKYKLKKAGVRVLYAKESIPDGPEGILLESVLEGSAEYYSASLAQNIRRGMRFNAENCKVNSGSIPFGYCKGPDGRFAIHETNAEIVRDIFRKAAAGVPFVDIATELNNKGLKTSRGGRWNKNSFVLLKNESYIGVYHFSDIRIEGGMPAIIDLGTFLAANERMNANRRVRGRHHDGGDYLLTGKLKCAHCGSYMVGFSGTAKNGESHYYYGCQKRRRERACKKANVPREWIEKVVVKAALDYVLQPDVMEWITDAVMEYQEREASSSQLAALTAELEENQKATDNLMKAIEAGIITATTKQRLLDLETKAKDLKRAIELEKLSHVRLEREQILYWLEQFQGGSLQNQEFRRKVIDTFVSVVYLSDDHLRIAFNYSGQNRSEADFNLIMDAETASADYYPINSLSLPLCPPHKKNPNLFPLEKGSDFSFAAFLTASFSFPVSAARLFYRCRLHIRSGCRLFRQRGGRE

SEQ ID NO: 994 - protein, 516 aa, synthetic construct
MAHAQKQVRIIEPLERFVNRINLVGCYARVSSDSEDQLNSYNNQVDFYESYVNSLENSKLVKIYTDEGITGTRMDKRDGFLQMIEDCRKGLINRIITKSISRFARNITETLSVVRELKSIGVSVYFMTEKIDTAKMGSEMMLAVYAACAEIESKAISNAQKWAFRTRAKEGRYNQPKLPFGYQRIDGEVKVIDDEAKIVEDIFNKYVNKDFSVTKLVDYLNKHYFKKKKWSQSTVSSMLKNERYCGDMLLQKKYSPDVFPYKLVTNKGELAQYYVYDVFPKIIDRELFEKANEKLVNNKLKFNKNQTDGNREYLLTSKIKCEHCGGTFKRSVLRNKEYWSCSNHVTSAKKCEVKMIGTYEIEDAFLKIFYKLKENIHVLEAYKKHIVNFTTNDDDKCELDLVNRELKKVSSSINTLVRYYQKDLISLEDYKKKHNELLVDKSVFEMQKCKLNEKIYQRFEVIQTQIIIECLESVKEITALDEEIFNTLVDSIEVGTLDIQFTLKNDLKLKVERKQF

SEQ ID NO: 995 - protein, 525 aa, synthetic construct
MKNRAVLYLRLSKEDLDKLREGDESASIKNQRLLLIEYALTNNFEVVKIYCDDDESGLYDDRPGFEEMLEDAKLGLFDIVIAKTQARFSRNMEHIEKYLHHDFPNLGIRFIGVVDGVDTAVASNKKSRQINGLVNEWYCEDLSDNIRSSFKIKMKKGQFLGSSCPYGYKRDPSNHNHLIVDKYAANIIRRIFSMYLSGCGKAKIGSVLSADGVLIPTLYKQQILGENYKNCRVMETTKNWSYQTIHTILNNQVYVGDMVQNRANKLSYKDKKKKKLPKEQWIIVPNTHEAIISRDTFARAQEIQQIKTRSVNGNQVNGLFSGLIFCADCKHAMGRQYARRGDRGFIGYICKTYKQQGKRFCDSHRIKNDELEEAVLCSIREEAKKILTEKDIDDLKKFKAVEAYQTNYELQMEQIQQEIQKIESYKRKTYDNFMEELISKTDYVNYISDYDKKISKLKRQKESISEKVDMQEELNHQYDEWTEAFKNYINVSKLTREMVLELINRIEVHDDGAIDIYYRFSNPYL

SEQ ID NO: 996 - protein, 469 aa, synthetic construct
MMKKIAVLYMRMSTDMQEHSIESQERVLMEYAKRNGYVVIRKYIDRGISGQHASKRPDFLKMIDDSETGEFQFVLIYDSSRFARNLVESLTYKSILKENCVRLISMTEPNLEDDEMSLYIDAMQGATNEIYVRKLSKSVKRGHNDRALRGDLPGDVQFGLKRLKDGSIVLDEVKAPIMRWMYEAIYYDDSSYYSICETLAAKGIKSQRGNIIDSRQVKRMLMNIKNKAYHWAEKDGKPILKKGNYPAIVDEEIFDAVQEIIAERAKHYKKNEKPAEFRKHWLSGLLVCPHCGAGYSYNTRKPPQHDAFRCGNQTRGACKKGSSILVDVAVEMVLDKLSEVYAGPLAPYVKNITVSQPEPQIDYDKEIKLLEAQLKRAKQAYLAEIDTIDEYAQNKRRIASNIKELHEAKNQAQEGAALNEPQFKVKLLNAITLLKSDCPMSEKIPAARSIIEKILVDPRNKTMDIYFFA

SEQ ID NO: 997 - protein, 612 aa, synthetic construct
MRAAFLIRCSTKKQDYERQVNDLTRLAKKFGYTSSDNMIFGEHITGKDDASKRDRQSIQRLKDAAINKEFDVVLVSEVSRMSRDPMSGRLYVRQLINMDIPVYFRDIDTWTIDPVTGKKVRDAETIIGAAFDAAWKYIKSMKTQIASGRRDELDNNQMSIGQPFFGYKRYGGRDKGKKNSWVINDDAAKVVVDVFEEYVKDGATLKSTALAITAKYGEQFNKKFSIGTIEHILTFEPYCTGIKVVSLTDPDTEDVDEFEVEIPTIITRAMFDKATTKRATNRTARTPYPKQATYILSKLLKCPICEHSLTPQKRGGDKGDKYRLMNGKVAIRWSCMSGINNATDCSSRITISNEKLEAIIWGLIKQELIGFANLNDEDRVAKVEELTDKITNLEMNIANFTSHISNMDRLIERAYSAYMDAPDSVMDIAKDKYYKTLTKCENERAECKGKIEALSAEKLRLENMRTFFNQPTLPKDAIEKAESDPIKMRNLVMELVDKIYPYRITTYVSPATNRIMKNGIVLLEVYTINGIYNVLYDGNQRNNKVAYYISGVYATFQNGKNKLDAYDTGEYFVISNATLVTETEDVDLTVTFNELIKICMQNGWEIDYTYKM

SEQ ID NO: 998 - protein, 515 aa, synthetic construct
MSYLIYLRKSRKDLENPFMTTEEILNRHECILLDLAKKMNLSIGDIYREIVSGDSISARPVMQKLLREVESGMWEGVLVVEVERLARGDTVDQGIVQRTFQYSETLIITPQKTYNPSSESDQTFFEFGLFMSRQEYKTIKRRLKSGVMSAVREGKWPYNSAPYGYRRYKLANQKGWSLEFDDQERPIAELIYHLFCDEKRGLGYISDYLEARNIKSRTGGRFTESFLREFLRNPANDGKVFYGRRKVVTKIVNGSSVRTRPRADEYIEVAGLHDPLIPHDLFLKAQERFRVSTPRNPSSYAVKNPLSGILVCSECGHKLQRRPASTSKRGAPYDVLMCKTRGCPTIGSAVEVVEREVLRALEDIVRGYEADVPSVPSLIPQKEELLHNAILHRADLNKQQERIYTLLEQGIYSTDVFLDRSKAMESQMQEAEHSIEIFKKELEEEKIKYDNWKSFVPTCKQLLKLYWTLTPDARNAALKEVIDRIEYKKLTRNPKGMYDVATFELTLYPKIPSKS

SEQ ID NO: 999 - protein, 622 aa, synthetic construct
MKEYEERTETIEQQKALIRERYKGINPDELDVIPALPKPDIFKTSSMLRVAVYARVSTDDPRQTSSYELQKNHYQDVVDRNPNWNLVKIYADEGISGTSLQHREAFKQMVQDCEDGKIDLILTKSVSRFARNVVDCIGYVRELLSLRPPVGVFFETEHLNTLDPKSEMILSFMSTLAQEESHTKSEIMNASIEMRFRRGIFLTPPLLGYDQDENGELKINEHEAKIVKLIFYMYLNGNTCQEIADTLTELGCKTKKNNEVWSSGSILQILQNERHCGDVLARKTWTPNYLDHKSRKNNQDRNQYRKREHHEAIISRDDFIAVQKLISNAKYGNKALLPELHVIPDGALKGFITVNPRWAGFKPDDYRAASSSISDSESTPSDTIPITAQLGSFDLRGYEIAHGQFFETTGKISATLSYEKLNFSTEALRKFGEIKTVELLIHPSSYLLAVRPCTLEDNRNKVQWARLRNGVLVPRYIYGAAFLPTLYELFGWNPNCKYRVLGVAHQKGSENVLIFNMKETEVRIPNEVPATTDKDSPNKSAEASSTPKTILGYPAEWMNSFGNNYYSQTHARELVAFTNNKNWQITSEGQPYKESELHTTSKADLTKGIVEIMEEIKENRND

SEQ ID NO: 1000 - protein, 487 aa, synthetic construct
MKTDAVYARQSVEKKDSLSIAGQIDLCRRTAGGGELRIYKDAGYSGKNTERPAFQQLMKDIRADRIGTLYVYRLDRFSRSVADFGQLWEVLQEHHVEFVSVNENFDTKTPMGRAMLHIIMVFAQLERETTAERVRDNYYRRAALGAWPGGPAPYGFDNGRARGRDGREVPSLIPNDKAAVVQRIFQEYAAEGMSLGLLARKLTAEGIPAPKRATWDNVTLSRLLHNPAYVMADEQVRLHYLGQGVEVTSPPEAFDGVHGVLLVGKREANARKYTRTENHRASVLNSVGIVPSPLFLAVQAKLAHNRQVGNSGKGKHTWLSGLLKCAKCGYSLSVVADKSYRYLVCSGRYNVNRCDAAIHVKLAELETVVQTEMEKLLAQCPREPVEPKPEDSYTRRLLELDRRAERLMDAFAESEDLPASYLQKALGKIEKEREALRQAQRRESGRIPLPEKLVFGELSFEEKKAVAAQFIHRIEVAEDSAEIIWAV

SEQ ID NO: 1001 - protein, 580 aa, synthetic construct
MAKCILLVRVSTDSKKQELSLREQESELFELALSKGYCEEDIIAICKQESALKRRYAKTSEEKDAIEIKQQGLQEMEDMIKNDSSINCVFAWEISRISRREKVLFDELEFLTDRKIQLIIAKPYIELLNSDGSLNPSSKMQFSMFAALADAEMRNKLDRFQRTKESRRKEGKYVGGWLPFGYMVEPSTKKIIINEEEAAIVKYMFNEYLKGGTSIYKLADELQERGIIDYDNRHSAFTFAYTILKNYAYAGLPSTVRQKGKKASTNLYPAIVTKEMVDKTIEMSEQAKTKPKTNVKNIYYCKSLLKCADCERVYVARLNKAVYQCTNDNGKCNNAEISINLADTILWNFAMTLKISQMLHQTEEDKAAYQVQIEVLKQKIEKINIDIENNNKAYSILNKRIIMQKITEEDGEAIEKELDTTKKELEKKLNDYTNKVAEIEQILFNMNTSIAFKHINIDDIADIEDDNLRYEIIHEMIDYCMIEKVADSIIKLELYAKHIDTAYTYYVTTRNRKIYNKDFRIEEAYTSNTTHLVDFKILQRYKRQGKANKEYQKQYYQKNREKLIKQNVEGKRRRKSKPEN

SEQ ID NO: 1002 - protein, 506 aa, synthetic construct
MAIALYARKSIERENSISCETQIEYCKSVIKPDERSEKTIEFIDNGYSGGNVDRDGFQKMMRQIERGKISKVIVYRLDRISRSLSDFVGILETLKKHNVQFVSSQESFDTSSPYGEMIVKILMVFAEFERKSIIERVKHAYAYRSEMGLYMGGRRPYGFNLKDTVINNVKTKMFEPVANEIEQIKYIFENYSIPNVTLRRLMDNLIDNNISATTGSWSTAKLSNIIKNPIYVKADNAIYEYYSKRNANIMSDINQFDGLHGIQTYGKSKHTADDMSDIKIVVMPHDGIINSDLWLKCQKKIEKNKKLGNSINNSTSWLGGKIACKQCGRTMTVTKGGKKKDGTQTRYFSCTGKSHNRICNGPKVTLYADSLEDMVYNLIAEKLQSLKGSRKKISTDNSNKINLLKNQLSEIKQSQEKIVNMLLDDSFKSDMKSLLNEKAKKLSEESKAITEKIEDLESEENEIISVINLSQKWKNANADERKAVCNVLIHKIFICEDGTCEVVWNI

SEQ ID NO: 1003 - protein, 556 aa, synthetic construct
MKTIRCAVYTRKSTEDGLEKEFNTLEAQRESGENYIKSQAYQGWEIIPTHYDDGGYSGGTLKRPALQQLLRDVEAGMVDMIVVYKIDRLTRSLIDFSKLVEIFDRNQCSFVSVTQNFNTYDSMGRLTLNVLLSFAQFEREVITERIRDKVDASKKKGMWMGGVLPLGYVSVNKKLEIIPEEAKIVRLAFEKYLIFRSEIAVAEWLNNNGYTTLSKGNGKFTHMRVSSLLKNVLYIGKVPHKDKVYNGQHHAIISQELFDEVQKIKSQNRVGRLAPSRFVEHALLKGLIYCDCCQAAMISTKSNKKNKVYEYYTSFRAVKEGFNNCKIGSIPAGEMDNFVLRQIAGIIKSPKILSGLIERAKIIRPDIKDVQIISKLKDGDDFIQRLSSITLRQLLVMLVQKIRVDVDRIKIMYTELAVSLMDDKMKDDLFPNNINGERNEILYRVCLRRKRGSLKIFAPEKYKPDENNPLYLALIKAFVWQDKMKKENLFIEDLAKSEGLSREYVGKVLRMTYLAPDIVTAIVDGVYPKTLSLRKILESEIPLLWSQQRLKYGFSF

SEQ ID NO: 1004 - protein, 525 aa, synthetic construct
MTKKVTTIPALLNKQSTNQVGIVKKRRVAAYARVSTDQEEQLTSYEAQVDYYTNYIKSRDDWEFVDVYTDEGISGTSTKHREGFNKMVKSALDGNIDLIITKSVSRFARNTVDSLTTIRKLKDIGCECYFEKENIWTFDGKGELLLTIMSSLAQEESRSISENVKWGHRKRFADGKVSVPFNNFLGYKKGEDGNLVIDEEQAMIVKRIYREFLSGSSSVAIAKGLTNDGIETPGHKQKWYATTVRSILTNEKYKGDALLQKHYTVDFLTKKQKINNGEVQQYYVENNHPAIIEPDVFEMVRLEIDRRLMLKGKYSGTDILTAKIRCGECGGSYGAKVWHSNDKYRRVMYQCNSKYSGKEKCKTPAIRSEDIESRFVNVVNILIESKDEIISNLEKVLDKICNKKELLEEKEKLENSLTEQVEKIQDLIDINSRVAQNQEKYKKEYDALIKNYDETKCKFEQLEIKLSQQAAKHQMIKDYINTLKKQEKLLTKFDGLVWGSLLESATIKDKDVIVFRFKDGTEING

SEQ ID NO: 1005 - protein, 545 aa, synthetic construct
MKKQQHYKAALYCRLSVDDGNFGGSVSIETQKILLEQYCKDHKITDYKFYCDDGCSGTNFDRPSFKKMLSDIDEGKINLVIVKDLSRFGRNYVEAGMYVQRFTDSNIRFIAADDNYDSLVNSDDLLFPIKNVVNEMYARDVSKKTKAAKKAKARDGQFIGSKAPFGYKIDPNDRHHLIVDEPAAQVVKRIFRLASEGVGYNKMAKIFREEKVLTPIAYFNLNNPDYFKSDYWRKEFDWHVTSIRAILNNEVYLGKLVYGKQRNKSMKSKEKVRNPKEDWIVVENCHEPIITQELWDTVHKILNAKHRPAKAGEVQMFAGLLYCSDCGHCLTYSQKQRKDGSYHGAYSCWMYKTHGKEYCASHYITFDTIYELVLIDIQRNLFQYRKNTDKFKSILSRKYQSDSQKQAEQITLEYEQKQKRCEELDKIISRLYEDNVLGRIGDERYESMSQSYELEQVEIKKALPILKSKIDELKRQSDCADNFINVIKKYTIIDKLDAAILNELIDKIVVHHKEQAEDGRTFQQIEIYYRFVGKLGTENELSKAA

SEQ ID NO: 1006 - protein, 525 aa, synthetic construct
MPTSKNTARKYAAGGSSDNSCGVEPLRAVIYARYSSSGQREESIEGQLRDCYEFAKKHGIIVIGEYIDKAMTGRVDRRPDFQRMMKDSEKGRFNCVLLWKMDRFARNRYDSAMYKYKLKKNGIRIFYAKETIPDGPEGIILESVMEGYAEYYSENLAQNVKRGNYDSALELKTLGKTCLGLKTGPDGRYMIDQAEATIVRRIFEEYAEGERAKDIYERLNSEGYRTSRGGKFNKNSLRRILSNKKYIGVYEYEDIYVENGIPAIITDRDLFERVQKMLKINHDAPARGKAQNFLLTTKLFCGLCGSPMIGDGGTSHTGKAYAYYSCTKRKRGRSCKKESVPKDWIEDLVVGELVKIVHNDELIEQIADRVMEYQKREKDQSGLHALEIRQKENEKAISNMLAAIEAGIITPSTKTRLMELEADRADIEKGIAHELLAEPEFERDQIIYFLERFRSGDINDEAYRIMLVDTFLNSVYLYDDDHLVLVMNYSGENCKVDLKLVEGAVSGDGCKGSAFAPSSAFYMLG

SEQ ID NO: 1007 - protein, 564 aa, synthetic construct
MARKKRVHASPMRPEIQGALWVAGLYGRLSVLDNGKVDGEPIESQIAIIEQYVAGHPELKIVERYIDNGYTGTNFDRPNWERMMADVKSGRINCIIVKDLSRLGRNYIETGRFLERICPKLGIRFISVNDNYDTAEIKSQDEFAASLKNIVNDYYAKDISLKSGSALKAKRQRGEYIGSYAPHGYLKDPSNKNHLIINPETAPVIQQIYQWRAEGLGYGTITRMLNERGIPSPGRYRFEHGIVTNNNKKGSSLLWNRHALTDILRNIVYIGHLAQGKCTASLARGIPVHRTPESEWDIAYHTHDPIITEELFNQVQEINRSRADAYNANYGACSHLPKGDNPYRERLVCADCGTQMKLYRNLSKNHKKAYFTYICPTYEEHQELRCTKKTIRSNALDAMVLKTLKIQMELFCDAQQVLERLSKKQPKFPAHTEENELQQLEQQVKRKQGYATSLYADYRTGLLTREEYTFARGKYQEEVAALQGRISQLQERLTLTSQVSDCAKSWMALIEQYKSAEIVSRELVTAFISEIRLSADGSIKVSFLFQDELSRIRAHCKAVESEVA

SEQ ID NO: 1008 - protein, 564 aa, synthetic construct
MEKKQKSALYVRVSTTHQIDKDSLPLQRSDLINYTKYVLGINDFEIFEDAGYSGGTTDRPAYQDMMNRIKMGEFTHLIVWKIDRISRNLRDFSDMYDELKKYNVTFISRNEQFDTSTAMGEAMLKIILVFAELERKLTGERVFSVMISRAQKGLWNGATVPLGYEWDPETKFPRPCDKEAKIVQYIFDQYEEIKSTTKVAKKLNIENIPTKRNGTWTPRTVGSILTNPFYIGTYRYNTKTKKTRRWKDKSEWVVLENNHQAIVNTEQFERVSQIIQNNYKGDKNYQRSSTNVHILSGLASCHKCGKKMHSGLDRARKDGFTPSRYTCYAFNVNYTCANYSSDLAILPGLINYIANYMTLQERITARHSLRDMESILLRGKYFEDIDHIEKQDLKNTYDLLINNKMVTYNSFEEKNKEAIISQNVIYEAEKEKYEKALKRLDDLYLYDVNSMSQKDFVIKRKEISDKIETINKKIQEVKFNDTPFINNKDFNLLSKASFYLLTKNLSSVKNIDVISLLNNLDRQTIKDFINTIITDVSVEKGKIYNITFKNGIVHHFIYKNEHKI

SEQ ID NO: 1009 - protein, 477 aa, synthetic construct
MKIAAAYLRVSTEEQDEYSLDSQLKLIREYAKNNDFLVPDEFVFTDDGVSGRNARKRESFQRMIALAKQKEPPFDSILLWKFSRFARNQEEAIVYKSLLKKAGIGVISISEPLPDGPFASLIERIIEWMDEYYSIRLAGEVKRGMIEKVSRGEPVCHPAFGYDLKEKRYYPNSDADWVRWVFSSFSSGMGMRQIAAHLADHGVRTGRGGLPDNRFVEYMLNNPLYIGKIRWSPEGRKASRRKYDDPSNMIVDGLHDAIIDMETWEKTQGRLKQLKAAYRKHQRPGQPVQFMLKGLVHCSSCGATLVYQSLACPSLQCHNYNRGKCKTSHSLSVSKANAAVISALEYSVDNLDFALDPDENTTKRASERDYKKLISAEQTKLGRVQQAYEAGIDTLEEYAEKKRRILEEIESLRQQANEEKNVQKFDPIEYAKKVSAVLELIKNPTVAENAKNEALRSILSRIVYEKKKQNLALYFYI

SEQ ID NO: 1010 - protein, 503 aa, synthetic construct
MYNDSKGIYLMYLRKSRADEYNQDVENILKRHEKELQSLAKREFGELIPEKYIFREVVSGGTIKDRPLMKEILKMMESGIIAGVLVVDPQRLSRGDLLDQGHIINAFKYTNTLIITPYKTYDLNDTTGTDVKLLKMELNHGADYLDYYKMIQARGKLASVRAGNFIQPIPPFGYRKVRYGKVTTLEPIEDEAKIVRIIFQKYAEGKTICGVTNELNAEGYIPPSKQIWTKGSVKRILSNPVYDGKIRWGFTPNETVMEDGKLKKCRPERHDYLLFDGKHDAIVKHGLFMSVQERLSKNKSFTNDRSLKNPLYGIMYCKRCGRKISRQNVTESRGGHRYACPNKLCDVQSSRYDLVINAVIDAVQHAIDDFDITIYDCNTSDSSEKIRDLRQELTKLNNKEETLFELLETKVYSTSVFTQRHAELEKKRQEIIGEINTLSLVVPPESCNDKKMRFKDALLALKDESMPPKEKNRLLKNCIERIDYDIEGVRYHSKVKLDVYFKF

SEQ ID NO: 1011 - protein, 590 aa, synthetic construct
MKTVEKIERKLPVLKTRKRVAAYARVSMESERMQHSLSAQVSYYSALIQKNPEWEYAGVFADYGISGTGTKKRDEFNRMLAECEAGNIDIILTKSIQRFARNTVDLLNTVRHLKDLGIEVRFEKENINSLSGDGELMLSILASFAQEESRSISENVKWGTIKRFKQGIPNGKFSIFGYEWQDDKLVIIPEEAEIIRWMYAEYMKGASRIEIGRALMDRGIYTRQGKPWMDSNVKVILTNITYTGNMLFQKEYCEDPITKHRRKNYGELPQYFVEDTHEAIIPMDEWQAVQAEFKRRRDLGPFGNKSLKLSAFSTKITCGCCGKHYRHSGKRNTAGEVYYIWTCQTKSQKGASACPSKNIPEKMLQNTTAEVLGLAEYDEDAFSQQIEEVIVIGDDTLTFRFYDGHEVTTKWQSTAKTDWWTDERRKLWGERHKRKDTNPNRHLFYEFTGFIKCGCCGANYRCQSGKRKDGTPTRSWYCTGPKAQCHNPGIRDETMKRLVSDVLGLDEFDEAAMDAQIENATILDHTVTFHFRDGHTESRDFLDKRHGTPWTEERREKARASMKAAWTDERREAMSERIKKIRSEKKWPNP

SEQ ID NO: 1012 - protein, 561 aa, synthetic construct
MTNSQNLGTIEATNPVLAVAPLKEETEMLRATDKITALYCRLSVEDMKEDKKGGKEDVSNSIQNQKMILLQYAKENRFPNPIFFVDDGYSGTNYDRPGFQAMLAEIEAGRVAVCIPKDLSRLGRNSSLTGLYINFTFPKYNVRYIVINEHFDTIDPNSTDSDIAGIKNWFNEFFAKDTSRKIRAVQKAKGERGVPLTTNVPFGYLKAPEDKTKWIVDEAAAVVVKRIFKLCMEGRGPMQIAKLLQEEKVLNPTAYKRRAGIKTPSPETDDPYHWNTNTVVHILERREYTGCTVNFKTYTNSIWDKKQRETPVEKQAVFYNTHPAIIEQEVFDKVQEIRQQRHRRTKTGKSSLFSGMVYCADCGAKMRYCTTNYFEKRQDHFVCANYRSNTGSCSAHFIRAVVLEELVWMYMRTVISYVSRYEYHFRAVMEQKLRLSSEAAIRGHKKRLAQAEKRLGELDRLFIRIYEDNVAGRITDEKFSMMSKTYEDEQAQLKAEIQALQQEIEVQERQIENLEQFIQRVHKYKDLDELTPYALRELVKGVYIEAPDKSGGKISAFPMTL

SEQ ID NO: 1013 - protein, 522 aa, synthetic construct
MAKTVRAIPATISRFTAAPINSRKKRKVAGYARVSTDHDDQISSYEAQVDYYTNYIRGRDDWEFVGIYTDEGISATNTRHRDGFKRMVRDAMDGKIDLIVTKSVSRFARNTVDSLTTVRKLKDKGIEIYFEKENIWTLDAKGELLITIMSSLAQEESRSISENVTWGHRKRFADGKVSVPYRHFLGYDKGPDGNLVVNKEQAKTVKLIYRLFLDGYTFHSIAGELTSQGLKTPAGKSKWYPKTVESILINEKYKGDALLQKRFTVNFLTKETKDNEGEVPQYYVEHNHEAIISPQVFDWVQEEIKRRREGKKRYSGVSIFSSKIKCGDCGGWYGAKVWHSKDKYRRTIYRCNDKFRNHCKTPHLTENEIKDAFVQAVNQLIGNKEEILSNIVVLKQRLTDTGSLEKERDALELDLNMLADQVQQLIAENARVAQNQEEYSRKYNELVSRYEETKKKYDQACAAMKRRIASSRQLESFIKDLQEQELIKTFDERLWCSLVDFITVYSKEDIRVTFKDGTEIKA

SEQ ID NO: 1014 - protein, 512 aa, synthetic construct
MKRITKIDAAAKETKKLRVAAYARVSTDSADQLISLEAQKEHYEQVIKNCPNWEFAGLYYDEGVSGTKMAKRDGLLRMLADCERGLIDYILVKSISRFSRNTVESVETVRRLSAMGIYIFFEKENIDTGKMEGELMLSIMSSLAEDESRSLSENNKWSIQKRFQNGTYVIGTPAYGYKNADGKMVIDEEKAEVVRRIFDSVLEGKSGGTIAKELNAKGIPTARGVQWRGSVITAMIRNETYTGVAVFQKTYKDDQFNSHVNHGERGMYRIEGHHDPIVSEEVFLAANTAVDNNAKEKGMVRNSGKYSVRYALSGKIFCGECGGKCKRKKIYGDIWYGCETHARESKKCRQLPVRADMVEAAFVNMMNKLIYGRDAVLLPMSGRLLGGGDKEIIDRLAEINTELDAVAERRQAADKFFAKGLLDAAVYREELDELARKEKELHTVRAGIEGDPNLDSDRQRALNELLRYTAKAELLTAFSDEVFTKHVDRVIIFSRKEVGFAMKCGPVFRERI

SEQ ID NO: 1015 - protein, 505 aa, synthetic construct
MKKYRAGIYLRLSHEDIEENNSIEAQRMITHEFANKNGYLIVEEYIDNGYSGMLNSRPALNKMMVDISTNKINMVIVKDISRLTRNKNKTGYYTEIFFPDNDVRFISVTEMIDSGERYEIDDSIMLRGIVNQYYIADISKKVKAVKTNKKLNGEYVEYKVPYGYKKDENDKYKVIEDEDVSNNVRLIYSMYLKGYSQGQIARHLTKLGIDTPKKYKGEKVKINEWRSDTVGRILKDPFYIGKIITNKYVTDYRTKKTKKTPKEKWNIIKGKHPALVSGDDYDLVQKKLEEKYIAPKQKYEYLLRDLVFCGHCKARMQYKYRTRTNVKDRILENPQKSWYFKCRMLYRFPSICDRGHTIKEEMLNEIVLKSLKDRLSMFKVDEYTGKVIDEFKKNDANYKLLEGYKKRNTKIEADITKIYSKKLEGSISVEEFKEEYAKLKLEKKDAQSNIENLESICKDSEIDSRLKEIIINFKNGIDFDNETIKILIDRIEVFEDRTINIIYKI

SEQ ID NO: 1016 - protein, 518 aa, synthetic construct
MTTIPATISRYTAVPINSTKKRRVAGYARVSTDHEDQVTSYEAQVDYYTNYIKGRDDWEFVAIYTDEGISATNTRRREGFKAMVADALAGKIDLIVTKSVSRFARNTVDSLTTVRMLKEKGVEIYFEKENIWTLDAKGELLITIMSSLAQEESRSISENTTWGQRKRFADGKASVAYKRFLGYDRGPNGGFVVNPEQAKTVKLIYKLFLDGLTCHAIAKELTERKLPTPGGKAVWSQTTVRSILTNEKYKGDALLQKEFTVDFLQKKTKKNEGEVPQYYVEGNHEAIIDPVTFDYVQAEMARRTKDKHRYSGVSMFSSKIKCGECGCWYGSKVWHSTDKYRRVIYQCNHKYKGGKPCSTPHVTEEQVKDAFVRAVNILLSEKAELGANVRAVIAMLCGSAELEKQQAELKEELEVVVGLVERCVAENARTALDQDEYSERYNGLVSRYEAVKAQFDEVTQAIADKNDRKKLLEQFLRMVETQEPVTEFDERLWSSLVDFVTVYREKDIRVTFKDGTEI

SEQ ID NO: 1017 - protein, 609 aa, synthetic construct
MIRAVIYCRCSTEEESQKNALEKQVAEAESCVRQYGWVLVDRYVESRSGTTAKGRNEYKRLFNDLLTDKFDVIVIKSQDRLMRNTKDWYLFVDRLCTEQKKLYMYIENKFYSTDDALITGIKAILAEEYSRELSKKINNAHRNRQRDGGNVMLPGNAYGFKRMPDKSVALVEKEAEIKREMYRLCAAGYGTRTISTIMRNRGIVNRDGKPFTSSYILRMLRNPINKGTAVMGKYHFDFDSKRTIKNPKEKIYIHEDKVPRTVSDELWNVANEQIDKRSVKTKDGEDDIGKNPGKYQLSGKIVCGMCGQPYWRKVHRKHSNHELIYTWACSCYLELGRSDNLRARPNLRKVFLENEKGCDNINISENEFYAVLEEICSNQYQKNKKKIIEKMMKLLSKSLNNQDGTKEIEKLEREQEDIERKMKFLVDKLIDGVLTDQMYKTKQEELEKKRDQNKKKILELTERTSNTQNIKDRLQEIETRLNDDDLFKKATVDDMLEEVDKIVVYPRYMEIYFSLSSVTGCMDLKIFDGDKKCFRVDYGNRLDYKSRQCDAREVVVDLIRENPRITGKMIAKEIGCSLSGANYKLKVLKKEGRIRFNGAGGKGCWEILE

SEQ ID NO: 1018 - protein, 549 aa, synthetic construct
MARKSRKQTAAPMPAPSLYVYVALYIRLSVEDNKKRGCSVENQKLVLNDFLSDKPDFVVYDTYIDNGATGTNFHRPGFQQMLSDIEAGHINCVIVKDLSRLGRNSIDTGYYIEQYFHAHNVRFIAVTDQFDTADSGNLHGGIMLPLKNMINEAYALDIGRKIKAQARQAMKDGDYIGARAPYGYRKDPDNCHKLLIDENTAPVVKQIFEWAHEHVSLNRIVRNLNEMGIPAPSHYKKATGEITSPGLIGSGKWQTRTVMKILESEVYTGDLVQGKTKIVDHQQVKAGEDNLIIAKCTHEPIISYELFNAVQEYRKQICEESKATPKRPYTPNIFKGKVFCADCGRSLHRQRAERRKGPDTYWFHCLTNSRVEKDSCKGATMQEKELISTVTAILEKELTVALGMSLPLFQLEARQKQEKDKLKIQMSAKRQEIEKTRRLIRGLYENFVQGILTNDEYFELKADYEYAINALSGEIEVFEKSMDSLDNQLARYRAMEKDAKTLAQDHVLTAELIERLIERIEIDHERNIHVTFRFKNEFQGKAVEPCATM

SEQ ID NO: 1019 - protein, 530 aa, synthetic construct
MQTIPIDLSALTPEERQQFADNPSVLSSDCEAVCCLYMRYSSDRQTEQSIEGQLRELIAYCKHHSYRVAAIYVDRAISAHASMDKRPAFQQMLADSARSSWKTVLVYKLDRFARNREDSAIARMRLRKNGCNVESAKEGISKNPEGVILEALLEGMAEYYSLELSQKITRGMRESAIKGNCLGGQIPLGYKIENKKYVIDPLTAPLVKEAFSRYGDGETAASICADFNARGYRTASGAEFNKSSFKNIFRNEKYIGVYKYKEMRREGIIPRIIADDAWIAVQSRLKVNEAAPARGKAKVPYLLAGKLFCGHCGAPMTGECGRGKSGKMYNYYSCATRKHHNSCEKKPVPKDWLEDVVAQDALDVLTDEIIEFVAEVAAQQSEEDIQKNTQIPVIRKKISEIENKIRNLTKALECASVAPDAIVERLAELEAQKKGLSTQLSDEERGVIPLTKESVVVYLKAVREKAVPLETQKAMLIEMLVNSVTVYDDEPGFLKLVYAYRLTQIPTRTYRVPIPAKVPCSDFRTQPAPK

SEQ ID NO: 1020 - protein, 568 aa, synthetic construct
MARKSRITEQPPLSLLERIYKVGLYVRLSVPDSGKKDSDTVETQEAILRQFIEGKPYFSLVSVYVDNGQTGVNFERDEFERLLEDVRSGRVDCIIVKDLSRFGRNYIETGEYLEKVFPFMGVRFIAINDRYDSIDPSTSDSLTMHLKNLVNDVYARDISHKICPVLRAKQERGEFIGAWAAYGYLKSAEDKHRLVVDEETAPVVRDIFLWRAMGKSFQEIAKMLRERNIPSPSQYRFSKGLVKDGRLAQAPWKIATVKQLLSNEVYLGHMVQGRKQEALWKGQKQSRVPKNQWVIVKNTHEAIVEEELFYAVQEMNRQANEQYWEKKKRFDHIQNTENILKGLVYCGNCGTKLTRYKNVRENKHKEPKFHVWYNYICPVHATSADLCSFISIPEQDLLALVYDVIRVQFLAALDMDKLMKKSRFGSTASAEKRKLEQQIAQAKLSLESIRRHEETLYDDYSEQLMSERDYLYAQNRYQEQAKSLRQQIGELEEQQRVHSQEKTGENPWLKAFLQFQSEPLLTRPMALELIDSVVVYSKTRIAVNLRFQEEYQRLLELVMPQYEVAANE

SEQ ID NO: 1021 - protein, 470 aa, synthetic construct
MKKAAIYVRVSTQEQAQEGFSIPEQTERLTKYCEAHGWTIGNIYTDPGFSGANTNRPALKCLFKDCERKRFDIVVVYKLDRLSRSQKDTLYIIEDVFLKNSISFISMNENFDTGSPFGRAMIGILSVFAQLEREQIKERMAMGREGRAKQGKWHGGGNVPIGYTSVDGNLIPDEYEAMQVRKVFSLALEGHSFIQITRMMAAAGYTHKYGAYKAGYVTVSKMLHNPIYIGMIKNGDDYVSGIHDPLIDQQTFDAVQKRLQQISDDYQKNHRKNQPVAYMLSGLCHCALCGSEYSGFYVGAKGYRKKYYRCKKRAYHWREKKETCTAPNIRVEQLDAAVIEEIRKIQTDPAYFEKVSKPQTSINNELQTLNNRFSEIQKRIQRTIKLYSLGNIEDDDIDDQMKQLYCERDSIQNEIDRLSGSQPDVDYIKEVLSLAVLEDMSTLELRQLCQTLIDHIIIKEDESIEIYWAF

SEQ ID NO: 1022 - protein, 578 aa, synthetic construct
MDIHDIRQQLRTKSIYDIPLRVTYYARVSSESDEQLNSLGNQIQYYEDFIRRNAAWAFVPGYIDEGLSGISTKHRENFNRMIDDAAEDKFDLVITKEISRFARNTLDSIQFTRQLLGYGVGVFFQNDNINTFDEDSELRLSIMSSIAQDELRKLSSRVKFGHQQAIKNNVVLGNSRIFGYRKEDRRLVIDEEQAPMVRELFELYATDQYSMKQIETIFWEKGYRNLNGKKIAHTTMSNMISNPKYKGYYVGNKVKVVDMFTKKQKFLPPEEWVMFKDETGEIVPAIVSEALWEQANAVLRRRSDDVKNRQGVCNHANLLTGKLYCTCCGIAYYRRESQDRQGNKNSKWVCSGKIKNGADSCASFPIYEDEIKPLLLDVFRDTEASAEALIEEYVEMFKSLDRGGRLGKQITILQKQLETVEQKRMKLLTYNAQGKLDDADFLAMNKKCSAEAKELQTQLAEALAQQESTGNMKQQLDTIRSVLRNAQKDVTKGVITKEFVTRYIDKIFATPEEDGSLRLDIKIFTGETCEKHLQNLRRQAAAQTAVPSAIAAFSPTGDPEVSTGHTFKKMIESYEKNL

SEQ ID NO: 1023 - protein, 586 aa, synthetic construct
MTGFTFQSLKPQDSLSNELRSVIRDNVLQFYAKGLSAESEEEGLTALYERLSQEDKLDGESNSIANQKKILERYCKDHGITAYRHYDEDDGYSGTNFNRPGFQRMLADIKAGRIKRVIVKDMSRFGRDYLQVGMYTDVVFPEFGVHFIAVNDGVDSTRGESEFTAIRNVFNEMYARDTSKKIRATWQSKGKSGEHLTTIPPYGYMKSPEDKKKWIVDEEAAAVVQKIFSLCASGKGPTQIAKWLKQQQILNPTAYCHAKGLPTSNKPTADPYKWTNETVSRILERVDYLGHTVNFKTTKQSYKSKKKIWNDPENWVIFENTQPPIIEESVFLIVQNIRKARRRPTKMGEMGMFSGLLYCAECGGKMYQCRATNFAENQKYFICSTYRKGKDLCTTHSIKNVVLHEIVLRNLREAISYVSEHEAEFIQDAAESDMRDRDAEFVRKRETLAKADTRIAELDRIISRLYEDNVIGKLSDERFIKMSHDYELEQSNLKSMADVLRKDLKQQEQQKTNVKAFIAAVKKYTDLQELDAAVLRAFIDRIEVSHVDKKSRTREITIVYNFIGAFDFTRAIENARNTSKKEQRTA

SEQ ID NO: 1024 - protein, 628 aa, synthetic construct
MTYSAPFTKSQQPAAAGMGFLGGLEQGFTPKRAISYIRVSTKEQAKRGGREEGFSIPAQREANKRKAQSMGAMIIKEFVDAGETGTNMKREGLQAMLKYLAEDPNVDFVIVHKLDRLARDRELDAQISRVIRSHNTQLISTVEAIDDTPSGMLMHGILASISEFYSRNLASEVMKGLVQKAETGGTPGRAPLGYLNKRYVDNMGREYRTVETDPQRAPLMKHAFELYATGEWSLRNLAGHLEAQGLTTRATPGRPAKPVSDKVLLRLFRNPYYRGVILYQNIEYAGTHELLIDPSTWFRVQAVLDGHRNGERTRVHAHYLKSTVRCGRCGSRMIVHNAKGSNGDIYPYFICIAKRQKTTDCSIRAVLIDAVEDKVADLYQSITLSTADRERIETAILDQIAASSRDSIEHRKNLKQHKDQLERERQRLIQAHYADAIPLELLKTEQDRIAKTLASIETELASLTDQATTAKANLAKILDLLENCHQTYVALPDHLRRLLNLAIFEEILIDTDDEHNVRPTGRLAKPLDTLTDRFHVIAQQTRQQKSTSPVPKDEARANSCSTYRSEAMHNAIISHTVPMVEVRGFEPLTFCMPCRRATNCAIPPYFRRSTGKETISSALPCGEATPIS

SEQ ID NO: 1025 - protein, 478 aa, synthetic construct
MKNVAIYVRVSTQEQAAEGYSIQEQAERLTKYCEAHGWNITKVYTDPGFSGANRDRPALQLLCSDVKKNMFDTVLVYKLDRLSRSQKDTLYIIEDVFLKNQIAFVSMLENFDTGTPFGRAMIGILSVFAQLERDQIRERSQMGHDARAKEGYFHGGGYAPIGYNYENGLLSINEYEAAIVRRAYKLFLDGLPVHSIYLTMEKEFPAGTRFGRITYSSVESMLKTILYAGFITWKGNIYPGKHDPIIPYETFQEVQAIIKRRRIEEPQRLTAFQHTTILGGIVFCGYCGARYFCKTNTASKKSRIVQKYYTCYSRGKCNKKMIRDPNCQNKSWNSKKLDALILKEISKLNLSRDFASYENAPDNSDRIASITAALSATDKKLEKLVDLYASDSIPVQILNERVSKLNAEKETLESELDALQNAPVPDLSTDQANEILDGFQDMLDSGDRDLLRNFIRSLIDSIIIRGEDIEIHWKFTVF

SEQ ID NO: 1026 - protein, 567 aa, synthetic construct
MARKSRKKLNGAVPGNGTAGKVEKAVLFRAGLYARLSYESGVNRERGTIETQMELMKGFVESTEDIVVQKTYSDASFTGTTFERPGFERMMGDIRDGKINCVIVKDLSRLGRNYVEVGNYIERVFPFLDVRFISVNDGFDSFQSGTDLSMPLKNIVNEYYAKDISRKVTSALNTARAEGKFVIKLAPYGYLKSPEDKQSLVVDADTAGTVKRIFRLFLEGNGYGRIAGILNGEGIPCPEAYRKSKGLPVTGHKGCVEWTGIVVKRLLSNEYYTGDSVHGKTGGKLFAGGSCGAEASAGYVVRDTHEALVSRADFDRVQEMKAEQVRVYNGKRAESRRCAAGRNKFKKKIVCSDCGKTMYLFRAGLQEGDKYFYGCSSHNRSREVCPYRHKVMLEDLEAAVFGVIRSHMDACLDTERLVRKLNAGRQGTERYRLMSRQADRIRERMRQAAGKKAGLYADFAERLIDGDEYAALSERYTKEAEALSAELEKLLEERERYARDFHIEEGWEKTVRGFLGERELTQGMVDAFVTRVSVDKDGDCEVALAYDDMLAELLEAVREREAENGEG

SEQ ID NO: 1027 - protein, 434 aa, synthetic construct
MERVIERVDFQIPMQPKALRVCAYARVSSGKDAMLHSLSAQVSYYNSLIQSHADWLYCGVFSDEAITGTKSQRDGFQRMLASCRAGEIDLVITKSISRFARNTVTLLQTVRELKSLGVDVFFEEQNIHTMSADGELMLTILASYAQEESLSASENQKWRIRKAFENGELANLRFLFGYNITANGIQVNEKEAAIVREIFTRFNGGESLSSISRDLNDRGCERPLGGTWCADRIRNLLSNEKYTGNALLQKQYRKNHIDKKLVPNRGELPMYYVAGSHESIIDQAAFDKAQVRLNELARQAEKREKPTRSTFSGLIRCGLCGSTYKRVTCRGKHFWNCTTFQTKGKAECPAKKIPAEMLKFLTCEVLGADALDSDMVRSKITMIRAEKNNVVVFCMDDGSEIVKRWKDRSRAESWSPEMKEQARQRALQTRRVQK

SEQ ID NO: 1028 - protein, 529 aa, synthetic construct
MKFTSTWRISDPLAQYIVYLRKSRKDMEAEALGQTDTLKRHRATLLSLAENNNLNVVEICEEVVTGDSIAVRPEVQKVLQLVETGSYAGVLVMEVERLARGDTIDQGIIAQTFKYSNTKIVTPSKVYDPNNEMDEEYFEFGLFMSRREYNTIKRRLSRGKEASLREGKWISGKTPFGWLREKLPNDKGYKLIPHPEQAPILQQIYDWYTGDGCTRIGAKAISTRLNSLGVPTNSGSLWRTDSVLDILRNPANAGWIKSGGRPETKRIVDGSVVVSRPRTRQEDLKLYKGLHDALISQAQYDKAVSLSYSVVAPRGKGAWKTVTSLAGLVRCDQCGRVMVRRASSGDRRPSFMCPTQGCPTVSSWYSEVEEALLDALRDWLRELEVGEADTNDDHSLLDALSASINADQKQLAKLEAQEARAYELVETGVYTPEVFLQRSQALAADKQVIVSRVEENQRAQDEITRAKQARARLAPAVRHVLEAYPLAATPQDKNDLLKTVLQKVLYHKRSKSYSKAGSDMCLTLYPLTD

SEQ ID NO: 1029 - protein, 571 aa, synthetic construct
MARVSRKNGVSEGLPKGQRQAVFRTALYVRLSVEDNGKADADSIENQELLLRNYLAERPYLELKEVYADNGYTGTDFERPAFHRMIEDVRKGRINCILVKDFSRLGRNYVETGEYLERIFPFLGIRFISVSDDYDSSSANAGEKLAATLKNLINDMYAKDISKKICSTMKNKRLRGDYIGNYAPYGYLKDENNRSRLVIDHEIAPIVVEIFELRAKGIGFDTICRILNEKGYPSPGRLRYERGIITNNNKKGSELPWNRHVLKDLLVNVVYIGNLAQGRSSQCLYKGEKYHWTKEADWDVVEGTHEPIISMELWNTVQEINKKVSSNATKSFGRYAHLPKRPNPYGSVLRCADCGRVMKYVRSYSRPKKDGVVTDYYNYKCPTNIELGDTACSKKSIRADDLDKIVLSVIRKQMDLFLDTQKTLLGLIALEKEKAKHSVPANRVKELQDKLDQKKKLFSRLYIDFKDGILTQQEYLLARDVYQKEIAAYESELQELQAIKTKTKVTETGARKWNRLISRYYKTKTVTEEMVEAMVDEIRVNTDGSLDIRFKYMPEFEEMFKECERIRKEVA

SEQ ID NO: 1030 - protein, 451 aa, synthetic construct
MKKLNVGYMRVSTEAQTEKYGLDVQEDKIKELAKKRGVKIARWYVDGGYSGSNIQRPNIQKLLEDAEAGEIQAVYIYKLDRMSRDVVDTLTLVSKLLPKYNVEVVSATEDLRNETPMDRVMLGVNAVMGQYEREVIYMRTRAGMVERVKRGLWMGGGTIPYGYRYDRNDGILHIIPEEAEKVKAIFQMFRDGYSCDRIQKILGMHSEKLVSNIIRRIAYVGKIQYKGKTYQGLHEPIIDEKLFYEVQEEIKKRSTNAYVSNKYMLTGLCYCGKCGTKMRMQKWGKYTKIVCYSQYKEKEHISKTGNPCKNKKVRADVVEKEVEDCFKRFIVNVEEKENESESTRKMIEKEISLSETKLKRLYTLYASGSSGTDTLFGVIQEEEKTLKNLQEELKAEDIREKAGRGEKIEKIKEMSNVWDTLTDSEKNKVLKECVEKVVITGDDIDIHFSIY

SEQ ID NO: 1031 - protein, 610 aa, synthetic construct
MKRPDNNKITALYERLSRDDELNGDSNSIVNQKKMLEKYAKEQGFTNLAHYTDDGYSGTNFDRPDWKRLTADIEEGNIGCVIVKDMSRIGRNYLEVGFYTEVLFREKGVRFIAISNGVDSTHSESNEFAPFLNIMNEWYVRDTSRKIKSVLRNKGMEGKHLTSNAIYGYKKDPDDNNHWLVDEEAAAVVRRIFQLIIEGNGPMQVARILTNEKVERPSYYLAKQGLGTCRGKCDITRPYSWTATTITDLVSKPEYMGHTVNFRTFKESYKDKHSQYANPEEWLIFRDTQEAIVDEDTWNMVQKIRETKHRPIAQGKANPLTGLMFCADCGAKMFNHRTKGYEKKDKDGNPTGKYTNAQNNYTCSTYSKAKGHFENKCSQHHVRTDVVRDLILTTLQYTASYVKEHEDEFLEKVRKSNVLKQEADTKALTKKITKSEKRVAELDHMIKRIYEDNVSGKLSDKRFELLSADYEKEQSELEEFLTSAREQLATAKEEASNVDKFIALVHKYTDFSELTTPMIHEFIDRIEVHEADKSTGERTQEIDIYLKYVGKLDVPMPELTPEELAEEERKRRKRAWNRTYNRRKAEKERAEKEKAALEAATDTDKSKKGA

SEQ ID NO: 1032 - protein, 485 aa, synthetic construct
MTDFKTAAAYIRVSTDDQVELSPASQLVEIRKWAAANGYIVPDEFVFVDEAKTGRKVTGRDEFRRLIATAKTKPKPFDAILLWKFSRFARNRDDAVYYKSILRKQLKIDVISIKEPIDEGKMGVIMESMIEAMDEYYSINLAEDVKRGMEEKHRRGELQSPPAFGYTVVDNVLTPVPEEAALVREMFRRYNAGEGCYSLARWLNAAGVRTHRGSPFENRTVEYILRNPVYIGKLRWNPTGRSHRNFDDPGIIVMDGKHEPLIGEELFHRTQRRIAQSKAAMPYHGRPLGSNKDWISGLVRCAACGGTMVFAKPHWWKCNNYVRGRCTTSQHINGDLLKDAILRRLQADSSTAADLHYEVLRITDKAGDPVAALRAQRVSTERRLERLREAFLSGIDTMEEYRQAKEETQAQLQRIDEAICEAERENHRRGDPKLMRNAIRLALATITNENATLEQRCAAARSIIEHIDWDKAQNQLTIHYRLLLD

SEQ ID NO: 1033 - protein, 491 aa, synthetic construct
MNKKINAVGYARYSTEFQTDNSIAYQTTAIQEYCEKHDINLLKVYSDEAMTGTNTNRPAFQQMLAAAEQHLFDAVIIYDISRGSRNVVDWFSFRQEMARIDIQVISCNQHLGDILDPNTYLTELITAGIGQHMVLDTRKKSIDGKNERAKKGIFCGGNPPLGYDINDGNYIINPKEAKIVQTIFTMYADGHSYNEILKELDGAVGKAGRPLGKNSLYSILKNERYIGVYTWNKRKIKIMGKWAGGRPNPDIVRIENAIPPIIDETIWRKVEERMKDNSRRATSKSCRHNYLLSGLIQCDKCGATFVGHTSTNQKKISTPYYICGNKYRTHTCCTKNINADRLETFVVMQIKHYLKTADFETLADEICKQVNSAAPDVSAEKKELSEIETKITNGINAILGGVNIPELKDEVDKLRIRKSELEDVITYKEKNKTRTLNRDKLVEMLKESAENIDSTDSNTLIRNFVTKIYAHADGTVTVNLGVHINGCGDWT

SEQ ID NO: 1034 - protein, 465 aa, synthetic construct
MPEKILRCAIYIRVSTFEQSVHGKSLQAQKEYLEHYAKEHNMSVVGVYADEGKTARKELKKRKAIHALIEDVKQEKIDVILFWRLDRWFRSLADFYKVQDVLDEYGVRWISASEPGINMETRDGRLQLNVVLSFGQNEVDTTSERIKFVNEASIKNGRLIFGEANMPFGYKSGVVDGKKCMIKDPETERMVIDFFRHYKKHQGKQDALKYMQRTYGIYFSYGMLKTMLSSEFYKGTYRGYPYCPAYLTEKEWNEIQEISVRNVKRAPSGRVYLFTSLMRCPSCGQKLVGTGCSSISNRKTGKKRTYCYYRCNKALADHLCPNRHRVSQNLIEQYLLENLSSEYEKYKIRSNKINEEKKKVRKAKNPAQLSKEMERLNLLFQKGRISFDYYDEEYQRLEEELAFAASDPSLEEPKRNYSELEKLLRTDFKEMYDSLSLENRRAFWRSIIKQIHLNDDCTIKEVDFL

SEQ ID NO: 1035 - protein, 555 aa, synthetic construct
MRKNEKITALYERLSRDDFGKDDDQQRESNSISNQKAMLEEFAARQGFTNIVHFTDDGISGTCFDRPGFLAMMKEVEAGNVEYLCIKDMSRMGRDYLKVGQIMEILRQRGVRLIAINDGVDSARGDDDFTPFRNIMNEYYARDTSRKIRSTFQSKGKSGKHLTGTVIYGYLWNEARDQWLVDPEAAEVVKRIFAMTIEGYGPYQIASKLKEEKILIPSAYLAQHGEGVNKNKTFKDVYGWGEAAPLTGLLYCADCGGKMYVHRTNNGKRISQYTCSQYTKVPCGTLCKTQHRINEDVVLSLVSEMLKAIAEYAKHDRAEFVRVVQEAQSSQQTAEVRKQRTRLATAKQRVSELEVLLCKIYEDNILGKLSDSRYATLDAQYEKEQSELTAEISVLEKAVKSYEKHEKDADRFIALIGKYENFDKLTIAMLNEFIEKILVHERDRKGSIQTTQEVEIYFNFVGRFVPPAFGEVELTPEELEEIRKREERKDRLHQNYLKRKASGAQKRYEDKIKGRKKAEIEAKKAAIRAEDIAKGVFVPVSSLPQREPMKGVQSA

SEQ ID NO: 1036 - protein, 577 aa, synthetic construct
MSINRNNTSETPKKAALYVRVSTNYQIDRDSLPMQRQELITYAQLMFGINDYVVFEDAGYSGKNTDRPEFQNMMRRIRAGEFTHLLCWKIDRISRNLLDFASMYQELKDLGVTFVSKNEQFDTSTAIGEAMLKIILVFAELERNMTSERVTATMLSRAQNGLWNGGRVPYGYDYDKDSKTFSINQEEAFLVRKMYDLYSEHRSLVMVSRTLNEDGYASRAGNDWSPVSIFIILTNPFYTGIYRYNHYKIPGLKIEKDPSEWIEVPDHHPRIISDEQFDNVNRILQSNSRSKRLPGQQHTSKGTHIFGGLLYCGTCGSQYVSTPSRLLASGYRPSKYACPNLRKKKTCNTKSISDPVIGEFVLNYVLNMMHARAAFSSIHDTSELQDALLSGGTFQNVDHIGKDGLDSCFHMFSSTPLDGKRFRKPKKATTIDPELKRLRAEKRKTERALDRLMNLYLYADNPISEKDFVIRKQALDDYLKEINENLGMIDRGRGIETISDENFIKRASYFIMSKELAGKDYIYFKKLAMDMDAEILRDFFQEIIDSIVMEGSNVKEIVFRNGLAHTFFYKDTEKPEA

SEQ ID NO: 1037 - protein, 476 aa, synthetic construct
MSALKNGALYIRVSTADQTELSPDAQQRLLLDYAKKNGIVIAKEFIFEESVSGRHADRRPKFQEMIALAKQDSHPIDVILVWKYSRFARNQEESIVYKSLLKKNNIDVISISEPLIDGPFGTLIERIIEWMDEYYSIRLSGEVLRGMKEKALQHGYQTTPCLGYQAAGGGKPFVIDEAEYQIVKYIMDQYDLEHLDPTAIARKCNDLGYRTRRGNLMERRSIERVLRNPFYAGTVVWNGISFDGTHETRLDPARYQERIKRMDARRRSPKSRNPSTCRHWLSGLLKCPICGATMTVTAGNTSCPYFQCWKYAKGFHKGSNSITVAKAERTVYRYFDDILAGADFSFTVRDRKQEQEDDETIQRLQQALAHLSVRESRVKMAFENGIDTLEEYGANKKRLAEERQSLQEELDRVLTPAALPETISKEDFREEIKNINDILKNPEEPAEKKGLLLRSIVDRIVYEKSSGTMYFDFFVS

SEQ ID NO: 1038 - protein, 518 aa, synthetic construct
MFTVGIYARKSVYRDNSDSVQVQVRLGKEYAGIIFKDKELEFRVYDSDEGFSGKNTNRPDFQRMMNDVENGLLNAVVVYKLDRISRNVQQFSAMYEILHQHQVAFISVKESFDTSTPMGRTVMYILAAFAQLERENTSERVTDGMLALGTAGKWTGGICPSGMKSVRMQCGDKYHSYLQIDPDTIWRPKMLYELLLDGNPITRIERYCRDHGIKSQTGKYLNTSQIYNILTNPVYCQNSIEAYYYFCDLGCKLPEASGFDGNHGLIGYGKTKTGTNSQHKRTSSEWTIAIGIHDYVIPADKWIAAQKRLGTNKMIRTAKYEAGILKGVLKCSCGGSMEVRTYTKNNIQFSYYYCRRMQRYGKEYCNSGYTPVKKLDSVFLNKLKQIQLDPARVTMDHPEDVFTQSSADLKKILHNLEASIMNLTNALTQAMGSSASEYIIRQIEELDHQKQITEAALRDAKIKEAQRIQNTNAVDQIYQSICYLLDHFDDIDYHGKNELIRKIVKNCIFDGENLKITF

SEQ ID NO: 1039 - protein, 454 aa, synthetic construct
MECVAYLRVSTEKQAEEGNGLDSQKRDIENYCRKNQLIISDWYEDDGFTGSNMNRPALQRLINDCSKKKLKCVVAFKLDRLSRSMVDGIYLIERVFIPNGVDFRCVHDSVSYDSPMEQAYTQMMAVFAQLDKNTMLLRMRGGMLERVKQGYWMGGGNTPYCYRYSKEDGILVPIPERKEMALRAMNLYISGYSDVRIQKLIGFKSEFVTRQVLTSPVNIGMIPYKGKLYNGRHEPIFDIKVFELAQELRKTRKQSKSFCVNHENQLLTGLCYCGVCGCKMRYQKWTHGKHKIYCYSRDNGMSYLPNYNPNCNNSLEWAEDIEKQVEDEILKISLNLSSHKPKERESCLDILSKQLQKEKTKLKRLYTLYAEGNDTVLEMIKETESGIDELKLKIQNEMKNPDNSQKKEFVYDNIKKLADVWEHIDKQSKNRILKTIISKIIIVNGNIEIQLKKF

SEQ ID NO: 1040 - protein, 514 aa, synthetic construct
MRRKKVKGGNRLVAYYRYSGGSGQTEQSIEGQRRDCENYAKLHGLTIVHEYIDRHISGKTDDRAAFQQMMNDGDKGAFDMVICWKTDRFARNRYDSAVYKKRLRDNGIEILYAAESNVEGAEGIIIEGLMEALAEYYSAELAEKMRRGMRESALKGQAINRCRSLGLTTDENKKYVIDEKTAPTVRFIFEHYAAGESSASIVEQLNAKGLRTSQGNPFNKCSIPRIIQNEMYRGVYTSKAYNVRIEGAIPAIIDDDLWKRAQAMMKTNRQLKAKYEPKAEYLLSGKLFCAKCGCTMKGVSGHSGGNDEVYRYYACSNPQCRKRNIPKDDLEGKVIRSICDHLLQPETMELLAETMVDVQKADMEKPNAERDVLEQELWDVRRRSKNIMDAIETGSANPQLVARLDDLTQQENTLTYQLSTMEAEKPLLFTKEQYLFLLQQFYAQPTEQDDAYKRRLINTFVTNIEVSDSELLIYFNVSEETENKNKNASQSNFDKSSSTEKRLVRVARIELTAS

SEQ ID NO: 1041 - protein, 684 aa, synthetic construct
MSILQTIKTIIRVVLYLRLSDEDKNKLSKEELSQSIKNQEIMLRDYAEEQGFKVVGVYNDDDWSGSDATRPDFNRMIEECKNGNVDIVLCKTQARFARDMELVEKYVHNLFHEWNVRFITVVDRIDNARKETKKTSQILGLTDEWYLEDTSLNIRETLKSKRKDGQLTSSFATYGYMKDPENKNHLIIDPISAEVIKRIYDEYLSGTGLDKIARRLNEDKILSPYEYKLLNGSKLKIPVIKDYVNYGYIEKTGTYMLDVSFTNKEEYILKDLVSFNYITTDMKNFNNKCDIVLKKYTNNRTKIYYSENDNIDINNFNIDDCILLNENDIIPKTAKVIISYTKELDRTHTINYQFEITLKENRDRVDYYINICGKGADEIKKSDFIHNIRKKFKWSSSTIRTLLTDEVYIGNMVQFKSTTVSYKNHTVVWNDDEIRIRKDNTHEPIIAKDIWYTVQERLENTARSCKGGTVHPLCNKVYCSNCNQIFTKTGTRRSDGTGYLCCKDKKTNWSNCDNKASIREDQLHQFILEKMNEMLKKFYEEDDLKEMQNEVIEQDLYKDKLNSLEKELQSINKELQGKSTYFQKLYEDRTNGILPEKEFLILMNKYKDDNEKLEERQKIVKKEISSTLAKKETVKTKKNIFKKYRHIEELSIEIVEDFIDKILIGSYDETTNSRDIKIIWNFTI

SEQ ID NO: 1042 - protein, 529 aa, synthetic construct
MVDVVAYCRFSSDNQRVESIEAQERAIKEYCLKNNFNLIAIYKDEAISGTSIKDRESFIKMINDSKKKIFKYVIVHKFDRFARNRYDHAIYEKKLEDNGVKLLSVLEQLNDNPESVILKSVLTGMNEYYSLNLSREVKKGQKENALKCIHNGGAMPLGYDLGEDRRYVLNEKEAEIVKKIYKLYLNGVGYTKIAEILNEEGYKNKAGREFRKTSIRDFLLNEKYTGVFVYGKKDANGRLTGKEIKIENGCPQIISKEEFQKVQNMMGKRKTGARMTAITPYYLSGYCYCGECGGSYTGGYRTRRRNGTIDYGYLCINRKTKVNQCKNKPIIKEKLEGMVFDTIKKEIFTGKRIDGIANGIYKKIMESQSGVEKELMTLEKEIEKVTNKAVNLLNKNLEGNISDEVFNVMNEKINLELTTLKNKKNSLKSPVKIEKEKIFNYLKNLKDNFKNPQIKKSIVEAFIDSVIIYPNHVEIRVRDIPADMDRNGGDDGNRTRVRNYQRHRLLQCLVYYFISQQSLPQTGLTEAIL

SEQ ID NO: 1043 - protein, 625 aa, synthetic construct
MNENEQKAGSVADQKSKIRERYKGIDPDELDVIPALPQEDIFAVENEQRVAVYARVSTDDPRQTSSYELQKNHYHDVISKSPNWKLVQIYADEGISGTSLQHRDQFKLMIEDCKKGQIDLIVTKSVSRFARNVVDCIGYVRELLSLPHPVGVFFETERLNTFDPKSEMVLSFMATLAQEESHTKSEIMNASIEMRFRRGIFLTPILLGYDHDEDGNLIINEGEAKIVKLIFMMYLNGCTCQEIADTLTELGCETKKGNTVWSPGSILQILQNERHCGDVLAHKTYTPNYLNHKSKKNMQNRPQYRKRDHHEAIISRDDFIAVQRLISNAKYGNKGILPQLKVIPGGVLKGFVSINPRWAGFKETDYMNASSSVYDGTEQSGPSPSHVEVKSGEFDLRGYEIARSQFFDSTDRITVTFSQGDIRFSAPAIRKLDSTLVELLIHPKKLVFAVRNAGKDCRNAMQWSKKKDGKNSPREISGTAFLPTLYSLLGWNDDCRYRITGVKRGSGNDAVLLFNLSEPEIFIPNDMVGAPDADPAVKPFTDNQQRNVRAYPPDWADTFGSNYYSHAQAEELAGFTGRKDPDTSHAPVTYNDTDIQVTSKNDIEKNIKQIMSDMKENADEHTDKR

SEQ ID NO: 1044 - protein, 477 aa, synthetic construct
MRDSKSKTVIIYNRVSTIMQDKNESLTEQTDECIRYCKTNGYEIYKILKDVKSGTKDDRAGYLELKKHIRRRDFDILVVLETSRIARKMKELVLFFSLLNENNIEYISIREPNYNTTTPDGKFAMNIRLGLIQFERDNTAERVTDRLYFKASKGQWVNGKPPIGYKLVNKRLEIDEEKAEIVKNIYEDFLNGYSLNQINNKLQFSWGNKQVKRILTNPTYKGYIRYGTRSNRKKNNREAFIVKGWHEAIIPEDKWEKVQEMYKSLNRKASNTKPTLLGGLLKCKECGNNYIRKRGGSYDKNLYYGCNLNNLRYSDKFFYKDILECSSATIKGDLLEKAVIDTLKKQINNLNFNDIEIEKKRQVNIKQIDSSINRFKNRLNKIYELYIEDEIPKDKYLKDKKDIEARIISLEKQKKSFGEIEVEKSNNEMIQEYFSKIDLSNIEEANRILKIIVNKIVVYKKKKTPKDDFEVEIYLNI

SEQ ID NO: 1045 - protein, 617 aa, synthetic construct
MDNEKKVAGLYIRVSTEDQAREGFSLPEQEKRLRAMCEYKGYEIYKLYKDAGISAKTGNYRPAFEELLQDIREKKCNTIVVLKLDRLTRSVFDLEGIMRFLEENNAYLDCANEEINTTNSSGKLVARMLTSVSQNEIERTSERTKFGLVGAIKEGHIPGKNPLGYKRDGKKLVIDPLTKDIVKRIYDLYFEGKSYSNIATIFNNEEVLGKTNWRDTGILRIISNEIYKGDFVSGKTFNKPVYYENVVEPIVSRELWENCQVQKKKNQKSYMRTQTYIFLQKLKCPKCGRILAGGASHKLKSDKWYFYYRCEDCKNNIKEEVIENSVKILLADILEYDNVVNEFFLPVLKSKLDNPKEQLEKELKSLNNKRDRIRKAYIDELFTEEEFKQESKTIDSQIEFVNSKLLENSQADQLNFTTEDILLKRDMDFINKVKLPISYYAFNENWDLLDRDTKADIVMRYIDDIELEIKNKKYHVKQINFRSTFYNDYEDLYKKGYIDRKRPLTYDFNGICVDTNIRYSEYLPIKDVMQHLYRLNEYYEVNLYKGTYYKETEKLDIGPLQRNEVPIRVFPLQKDNNGDKNWLSMGMLATKNNLNDIKVNIRDVFETIPDNVTKEDF

SEQ ID NO: 1046 - protein, 523 aa, synthetic construct
MYQLPELQPSQVLIYLRKSRTDDPALSVEEVLSKHEQMLDDWTARALPEPHRVPEENRYREVVSGETISSRPQMQALLRRIESARIRAVLVVEPQRLSRGDLEDIGKLVKILRYTRTLVITLQYTYDMHDDHDRDAFERELKRGNEFLEYQKRIMHNGRLLAVKNGNYIGNVPPYGYKKVCVREGKRTAYTLEPDPIEAPVLRAIFSWYADGVGTTQICDKLDELGAKPRKAEHWSPYTLLGLLNNQHYIGKVYWDRRATVRTVEDGEVISSRPRAKEYLIYDGKHEPLIDIELWNRVQAIKGAHPPVKKEREFRNPYAGLLYCKNCGRAIKRQTYINGEPRYVCINQRVCKTASCTEDELRNAVADVLAECIENFEIQAKQTESMQKAADAHADMLRGLQQRLDDLYALEAAQWNEKAKGAMPDRVFERLNADVLQEIEATQKSIAAAEANPPSALNIEERLAAFREALNCLTDASVPVHEKNRLLKECFKRLTFDRRRKDFTRGRRWGEPYPVTIQSDSKV

SEQ ID NO: 1047 - protein, 434 aa, synthetic construct
MGRIIAGYVRVSTLKQKNDGVSVDMQKEMIIKHALMMELVKEADEIEFFIDDGYSGKSLERPKIKELIEKIKKDEVYAVICYDLSRLSREMFDSNSLLRMFNNHGAALKCIYDQTSIKTASDRFSTNIKILNNQYERERIVERTNDGLLSIAESGRYPCGGIVSFGYFRGEDKNIYIHPADSKIVRRMFKMAKKGYSIDDIRITVNAISNSRNIIFDNAHIRRILKNKIYTGLLHYKGKDYTDIVPRIIEDSLFDEAQRVTRRYSKTGEGYIYNQRLYCKSCGKFFINTHGTSATGQRYNYYKCPECNAIISENKLDTVFAEQEPDASVSKMKAELVNNIEYQLKLLNTRIRRIKNKYLKELINDEDYIELLKPINKAIDRLEDKKREIDRVTINKQRYGDMRSCEEKYKYVRNNVDKIIIEPETKKIYKILMK

SEQ ID NO: 1048 - protein, 495 aa, synthetic construct
MNAVIYARYSSDKQRDASIEDQIRECTEYAQANSLTVIKTYADRALSGTTDERAQFQLMIKDAAKKQFTQVLIYKTDRFARNRFDAAIYKKKLKDYGVKVVPVKEPIPDGPGGVVMEALYESMAQMYSENLSENVRRGMDGNARKCLANGKPLFGYKIDKTTHRFVVDETQAPVLKHIFEMAAAGKKYAEILKYMADLGYSRYNNWLTTTFRNRRYLGIYIYKDIEVPGGMPQLIDQDTFDAVARILKRRSNYPKAKPEKYLLSQKAFCGYCGKMLVGNSGSGHQGNKYRYYRCKGKGLNHSPAIRAEALEETVALAIKKQFLQDDIIRKLAKETIKYQEEVFEQESNCTELRHQLADVQFRRKNVFKAIESGFVSESLQERLHELEAQEKKLLGMIATEQLKAPRFTEQDVIAFLSGYKNGEISDPFYSGKLIEVFADQVFLFEDHLVVRYSMDKAETRISLDEVSGLATSLVGGPSRIRTYDQAVMSRRLWTN

SEQ ID NO: 1049 - protein, 506 aa, synthetic construct
MQRAVIYARYSPGPNQTEQSIEGQVRECTKYAELHDLRIVGTYVDRKISGKTDNRREFQRMIDDSEKHIFDVIILYHTDRFARNRYDSAIYKHKLKENGVELRYATTDIPKGPEGIILESIMEGWAEYYSAELSRKIKRGMRESALKCHSTGAGRCLGYRTAEDKSLVIEPEGAKAVQTVFDMYIKGKSHADICRYLNDCGFRTAQGKLFNKNSVTHIIRNKRYIGVYTYDDITIEDGIPAIISKDTFHLAQLEAARRKTAKRPKEPKAEYLLSGKAFCGHCQKPLVGVSGTGKSGNKWYYYYCQESRAKRGCTKRPVKRDWLEREVVERTVAEVLQPEIIQHIAKKCYDLQMEYRQDNSDVLFYELKLKDVRKAIKNTMRAIESGVKTKTLPARLQELENEEEALEAEFAIAKASDFVITTDQIEFLLTQFAEPWECESEEEYHRRIIKCFVHKVFLFDDKLLIYYNVSRDGKTREQSEAELLEEALGEGFDKRSSGSTITGHQL

SEQ ID NO: 1050 - protein, 526 aa, synthetic construct
MAEKRKLAFYIRLSDADEEVKAGTKDESNSITGQRKLLYAYIKKTEEFAGFEVLEYFDDGYSGTMFNNRAEFQRLIQDAELGRFECIIVKDFSRFGRDYLEVGNYLEFVFPAMGMRFISVNDNYDSDRNFGVTGGMDVAYKNLIYQLYSMDLSRKVKSARRTRNLSGEYTASFVCYGYKKDPDDKHKLIIDEEAAKVVVEIFSLIIAGYNASEVARILNERKIPTRVQNQWKNGINYVPVHNKGDYMWDNSEVIAIVQNEQYKGIMIQNKCETVGFGDNKKVRKRNKEDWSVVEGAIPRIVSDEMFDEVNKMLRVEARGIEKSTKKRKKNLFICPYCGRKLMNSSAVCTPKLLCPKRRMVRTGECQQIFMLKSEAQDKVLEITKEICRTLIQEEELKRASKDKRKVTSDEYLISELKAEYDRISNSTVSCYQSYREGKYTKEEYVQLRKTNQELLADLENQISDLQEKAANQEPDTEEKIEQLTQYSMLEQYDGDVLSNIIDKVLIYNDKDIEVVFKGENFIRNAV

SEQ ID NO: 1051 - protein, 524 aa, synthetic construct
MNKLRAAAYCRVSTDRAEQSGSLASQRSFFDDYIRNSDSMTLVGVFYDEGTSGTTTLNRYGFNKMISLAVSGGIDIILTKEVSRFARNTVDTLNITRMLRAKGVGIIFINDNIDTRDSDGELRLSIMATIAQEESRKISERVKWGQQRKMEQGVVFGRSCLGYDVKDGKITINADSAEIVKRIFTEYTVLLKGAESIADGLNAEQIRTVNGGRWSGAFIRKVLRNVKYVGDLEQKKTCTPDFLTHKKRLNRSEHIYIRNHHEPIISRELWEQTQAEISRRKPTDTSRHSDRYVFSGKVYCGVCGSVMVSRVKTLKNGKIYHALRCSGRIGGKSCNNETLNVTALKACVKRIFTDMPIDKTAVINAVIKGLSRTDKPDIPALRRKIETLNAKKRRAVDLMLDGLITQQELIEQKSYYDSIIEKLSQEISSDRSVFETDKIRKNAERFLDFTSDPLWLLVIRADYIHGTLTVYLKGIENGFTTCFTATGRGDSYRVITGNTVRSQGIIPGTMQVQKNRCRHDVNDK

SEQ ID NO: 1052 - protein, 526 aa, synthetic construct
MKKRINTNSAARAVIYARYSSANQRDCSIEQQVEKCRELAAREGVTVIEIYADRAVSGKTDRRPNFQRMMKDASLRQFDVVLAWKSNRMGRNMLQAMMNEEQLRSNGIRTIYAEEDFDDTAAGRFALRNMMNVNQFYSENMAEDISRGLMDNASKCMSNGSLPLGYKTGKDQKVVLDEAEAAIVQEIFTRVSCYEPFIDIARDLNRRGIKTKKGAEWGRSSFHTICRNERYRGIYIYRDIRVEGGMPRIVSDELFYKVQEVLKVKKNPQGRRKRSGYEEYLLTGKLYCGHCGSPMTGIAGTSKTGAMHYYYTCQKRRTDHSCDKKAVRRDQIEKAVAIAIQQQLLTDENIQMMADETMAYNARTEIKYRLQSLQQQLYSNETSTANIMKAIEMGIITDTTKARLLALEQEHGQLLAKIDTAKAEMVPINREDFVSLLDIYRTGDVNNKKYLAALFDTFLVRVDLYDDHFKITFDPTGGKMPVDIPIGAEDSPESPGDSPESSDFEASPQDAEKFVLALHNRTKEST

SEQ ID NO: 1053 - protein, 519 aa, synthetic construct
MKKVTKIAETASSKVKLKKIRVAAYCRVSTDSDAQLESLEAQKTHYENYITSRDDWEFAGLYYDEGITGTKKDKRPELLRLIDDCKAGKVDFVITKSISRFSRNTTDCLELVRKLLALHIPIYFEKENINTGSMESELFLAILSSMAEGESVSISENSKWSIQKRFESGTYKVSYPPYGYDWDGEQMVINPEQAAVVKEIFAALLSGKGSHAIADDLNRRGIPTKRNGRWTATTIRGMLSNEKYVGDCLFQKTYSDSSFVRHNNHGEQTQYMVKDHHEAIISREDFEAAHAFIHQRATEKGVVKGSDKYQNRYTFSGKIICGECGDTFKRRIHSCTGYKYTAWCCSTHIKDKDKCHMLFVKDDDLKQAFVTMMNKLVYAHRIILKPYVDALKNTSSDDSLRRIQEIQTLLAQNTEKRETLTKLMTQGIIDPIIFNKETNELLSQADSFRDEINALKNAVSGDVTKVTAATALLHFTEKGGILQEFDDGLFNEYVNRIIVHSRNEVRFELKCGLTLRERM

SEQ ID NO: 1054 - protein, 587 aa, synthetic construct
MKTTDQPQVKQYVIYSRKSKFTGKGESIENQIELCRQYIAMHFGEDEAEHALVYEDEGFSGGNLERPQFKQMMKDSQKIEFAAIVVYRLDRISRNIGDFAKLIEDLGDRHIDFISIREQFDTSSPMGRAMMYIASVFSQLERETIAERIRDNMHELSKTGRWLGGTTPTGYASESLSSVTVDGKVKKACKLKPIPEEIQLVKTIFSVFTESGSLSKTDQYLLEHRCVTKRGKQFTRFAIRAILTNPVYMIADDTAYQYLKENNVDLFAEPSEFDGEHGIMAYNRTLQRPGKATQIRPMEDWIVAVGKHPGIISGANWVRVQSMLDVNKSKSYRKPRSNVALLSGLLRCGECGDYMRPKLTGRTNANGELIYTYMCSTKERSHGTVCSMKNCNGNTLDAKIVEEIRKVATDKKDFGQLLSKTKKVINDNKASYEAELTLLVKNHAETEARIKRLVESLSVASETSAKYVMEQIDELHRQSEQEQTRIAELEKLARQSNALSQNLFFYRDMIESFAETVDSTTIEERRRLLRTIVKKVVWDGKNVYVYLFAEDGELNLPPIGQLMCPSGEDSECYPITVEQTAVEAEKP

SEQ ID NO: 1055 - protein, 535 aa, synthetic construct
MKQPIQAALYMRLSRDDEYYGDSVSIETQRTIINQFVQEQGFPVYDEYVDDGWSGTNFDRPDFKRMMDDVDSGKVNCIITKDLSRFGREHIQMDHYLEIDFPARGIRYIAITDNEDTEKGLSDFVPFKNLFNEWFAKDTSRKVKAALKAKFAKGQRIFAYAPIGYRKDPDDKCHLLIDEETRWIIEKIFDMAYHGDGAARITRRLVSEQVPTPAWLNFQRYGTFAHIFKDQPESKQYAWTIAQVKSILHDETYIGNSVHNKQSNISFKCKKTVRKPPSEWVRIENTHDPLVSREVFDRVQEQIATRRRSMKDQTTQIFAGLVKCADCGWSMRFATNKTVSRPFSYFTCSQYGQGTGNCSSHYIRYDVLYAFVLSRVQYWAKEVQDHEDTVLQRLIKNGDKNRDSANRKAAADLKKAEKRQRDLDTLFTKLYEDRVSEKITERNFSMLSQKYQQEQEELEAKVTALQNQLRQSEEQITGVEQWVELVKQFSRPTELTALMLNTLVEKILIHTATKNPDGTREQEIEIFFRFVGKID

SEQ ID NO: 1056 - protein, 521 aa, synthetic construct
MRRKNGMDRKHRAGLYLRLSKEDEAQGQSGSISNQRAILERYAQDQGWEVAGCYIDDGYSGLHFDRPGFQRLLSDIEAGLVNLVLTKDLSRLGRDYIDTGYYLERYFPSRQVRYIALADGIDTFASSSAQNDMGPFKSVMNDLYAKDISQKVRAVMDTKREAGQFIGAFAPYGYQKDPENKNRLFVDGPAAEVVRRIFEEYLAGQSMAGIARRLNQEGVLPPSRYKAEIQRLPYHNANAVQGVWRAETIRTILGNPTYAGDLAQGKNEKWSYKLKASHKVPRQEWTVVPDTHEAIIDKEAFQIVQQLLERRSGHCKTKAHSHLLSGLVFCGDCGRPMTFCRRSSGRSFVLICSGYSRYGECQRHTTDEAQLERTVLERLNGFAKQVLPSGVEEALLQSCSGRNEALWMQEKTHAQERFNQIGSILQALYEDRAAQRLEESEFTQLAATYREEKRKLQSLLEGGHLRGEDRFLFLRAAHKLLYFEQPDRRLLCRMIRRITIGQGGAVSIDYSFQAPGFHNGI

SEQ ID NO: 1057 - protein, 558 aa, synthetic construct
MRDTSSKIDNRVWHIAIYIRLSKEDGNDESMSVTNQRKIIKQYLESTFEGDFVVMDSYIDDGRTGTDYIRDDFLRMIADIEAGKVDCVICKTLSRMFRNYADQGYFLESHFPRFGVRFISLGEPAVDSFLHPEVITEGIELPINGVLNDRYAARTSADIRRTFDMKRRKGESIASFAPYGYAKDPANKNHLIIDKEASEVVRNIFLWYIDGMSKSGIVRRLNELGIPNPSAYKHSKGLNFHNAKLNGSNLWSISTISVMLVNEVYIGNMVQGKRKIISYKVHELVQVPKEEWYVVEGTHEPIINKETFDKAQALKKHRTRTAPKKREVYLFSGLIRCGDCDRALYRRTSKGHVYYFCRVHNLRGQESSSSLSIREDELQTAVLEAIQKQIELVEDLSKVVDQINQAPAVCTKSKRLNDLLKQREKELQKITNITDNLYVDWKNGDISRTEYHHMKEKYTAQMEQLEQSVANLHEEIRAIEDSISNEEDYFENFLKYKNIKKLDRGILVALVEQISLYEDKTIRIDFKFQDQYRRIAEFIEINNQDNTSGQDATASNAF

SEQ ID NO: 1058 - protein, 502 aa, synthetic construct
MAKIRRIEPNIPSLSGRKRVAAYARVSMETELLHHSLSAQVSHYSSLIQSNPEWEYAGVYADEGITGTSTKKRDEFNRLMKDCDAGKIDLVLVKSISRFARDTVDTLNATRHLKDLGIDVFFEREGIHSMSGEGELLLTLLASFAQAEAESISANEKWSVQKRFERGEPNTGILCFGYDWNPETKSLTINEEEGKWVKYIYEQYLGGASIKGLTLDLKEKGVRGKRGDLMGRTTLRRILSTETYVGDLLLQRYFSPEIHKPKLNEGEMEQILVSNAHEPLVSREDYAKVQERLNRRAKAAHNHGYEKTFFAGLVKCGKCGYACNHVLYHRQPADKAYIECNKRKTKECDLLPIRELELKGIMEQIAGCRENVERITLFDGHIDFLMKDGTVKSHIRKYSGDGFNKTPFSRKIFCGYCGSSIVRMGGNKRRTCWMCSVKKADKAGCEHELMSDGELYGAAQSILGTEENLDMEIYLQIEKTISYNDRIEFYMKEGGKKVWQRR

SEQ ID NO: 1059 - protein, 532 aa, synthetic construct
MLAERKKTALYARLSKDDLEDAVSNSIIHQKFMLEKYAEEHGYYNTQFYADDGYTGVNFNRPAFQEMMDDIRKGKIERVIVKDFSRFGRNYVDCGRYVDYEFATYNVQFISIGENFNSENGDRIMMGLFNLINELYAQDISRKQRAAIRAKGESGKHVTTRPIYGYRTDPQDKSHWIIDEDAAEVVRFIFTMYLSGHGFSEIADMLHDKKVLCPSAYRGKIRKGSSAQTDPYTWNGRTIADILSKQEYCGDTVNFRTERKSYKDKRVIFKPDSELVIHQNTQTAIVSRADYEAVQEKLSQKKKYVRNRERPILDGKVFCYDCKCKMYLMRKKQKGGIYNVYVCNNYRKKKNQTCSSHYIPEKTILQELKKLLYQILQEYENDKKTFLRKLRYLLRAKCSSELMAARSECEKVENRIREVSDYKKSAYADKLSKRITDEFFDSIMFSMDEETIQLKSKYEECQHVLCAAEEKIKGADLFCRRLNQFSLESLNEISETAVNSLVDRIEIREENELGKKSVLLDFYLVGIGKILS

SEQ ID NO: 1060 - protein, 512 aa, synthetic construct
MPTVTVIQPTITEEQNIKIRCAAYCRVSSDSNDQLNSFMAQTRYYSQVFENSETEELIDIYADEGITGTREDKRDEFQRMLKDCRRGKIDRIYTKSISRFSRNTRDCLKSVRELKSLGITIFFEKENIDTANLTDEMMITIMGGLAQEESTSISQNMRWSIKKRMQNGTYRNSCPPFGYTVQNDTLVVNEEQAKIVKQIFNWYNEGYGLQAIADTLNSMAVPSSQTAERWHASSVKYVLSNERYIGDALFQKKYRTETLPTMQKRNRGEKPKYYVQSVNTPIIDKDIFYSVQELLNKRHREYINNNHFLSKRILCSKCGATYKCVSSKNSVFWTCRTHNNKASDCSNGRIADIKIYAAFVRLCNKLLYNYKTVLIPLQTALQDLKLRKFSGKTQVMDIHKEIAKLREQTHVLARLKTKGFLDEAKYIEQTTELTAKINKLQTDLKKLTRSDDEDETLNQIEMLIDFFEMRDKPITKFEESAFESIVERIVVINQHELEFHLIGGLKFKEKIK

SEQ ID NO: 1061 - protein, 507 aa, synthetic construct
MYADNYLMYLRKSRADDPSETIEEVLKKHYEILQRYAYDKFGEYIKESNIYREVVSGETIDERPEINKILKRMESPDILGVLVVDPQRLTRGDLIDCGTIINAFKYSNTLIITPIKTFDLSFNTDGPNYDEKMLKMELGNGSEYLEYTKMIMNRGRNLSTSKGNYIGSVAPYGYKRIFIDKQPTLDFEPTEYKAVILIYDLYLQGYGYNKIATILDMRGYKPRHNKNWSPSVIKDILSNPIYTGYIAKGRKKEIRMLKDGKMIKTRPRNKNYELIKGKHPAIISKEKFDAVQNKMGKNPRVNSRHKMINPLSSLLFCKTCGKAIIYREYKRKDGTIKNLPRYLCGNQKNCHTKSSRFIDVYELLINTLDKIVIDFEFKASNDNTKYINEYNNMLKNIQKELDDIEEKQNELYDLLESKIYSRDIFVKRNDKLAIQRKEAKKRYDDLLKNSPSKTNYKEKALQFKDVINALKDEDIEAIDKNNLLKSIIKRIEYSYVDGKIILDVILL

SEQ ID NO: 1062 - protein, 610 aa, synthetic construct
MARKKNIAAGLDAVIYARYSSHNQREVSIEQQIAECTKHAAALGLRIVGTYEDRAISGKTDNRPRFQQMMRDAEKGKFQAVVAWKSNRIGRNMLQAMVNEAKLDDYGVKVFYAEEDFDDTAAGRFALRNMMNVNQFYSENMAEDITRGLYDNANKCMANGRQPLGYKRGADGKVMLDEPAAAVVREIFTRVAAGDLFVDIARDLNAKGIKTSKGATWNKGSFQSICQNERYKGIYIYGNVRIVDGIPRIVSDELWYKVQEAMRMKKNPVGTRHRVGAEDYLLTGKLRCGHCGSYMTGVSGTSRNGELHYYYTCQKRRTEHACNKKNVRRDVIEPAIAQAIKMYCLTDDVIEWVANRTVEYWEKHDNDLHIEALEQQLEENKKATSNMLKAIEMGIITDATRSRMIELETEQSKLAVQLNAAKADVVKIDRDDLIDELQIFRDMDVNNRSVQAELFKDFLVAAYIYDDNRLKLVFSFMGKDNSIEIPLETGEDPPDGEDSPDAKMFVLTPDCSTRKKSTAQECAVLFCCVCPAMQLLNSCWTFAESYGIILSAIAGIVHRLVYQPSKLRRWVRFPLPAPKDLNLERSGSFLFVLHWAVILQTGGGNATIEP

SEQ ID NO: 1063 - protein, 478 aa, synthetic construct
MKTVCAYIRVSTDSQEEYSPDAQVRLLKEYAASHDMTIIDIYQDLGISGRKADRRPKFQDMIAMAKSKEHPYDAILVWKFSRFARNQEESIVYKSLLKKNNVEVISVSEPLPDGVIGELVERIFEWMDEYYSIRLSGEVRRGMTQKALAGGYNANVPCGYTKEKGSNTIPQIDEYYGPMVQRCFHMFAIEHVPMTKIAATINNLGYRTRTGKRWETRNITDMFQNPFYIGKIRWNSASSRRTTPRVGEEIIRDGKHQPLIDQELWDATQERYAKITARMGHGKRPDIYKHWLSGLLKCPNCGGTLAYQNGLDTKTGKHYPYFVCWKNVKGMCATRNSISAGKAAQYVLDGLLNIVEDKDIKTIAPIVQFNQDEAAIAKQIASIKAKLGRVKEAYVNGIDTLEEYKANKEKLEAEIAHLKELVVPEVKPKTVTVDVIRTVHDTIMNAQSDSEKATAINSIVDHIVYNKEADTMEFFFVS

SEQ ID NO: 1064 - protein, 553 aa, synthetic construct
MALFFYKEKNKDIRAAAYLRLSIEDGDKAESNSIGNQRELIRDFAAERPGLYLVEEYADDGYTGTNFERPGFKRMMEDIKSGKINCIIVKDLSRLGRNYIEMGKYLEQIFPIMGIRFIAINDNYDNANTESSDSDNIVVPFKNLLNDSYCRDISIKVRSQLDMKRRKGEFIGGYAIYGYCKDKRNKKRLVVDEYAADIVRSIYRRKLEGMSAQVIAEQLNSENVLAPSEYKRLCGLNYHSGFKAGTHTKWQAIQVLRILKNEVYTGTMVQGRRQKINYKIKKIRDVEESGWIRVPNMHEAIIPQKLFDTVQEVLKLDTCASKGQQTVNLFSGIVRCGSCGQNMVRRTVSKNGKKYIYLHCVTNHNGLGCSSHLISESKLAEVVLAALQGKVQQISGLEHRLDEINEIPKNERRLKSVEEHLKMLEQEEQKYQTLRRQLYEDMSSGIVSKEEYKEFSHSFNEKVETIRKAKAEMNRQRDCLNNLDVEHLPWIEDFKSYQNLTSLNRRVLVELVESITVYDKEHIHIQYRFDQEIRNVLEYCSSVPAAETEESAV

SEQ ID NO: 1065 - protein, 526 aa, synthetic construct
MTDSRKIAIYLRLSIEDDALDGKASTEQRESNSISNQRKMLLDYIRNDAELMGQEVAEFCDDGFSGTNMDRPGLQEMLKQVKQSKISCILVKDMSRFARDYIELGDYLNQIFPFMGVRFIAVNDHYDSREHEGSTTPLDTAFQTLLYDLYSKDISVKVKTSFQNKCANGEYVFGQVPFGYAKSEIEKNTVIVNEKEAEIVRHIFSLAEKGMSSTQIAKELIAKQTPTVTQMRHPERKMEREHHTWSNTAVRRILNNRFYLGEMAYGKSVRKSVGSKNGIAVPKEEWKVITDHHEPLVTPEVFALASAYRPEQSTKRKREKHPLTGKIYCGGCGYAINYKPQRNNGKMPNHFWCRKHSLLQIPDCCTYFRADILEEIVLTELYRELMRRGDLIKQRESLEQFQKEEWNRLNKELGNYRTQYRSLQTEKDTLYENYAVKQIEAGEYRSRADGIALQMQELSRKIEEAELAFGRLTEEYNQPKQDMKEIIRFSQMEKLTQEAVDVFIKKVIIYRDKRVEIEWNYAFGEE

SEQ ID NO: 1066 - protein, 506 aa, synthetic construct
MNAVIYARFSSHNQQEQSIEGQIRYCTEYAKKNDMTIINSYIDRAISGTSDNRPEFLQMIKDSNNHQFNVVLVWKLDRFARNRYDSAIYKNALKKNNVKVVSVTEYLGEGSESVLLEAMLEAMAETYSRQLSENVRRGMRESALKCQVVGGSVPLGFDTVDKKYVINEKEAEIVRFIFDEYVSGTSKKEIVNKLNAKGWRTKNGSTFVFNSLNKILSNRKYIGEYKYEDIVVEHGIPAIIDERTFNLAQKQLAKNKRTAGRKKAKVEYLLSGKIFCGYCGENMLGESATNRHGKKYHYYICNSKKKYKNCKKKRESKETLEKYLVQQTILFFSDKNNIDKVAKKVVKLYNSELHNGHIDSMIANKKELEKQLDNLTNSLIKTSNDRVLNTINEKINSIDTQLSDLEIEIAREKSLASIEMTVSDVVCFINDLINGDINDVIFKKQIIDTLINAIYIYDDKIIVYFNGSEDAKTITYDDLCSDLEKIDNGGEFVFQPLTSTNKLNCT

SEQ ID NO: 1067 - protein, 567 aa, synthetic construct
MTENQEKIVALYVRVSTGYQVDKDSLPFQKKELKAYCEHVLHIDKKRIEIFEDAGKSGKNTKRPAFERMMNKIKAGQVSHVIVYKIDRISRNLVDFSLMYDDFKYNNVTFISLNEQFDTSSAIGEAILKIILVFAELERKLTSERVKDVMIGRAKNVQWNGARVPYGWDWDEKNKCPVHSDKEAPYVRTMYQMYLDGGSTITIRNYNNSHNIPTKRGGEWTSKTVADLLRNPMNRGDYRYNYRESSRGRKKPAEEVIYIKDAFPPIVDPKIWDAVNKKMDENAALRNTSGLHTIRNRCNVFAGLIVCGKCGHNYQVKGKDSRKGNGFRPSSYACTGKFQKNNCDNMNISDVNIGPFIINYIAAMVDASKKRKNIRNIDDLEQLILSHINFSDVIGISEESLRNTMDLFSAQTSSLGISSLSTQDQDGSVISQKNKLEEELQKTNRALERLKKAFLFDDDGISEKEFLEMKSKLEIDRIQIENSLKKISQDSISANVNHIEFIKTASQFLMIHEINSGNFVDYKKLASADEKTMKDFISSVVSGITVLDKRIVKIVFRNGLSHTLLYR

SEQ ID NO: 1068 - protein, 492 aa, synthetic construct
MNVAMYLRKSRADENNPLETLERHKEILLSYAKDNNLTVIDIFEEVISGGMLYNRTEMLKLLDAIPSHIYDAVLCIDLDRLGRGSAADSEKIFDVLKENDVKIITLKKIYDLNNEYDEDYSEFEMFMARKELKFITRRMNRGRIKSINDGCFVSGAPFGYRNAVINKKHTLEVYEPEAKYVRMIFDMYVNQSMGITSISRQLANLGVLSKKNTPLHPTTIARMLRNHTYIGKIVWNKSKSVKGKNTQEKTSKDDWLYVPGLHEPIIDENTFNKAQDIINLKYKPPMRTGTLQNPFAGLLKCANCGRAIVINTSNETVEKYRLCCRTLGCNKASALSIVEDKVFEVLTKEFKDIELSLKNIRQSHNKDKLSCLDTIATLETELKKLDKQQLRLYDLLEQEVYTKELFLERNNAISDRRKKINATIAQEREKFKLVDTSSIEERLPLLRELLTNYNSLSATEKNSILKNFVKKIEYKREKSAPEGDIFLKIYYK

SEQ ID NO: 1069 - protein, 534 aa, synthetic construct
MKRKVAIYARVSTEHEVQLSALDNQVQYYDDILKKNPDWILYDRYIDEGIAGTSIKKRKNFMRMIEDAKAGRFDLIITREVSRFARNTVDTLQETRKLKNIGVEVYFVEDNIWTFNDQDGELKLTIMATLAQNESEKTSQRVKAGQMISFQNGVFYGSGNILGYDKVGKDLVINEKQAEIVKYIYSEYLNGKGTVKIADELTERGAITSTGLSRWSAAYVSRVLRNPFYSGTIVYRKSYIPDYLEQKPKMNYGEVEQVIVKGRHEPLVSKEDFKKVQQIMDSHSKPIKIGKRQATGVPKNIWSKKLVCECESNFNRKIYHKNKNDTTYCYVCYKKKNRPKSRFKDGCSMKEVQEWKLQYMAEYIFRNLTQNPDNRKQLFERLMKGVDIDVHPEIKIRQRIYKLNQLIEKESEKFDRLIDTYLDKTIDINLYDMFQKMLSSRIEKYKIKIIELEKKCESIEPLEVRIENAKKSIRRLLDINYNGVDDKIIEEFVERIIVHKDYFEWKLNFMNETIKLEISGASKKDGCLVEHCES

SEQ ID NO: 1070 - protein, 623 aa, synthetic construct
MISSGTEAVDRKQRIRDRYKGVDTSELEVIPAKAVEGLGESTSIRRVAAYVRVSTDNDEQTSSYELQKNYYTDYIKAQPGWEFVGIYDDEGISGTSLAHRKGMQQLIEDCKAGKIDLILTKSIARFARNIVDCLSVIETLKNLDPPVGVKFEADNIYTLDSNGRMILTILASVAEEESHSKSIIMNWSIDRRFSRGLFLTPALLGYDQDEDGNLVVNPEEAQTVKVIYYLYLNGFSLKDIAELLTDYERKTKLGNTEWNPGTVAGIIANERHCGDVLARKTFTPNFLTHKAKKNHNDRTQYRQRDHHEAIVSRDVFNAANHLRASRTYKKKNHPLPVLSVVDDGILRGYVPFDKDWTGFSAEEYREASESVMQEERHDTAEVMNRLDLTGYEVVRAQYFATLQNPAMTISNGRLRFNTACLKKFEDVEYVELLLNSVDRCVAIRPCEKSNPNAIRWGRLKQGRWCASTLGCRGLAKALFDIMEWDENLKYRFRGQLVEQGDDKLMLFELDEPEMIKVEKIVLPPKEEDTEGKTIRQTIYIFPPEWAGTFGQPITSIAQVGILRQEHYAGNWDVLRPASEIKELNIFTAEGLNALLHEAEEIMEGWIDIDGRKQSDDAAAGIGN

SEQ ID NO: 1071 - protein, 455 aa, synthetic construct
MKTVACYCRVSTEEQVKYGFSIQAQKDALSKYCQENEYKYDFYIDEGISASSMKKRKALQKMLDKSVAYDMILFTKLDRLSRNVLDANNINKILQDNNCNMKAIDEDDVDTSTADGMFMFNLKVSLAQREIGKTSERIKFVFQNKREKGEVTSGTTKYGYKIKDKKFVIDSEEAENIRNLYKYFISVNGDHKKTYSYFVKHFPGKGKDALFNYLRETAYIGKYKLYRKNVYLDNYIPPIMDKELFNEVQNLLPRVEKVLKKENIPSIFAGMLYCYYCKSRLVRKVDYRSKNKIINYFCDKQYKYKVGINEKQCQNSKVISDKSVEEYLINNLKYLCKQYISKSIIKTKPKPQKNNIKINSLKNKLSKLKDLYLDDLISKEDYKQDYIKINKEILKLEEEQKEKPQKDFTYLNELINKDIPDIYNTFNIDEKRKFWLKIIDKIYIKEGKIKEVTFL

SEQ ID NO: 1072 - protein, 455 aa, synthetic construct
MTILRAGLYERVSTEEQALRGFSIDAQIENLTEYCDKNNIKIVDHYTDEGISGAKPPLKRPALQRLLDDVEAGNIDVILFTKLDRWFRSVKEYFKVQEILDKHGVQWKAIHENYDTSTANGQMAITIFLAVAQNERDKGAERVKAVLKNKRKNKEACFGGPFKPMGYKKEKDADGIMRLVKDPETEQMTQEFWNILVRHNNLAKAIRHMGDVYGVTKSPKTWTRIARSPFYCGMWDGIEDFCPPYVSKEDWAMIQETAERRRQDTRAKRIYLFAGMMRCPECGHILCGTYKTNVRKGQKYDYLFYRCRFKSTGCTYKHSMTEIKVEKYLLKNLRRLLEAEIYEAELEKSKPKKRPKSKLPALKERLRRLNVMYMAGNISDEDYLKDDAEIKALIAKAESEAPPPERDIDPLREILKTDFEGIYKALDREEKRRFWRGLIKEIKVDGLDIVDVIFF

SEQ ID NO: 1073 - protein, 528 aa, synthetic construct
MPDKVLAFYIRLSSEDRDLKTNALKNESNSVFNQRRLLQDYYDTHESLHGYKVIVFCDDGVTGTHFDRPKFDELIEMARNQEIHCIMVKDLSRFGRNFLEMGNYLELILPLYGVRFISINDAFDSDDYLGVTGGLELALRNLINNMYSRDLSTKVRSAFRTRNLRGEYWGGNGFYGYQVHPHNKKRLIVDEQVRDIIVMIFESCVAGMTTSEIAQMLNDMGIPSPLEHKRRSGGFYNGVVKEETGIWLKGAVRKILTDERYTGKMITNTRETEEVGKPKMRSLPRDQWIIVPGTHEAIISEELFRTAQNALQGRIRNVNKNTAGNRANNLFVCGCCGRKLRKNPAKEPHLVCPKNDSIKGAECAGLFVNQAQIEQAVLQMLREQSRSFLEQHCLMQACIDKKLSSIQTELDANTNMTRRLQSRKAELYEQYRAGRISREKFADIQKTDSEKLARLSSRAEEIKRLLVEHYESRGNLAAGKRTADQIILLKDYDPEIIRNFVERVRVYPSGEIEIDMRTSSGFEFVTAS

SEQ ID NO: 1074 - protein, 541 aa, synthetic construct
MIENRMMTGNRVDCLYRVSTDKQVDYNDKSQADIPMQRRECHRFCEKMGWTIVHEEQEDGVSGHKVRAENRDKLQIIKERAKQGKFDILLVFMFDRIGRIADETPFVVEWFVKNGIRVWSTQEGEQRFDNHTDKLTNYIRFWQADGESEKTSIRTKTALGQLVEDGGFKGGLAPYGYDLVKSGRFNKRKHEVFELAVNEAEAAVVRIIFDKYVHEGFGAQRIATYLNNLGYRARTGKMWHHASVRGIICNLTYTGVLRSGKSRSQTLPHLQIIEQELFEAAQHIRTSRANSAEQERRVPLNTRGQSLLAGNVFCGHCGSRLALTTNGKAYPCKEDAHRIVKRVRYICYGKTRKQTECDGQTGYTAHILDGIIDKVVRQIFERMKAIPKSEIVNIRYREKMEERKALLKSAKSDYAKAAAELDTLRAEVIKSLRGESAFSQDLLGSLISDCETKCLEVQHTMEAAQAAYDEGQAMLDALNAQYDDIISWADMYDSASTESKKMIVSCLIRRVEVYRDYRLHIDFNIDFEQFSAGLDISAIAA

SEQ ID NO: 1075 - protein, 498 aa, synthetic construct
MNQNESLKTAFGYIRVSTHMQEEISPEAQKHELQKWAKQHNILITQWFQDNGISGKKAENRTAFQNMIALAKEKDHPDYILAWKFSRFARNQEESIVYKSLLRKNNVQVVSISEPLPDGPFAPLIERIIEWMDEYYSIRLSGEVKRGMKEKAKKGGYQSAPPLGYRREKGDTVPVIYEPEAKIYRLIKKYFIQDEYNPTTIARTLNDQGYRTRQGNRFEARVVIYILRNPFYIGKIRWNRSSHGGYYENSPEDVIVSDGQHEPLCTSEEWDTISKRIKKYTPGSTGRRRSKTLLPHYLSGGLFRCPICGASMCYQRGVSKKLPRAYPYFCCWKYAKGIHSENVNASAPKTEEALLNSLQEFVDHGHSDITYTVEKVEEPSGNNAAQYEQLLDKLAIRKQRAKEAYLDGIDTKEEYRENRELIDAEVKSIKEKLATLETAAVITTTEEFHVDIREIILKLKDDTLSTLEKHTALASILDYMEYDKEKNEYSFYYKFEAE

SEQ ID NO: 1076 - protein, 500 aa, synthetic construct
MKNCIIWTRVSTKYQEKNGASLADQKCKCELFAKQNGYKIKGYFGGAHETAKTPGPMLKEMYSVLKKDKTITHVIISEVDRFSRNVGQGATIIDELLKRKVIIVEASTGIDTSTRNGVMMVKFKLTLAEWDNGNRTDKFISGRKFCLENGVYCEAAKPLGYTKHGKSLGTTFTINEDGKLIKKAFAWKLQGMANYQIIEKLKTYGLTLTKQKLHHILTNPFYAGKIRHKMLEGKLVDGNQPHIVSYDDFLRVQEILSDRTGVYTHKKETPRYPLKRHVLCAKDHTPFTAYTVKKKNLDYYKCNQIGCKTNESAKKLHSKYERVLHSFNIPHELTSILRDIISRMIAVDDEEQRKTEALLKKQKTECQNKMKKCKVRFGMGDIDEDIYEATVETLQERLTKIDLELANCKRNLSNFNSEVDDTLAICCELDTLWKNASLELSQRIQNLLFPDGILWDKEIDDYRTFHENKALSIIAKISSDYKNKKEKNSSEFSSSVFLCA

SEQ ID NO: 1077 - protein, 465 aa, synthetic construct
MKKISILEPAAPAFKPRKRVAAYARVSMETERLKHSISAQISHYSALIQKKPEWIYAGVYADDAVSGTGIDRRGEFTRLIGDCDAGLVNIILVKSISRFARNTVDLLETVRHLKDIGVDVWFEEEGIHSLDSDGELMLTILASFAQEESRSISENAKWGIRKGYECGEARNCMLYGYRCRNGETVIEEKEAKVVRRIFQMFIAGDSCYFIAKKLNEEGIPSFYGKTWSNTVISSMLHQEKYIGNRMMQKYYTESHVSHKVVKNKGELPMYYLEGTHPAIIDEETYRMAQEEYAKRYGVEIVNGTAERAHYMYHHPGEYRKPEFHFRRAQWTEEQRREISERRRSRDLYGHAQHDLTLFLKCEGCGENLVAQVRSFTDGTQSRRWHCYRHSKVAPETPKPMYMRDCTLKKIICEVLGLNEFDENVMLEHLTHISVLGTRLTFHFRDGHTEERTYAHEKRKRCPRRY

SEQ ID NO: 1078 - protein, 500 aa, synthetic construct
MYLRKSRADDPHESIEDTLRKHEKILFDLANKLNIKKDEIVQFKEVVSGENLKNRPQAQKMLKLVMENAFEGVLVVDSQRLARGDTLDQGTIIRAFSLNNTKIITPGKTINPGDEIDQDYFEFDLFMGRREYKMINKRMQRGRNISVQEGNYVGSIAPYGYKKTKIGKCHTLKINEDEIDCFNKMKELALNGLGCTSIANELNRLGFKPRKSKLWTTNAVRDILLNKTNLGLIKWNTRKSVKLYKNDEIIKSRPRNEEAEYYPGKHPAIITQVEYDAIVENIKNRARPVKKDKKLQNPLAGVVYCGKCGKAMIRRSYNNGYRDGLICTNTHCNNVSSVLEVVEKRVLESLEDTLKEYRQFIDNYHNDKTKTNNDSLIIKTEKEINKIDSQINKACEMLEVGAYSVELFKERKTLLDNQKKALIDKIEALKKEDTDFKLQNYINAVPILENAIKLYWNSSVEEKNKLLKQIVKRCDYLKSERGKRNGKGMYNFKLNIYLKI

SEQ ID NO: 1079 - protein, 511 aa, synthetic construct
MPEALNAVIYARYSSDRQTEQSIEGQLRECYAFAKANDIAVIDTYIDRAISGKTDNRPAFQKMIEDSAKRQFQAVIVYRLDRFTRNRYDSAIYKARLKKNGVKVLSAMENLNGSPESIIMESLLEGMAEYYSVELSQKITRGMRENALKGKALGGQRVLGYKVNSDCYFEIDETTAPVVDDIFKLYSSGKTVKEICDILNARGVKTARGGAFNKNSLHTILTNKKYIGIYKTKYGEIVGGIPAIIDKELFEMVALRMEQNKKAPARAKAEINYLLSTKLFCGKCRSAMVGESGTSKTGKKYYYYACVKKKREKACDKSNVKKDWIEDLVIQRTVTDILKDDVIEKIADRLVELQKAEAAESGTMLYLQNSLAEIQVSIKNIMTAIEKGIITESTKTRLTELEDEKRNVEIEIAKESIARRIISREQIIYWISSFKDGDITSEKYRQQLIDTFVHAVFVYDDKIVITYNYSGENNTATISDLDLSSPPKIKRHTFVCLFIFGGATSFCRRRP

SEQ ID NO: 1080 - protein, 479 aa, synthetic construct
MDDLKIAAAYIRVSTDDQTELSPDSQIKVVREFAKQKGYLIPKEYIFRDDGISGRKASKRPEFNHMIAVAKQTPSPFSAIMVWKFSRFARNQEEAIFYKGMLKKRGIDVISTSEPIIDGPFGSLIERIIEWFDEYYSINLSTEVKRGMTEKVSRGGAVSIPAFGYDIVDKKYQVNPINAPIVQRIFIKYLNGVGCRAIANELNDLGIKTTRGNNWENRTIEYILRNPVYIGKIRWNPKRRTRRNYDDKDIMIVDGIHQPIIDTDIFDKVQKKLDENKAKYRPYITDRQNGKDYMLKGLVKCSNCGATLSLACNSLQCIKYAHGTCNVSHSIQVNRLNEVVINAIDDTLKSGDFQLKPKEQPHEEPQELNIDFMIEKENTKLRRIKEAYEEGVYNLAEFKQRKELIESKIRSLQKQNKPPEPKPDHLLAKKKLMSRRKEIISTLKSKSTPEVEKNALLCTFIDKIIFNRSLSSVELFFCF

SEQ ID NO: 1081 - protein, 490 aa, synthetic construct
MKAALYTRVSTDEQAEHGFSLEAQKKRLIEYCNKNNIEIYKLYSDEGISGHSIIKRKALQEMLQDAKEHKFNYVIAYKTDRISRNLLDLLTIKNQLDEADVELLLSDEAIDTKDDAGMTMFSIMGAFAELERKKITERMMSGKRQKLMNEHIKLKNGRVPYGYLYDDENKKYIIDESRRSIVELIYKLASQGWSYNKITRHIAEETAANSSDSKKKWYISDIRAILTNPIYKGYSGISYYYNFNDRAKKPKNSAILYKATNVEPYFTEEYWDTLYSQLEKKTQYFKRKHPIDSYIFSDVLFCATCGLKIGTRQHHANYLYYVCNSKHKMYDSDHICDYAININKFNNWFIEFIRGIDENNIKLSVSKPKDLDKELQAVRSQISLKEKNREVLLDKLMNGVIDDTEYRLASNMVIASLNSLKSQEKELSDKMDSLKEKEQTKRYNRLKIKALKVLVNDWDNLTDQAKKTLINSSINKIMITKDGIQEIEFN

SEQ ID NO: 1082 - protein, 518 aa, synthetic construct
MQENETYAIYLRKSRADSEKSSLEEVFAKHESELQSLAERTLGNRIPEDKIFREVVSGETITDRPVISQILKVMESKKIKGVFVVDPQRLTRGDLLDKGHLINVFKYTNTKIITPYKTFDLNNDFDLKLFKMELDKGSDYLEYYKMIQARGRIASVRSGQYIGSTAPYGYDKYSYKENKHTVNTLKPNSDEATVVQLIYHLYVNESLSYAAIANKLNTMNIKPRKSTSWSPYSLKEILHNPVYIGKVRWNRRKTVMKYKNESLLKTRPIALNDSIISDGIHEAIIDEALFDSAQECNGKTPRNHSNSKLINPLAGLIFCGNCGRAMSYKTYKNNAGSEKQSPRYLCNNQSNCHTKSAKATDVINQIISALECYIEDFKVKLENDDGNSFNVRSQIISVLNKQLQDLEVREETQYEMLENKIYTPELFKKRRQKLLEEREVLLDKLQEAKVQEPVKIDYQEKIISFTDTVEALKNPDIDILQKNMLLKKCIKKITYTTDKKKGNRWRESTFEIDITPLI

SEQ ID NO: 1083 - protein, 521 aa, synthetic construct
MVGNSSFKVGLYIRLSRDDGNVESDSIVSQRSLLNQYVKENNYIVVDEYVDDGFSGTNFDRPSFNRMMKDIELGKINMIITKDMSRLGRDYIGTGELIEKYFPNNNIRYIAINDGIDTFIDNTNNDIAPFKAIMNDMYAKDISKKIKSSLHSRMKDGLYVSGRCPFGYQKDPTNKNHLVINKEQAEVVKIIFDLALKGNTYHYIAQYLTERKIETPASYYNYVWNKKCINTNCISQEYGVWVDTTIKAILTNRIYTGDAVQGKTKKINYKLKKTVKNNPDDYIIVENTHEAIIDRATFNYMQTLLPKNVKRPEKKRFYLLDGLLYCGDCKHRITIRYQNKTGRSYTTCDYYRTYSKYHVCTTHTNNYEVLENVILENIKEVCKKYLDKNKIKNSIGNLEFEDNTLKIKKQIESLEITNNKLITNLDKTYMDRLKGIIDEEQYLRVSENIKIEIDNNKKNIDILKNEQIEENKIDNKQIEKYINKFLSLDNPTRELIINLVEKIYIYQDKTIDIIFTFKNVT

SEQ ID NO: 1084 - protein, 433 aa, synthetic construct
MQKSIRTIQAEPTLPTRLRVAAYARVSSDKDTMLHSLAEQVSKYSRMIQSNTAWEYAGVYADEGITGTKEDRPEFQRLLDDCRDGKIDMIITKSISRFARNTVTLLKTVRELKLLGIDVFFEENKIHSLQAEGEVLLTILSSYAQAESFSASENTKWRIRKGFERGEVMNWRFMYGYNITKDSVEIDEAEAAIIREVFNRARDGESFRSICRDLNERGIRGLLGGKWSTAYLYQVLGNEKYAGNALLQKTFVNNHIDKKVVRNNGELPRIFVEGSHPPIVDQDTFDAVQVILARNKAQRAGKKPPEQCEFTGRIICPKCKKAYRHVTSNGSTGWNCSTYMAEGKAKCHGKKIPDTTLRCLIAELLGMPEYDPAAFCEVVDSIYPYEGNRLVFAFKDGTVREATWKDRSRAESWTPEMKAQARENSKRRKTCQR

SEQ ID NO: 1085 - protein, 550 aa, synthetic construct
MNNNTSNYLVYAIYSRKSKFTGKGESIENQIELCKNQLINKYNIKEENIKIYQDEGFTGYNTNRPQFQEMIKDIRNKKIKCVIVYRLDRISRNVTDFCNLKNEFIKYNTDFISVTENFDTSTPMGRAMLMISSVFAQLERDTIAERIRDNMYELAKTGRWLGGNTPLGYKSEKVETLSVDGKRKNLYKLDIVFEEAEIIKLIWNKMCELKSLSKLEVYLLQKGIKTRNGNNFTRFSLITILKNPVYVVADNKIKDFFEKMNVTIYETDIEKCNGINGLLAYNKREELMGKTKSYKDITEWIIAVGKHQGIIPSQQFIKVWNLIVNNKDKRCRVPRQNTSILSGIIRCKHCGNYMRPRLRNTVTIDNKRNFSYLCVLKEKSRKRLCKCKNINGIETDMIVIEKISELKLPTNMLINKIKLLINNKEKESDKRINELQTLNTILSRNKRKVEALIDKMAIIDGELIADITAQIKSIKSKNLEIEKRIIELSKEMEKEIDKDEVTVLALNIINKYMSSFDSLNIVDKRLMIKSLVNTIESDGENIYINYMGCP

SEQ ID NO: 1086 - protein, 555 aa, synthetic construct
MKTAVIYARYSSDKQTEQSIEGQLYDCYNYAKQHGITVVQEYIDRAMTGKNDDRPAFQQMLHESAMHKWDSVIVWKLDRFARNTIDSAVNRQILAKNGVKLLSVMESFGDDASGQMMTHIIEAINEYYSADLREKTIRGMRQSAMKAQTTGHIPLGYKVVDKKLVIDEDTRIIPDTVFRMYAEGERLTDIADHLNAQGYRNRRGRPFTTNSFYNMLSNEKYIGIYKYDDIVIEGGIPQMIPNDVFEAVREKLITNRKRAAKNTAKADYYLSGKLYCGHCGEPMSGLSGTGRNGVKHYYYRCNGVQKKSGCHKKLENKYLIEDEVCRAARSAFEQMDKAETAETIYQMYLQTVRNEYAPAELEKELTECTKQAENVVNAIAQTGGNQLLYDKVRELEERKEQLSSALRLSQAMTDNVPSVEQITVFIDDILATDINTTEGKKAIADIMISKVYVYDDKLTVIFKDKDGKSVDIPLSAVSDSSSADCAPSALGSQSRIIRTLSSLRMCSDLLFIFDIETVRIFISSGGFCYHKVKFALGLSADYKVKIEFMQIVIFV

SEQ ID NO: 1087 - protein, 505 aa, synthetic construct
MNKSILSAMYLRKSRADDPGEDVMDTLHRHESILRAVAKRGKYLVHEDCIYREVVSGENIFSRPQMIRLLEDVTKGKYQSVLVVDIDRLGRGDMRDQGLILETFKAADTLIVTPEKVYDLNNEMDEELTEFKGFMARREYKMITKRLKRGREQTVRAGGFVADPPYGWKRAKINNLPSLEPHETEGPIMQMIVEMYGNQEPISTIQERLAAMGVYNRKGQPFCRSSIRHIATNPVNAGLIRWNRYKNIRKGQNGSPTGYEIENPPEDVILVKGVHQPQVSVEAYQKCVNVCKSRAAPSVKKGLHGVVRNPLSGIVICSNCGSRMQMQHSSTKDTRTLLCTHPGCMPGVDIVRAEAAMLDILRDKLEEIRTGQGKKQQDKALAALQKSVHAAEKNIQTLKKQQDKLYTLLEQEIYSLEVFKERNQVLSQKLTDAQEQLKILQDQVDDLSSRKEERLAQNIENVLANYEYSSIKEKNRLLKTVVEKAIYFRKTRTSPFALDVTFLNM

SEQ ID NO: 1088 - protein, 581 aa, synthetic construct
MRVSVNLNAQKPDTTTNAVIYARYSSHGQTEQSIEGQLAKGHEYAAAQGYTVVHEYIDRAMTGRNDNREAFQKMLSDTGKHQFQVVIVWKVDRFGRNREEIAFNKHTCKKNGVRVEYVAESLPNSPEAVILESVLEGMAEYYSIQLSQNIRRGQLESAKKCQCVGGSVPLGYTLDSDKHFVIDPQTAPVVKKIFDLYAEGATISEITGQLNEQGIRTARKQLFTKNSLTKLLKNEKYIGVYTYKDIVRVEGGVPAIVDESTFDRVQELLKINRRAPSHTWTKVEYLLTDKLFCGHCGSPMVGESGFSHTGAKYSYYGCIKRRREKACDKKPVRQDWIEALVLDETVKLLHDDELMEYIIDRTWEYYQVTDKVQEEKAVLEAQLAEVDKAINNLVRAIEAGIFNAATKSRMDELDAQKAALTASLADLELTSGIRITRDHIEYFLLRLRDLDVKDRECQKRLVQTFVNAVFIYDDGRVKITYNYSGQSSTITLNQIASAEKGKGFVCCLPCSTSRNPWRCKGFGFLFAHKYHQTYHCCVLDSCREGRAALPLGSCFLILADELFQLLCGLLTHVGVAMTVHV

SEQ ID NO: 1089 - protein, 410 aa, synthetic construct
MQVKVIQPTMQPKTYKLRVCAYARVSVDSEELENSLDNQISYFTSYIKANPSWEFCGVYADFGISGFYEKRPQFQQMIADARAGKIDLIIVKSVSRFARNTETVLKFSRELKSIGVGILFQLQNINTLDGSGELMLAILAAFAQAESEDASQNAHLTYKRKFNAGERTSGLEHTFGYQAIDGEVAIDEEVAPTVRLIFDLAAQRVWPGKIAIYLNKQGIPSPGGQKWIPSTVFRILDNTAYKGDLMLQKTYLDSRRVRHRNRGEHEYWYIPGYHPAIVSNEQWDAVQEILMDRSKALEERKATPKVNHSPRSTYPLSGKLFCPYCGEKLIHKWGNKNKDEYWACKTNLKVGSHACKGVWLPASVADEWGEISEPVTVLAGKDKYGMWEYTAYPKEEYEQSADCPYREKGA

SEQ ID NO: 1090 - protein, 502 aa, synthetic construct
MEKYAMYLRKSRADQDKTLEDTLRRHKETLIAYAISHDLSVQDVYEEVVSGESLYARPQMLKLLEAVSCRAYTGILCMDIDRLGRGGMSDQGVIIETLKQNDTLIVTPQRTYDLNDETDESNVEFSAFFARYEYKQITKRMKAGTRKSVQEGCYLACAPYGYRNTKVNKHSTLEIYEPEAKYVRMMFDLYNNGYGCQTIADRLNAMGVSPHRTDKWGRTSVMSILKNYAYNGKVVWDKITHIKKGTRGNAKHIRIYNPPEKWTITEGLHDAIISDEQWETTQGIIKDRTHPPSFTGDIKNALSGLVYCGNCGSLMSRTPERHRNGKTESARYLCLKRSCIAGTKYELLEKAVINSLQEKLKKYDSLKQTNRIQENNFEEQLKSIAGSISVIKKQQSKLHELLEREIYSVTTFLDRQQTLQLQLDTLNSEYAAVKKQADSIKIVDIEQTKQNISDVLNCYWQADISTRNRLLKTVIEKVVYFKDKKTKPADFTLEIKLKQAFL

SEQ ID NO: 1091 - protein, 521 aa, synthetic construct
MKKITKIDELPRSQLSKNKLRVAAYARVSTDSDEQLVSLKAQREHYENYIKSNPEWEFAGLYYDEGISGTKKEKRPELLRMIRDCENDRINFIITKSISRFARNTTDCLELVRHLMDIGVYIYFEKENLNTGDMESELMLSILSGFAAEESASISQNTTWSITKKFQNGSYIIGSPPYGYANVNGEMVIIPEEAEVIKRIFTECLSGKGGSVIAKGLNRDKIPARRGNHWSSGTIIEMLRNEKYKGDVLFQKTYTDSNFNRHINNGEKDQFYCKNHHEPIISREVFSKAQKLIAERAKSRNNSFAKNAYQNRYVLSGRIICGECGSKFRRKTNYSVGRSYIAWSCIGHIEDKDSCSMLFLRDGEIKATFTTMMNKLAFSRKIILEPLYNSINKIDEECDLERIDAIDKRMEQLTEERNTLIGLMTKGFLEPALFNKERSSLDIEIKNLTAEKTNLVMSFTNGTSQADEIKLLLDYVAKDKFDGDYTEEAFEKFVDNIIVNSRDELTFIMKCGLSLKEKVVR

SEQ ID NO: 1092 - protein, 513 aa, synthetic construct
MKKCVIYARYSSERQTEQSIEGQLRVCYEFAKNNELIVIHEYIDRAMTGTNDLRKEFQQMLSDSERTKEWDICLVYALDRFGRNSIEQAINKFKLQKTGKIVISATQRTSRNIDGSQNLDGIILENMYVGMAEYYSAELSQKVKRGLNESRIKGQFTGGVPIFGYEAYGTKAEGRKVRIKEDEAVIVRRIFDEYASGRLIKDIHDDLNNEGVLCHGKPFTRTVFYNLLKNEKYIGIVRFGNQIFDNIYPPIVKKQVFDICRAKAQANKIGKHTDVQYLLKNKVHCGYCGRSVSSDTGTSKNGTVMRYYKCIGRKVDKNCDNVPIRKELLEQLVIDSTYQALATPDLIEKIADLILSAHEKRMADNSIINILESQLQDISTSITNLIACMEKGIVSSSTAKRLEELENQKIALETKISLEKVKESTLIQKRDIVNYLKNAIKKTPRLMIELIIKDVILYKDRIEIHFNYTDLIRPDAEPRQAFLFFKFTKEIIFDYHWMNWKPIKKNIEINLLI

SEQ ID NO: 1093 - protein, 529 aa, synthetic construct
MQSEQYAIYLRKSREDRELEKYGEGETLARHEKTLVELAKKMGLPIGEIYREVVSGETIEERDEMKRLLKDVESRKWTGVLVMEVERLARGDTGDQGIVSVAFKYSSTKIITPMKVYDPNNEYDEEYFEFGLFMSRREYKTINRRLQRGRMTSITEGKYVGSIPPFGYKRKKLENAKGYTLEPNPEEAEIVKKIFILYSYEEVSINSVAKEINKLGLKPRKADSWSISSIKDILNNPVYIGKIRWNSRKQVIRSENGKRITSRPRNSDILLINGLHKPIIDNKTWDIVQNKRSCNAPPIPHNDKVQNPLIGLVFCEKCGKPMQRRPYNLKQKEPTLICNNPNCNNISSKLYIVEEKIIEALKIWLNGYNVNYSELESRKTEFPVIKTKVILKQLEEKLLSEKNKLNKVYELFEEDTYNKQEFSERSTSLKNNIDEINREITKISKAVNTQEEAEQNKEIIVPKIKNVIDIYSKLETNEQKNILLRSILEKVTYLKTEKAIKKDSNPSNFEIHIYPKIPKLEQQQNKKIN

SEQ ID NO: 1094 - protein, 514 aa, synthetic construct
MRNEYNPIIIKYVAEYLRKSRGETTEDLIKHKTILEELCKSRGWIYVVYEEVETGESLFARPVMQQLLRDVEDNIYDAVVCVDLDRLGRGDLVDWGQIKRVFQKTNTYMVTPSSLYNLNDDNEEFAVDLQTLFARREYKKITHRLSMGKKVGAKLGAWTNGTPPMPYEYQEWIDPATNKRYYNEKGLVVNLQKLSIYRFMVDSFIKDKKSTNEIAWELNRRNIPSPRGGRWCNMTVRRLLVDETHLGKIISNKTKGDGHKNKSPNKQPFQKIPKEQWTVVENRHEAIKTQDEHEKILIGIQKNLKSPYRRSDHYYPLKGLIKCGLCGYGLPLEYKRGKDLVVKKCWHKDYLGNKCPNSSGKAQYIIDAIDEQLKEYEEQIRKEIESCEDQSTDLIQLQIKTIMDKLNKKDIALKRARIAYDEGVDTLDEYRSAKERILKEVDELESQLSIENLKLQKAQSITNHEKLHYIEEFRRSRWEDELDDKELNDLYKTIISSIIWTKQGDNIDIKVNFL

SEQ ID NO: 1095 - protein, 513 aa, synthetic construct
MLYAIYLRKSRADLEAEAMGQGETLARHRAALLDYAAHHGLEIGAVYEEIISGESIDARPKMKQLLREVEQGRWAGVLCMDIDRLARGNSADQARVSNTFRISGTLIITPSKVYDQSRESDEEYVDFELFMARREYKAISRRIMRGRIASVKEGHFIGSTPPYGYDKVKVEKGRGFTLLPNSESDTVKLIYSLCISGMGCNAIARRLDTMGVTPRKGSSWSSASIQDILKNPVYCGKIRWQYRKEEKSLTDGIVTTHRRENPDCIIAQGLHPALICEEEFDQAQQFLNSRRIPHKKESTELRNPLSGLVYCGMCGSMMTRLGTSSRNHSDTLRCPNRNCSNVSAKLEFVESALVEGVARWLNDCRVNVSRKPAADTAKAERTAAEKVRAELAKLDSQREKIYSFLEQGVYSAGEFRERMESLEKRRTQLSENLRQAEQAVSEAEGNRQLYAQIIPSVERVMDIYAQSTPEEKNRLLKTIISRAEYIKTERNTRGNADRCNFTLNVTPLFPETD

SEQ ID NO: 1096 - protein, 526 aa, synthetic construct
MKMKRVICLYRVSTVGQVDHDDIPMQKIACREYAATHPDWEIVDEISEKGVSGYKISTNARDAIIEIKKKAINREFDVLLVFMFDRLGRREDETPFVVQWFVQQGIEVWSTREGEQRFDNHVDKLLNYIRFWQASGESEKTSIRVKTKHIQMVEDGQYRGGYVPYGYKLEHQGRTNKKNQPVRDLVIDEDEAAVVREIFHLLTDEGYGTVRVANYLNDKGIKTKRGKSLWRGTSIRALIDNPIYIGIYHMDGAQSQPFDHLKIVDEAMFERCQQTVKGRATCLGDKMTMPVRTDTRSLLSGIIYCADCGSRLAYSHNVTRRKLADGTERVYERECYRCYRKINARETCDGQSSYNAETINETVLYEVRRILNAIKSKPEAALLEKAKECTTGVNEIAYRQAEADFFEAHKQITALEDQTMKFLTGENTVDISIINAMMPKYKEKLANAQKRMDETRDKMEAEKATAKNAVQEVTDLLSWAEAFDDATIEEKHMIIARLVERIDIGHDYEIEIKFRISVEQYMRIAA

SEQ ID NO: 1097 - protein, 513 aa, synthetic construct
MYRYIVAIYLRLSVDDKRVESMSIESQRLLLRKYAEILGDNVEIIEYVDNGYSGTNFERPAVQQLLTDVKTYKVNCILVKDFSRFGRNSIEVGYFTQQIFPLFGVRFISVSDNYDSDEHKGDTGGIAVAVKYLVNEYYSRDLSVKTKSAKYTKMRRGEYKSGNYTYGYKPDKNGEQIIDEKAAETVKMIFELTADGKSAAYISKLLFDKNIPTPAQYKGIKGNYGSRFPNCKYWSISTINRIIVNEQYMGMFVMLKQKVQDVGSTKMIKRDESEWIKIPNHHESIVSKELFERANAVRRTFKQPNKQQRSYPLRGKVECGCCQHAMDYVPKKIPIYRCSYTRNDETEPCYKSEIPESSLNQAVFDIISKQAEILLNIDDVSKADTAQIKTGQLADIEKQIAACQKEKQKLYEHLLTEKITLDEYRRLKQEYDTKAENYRIRYDKCRQSEEQNRLKIENRTKIVQTAKTIKKENTLTQALADVLIEKVCVYPDNRLEIEWKIKDFCTENTAVIS

SEQ ID NO: 1098 - protein, 537 aa, synthetic construct
MSDTNKITALYCRLSHEDELAGESNSISNQKDILQKYADDNGFYNTEFYIDDGYTGVDFERPAFKRMIDDVDNGRIGTIITKDLSRLGRNHLHVGLFTEEYFPRNNVRYIAINNNIDSDNPDSSAIDMAAFYNIFNEFHVKDTSRKIKASCLIKSERGQRVASRPPYGYMKEPNDHSKIIPNPETVPIVRHIFQLCAEGLGPAQIAHRLEEEQIYTPAMYEYSKSGTVISNFDTSYPYRWNPTVVANVLEDVSYIGHTCNFRFGRASYKDHRKLKLPESEHRLIENTHEPIIDINTWEIVQRLRQSKRRFTRSGEKSIFAGIIFCADCKQKLYFHRHVREKPENWKFVCSSYRKNSREQCTMHGIKESHLKEIVLHEIRNVTAFARERTDEFAEYISLKSNSAVKKELSDANKKLKKSEKRLAEVGIIFRKLYEDHVLGTIDNDQFRMLSQGYTDEQNQLKAEISDLNKAIQELKSQTANTAKFTAMAKKYTDITELTQEILHTFVSRIEVHEKRKDDNGSVTQEIDIYFTHIGIVK

SEQ ID NO: 1099 - protein, 518 aa, synthetic construct
MLAYGYCRYSSDMQNEKSIEQQKNELEDYAKKNNIKIKKYYIDEAKSGKYDTRDSFQELINDACKTKEIQAVLVWKTDRFARKAMDSLYYRNKLEKFGIKLISITQPIDTETPEGKLMSTLLAGMDEYFSQNLASNVKRALKSNAQNCQFNGGIAPLGYNIINKHYVINEQEAKIVQEIFNMYIDGMSYIDIALKLNMKGYKTKKNKPFAKTSVLSILENEKYTGKYIFNKGTKNSHRGMRKDAIVYEDAIPQIISKEIFKKAMERRKTKPHAENTAKRVYLLSGLIKCQCGGTYTGYLSTKVKNGNTFKYGYYKCNRRDKLNKCTMPFLKQELLENYIIELLTKKLLAKDNMQKLVNQVVMQYKNLQNEATEDVLSLKSRIKEIKVQMDNIVDLICRGMGTDALAYKLKDLEQKKYNLEDELNFKNSNFKIDIKSEDVIKILKRDVDELQDSSKNELKKLIRKWVKKIEVTNDFLDVYFYSEDFLPHQMVARNGFEPSTCRVWTGCSSQLSYLAVND

SEQ ID NO: 1100 - protein, 563 aa, synthetic construct
MKVQVIEKKKGRIDRTTGEIIKGNLRVCAYARVSTEKEEQINSYNSQLKYYEEKIKSNSNWKYVGIYADEGITGTLDYKREGFMKMMQDATNNKFDMIITKSISRFGRNTFDILKYVRLLKEKGITIYFEEEHINTLELSGEIMLTVMSAMAQQESENISSHVKLGLQMKLKRGELIGYNGCLGYVYDKESKQISVNYEEAEIVRYIFERYCQGVGCTTIAKELTTMKYRTPTGKKKWHESTIRGILKNEKYKGDVLQGKTYTTDPISHRRVVNMGEENMYYMQEHHEPIISERMFNQAQEILQKRGGVRGSGRRKGNFSRKYPFSSRLYCGFCGSFLTRRNWHSGTKNSITVWHCMEFVKHGKENCPHCKAIKETIIEEAFTQSYKLLCGSNKELIQTFLNEMEVMIQEESNECSIKRLEEEKQILKEKIDKLIDLNLNGTISTETLQEKKAKLQNKINKLTKEQEHLQLEIEDSMSLNQGLNKFKTLFKDNEIMPNFDKDVFELIIEKVIIGEKDSKGKINPRVITFILKSGNEIKCEEDKNQQSSYEAQENYLQNVSEPC

SEQ ID NO: 1101 - protein, 528 aa, synthetic construct
MICAAYVRYSSEGQRDGYSIEAQLNAIKNYCEREGYTLSFTYADEARSGTIDDRAEFQQMITDAKAKKFECLIVHKFDRFARNKYDATIYKKVLRDAGVRIISVLEPLDNSPEAGIMEALYDALAEYYSKNLSRETLKGKNEAAKRCQFLGGGYVTYGYAVENKKYVIIPEEAKIIQEIFSRVASGESYGSVSRSLYDRGVRNRQGRIISSTSISRMLDNPMYKGTYIFGLRSRDKTKTPITIEDGCPAIVSKELFEQASSIKKKHQEEWWTHTREVRAREKETTYLLTGYIFCGVCGSNYYGHKSKSTGHNRKGERIYKYEYHSYRCSKRHLKTEACTVRDYKKICDNVFLRKEPLEDYTIELIERCISSDSIIDSIVTLLKDARKRQSEQLFDVKSIKKSIQKLEGQEDKLLDAYISGLISKEKYEERLKDCRTKKASLNQELARVEAAQSNNPLPTTKQIKSTFLKALKGDKSDIEYRKMLVSTFLESIIVYPDRLEFTFKFPIFNGSYSSSVGSDIFVRSNTTV

SEQ ID NO: 1102 - protein, 441 aa, synthetic construct
MDNVRLYTRVSTDEQRRNGQSIGAQKEQLYDYCAKNDLNVLDYYEDNGFSGGNLNRPSFQKLMKEVQPGDVVLTCRLDRLTRNTVDGLSLINAWNDKNIGVKCIHDLDIDTTTANGKLILTVLLGLAANEREHASERINETFANKKKLGEPCTGCCALGYKVEPKKVVIIPEESKMVKYAFDTFLATHSVSQTKVVFNKKYGDYLKEKSKRANGRDAFTEQRMRYLLRNNNYTGNKTYPQIIEVATFEAVQEILNERAGGKPRKYDYIFRGLLKCGYCGSTMVGAPRHDNGKLYLNYRCNARSSERNKTCITISEKNIEKLLISQVHEDLTKCNVDLELENEIKVKKSDITKLEKKLERIKELYADGDLTKQQFVDKKQKINDEINDIKRQLINSKRIKLDDNALNIYWKLSNKKKAVFWRSLIKEVRVYKGYVDIKYVGE

SEQ ID NO: 1103 - protein, 550 aa, synthetic construct
MKKFPIDLSCLTEEEISQFQEDPYTLYNGDQDVALYLRYSSTGQSDQSIEGQLRDCRAFCKANHYRIVAIYVDRATTARKDVEKRVHLMEMVADSAKQNWEYVIVWKLDRFARNRNDSAIMKMRLRKNGVKVLSATEHLTDSPESIILESVLEGMAEFFSAELSQKVTRGMRESALKCHSVGGHIPLGYKVENHKLVVDPDTAHIVQEAFSLYANGESVADICRKFNSAGYKTAKNTEFNRSSFKAMFRNTRYIGTYTYKDIIIENGIPAIIDKELFETVQRRLSKTATAPARGKAKVDYLLSGKLFCGHCGASMNGESGAGRHGKVYHYYSCYTKKRKLGCDKRPLKKDYIEGIVARDALNLLTDQLIDEIADMAIRQSEQDLINDTHIPQLTAQLSEVEKSITNITAAIEKGIASETLMNRLVQLEHEKKTLNKEIKAEEKFVYRIDRDQIVFWLSQFKYGNIEDEDFRRRLIDLLVNSVTVWDEPDGYKITTAYNLTSCKTKTFRVEKNPAAEEATGFDFGESECTIKNYRYRCVWHKAKRINRFRS

SEQ ID NO: 1104 - protein, 586 aa, synthetic construct
MSGKTLRSLKKTAEELLNTIKVAIYIRVSTHWQVDKESLPVQRQDLISYCKFILNTDNYVIFEDPGYSAKNTDRPDFQKMMARVRTGEFTHILVWKIDRISRNLLDFAAMYQELKELGVTFVSKNEQFDTSTAIGEAMLKIILVFAELERHMTSERVTAAMLSRATNGKWNGGKVPFGYRYDKEAQEFIIDEAEARVVKLMYDLYEEQRSLLAVSKELNDRGYRSRKGAKWSPVTVGNLMRSPFYIGVLRYNYRDESGASFTFKPESEWIMFEEHHPQIITHEQWNRVVSTMRSQRRGQPGHGRSFNRGNVHIFAGLVTCGYCGSLMRATKDRVRADGSRPSIYHCASKRTGSDCPNKYISDLTIGPFVLNYIANIIRARKSFGVSTSIETLEKKLLRGDTFKDVVRIGRPGLEELYRHFQGTKGVEQNFMASPGATASNAEEERDLLLAEKHRKERALNRLKALYLYSEEEQAMSEAEYIVERKRLLDSLDGIDTRLAEIDEVLAQQIKLSDEEFIQKASYFIMAQQLTEKRHIDYTRFMRKADPQIVKNFIQNVCANFCIKSGRVVSIRFKNGIEHQFFYRDTE

SEQ ID NO: 1105 - protein, 531 aa, synthetic construct
MNDKIAIYLRLSLADGDLKKGSKDESNSIENQRMLLHDYIGKQEDLFGEIVEYVDDGYTGTNFNRPAFQKMIVDLKQGDIKVIMVKDLSRLGRDYIGVGDYIEQIFPLMGVRFIAVNNSFDSMKLNNGTPGIEVAVSNLVNNMYSRDIAKKIRAALETNWKNGKATCTNVPFGYVRNKKGGQRWEIDPEAAPCVKKVFELALSGRNTTQIAYGMNELNLPTPGLYAKRKNLLMGSNPIIAPDSEMLWNAAIVWRILRRYEYTGALVMGRRKKIDVNTTSVRTLPEDKWIIAENAHAAIVTKDEYYQAQKAIRNVTPIQYKVGDDFALKGKICCGNCNRQLRHERQYGEMVFYCGYKRSAGKFSKCYGGYYREYSVNAKVARAIKTVFYALDVVNQGMQEKQSITVRCMDIEDLEKQAEAIRVEQIKLYESYADGVLLRDAYIEKKKALSEKLAALQDSIRTEKEEQECADELDEEIRALTKQASEKTYIGGLTKECVDAFVSMVYLYDDQTMKVEFNCEDVIRRALEKYGA

SEQ ID NO: 1106 - protein, 489 aa, synthetic construct
MLKTVIYARYSSDKQNEQSIEGQIHECEQFAKTHDMVIIKHYIDRALSGKTDDRPSFLQMIKDSSSGLFDAVLVYKTDRFARNRYDSAVYKAKLKKNGIKIFYAKENIPDGPEGIILESMLEGFAEYYSAELSQKVKRGIKENIRKGLSFGGACPFGYKIVNKKYVIDDEQAPYVKKIFEDYAKGRRAIDIFNELNTLPNYAGKGRKWNRSSLNRMLTNKKYIGIYELEDVCVKDAIPPIIDEALFNKVQSRILFNRRHTTRAKVNYLLSGKLFCGLCEHSMTGKTGTSKTKVKYHYYVCSNRHCKQKKYRKELLEDIIIQYTVKDILNPKHFKMIAKKCLEIQQADNKINDILLMLKKQLTATKTKINNIMNAIEAGIITTSTKDRLEQLEQEKYKLELEISTQQLNSNRLLSEKQIIYMLNVFYNKRVDVSFYNQIIDCFIYKIYIYSDKICIVYNLNNSDKDVTYSDINELYKSSHLNSCGSPYDL

SEQ ID NO: 1107 - protein, 461 aa, synthetic construct
MVQMKKAKSETTLVRAALYIRVSGEEQKIKGLSLEAQEERLRDFCKERGWLICGVFIDAAKTARKNIRKRVEFQHMIDGVKKDQYDILVFCRLDRWFRSVADYYKIMDILNAHNCGWVTSDEDYDTTTANGRLYINVKLSIAQNESDICSERISVVFDSKIQHGTVLSGFSPFWLDVKDKKLVVNDERAAIVRDAIDYFEKDMTQNGTVRYIRNKYGINWDINMLKRVFKNKLLIGVYDSNGRYNDHFCDPIISVDQFNRVQSIFDKRIKVVPTKRVYIFTSILKCPVCGCRLSGQAAGTNTRYYYRCNRHFIRKDCSYGKITNERLIEKWLLENLKSKLSECEVAWNVKQVKKRLEPSAKQKASLKRKLSKLKDLYLNELIDLEDYKRDYIMYSSALSELSTSQKEETPPDFAAVHRILDNDFLSTYNTMDRTEKRTFWQSIIKEMVLDDNGHVTSLSFV

SEQ ID NO: 1108 - protein, 487 aa, synthetic construct
MKKIAAAYIRVSTHMQEELSPDAQLRCIRDWGNVHGYYIPDEYVFIDNGISGRKAKKRHDFLRMIGLAKTKPASPFEAILLWKFNRFARNQEESIVYKSMLRKKCNVDVISTTQQTTKDIYGDLIERIIEWTDEFYSIQLGEDVFRGMTENALRGNFQSSPAFGYKVEKGQGLVIVEDQANIVRMIFNLYANTMMGFYEIARHLNRLGYKTKKGGAFETRTIRYIIQNPIYKGYLRWNYANGTTRVVNDESEWIIVKSPLVPIIVSEELWDRANERLKNEYRPKNGKPVSKHRHWLSGLVKCSSCGASLSTSVQYRHDRTYINFQCYKYLKGKCLVSHGISEKKLVPLVLNVLKEDMSKSYIECERIEKVVENQQDILDVQLKRLATREARIKEAYLNGIDSLAEYKANKEEIQKEREFLLQQSQDHNKTEKESNELPNKIRGVYDILVSDQCSKDEKQAAIRSIVKKIVFDKENKTLDFHYYIKED

SEQ ID NO: 1109 - protein, 579 aa, synthetic construct
MNENKKVIVGLYPRVSTEDQSRFGHSLDEQECRMKQLCEFKNYEIFKVYREEGVSAKNTNRPKFQEMIEDVKQGKINKIIIFKLDRLTRSIQDLENICKFLDKYNCGLESISEEINTSSANGKFFVRMITILAQLEIERTSERTKVGLVGAIKQGHISGRPPLGYVKKNGSKKIFIDEVQADVVRRIFKLYLDGMSVCSICKLFKEENVLNRRWPTTTVDKILSNQLYIGNSEYGKRTNNEIQIFKNVVPAIIDKTTFDMVQKRKEKNLKNFKRKATYIFMQKIICPKCNKVMGGTSSTSKNKEKHLYYKCNCCKTRINEKKIEKELMEFLNDMLDFFLIIDNSFKPTLNKDVENEIKKYLTMKEDINNKITRIKTAFIDAIIDANIFQEELNELQRELENVEIKLNELEETKRNIEYKQDIETIFNIKEIEKMKMKSEYVKSHNLWKKLDSSQKYYIINKYIDEIKIDIDKKYNVSINDIIFNKNEIENIGYMFRSDCFDMIINIDERDAILSNYKNEFKTQEYIESLREFYNIKETTIQADLFNINEYDKDNIIQIIPQERKTKFEKNKFTILEIEV

SEQ ID NO: 1110 - protein, 478 aa, synthetic construct
MKTVCAYIRVSTDSQEEYSPDAQVRLLKEYAASHDMTIIDIYQDLGISGRKADRRPEFQDMIAMAKSKEHPYDAILVWKFSRFARNQEESIVYKSLLKKNNVDVISVSEPLPDGVIGDLVERIFEWMDEYYSIRLSGEVRRGMTQKALAGGYNSNVPIGYTKERGPDTIPQIDEYYGPMVQRCFHMFAIEHIPMTKIAATINNLGYRTRTGKRWETRNITDMFQNPFYIGKIRWNSASSRRTTPRVGEEIIRDGKHQPLIDQELWDATQERYAKITARMGHGKRPDIYKHWLSGLLKCPNCGGTLAYQNGLDTKTGKHYPYFVCWKNVKGMCATRNSISAGKAAQYVLDGLLNIVEDKDIKTIAPIVQFNQDEAAIAKQIASVKAKLGRVKEAYVNGIDTLEEYKANKEKLEAEIAHLKELVVPEVKPKTVTVDVIRTVHDTITNAQSDSEKATAINSIVDHIVYNKESDTMEFFFVS

SEQ ID NO: 1111 - protein, 430 aa, synthetic construct
MEKIVKDITPDLRANDTIKRVAVYARVSCEKDTMVHSLKAQIDYYRKFIMKNPGWKFAGIYADEGKTGTKEAREQFQALLTECRNGNVDMIITKSISRFARNTVTLLSITRELKELGINVYFEDQKMDSMTSDGQLMLTLMAGIAQAESKDCSDAVKWRIRHGYEQGRASSFKILGYRWDDGNVVMVPEEAPLVKRIFDLYLSGKGANAISKILNSEGTTGAGITKWSSTTIRNILRNEKYYGDLLLQKSFVEDHINKRKVINNGELPQYFIEDDHEAIIDRQAMSDVKNEIAIRRARFYHGQGKESCLTSKIKCPYCHANYHRKKINGISKWSCATSNRKGKSMCPKSKDIREDVLLAILAHQLGYKDFDEKLFAEQVDYIECFDDHIITHFYDGSIKNSKWSNPSRKDSWTDDMKEKARQRGLNQYGK

SEQ ID NO: 1112 - protein, 597 aa, synthetic construct
MANKVVKVIPARPQGIIIDQAGVIKRKRVAAYARVSTEKDEQTNSYEAQVNYYTNYIQANPEWVFVGIYSDAGITGTSTKKREGFKRMIDDAMNGKIDLILTKSVSRFARNTVDSLVNVRKLREKGVEVYFEKENIYTLDTKGELLLTILSSLAESESVSISQNTTWGQRKRFADGKVSFAYSNFLGYDMGQDGKLHINEEQAKVVKRIYEEYLLGYTPSYIAKRLTADNIPTPQRKKVWYQGVIDSILTNEKYIGDSILQKTFSTDVLTKKRKKNEGELPQYYIENNHPAIITDEIFEMVKEEMARRKSAGLMTNVSCFSGRILCGDCGGYFGRKVWHSNQPNRTIVWQCNKKFNNPDACGTTSIKEKAIEEAFVRAFNEMFSRKDEIIENYKLCIDVICDDSKFQERKNELDKDLEEKTIVIKDFLLKCSKTEENIEESNARYDVLIKEFEALNAERQKCLDMISSLAAKRVKINSFLNILNSTEGVINSFNEVLFQKSVNHMVINHDLTIDVIWRDESKTTTYIERGVKEVKKSAPRIKPEKVLSDHTCLCCGKQLYITPGKVQRIFCNKKCGETYRRAKAKEARLENNTISHA

SEQ ID NO: 1113 - protein, 479 aa, synthetic construct
MKYAAAYIRVSDDRQDEYSPDSQLKLIRQYAKNNDYIVPDEYVFYDDGISGRSVKKRKAFNNMIGFAKSKEHPFDAILVWKFSRFARNQEESIVYKSMLRKINVSVISVSETIDDSPFAPLIERIIEFMDEYYSTRLSQEVTRGMTEKASRGEVMTIAPFGYDLKDNTYIPNEKGAKIVQYIYDSYLAGKGYRAIAQELGSMGVRTKRGNFPDNRFVEYILQNPVYIGKIRWSPEGKQSKQRYKGDNSNVMIVKGKHSPIIEKSKFEQVQSQIADQKKRYGKYQRKEQPVQFMLKGLVRCGNCDATLVYVNTKCPAMQCHQYARGTCKVSHSLSIAKANKAVIEKIEECLETLNFDITYKTTTDPQENIDYDKLIEQEKDKIRRASEAYDAGFDTLEEYGIKKRTYQSRIEEYEKAKVKQPKKKNDTIPNDFLERVSNVLKIIKSPDVAESSKNEALRTVVDHIVYEKEKNNLAIYFYA

SEQ ID NO: 1114 - protein, 541 aa, synthetic construct
MIQKQASDYVVAIYCRLSKDDGLDGDSSSIQNQKETLIKYCNDNNYLVGGIYCDDGYSGTNFNRPDFIRMIDDIKRGKINCVITKDLSRLGRNYIQVGYYQEEFFPSHNVRYIAINDNVDSNNDNNDFVGVFKNVINEYYAKDVSKKIKFTVRAKAKNGECRATPRPLYGYMYNNKGERVPDPETAPNVKMIFKLYAKLKSSSKVAEVLKEEKVYSPNYYNYLKRGDHSARYSNCTEEEKYNWYGDRIYRMVDNQEYLGHYITQKTLKNSFKSKKITKNKSPYIFENKFEPLVTQEEFDTCQQILNMYACLHTPEEENNYKRLIVCGCCGKRLSFGKRKDRNTSASKYRYYCRNKECESSAYINREDLNEIVKKELSELFNTVLANKDKFIAYANELTSHYDVNYLNSIEGKKRSFLHQKKELEGKLSRAKELYISGDLDVNDYKTFKADTEDKIGDLVTNYNSLCKDSETRNYTNEAYALINILESLKDGELTSTKVIGSLITKIEVTKSPRNKDVSVKIHYPKINDMVGAFIDYVNNEK

SEQ ID NO: 1115 - protein, 515 aa, synthetic construct
MANAVKRVQVIRATKGQNDYGKIRMAAYCRVSTDSSDQVNSFMAQMQYYNDYIRQNPNMVLVDVYADEGITGTSIEKRPEFKRLLRDCENHKIDRVIVKSVTRFARNSLECLETIRTMQSCGVSVYFETDNIDTANMNSELLLYIKSAFAQGEALAASARIQTSIRMKMETGTYVVSSAPFGYRYELGKLIVVPEEASIVREIYDWYLSGKGFDAIAATLNRRYGGGWHPNRVRYILTNEKYIGDTMWQKTYTPQMLPLRNVINNGVKPKYYVEETHEAIISMDDFKMVQQIISQHAKNEKPQKKTHFFPVGVVCRHCGWSFSRKSSSPHLIACNKKGLSGTECPSRSYSREELSDAFIRMYNTLRQNEHRILDETLSRLHDFKTKLTGQDEQIAAIDSDIALLCEQSEMYAKLLTEKVIDQVTYAEKCDIYKRRISELRTRRRKLMSEDEDEHCITCLRKLKIILGEMPRRLLIVTDKQIKAMTEKIYAEEDGSLTFVLCGELELNVKMDTVWH

SEQ ID NO: 1116 - protein, 549 aa, synthetic construct
MEMKHSDNIIWNTGLYVRLSAEDERKKASGSVETQKELLLNYIQDKPDMLLYSIYVDVDKTGANFERPEFQRMMSDVKAGVVTCIVVKDLSRFGRNFLDSSDYIEQIFPLLGVRFISVNDNFDSINYDNNPNMSVALKNLMNDILIKDLSRRIKSSLFTVMKEGYFRGGTPPYGYISVKDEEGKARLYIDKETAPIVRQIFQWKIEGKGYGTIARTLNQQHMIPPQKRLQQLGFRLNKTGDSDLWLSSSLRRIIMNPVYIGSMVQHKYEVMQISSKKIKSVAPEDWIYVPNTHEAIVTKEMFEAANETVRATVAKQKGRNQWSKVLEKTPNVLKGLVYCKDCGRKMQRKSEVSKDKTHYIYHFSCMQYMRAGSCTPHRISEKIILKAIKDALSVHIHLIQLAKRKLEKNAKAIEEQEQEKKAKLTKLKRKISTLKTSKRDLYEKLLEGDVSEPDYLLQKNKIEDDINHLEQEMTASLSEQEEKSALSDKDREWVHFVESLKGKRNLTHEQLGGLIEKIIVDDNKHIEIVFSYSSPFLNSITEGGIDDER

SEQ ID NO: 1117 - protein, 518 aa, synthetic construct
MVAIYVRQSLDKKDSLSIESQINDCITLCKRNGWDDYQVYKDKGWSAKNLDRPEFQKMNNDVEAGKIKAVVCYKIDRISRSIRDLVNLIEDYHELGVHFVSFADNINTAAPGGLMMATLFGSLAQMEREAIIARVTDNYYYRCELGYWGGGPAPYGFNLKKIVENGQKHTVLEINEREAAMVKQFFKWYLEPDGTIYEILKKADKAGITTRKGGAWTSRVISELLSKPMYAPNSMDIYNFYAAQGVRVRVTPEQCDGKLSLNVFGRRDRGSKHPKRSRPVNEMTLAICKNPPIIDSDTFLKTQFKKKAKLQVSPRTGTAKTTMLSGLVKCAICGRAMSPSGSSRGVRYFTCSGKRNYAAGTCTSKSIKVSALEKIVIDDILRYATNPKVIDMFHAMQGSKLTAEQSHEVNLLQQEAAKLDIEIDNLLDACSAGNTTAIEYLNKRIEKIDTRKHEILTRINEIKRDTENVISLFSGIEIENVPYILAHGSIDEKKNVCQFLLSSVLFTNADDVKVYYKM

SEQ ID NO: 1118 - protein, 518 aa, synthetic construct
MKNLINNNMENYCAYLRKSRKDMDAEAHGQGETLARHEKRLKDYANSVGIKISKFYREVVSGETISARPVMQQLLTDVENGMWSGVLVVEVERLARGNTLDQGIVSNAFQYSNTKIITPLKTYDPNNDYDEEYFEFGLFMSRREYKKINQRLHEGILSSVNEGKHVGAAAPYGYDKYKLPKQKGYSLKINDYEANMIRSIYDLYCSGNGLEFICNELDRLGYKPRRGNSFAKSTITNILTNPVYIGKIKYTDKATIKKVINGNIVRVKNENKNEIYVDGLHQPIIDLDMWNKAQNIRKKNLTNRTKIDYTLKNPMASIIKCGLCGGALSRITYSNRNDIRICCRKCKENVGSNIDSVENKLLQSLKILLNDYKIKIINNDNSDIEMLLKITENNILNLKNELNKLKIQLNKTYDLLEQEIYTKDIFIERSSLLKQQIKDTNNNIIKLESQKKQIIAKKNNREILIPKIENVIDSYFETNDIKMKNELLKSVLEKVEYTKITPKDKDDFKLKLFPKIQA

SEQ ID NO: 1119 - protein, 579 aa, synthetic construct
MAYKAKAPDSGAEKDIRVAIYVRVSTVYQIDKDSLPMMKQDLTAYCKYVLNTEDYEIFEDAGYSGKNTARPAYQKMMAQIRQGNFTHLLVWKIDRISRNLLDFAEMYQELKKLDVTFVSKNEQFDTSTAIGEAMLKIILVFAELERNMTSERVTATMINRASNGVWNGGRVPYGYSYDKDTQTFSLDPNENSIYNLLVETYETSKSVVYTSRKLNDLGYRSRYGNLWSPIAVWTILRSPWYKGIYRYNYYKIPGRAAVKDESEWVVVENHHPASITPERFDKIQETLDRNARFRNAPGRKITKKTTHVFAGLVLCADCGSAFTASPGKRHVSGYHPSKYGCSNARKTSACHAKYTSDVVLGEFLLNYILNILNAQKNVDEISSTEELQSRLLCGSTFSSIDHVKQDDLDSLFTQLKSRPEKDPFTAVRSKTKPKVDPELKRMMNDLKKQRRALDRLNDLYLYSENSISEREYLVRKQQITDCIQEINDTIEAIAKENHEQSIDDNEFIKQASTFILNQKLADRQYVCYTKLAESLAPETLKAFFSSIIDSIIMRAGKIETVIFRNGLSQTFIYKEKPGK

SEQ ID NO: 1120 - protein, 591 aa, synthetic construct
MRCGVYVRVSTDDQKDNGYSIDSQLRMIKEYCEKKNYDIIDVYNDAGHSGKDLMRPEMQRLLKDIKSKKIDKLVAIKVDRLTRSNYDGFWLLNYLEEHDVKLELILEPFDVSTANGEMIYGMNLVFGQRERKEIGARTKRAMEEMAMEHIHPSKAPYGYIRNKETGHLEIEPIEAEVVKEIFELCKERHSTRNIATIMKNNNAYLSHGKWKADRVYKILTNSIYIGIFEYGKYKRKPEDILKVENYCEPIIDLKTWNITRKNLEKNKHPNYGEHIHLFTSLIKCPECGNILSSTISYKYSGTSNKKEYYHLTCKNVNCKAKGLHYSSDKIEKKLGRVLNELTRYMYDMNNEIIVSNSTKSKDISDIDKAIEKLKIQEKKLVDLYLSSNLNVDAINHKNEVIKKEIEKLNKKKQLLDPNDDFKEYTVELLKKLDYKKEEDYLLFNKLGFSFMWDSLNRKAKRDILNKLVSQIEITRDKNYNIEIKNIKFTDEFISRSCKEYLEYLNDILKNNNIGIKYQELITTDELNDYSKNYYVLSLQKLEKNEYSNDERKILLTLASEHFYYDGIIHCPLYSNETIIDQVMLIPKTEIC

SEQ ID NO: 1121 - protein, 459 aa, synthetic construct
MEALLYTRVSREEQVKFGLSLGAQLEALKNYCAENNLKIRNVYSDEGISGGSIKKRKAFQKMIKEAEPGDIILFTKLDRFSRNLMDANLVVQELEERNISIKAINEDDIDTSTADGKFIFNLKLSLAQREREKVSERIKDVNIYKIKKGEAITGTVPYGYKIENKKYVIVENEAQEIRNLFDMFIKTQNLTNTTNWWNENHPNDLRSSGSLRYQKLKNKIYLGIHPSGLNNEFCEPIITKEQFDEVQRIFEGNRNIRGSKTKTKNVYLFSKLIHCPKCGCTMVGIYGSTRNGKYRGRFKYYRCNALYRSKENLKCDFRHYLYEKRVERVALDGLIAKANETVDVKLEPEKNNVAELEKKLEQTKSKIKRLKDIYVDGLLTREEFDEKYKDLQNLVNEIQTSLDKEDENKPTNLAIELKGLDIESLYNKLTPENKQIFWRKYINRIEVDKDTLEINVVYQ

SEQ ID NO: 1122 - protein, 565 aa, synthetic construct
MTCNPIRFDSTEPERLGKDEKIMKSNQQKITALYCRLSQEDELEGESNSIKNQKSMLEKYAADNGFGNCRFYIDDGYSGVSFERPDFKRMIADMEKGEIGTVITKDLSRLGRDYLKTGTYIEIIFPQNDVRYIAVNDGVDSEKGCNEFIGIRNYFNDFFAADTSKKIRAVQRAKAERGERIGSKLPYGYMKSEDNRLVPDPDTAPVVKRIFDMYVNGVGTRTIAMTLERDKIMSPSAYAYYKYGRKENGLKLNNPYLWSDVTLRGMLVNEVYIGTTANYKTTTKSNKLKKQIHNDRKDWLIFENTHEAIIDKSTFEMVQKWFAGRRKPNKSGKTDVFAGLVYCADCKSRMYLRRVLKYPKENNYLCKTYQRYGNNHCTAHRISEQDLHAVILQKLREVTAYVRENPEEFYEIASRNARAEAEREMKTYLREKEAAEQRIAELESIIRCLYEDRVLGRISVERYESLSSGYETEQSELKTKLNEMNAFLDENEKREQLIQDFIENAKKYIDIQELTPEILRAFISRIEVHEKAKWHSTECGNDIVIYFTVERKEQLNVWHKEIKTA

SEQ ID NO: 1123 - protein, 480 aa, synthetic construct
MFGGETLKKTITEISPKDTKSKKVTTKSKLNVAAYCRVSTESDEQMNSLANKKEYFEKLIKSHADWSFVDIYYDEGISGTSLKKRDGFNKMIADALAGKIDMIVVKSISRFSRNTVDALQTIRNLRNHDIRIFFEKESIDSNDIKSEFMLTIMSSLAQEESQSLSENVKWGKRKIAQKGFVQIPYSNVLGFQQKGKYGIEIDREQAKTVVLIYDMYLHGKTTGEIIKKLIEDGTPTPTGLEASHWCNTAILSILRNEKYCGDAILQKTYTKDFLNHKKCINYDAFPKYYVKNNHEEIIPRATWEYTQELLEKHSKRSINVRYGELIFCSACGRKYRRFHRYHKYYKETILSYRCLGKYDKSVNCSNIKLFEKQLDEIYHATVLQLLAFYKEELIGYFNIMIPKVIDGKRKSNKVIKLLNNMDTFAQSDYEYDSLHILIKKIVVFPERALGFSTLDDSIIKMTIPKYRLVEHYGRKKASGN

SEQ ID NO: 1124 - protein, 611 aa, synthetic construct
MNKENKIAGIYIRVSTEDQAREGFSLGEQEERLREFCKFKRYEIFKVYKDAGISAKSDKRPAYQEMLEDIKSKNINVIVAFKLDRLTRSVYDIEKLMKIVNDLECDIDCLADESNTTTSNGRMVMRIMTSVSQNEIEKCSERTKVGLAGAIKQGHLPSRTTLGYKRENKKLVPNPLTKDIVVRVFDLYLEGKSHQKIANIYNKENVLGKTWRDSTIQKILSNEIYKGDYIHGKRTKHPTYYENVVEPLVNKDKWESCQYQKLRNARHYERTSTYLFTNKLKCSKCGNYFGGKASVKKKLNKKYYYYKCNHCKINLKEDSIEDLILLELLALVYIDDLFNDYYTPFIKSKLDYNKIDYKKELKELDKEKDRIKTAYIKGIVKLDEFDNELKQIEYKRQVLEKQEQDSKQYENLNFTMDDLLLIKDKKEIEDYLHPENIIDLFVRWNYLDKTNKQKLISKYIDDIEIEKLGTKIEIKKLNLRNSFYYDLIDYHNNYDTPLDLFMFMDEDKFPIPVAHNGFRTRIEIENYVNKLKEMYDVNYYEVIPNKDFTNLSFTPKNDIEKIIRIIPIKDNDKFKSNKLELGIITINLSKIKSPDGTLLYKNIFKTSKLPT

SEQ ID NO: 1125 - protein, 520 aa, synthetic construct
MKKIKNQVQRAVIYARYSCSNQTEQSIEGQLADCEKFAEKYNYYIVDTYIDRAMSATTDRRPQFQQMIADSATGGFDVIIVWKLDRFARNRYDSAVNKQKLNSNGVKVVSVMEHIEDTPEGALMESVLEGFAEYFSKDLSQKVSRGMRETALKFKATGLIPYGYKKTSDNICVPDEHTAPVVKKIFEMYADGVINKDICDWLNSHGYRTSNGNLFRNQYLRKILNRRRYTGSYTYGDLELHDENQRIISDELFDRVQIQLQAKKRTGRIAREQYILVGKLFCGYCRNPIRGESGRNHQNRIYTYYKCSVNKTGGKCPKTTVHRDIIENSTIKFILNNFLNDEIINSVVDTIQASETAENNSAELIALRTQIEDTDRKINNLLSAIENGIFTPSTKQRLNDLENAKEKLKYELIVKQSEKNNFNATAFKKFLKNIDVDDFKTTEQRQKLINLVLYREYLWNDKVLYIFNITPSKPNDSVDVDSYVDAVLAGSTNPTDGVPQVVISELWFGYFFVQKQNIAS

SEQ ID NO: 1126 - protein, 643 aa, synthetic construct
MNEDGKQGNRQRERERVRKRYQVTVDPNKYEYIPETQKYSDFYDNESYKRVAVYVRVSTDDPRQTTSYELQRKYYEDFVVHHPNWELVKIYADEGISGTSLLHRDEFNRMIKDCKDGKIDMIITKSVSRFARNIIDCIGMVRTLAELKSPVGVFFESECIFSLKDDCQMALSFQATMAEEESHIKSRSMETSLRMRLDNGIPLTPKLLGYTHDADGHLIVNPEEAPTVKLAFYMYLYGYTAQQIADAFIALGRKSYLGNIKWTSSSIIQILRNERHCGDVLTRKTFTPNYRTHLSKKNRGDRPQSRYLDHHDAIISRDDFIAVQRMLDNAKYGNKSILPELRVIDSGILKGFVSINPRWAGFKAMEYFQAAQSVYQQSSTGNEEHDEPVKAGNVEPDEPREIQIEVEAGDFDLRGFEITRSEFFDSYCRPIVTFENKKIKLNTTCVKKFGEKSYVELLVHPMQRRFAVRPTDKSNRNGVLCSKITESGIQPRTISSAAFSDTLYNIFRWSKDCKYRVIGSLYEQDGEVAYIFDMANSEAFFKADILRSAGKDENGEAIQPLTPSGTHIRAIPEEWTTTFGKQFYFHEQSLAALEAQSEDDWKLRLQGELFETGKKINVTSFDEIKRYIKQELSGAMPQEVPNE

SEQ ID NO: 1127 - protein, 523 aa, synthetic construct
MENCVIYARFSSHGQNEQSIEAQVRICKEYAENKGFDVVNLYTDKARTGTNDARPAFQKMIADAKTGAFQYILVYMFDRFARNRRDSIIYKEMLKDKYGVKVISALEPIAEDEGGEFYEMFLEWNAEKYSKRLSKRVRDGLDTSIANGTFCGGFIIYGYKLELEPVPGKQGKFIKRVVINEEEAKVIRYVFEQYDKGVSKKQIANNLNAQGIRVKGKPITHKTFDNYMKNTKYTGEFYFGERLCTNMYPPIIDKEMFERVQQRLASNQYFLGGKETAKEPYLLTGKLFCGHCGMEMVAGGGKSKTGKKYYYYECKQKKKKLCTKRIEHKDKLEKFVVRKVIDFLSDEVNLNIVTQDVLKYFNSRTDEREIKSIRKRIADIQEEADAAANAFIEAKSPLLKQRIEKRMQECEVLLADLEKVKARLVIERGQKLTEQDIKAFVNMILQGDVEDLEFRRRLIDNLVYKVYVSDDDTYIYFNIKGGNHIEEITLEDTKAALKEANRVQTQRDPARQAKPKSNPKSLV

SEQ ID NO: 1128 - protein, 645 aa, synthetic construct
MALSSHYTEEQICKMDIRDFLAQAHFDDILHSVRTLQVARYARESTKHEEQIMALENQVVRLDTMIESNPKFILDEKHKFTEYGISGRQVDDRVAFNMMLQSASRYEFNVLIVQDTARFARNIEQLFTNIRILKDYGVGVLILNGNHWTYNMTETDILRLAIDAGMAQGESMRTAKRVSDGVESYRARGQLVISGIFGYIYEKNIDKRLNTLTPHPVESITVKRIFDLYTHPDPQKRMGSGKIADYLNENNYKTAVGDLNWSASKVVRVLKNEKYMGYILYGKVKVVDTIKKKKVATKIKPIREDVYDKDGNLIKKCNLVKGNWTPIVSEEVWWLANEIRTKRAKEYIYSEKGNIVTGLREPKDIIAQKSFCQCGYTRSIQYVHVATQKKEAQFRYTCRCQINSGSHKEKSVCHVPAVSEVKLWLMSLKVFGYIFGDSKDEILYTINLLKEAQKYKQKNRTGKSLEDLESELKKVETQIENLYLDKLSGEIDANMFKKLTVRLEEEKAGIEKGIRDRQLEEARDSKETFDIETIEKKLNTYVDFTGRKVSDELIDMFVERIIYRDNDEFVWEMNLSGVRKNTIDYRIKEYSEEFAKSLQNDDNFNIIHTFIISTEECQQFMESSRVGRRFVKKYWKPITVKIAIK

SEQ ID NO: 1129 - protein, 549 aa, synthetic construct
MKQSNQNEITALYCRLSQDDGVDGESNSIQNQRNILERYAREHRFPNPRFYVDDGYSGGSFNRPGFQQMMTDMENGKIRTIITKDLSRLGRNQLHTGLYIEERFPMFGVRYIAINDNVDTDRSESTELMPFKNLFNEWFIRDTSRKIRAVQRAKAERGERLGTRAPYGYRKDEQDHKKLVVDEEAATVVRRIFALCAAGQGPSQIARLLKREQVLCPTTYAYKIFGVAHSSLNLNDPYGWSDSTIANMLENEIYLGNTINLRYSTRSYKDKRKVEHPREECMVLENTHPALVSREVWDIVQRVRQHKRRPTKMDEQNKYSGLVVCADCGSTMVLHRAHTMSRSYNHFTCRTYKKDGTLCTAHYIRECVLDDVVLEDLRRVTAMAREHTQEFAAYIGSRQSAELRKEARGLERELTAMKKRSKELDSIFKRLYEDSVLGRITAEQFQTLSGSYTQEMEMLNKAIPEKETAIQRLREQVSGTDHFISLAKRYTDIQELTPELLRLFIRKIVIHEKDVKWSKYAQQTVEIHYNDIGCVELPQPKGQSTAKGA

SEQ ID NO: 1130 - protein, 546 aa, synthetic construct
MEETIKAVGYARFSSSMQREESITAQKRYMMMYAKRNNMEVIDWYCDEAKSAKTVNRPAFQKMINDAKNNPEFKAVLVHKTDRFSRNLSDSIQYKKLLEEYGVQVIFVNERFENNPESHLLYHIMGSVNQFYNENLAREVMKGLKENAYQCKFTGGRPPLGYDVDKDLKLVINEKEAEAVRLIFEMSAEGYGYGETIDKLNILGYKTKKGLPFVKNSLYEILRNEKYKGTYIFNRSCSANSLNKRNNHRRKPEEEIIRIENGCPAIVSSGLWHRANAVKKATRSSYTNAKNTYLLTGLIHCGECGGKFHGNIRYNKNNTNLVYRCSAKKNKRKCESKEIRCEYLDSFVIDKFVEFFFNDDNIKVITKQLNEQYSKSCISDLEYNEAKSTLKILEKSRNNLVEAIAKTGINDIMSDKIKEYEEQIKKTSEFIHKYEKQKIDRVITEDEVREQINHLKDYFYNPKNIIRTKFVLSQYIDRIDISNDNVQVHFKVSISPSGNTDGDCICVHTEMIKRKYLFDYVCEKVDFEQWNIEKLNKSETEHRKGA

SEQ ID NO: 1131 - protein, 545 aa, synthetic construct
MNKYHLYQRVSKQIQAEEGQGIQRQEQACEHWISDYNKRLLSEGKSAYSKGLIYEDRGKSAYTAANFKRGELGALINDIENGKIEKGDLIVIELIDRFSRANVDFVRSQFQRVLDAGVKIAITKWNLVFEENMESVSSVTGRILLEIGMYLAYQESSQKSSRIKASRKLLEDSGRKSIAKPPFWLARNLDLKSYTIIEENAEIIRKIFDLKLNFNYGPQKIIKSLGDLDIYRYSFDENGNLIKTTKNSPLSESSINAYIRNTNVIGKLDGKDYYPRIIDDRTFYAVQKRTRENTGGVGEIFRNVFVGVGKCGCLIRKENENGCGSLAKCGYIMAFSSRKVKNPTKGMYLKCNRKRKSTKCDSENINYYLAQNKIYNVLKSLKFDIDQSVDISHLEEKINAIDKSMSKIREYMTQYSDDEEWENQYNIKRMEREKIENEIKASKSRITGKLSNLDIDFSKEKDRVLFNQFLKDNRITVYFTKERMEIIIGSLNNFSIKCGYDDSNRDIDHIIESYSKNGLVGIEEKAGKSEGKGLLRFNLPTVPGS

SEQ ID NO: 1132 - protein, 515 aa, synthetic construct
MKTAIYLRKSRADLEAEARGEGETLAKHRSTLLKIAKEMNLNVLAVREEIVSGESLVKRPEMLALLEEIEDNKYDIVLCMDMDRLGRGGMKEQGIILETFKRSNTKIMTPRKTYDLNDEWDEEYSEFEAFMARKELKIITRRMQRGRIASVEAGNYLGTHAPFGYDIHRLNKRERTLMINSEEASVVRMIFDWYANEDMGASAIRNKLNDLGYKSKLGNDWNPYSILDILKNNIYIGKVTWQKRKEVKRPDAVKRSCARQDKSDWIIADGKHEPIIPESLFEQVQEKLNSRYHIPYNTNGIKNPLAGIIKCAKCGYSMVQRYPKNRKETMDCKHRGCENKSSYTELIEKRLLEALKEWYINYKADFEKHKQDDKLKETQVIQMNEAALRKLEKELVDVQKQKNNLHDLLERGVYTVDMFLERSNVVSVRITEITSTMENLKKEIKTEIKKEKVKKDTIPQVEHVLDLYFKTDDPKKKNSLLKSVLEKAVYKKEKWQRLDDFELVLYPKLPQDGDI

SEQ ID NO: 1133 - protein, 514 aa, synthetic construct
MSGIDDTQFRRPGLRAILYARNSHDRTRRGISVNDQFAEMRPVAAREMWPIVGEFRDVGMSATRHARKPRDEFAAMMEAVRSGAGDVLMTWESARAQRDLAVYVALRDLCHDTKTLWWYTGELYDLTLRSHRNRTALDAVRDEDAGEGIREGVLRTVRQRAERGEPHGRIPFGYRRIYHSDTGKLIAQIPDDALPTAEFAFEALANPKAPIVREIVRRIAARQSAYSIAQDLNRRGIPTPFRNARGWDIIQVVRTASNPAYIGMRVHQGKVIGKATWEPLLKDDDVTAWWQASAIIADPTRKTHRDNAVKHLLSGLAFCGAPGCGEYLRMRHPRNAFCYTCIAAFHVAMAEHLLDDYVEAAVLERLERPDAADAFLNASNDDDVVQAALAEISEKQAKLEEARALATKGTLSLTSLAAMEAAWMPEIEAARERARRSSIPPVLEQLVGPNAREVWGGLTIPERRQALRAIVTVTVNPTGKGARSIRPGRVTLDWLTPGAPRRRPGPLSGPGANA

SEQ ID NO: 1134 - protein, 523 aa, synthetic construct
MKRAAIYARYSSSLQKATSIEDQIAMARRECERNGWTVVEIFEDREKTGRNMRRPGFQAMKAAVARGEVDVVVIEALDRLTRKVVDALSQFDLLQFQGVELHSVKEGELEFFSVLVGGIGAQQFSEMIGAHTRRGMQGAVSRGRLHTSAYGYRKREAAEGLNREIDPEQAEVVRRIFRETADGRSATAIAKALNADRIPAPKGGTWDASSIRGRKDRCEGILNNRLYVGEASVCRFGRRYHPETGAKAVFATEDDTVTETFDALRIVSQDLWDQVQAELATRTQRATSTGNPQAARRSKHLLSGLMVCGCCGAPYIKTSRNRFQCRENRKGVCENSLTIRQTRIEPRVFTALRSRLRSAELIAEFEAAFRAEMRILEGTDLGASIKAANAQLAKVRKARRRIMSAIENGADFADYGARDKELKAEAQELEDRIAQLEVQQDRKDATPPDIPAIFEAALQDLEALLGDPDLVARANEELRTLIRSITLIPDTKSEDGLAAEIQLDLGSLRSRVWDGGEARGQSP

SEQ ID NO: 1135 - protein, 528 aa, synthetic construct
MKVPVWSYARVSTLSQIDGFGIQRQVNTINQFIQYLVLDHRLPYTLDVDNITQMVAEGKSAFKGKNWNPKTKLGQYRKMVMDGVVPDSVLIVENIDRLTRLDPFQAVEIISGMINRGTTILEIETGMTYSRYIPESITVLTMQINRANGESKRKSIMMQKSHLNRFGKVSKVRPRWFDVVEIDGVKQYRINDTAKAIQRMFIDYANGIGPAQIVRTYGTSDNGKQWTLVTVLRALSDKRVADDARYPPIVDKSLYEKVQAMKNPLRGSTHQKNMFNIFSGMSRCPLCKQSIIVKRNSHGGLFTVCLGKRTHKTCEARSMAYNAIERPLLNAIKGLDFSEVYNREESNVLTLRDQWIRNERDIAAFRERLSKASRHEKFAILDELEQISKEQDELSIRLKSIDAPHDVQLDFNDDKLDLDVSYRIELNNRMKKLIQSIDMVRVDTGRSTYTVYCSIKYWSDFMTHLVIIDAETKRLGTGGTNMLTTTLRSVSSINSDGTISGNPDMEAIEYWQSVMTQAFERAGVEMPK

SEQ ID NO: 1136 - protein, 599 aa, synthetic construct
MKKKLYSYIRWSSAQQTAGTSLERQTAAAREYAKAHDLEFVEILDAGVSAFRGKNATDGALAEFIAAVENGAIPSDSWLYVENLDRLSRATVRNALKLLLHITDLGVTVVTGMDGKIYSAETMDKDFTDLMISLLLFSRANEESKTKSDRVKEASMKALARVQAGLPATIKGGGADPFWIQRGDRETSPTQHPTHWLAIKKIVELSLQGVGCNRIRQVLNDDPTLYPPPRQKDTPRRRALLDAGLAPTGWNIHRIEDARRQPSLYGLKTITLSGHTYSLEGYYPAVCSEEEFHLIQNISASNRIKSGDIRNTITLLSGLNLCKCGSCGGWVTTFRKNGKLTYRCDAGHRKIHHCPTRWSLNARIIESATVRALIAGVAHNIIEDSQDLESVAGEIDNRRAEVADIDRKRERLAARIAEEDDDLLMQQLRQYNARKRDLLTEIGALTQREALRSEGQNVAERLAEAQRLLTADMVNDIFTSDRLAVRELIRKSMRQVTIWKRQDKSLKVECEFISGWRYTFEGVMKEGKKSFIEYRTSPDGINMMEIYDKLNAITAKAFKHVLDVDDNVMPPTLSHVQAYHDMSVRLGHSPLTGSQFFWR

SEQ ID NO: 1137 - protein, 509 aa, synthetic construct
MLKMKKTIAYYRSSTDLQENSIEMQQIKAFEYSMKKRITIDEEYVDKDVSARKKTLMQRPGMNKLMKEIEAGVVGSIIVYKRDRLARKLQEHMQLYRLFQEYDIDVYFSSDSEVQINYSPIGEYIEAILGSICENEGSLIAQRIQETKIAKFLSGKYAGNLPYGYEKGEPNADGQVNILQVSHEIEVVKEIYNALLNKECKSIQELCNGLNEKYKIEETKDWDQSKVVNIVKNPIYHGLRVMNFGSKEYKKAYKNIKVVEKIDWDIANEQLDKMIVKRETGKEIIQFLLENILHCHECQKPLIAKKRMRNYQDYYIYECKEHDVCVEARYIEEEILKHAKAFFHRLLDENFNELYERSTYQNVRKIQKIIANQDMVIKSVTKKVGKLIDQWLNCQKVQRKHEENECAKCQSNQHIGEIKEANEILKIEKRKLQHLRMRLYEIKNFKEKAKEWLTHLECPKDILFLEKEERKRFYRDMIHCIQVDSWEYHIVFKHPFMLIQEVHQNSETV

SEQ ID NO: 1138 - protein, 551 aa, synthetic construct
MSQPAYIYARFSSIEQAKGHSLERQLQGARLMVERNGWLHSPDREMVDEGRSAFHGINRAEGSALFDFEEKARDGHFQNGAVLVVESLDRLTRQGHEETFDLVRLLTRNGVTIATFQDGQIYEAGQRLDLASIITVIVKGELSREEIEKRQKRILAVWEKKIQTIQDGDRKAVTSMVPAWIDVDPDTKVMSINPYRGKLLNQIYDWYIEGRGMVWIVKELNRRNEPTWTMKNNVVAKGWNSSSLHKMLTFRAVLGEYEPKARLRGQNIGESKGIVIPDYYPQAIDTHKFNQAQAVRAGRQRTGGKSTNTQNNLFVGMMRCGHCGGPAYHQINTWKGQRRKNKKRNGDPVVYESHTNLSYIRCNNWRRSHQCDNSVSIRYETLEQAVLDYFFSDAIETIIKPDAREASMKAEIAEAERQIALKKSRLENAIEALTETPLKALAQKAVEMESEIEEMERDVAQRTNELGVLVGHGLPSDNLKIIRSIQADLNSEDSETQYIARSKTHTAFKNVIDKITIWKDGEIAIWFKNDEVLMFDKDGYRSGGTDSYYAD

SEQ ID NO: 1139 - protein, 497 aa, synthetic construct
MSTDRQIYSIDNQRDAIRNYANVMGYDIVATYEDPGRSGLSLVGRPGLQQLLEDVESRRADFETVVVYDVSRWGRFQNTDESATYEYRCQMAGVRIEFCAELFVNDGSIGSDVLKAIKRSMAAEYSRMLSNRVFAGQSRIVALGFSGGGPAGYGFRRLLVDGSGNPKAMLHRDERKGLASDRVILVPGPKEEVSTVRWMFNQFVTKGKTEAEIATALNARGPVTERGRPWTKACVGTILTSEKYIGNNVWNRISHRLLHDRVRNPPSAFVRADNVIEPLVTRALFDRAQAIRRARAYLKPDEELLADLTKLLKERGKLSSPIIDAAPFCHSASIYAHRFGSMKAAYQLIGYDASANYRKLDVSNRLKQIRQQVVEELMSKIDKVRGSALYDPKTKLLRVNEEFSIAIWIARYRIIVTGYPRWIFWNRGLVGPDVTILIRMEPDHQTVRDFLIAPAHQAQSALRMLNANNGVRLDAFLFASLDPVVEMARRESISALK

SEQ ID NO: 1140 - protein, 464 aa, synthetic construct
MTVGIYIRVSTEEQVRDGFSISAQREKLKAYCIAQDWDSFKFYVDEGVSAKDTNRPQLNIMLDHIKKGLINTILVYRLDRLTRSVMDLYKLLDTFDRYNCAFKSATEVYDTSTAMGRMFITIVAALAQWERENLGERVRMGQLEKARQGEYSAKAPFGFDKNDHSKLVINDIESKVVLDMVRKIEEGYSIRQLANHLDSYIKPIRGYKWHIRTILDILSNHAMYGAIRWSNEIIENAHPGIITKDRFMKLQKIISSRQNFKKRQSNSIFIYQMKLVCPNCGNRLGSERSRYYRKKDDQHIECNQYRCQACALNKINKPFASSEKKIEKAFLKYISDLRFEQIPQLKEDDNESEIIKKQISKTERQREKFQKAWSNDLMTDEEFTDRMKETKKMLEELTEKLHALKPIENTKIDCAVIKDIVDNIKNNWSFLPPADKKQFMNMFIESIKIDKKDGTTEVLDIAFY

SEQ ID NO: 1141 - protein, 501 aa, synthetic construct
MKPNIKEVAIYLRKSRDESDGKEDVLAKHESLLLEYVKNHNLKYEIYKEIGSSEYIDSRPKMVRLLNDVSQKLYDAVLVVDLDRLSRGDLEEMGRIGRIFKDSKTIVLTPTKTYDFNDEEQALINNFEMVFANHEFRMIKKRMLRGKLQGTKAGKWTNGRPPFPYVYNRLTKELDVDSDKVKVYEFMKKMFLEDMKATYEIAWKLNELGFKTNRNSYWYENTVRRLLINEVHLGKVVYGKTSGSGSKKKLNANGVQIKDRSEWIIAEGSHQQLKTEEEHQRILAILESRRYTPKGTRTNVQVLSKLIYCGKCNRVMSFTGKASGKKYVKTCLTTDHFGNRCHNRCLNVEVIYAQLFLDLEQYEQQLLNHEPKEKQGDSSTLQLALHNKLEELERLEKGVNRIKDLFIDEVIDKSEMKKRLEKQKQLMQTKKEEIRSIEQSLAVIENIRTDNDRLHAIREFKKAWNTEGISKRELNTLAKQLIDRIEYVREGNNVQINIKFL

SEQ ID NO: 1142 - protein, 665 aa, synthetic construct
MNNNELFSKWARKSSTPSFSSAVKKAVVYTRVSSKEQFDKNLSLDWQRKAIEEFAGRNGFEIMNYYGGTYESAKTDGRKEFKAMLDFIRIQKGKVSHILVYLLDRFSRTGGGAIKLAQDLREKYGVTIIAVTQPIDTSNPGGVFQQNMQFLFSQYDNELRKQRAVAGIKEKLEHGIWCLKPPMGYDIVRTNGERKIVLNKEGKLIKKAFEWKAAGWKTEEIIAELRSKGLNIYKQKLSQMFNNPYYCGLLVNKMLNGKVVEGNHERMISKELFLQVNNIRLTANKHGVAHQKEQDALPLKVFMHCPVCKEGYTGYVVKAKNLWYYKCRTKGCCANKNAATVNNQFEEFLTRYQIKEEYIPLLIDELLDSMESINEANQQRQKEASTALKEVQKKIDTIEEKYFVTGEMNKETYEKFQAKYSQEKEEINGIFQNNFTSSSNHTEVIEKAVTLSSKLALIWSSSPVKTKEQFQKLLFPEGVSYDVKKEAFRTTKVNLLLSLNAELAGLSEDDIKKQGGIKTTLSKLVGMTGFEPATSSSRTKHATGLRYIPMKHKIIYFLFSMMNTAGTDRCPSLSLGLMVSLPLTSMQLLPPPSRFNASTQPKSSKSFASCVNDAPSAILGMRPCTTRMMSFPSAVYPMAVRGCLSSMALPINIYSSLLLTSTFPF

SEQ ID NO: 1143 - protein, 478 aa, synthetic construct
MKVALYVRVSTLEQAEEGYSINEQKDKLKKYCEIKDWTIVKEYIDPGRSGSNINRPSMQQLIKDADTGLYDAVLVYKLDRLSRSQKDTLYLIEDVFQKNNIHFISLSENFDTSTAFGKAMIGILSVFAQLEREQIKERMSMGRVGRAKSGKIMEFNNPAFGYEIDGDNYKVDPLRAEIVKRIYKMYLSGTSINKIKETLNSEGHIGNKKNWSDTRIRYILSNPTYLGKIRYDGKTYDGKFSPIIDEETFNKTQNELKERQTATYKRFNMKLRPFQSKYMLSGLLRCGYCGATLFVNSYVYNGKRKLRYNCPSTYKSKQKTRTYKIMDPNCPFKLVYAKDLEPAVINEIKNLALNPQSIQKPIKKKPDIDVETIQKELAKIRKQQQRLIDLYVISDDVNIDNISKKSADLKLQEETLKKQLAPLEEPDNDDKIVAFNEILAQIKDIDSLDYDKQKFIVKKLIKKIDVWNDNKIKIHWNI

SEQ ID NO: 1144 - protein, 550 aa, synthetic construct
MANALIVHKAKLPLHQKALLAAQYVRVSTDRQRYSIQNQAAVIAAYAHAHNMTIVRTYSDEGESGLRIKNRAGLTQLITDVRSGCADFNWILVYDVSRWGRFQDVDESAHYEFVCKRAGLRVAYCAEQFDNDGSMLSSIVKNLKRVMAAEYSRELSAKVRAGQRRLAGLGFKQGGPAGYALRRELVDENMRPKGLLRKGERKYLNSDRVKLRRGSADEIATVNWVFHQYIDEHKSAAEIARQLNQKAIPSERQGPWNCGMVSRLLRNENYIGNLVYNRMSRYLGQRAVSNPAHMWIRTLGVVEPTVEKRLFLSAQKIIRERRVDLTEDEMLDRLRNTLKRRGRLSTSIINDTVGLPSSATYMAHFGTMRNAYKLIGYTTKRDCDWIDSSQYWAEAMAKISTSLTAAIENAGGYAEINEPADGLLVSGKVGVAFRVARCTPGRLTSHSPRWTIQRRKHLAAGWIAAIRLAEANKAVLDYLLVPSNSLVDRTIKFTEIARSRHKVRRFDTIEALVRAIITCLDKSGAVPANAMRLNIQSRSRRSTRKSASLP

SEQ ID NO: 1145 - protein, 567 aa, synthetic construct
MSSAIQIKGDSFRRQAEASAKYAAEHDLDLIDDYKLADLGVSAFKSDNLTTGALGRFVAECEAGEIEAGSFLLIESLDRLSRDKILDAFSLFARILKTGVKIVTLSDGQVYDGSSDQVGSIYYAISVMIRSNDESKIKSTRGLANWSQKRKLAAEHGVKMSSQCPAWLKLSDDRKSYLIDKERAKIVQRIFEASASGKGANLITKELNRDNVPTFGRGALWAEAFVSKTLRNRAVLGEFQPGQYVNGKRQPAGDPIPNYFPPVIEEELFDIVQASLRGRLLAGGRRGEGQSNIFTHVAFCGYCGSKMRHRSKGSRVKGNPPHRYLTCFNRFNGPGCDCKPLPYAAFERSFLTFVRDVDLRGLLEGAKRKSEAKTIADRITVNQEKVKKADERIRDYLMKIEGAPDLAEIFMERIRELKTEKDDLVRSIEESNDALSKIKSDNVTDEELASLISTFQNPCGENRIRLADRIKSIIERIDVYPNGEIRKDDPAIDLVRASGDPDAEKIIAAMNAGSRLKDDPYFIVTFRNGAVQTVVPNPSNPDDIRVSVYAGEKTRRVEGSAYEYESD

SEQ ID NO: 1146 - protein, 479 aa, synthetic construct
MNKVAIYVRVSTTSQAEEGYSIDEQIDKLSSYCKIKDWTVYDVYKDGGFSGGNIERPAMERLISDAKRKRFDTVLVYKLDRLSRSQKDTLFLIEEVFIKNNISFLSLNESFDTSTPFGKAMIGILSVFAQLEREQIKERLMLGKVGRAKSGKPMMFSSISFGYTYDKHAKELHINQAEAVIVKKIFSEYLSGRSLTNLRDYLNDNGFTRNGRYWDYQGLKRIMKNPVYIGMIRYNGVIYPGNHQAIIDAETFDKTQIELKKRQLQAAELQNNPRPFRAKYMLSGLLRCGYCSAPLTVVLSGKTKSGSRNIFYECYNRHPKIKKGRTIYNDGKKCNSGTYNKSYLEECILNEIRLLQLNPERIDDIYDVQPTIDVDSIENQIATLNKKLDKLNDLYLNDMVSMDVLKKQTHTLRQQKKILEHELENNNVEIIKNSKRIFIETLNISDVTKLDYNIQKNIANTLIKEIVVKNGEITIQWRI

SEQ ID NO: 1147 - protein, 555 aa, synthetic construct
MTLAAAGKPLLYSYIRFSTIEQAKGHSLSRQLSFAKEVAKEKGLELDDSLTMRDQGLSAYHKANITRGALGVFLAAVEQGKVPKGSILVIESLDRISRAAPLESQGIIAQIINADITVITAVDRKEYNKETIKSNPMDLVYIILVLIRAHEESETKSTRVRSALTKQCEDWLAGKRGIRVKCGKPPKWVVWNDEKQHFEFEPRHKAIMLRKIDLFRQGLGGLKIAETLNTEFGPGTVHHTGANVYKEVKRRSLLGELNVKVGETEYVLEGYYPALIGNLEFEQLIADSGNRGAIKHSQKFVGILSGIDVFKCGSCGKSVGSHVIYRKKSLQDVTSSHKRYGCVEARRRNNCSMSATVQVDVIESAVVTFCQDSVNLQRILLNSGNREALHATESGLRARLDKINEDIESLTQTLLILTGEPPQAIANKIKALESEEAQLKEQLQANRNSMAKLDNTHRDEVTQRWLALTKNLSTLSGDERLAIRQLVKDTFKSITLQMDVTQTQQQGGLATVFEQLLGESTNEYVELMLEFHNGTKRLLRVHKYTGELAQGVTLG

SEQ ID NO: 1148 - protein, 504 aa, synthetic construct
MRAVIYTRVSTREQAENSSLASQERDCQAYAQRHGWHVVQVYQDAGKSGRNADRPAFMQLRADAAQKPRCFDVVLVWKLDRCARNTSLQLRVVDEFHALGIQLISITEPIEMDTAAGRFNLTMLGAGAELYSRLTGERVARARRAAAESGKLPGPVPTGYQRNDHGVLIPSVDAEHQRMLFTLYATGLYSFSTIADAMNQRGARVWNTQQGRYVPYTKDNVASMLRNQVYIGKVSYKGQTYAGQHEALIDQKTWDAVQTLLDRRGQKRGWTPVSQGRGLLSEILFCEQCGSRMWQHYKRTTNVVYYECSQHRYNQCPMSMVRNDVIDQHMIAVLDALAFPSDWKHDILRVAQQQWSARQQPAPEAPNVEAELAALKRLFLNDHIRADEYEQRKSALLAQAQTPRQKPAASFNMEQAFDLLESISWTFKQKGALAEKRVALQSLIAAVWGTKKGIVAYQPREPFLELVASLQQSRLVSRVGIEPTTSGLKVRCSTTELPAQRVRV

SEQ ID NO: 1149 - protein, 484 aa, synthetic construct; identical to SEQ ID NO: 187

SEQ ID NO: 1150 - protein, 507 aa, synthetic construct
MNKIAIYLRLSEEDYHKVDESESIANQRDYIKSYIENETSLKSCEIEEYVDDGYSATNTNRPSFLRLIEDIKSGKVGTIIVKDMSRFSRDYILLGDYLSNILPFLKIRFIAINDNYDSLKEQGNGLDTDTQFKTLYYDLFSKELSEKVRSSIRQIKSQGKNINWAAPFGYIKDPKDKHSIIIDEKTAFIVKEAFDLLLKGYSCIQVANIFNEKGYITRSERKEELKLSDYTGNLITGSEVKKRVWTNAAISQITRNELYTGDYVYNKFKETKIGGRKRILLPEEEWKIFPNTHEAIISREVFDEVKKIKEKRSFGGYTGNKNRSIFSDKIFCKECGRHMSFRCDSRQKKNSDKIYKYKSYYCNLCKDEKTPNNIREKDIIELIKPKLKDFKIQNTLNEEKVIEHKNVEEDILKEISILNSNLQIIYENYKRKNISKEEYLNEKTLIQDKKVLLENRLDEFQSYIVNSEKATDITVLDEENLLKAYVDNKIDKIIVSRSGEIQIMEKY

SEQ ID NO: 1151 - protein, 478 aa, synthetic construct
MKRAAIYVRISRDHAGAGLGVERQEADCRKLAAERGWEVAAVLSDNDISAYSGKRRPGYEQLIGLIQTGDVGAVISWSHDRLHRRPTELESYIDVCDKAGIDTYTVKAGHFDLSTPSGRAVARTLAAWAAYEVETSTGRVLAAKKQAAESGKWRGGQRPFGYDADGMTVREEEAALVREAAQRFVLGDSWRTVALDWNTRKIVTANGMAWNALKVRNLTIRLRNIGIVDHNGTDRYPAQWPAIIDQELWDQLQTAIAVSRNVHTQRGPFRKHLLKGFAYCGECGNRLNVYGTKRAGGRYEPAYGCRKNDDEKGQVGCGSVKRMLAAVDDLVIDSLFYRLDTEDMHQVLSDASSDNEALSTHLAELHAATQRLEEIYGLFGAGEIDFAEYKAMKAAAHEEKERASRKVNQSSGKGTIANVPVGKTLREAWDGSDLQWKRQLLSVFIDRVEIMKVPKGSPRTFYKGWQFNPDLIQIRWRA

SEQ ID NO: 1152 - protein, 588 aa, synthetic construct
MADPRVVRCAIYTRTSSDENLGQDYNSLAAQRDACAAFILSQKSEGWVRTTNIYEDGGYSGGSLDRPALRQLLADMAAGQLDIIVVYKIDRLTRSLRDFARLSELLDRQGASFVAVTQQFNTASSMGRLTLNILLTFAQFEREVTGDRIRDKMAASARQGIWMGGRPALGYDAPQKKLVVNPGEAEIVRHIFQRFVELQSMGELRKDLERCGIVSKHRVFREGVETGGNKFSWHPLRTILTNPVYAGMIRHKEQLYPGRHEAIIDPAQFAKVQDLVQKVADREKEKRERAYPSLLRGIIFDTDGGRLCPVHTNRRTRKYQYYVTGSLITRVTRRKLTNHKHKMRFSAPELDKFVVNLLARHFRDRDWVTSNVPTASRLHVTLRNAAALADELHGQLRRNTNLIRDMVRRIELDKITIRISIDRTWLYERLDVRLPRKAPPFAASAIEVVFNGHKLRTGNEVRVVFEPKDALPEPDHRMVREILRAIRWFNELATGRYATIMELAEAENCCPALISNRVRLAFLAPDIVEAILTGTQPSSLTISSLRRACPLPLPWEQQRNQLLGRSRATNEGHQGVGQPPLAPATQPQ

SEQ ID NO: 1153 - protein, 545 aa, synthetic construct
MPPFAAGRFPERNQWVQTVIYARYSSKFQDSRSIEGQLADCRARCAREGWTIIGEFHDAAISGNKGITEEARPGFYAMMQRVMAGGIDQVLCDTTSRIARNERDSIEIREDLKFVGCRLFTLQKGVIEGITASIEAAVDAEQRRALAHNIRRGQRTSVDQGRVPAGIAYGYKQANRLTERGEVIRGLREIDDDQAEVVRRIFREAAAGRSAFAIAKGLNLDGIAGPRGNYWMAPTIYGNPKFGNGILRNRAYIGELVVGRTVSVENPRTRKVSYRPLAKEEWRTKQVPELRIVEQEVWDAVQAEIARRSIGPAHAQRRPRHWLSGLGVCSECGSPYTRAGRDQWSCAKRSKGGACTNGHTVETKRYMAALLDALTNDLMHPDAFDEYEAEYREARKERLSSQRREQQKLERKRGEITRKIQRLADAIANGAGDVSEIVTLLATLRAERSDIERQLDQIEAVELIPLLPGVREKYRREMAALEEALASPEASLEAVPRFRALIHRVVLSPNPAGRGALITVEPRIDEALRLATGEAPPQALRRKAG

SEQ ID NO: 1154 - protein, 525 aa, synthetic construct
MYEEVKNACIYARYSSSNQTEQSIEGQLRVCREFCNRHNIRVVEVYTDRATSASKDIEKRVSFLKMIKDSERGNFDAVIVYKLDRFARSRYDSATYKYRLRKNGVQLISATENISNDPEGIILESVLEGMAEFYSAELSQKIHRGLRESAYKHNSIGGQIPLGYKTEGKKLVIDEETAPIVREAFEMYAEGHGVADICRTFNAKGYKTSKGTRFGKSSFSKIFRNEKYIGVYQFHDYRAEDAIPALIDRKTFNLVQARLKTVGKAPGQFKAKHIYLLSGKLYCGHCGSKMNGNCNTNEYSYYECYGKKNLHKDCHKRNLRKDFIEDIVVRDALSLLTPERIEEIATVAIQTNTYEVETTTDIPAIRGRLHETKLSLENITKAIEGGLAPETLVKRMVELEKEKKVLEGELKKEEKGVAYLDREQVIYWLNQFKDGDIEDEDFRRQLIDLFVNSVTVWDEPDDFFKITIAYNLTSLQEKTYRLPKGGTLSDLALNPPALKSNPIIEGNLLFHTTFQQYIPYKRYGK

SEQ ID NO: 1155 - protein, 495 aa, synthetic construct
MARPLARLNRKRAVLYLRQSTYREESISLELQETAGRDYCARQGYDVVAVESDPGISGRTWKRPAVQRTMGMIEDGRADVVVLWRWSRLSRNRKDWALAIDRCDIAGGSIESATEPLDTATASGRFARGLMTEYAAFQSEQIGEQWKEAHARRRRMGLPSDGAPRYGYDKLPDGTYAPNATEAPILAEMYRRYLSGEGFTRIVQWLNTSGHGTKRGAAWSRVTLTHLLDAGFGAGQIVQRPTSKAGRRNWRLDQATFHPGAHTPVITADEWASYVRRRLDAPQPSGVIEPKYMLTGLIFCGDEGCGAPMHVGNSGLRDYKCSRAAQQRDVRVHCMTRALVEQRVTEWVEEIAADVDGAMRAQAKQEERKLVHLDNAATLDRKIVELQDRMGRITVRWSAGNMPDAAYEASIAQLDSDLAALQARRRRAAPDEITIDPQKVAANLVADWQHLTVIERRNMLRALIHQVRILRPVRMGTGVWRQRVDIIPSWDAPIG

SEQ ID NO: 1156 - protein, 571 aa, synthetic construct
MTDVKEDTKKIVRILLRVSSDQQLEANGDLSIQRKLVVEEVKKHEEWILDSKEYFEGSNSGYKNSVADRDVLQEALRDAENREYDILLAYKDDRLGRRMLEIPMYIMSLKQFGVDVYTVKDGLLTPDLGDVMGMLKLAMQYGMAEKSSSDTGMRVKDTAKKLVQQGKFMGGKAPYGYKLEYSGEYSKHQRALKHLVIVPEHAEVVKYIYKLSLYKEYGSGKIATTLNLDNRYKNLAPNDVWKSGTITSILTNPIYAGYTAYGRRQHTAGRYRSLSQEDWIIAEKPNDEITIIDRDMWEKVQISRQKRGTKYQKQPWNEKATVISRNDGQLALIDVAYCGYCGRKLTNGTKYDYWTIKGTGERRSSQKSIYKCQNVWQGVPHEKMKQIRADKIEPIVFKKLSEYVGRLQEDENIFEQILENQSFEKSQQEQILVREKRNLQEIEKNIDILNDAIPNAITGTYPLSLEDLAKSIERQKDKASKQKTVVEELETNIKNLSVSQEDWENLYHNLPTWQDIFMNADVATKRVLVNKLIERIDITDDTVVIHFKVDLDHFCPQPRMTNYDGVPEPGL

SEQ ID NO: 1157 - protein, 507 aa, synthetic construct
MDKTIALYMRLSDEDDNLAAHEESNSISHQRKLMLDHIQKLPELKDCNIMEFSDDGYSGADFSRPNFVKMMDLVKAGKIQVIVTKDYSRLGRDYLEVGNYMECIFPVLQVRYISVNDNYDSANSFGSTGGMSVALKNLVNALYCKDASKKVRAAKAVLAKQGKYIAAFAPFGYQKSEDDKHMLVPDPVTAPVVQLIFELAIKGMKYTEIANYLNNNGYDSIFEYYQKIGVKRCYERDIGEHMWSASTVMEILYNEVYIGSVINNKTADNIDTGHQVVQRDKEDWIIVENCHEPLVSVEDFKLAHKMIARREVTKRKPNGKWRKSYIRCGICGKGLYKYGNKSSYRCHNGHVSRIRGEELEATLLDIARNMALAQLQEFELKTDGGNCPDNLEREIESLKKSKAHYAKLKFEIYDDYTKTNITRDQMAKKTAEVKQKIAEIESLITEKQETLDMQKDLFLDAKQEQLTKLSKLDEFDEEVIRYLIDYVLVYDNEHIEIRWNFDDFQAG

SEQ ID NO: 1158 - protein, 605 aa, synthetic construct
MNTAVNEYNYRFKLTDYSLFDRNRARKVAIYGRVSTEHEAQLSALENQLQWYDDQVKYHPNWTVCERYIDEGITGTQAKKRPAFLKMIEDAKQGKFDLIVTREVCRFARNVVDTLVVTRELKGIGVEVFFIDDNIWTMDGDGELRLSLMATLAQEESRKTSERVKAGQKISRDNGVLYGNGNILGYDRVGDTYVINEEQAETVRMIYDLYLQGYGSMKIAKILTERKRKTASGLIKWSVSNIMRAIKNATYTGTKCYNKSRSNNFLEQKRINNLDMSTYEYVEGDFPSIISQEIWDKAQAIRESRVKPVCVSAGKNTHSKRDSRDIWVNKLRCSCGSSYRKNKWHTKLDGKTSYGYQCYNQLNNGIKRKRAEIGLDTEGYCDSRMITDWKLDFMAKALLEHLWTERKESVLIALDLIKYYYKEEKSNETQSDTVTIQAKLDKANSRLTNLIAMRADGEISKDEYQAMRSPVDEEIKKLQKALDEIPQEKSNPKGLDIEGIRSTLNSFIDFSGSTISHDVVNQFVYLITPTSDTTFDWYVNLNGTADVKATFTAEGRKKNCIIKLEEIEKISSVHREKNEDNAHFIKNPHIFTYLHRQQSLRRMHK

SEQ ID NO: 1159 - protein, 541 aa, synthetic construct
MKAKKEKKITRIEPVRTTQSLEKTQIKRVCAYCRVSTDSEDQRHSFDSQVAYYNRMIGERNNWIFSGIYADEDRSGTKMNGRDEFQKMMQNCRRRQHDYIITKSVTRFARNTVDSIQAIRELKALGIGVYFEKERVDTLSEKSEQLLTILSSIAQGESENTSTNVRWSVVRRFQNGTFIISEPAYGYCKDPDGNLIIEPKEAAVVRRIFEAYLGGMGSYAIARSLQEERIPTSRKSNGWQEGSVKEILKNPVYEGDLLLQKTCTTEGVPFRKKRNHGELPQYLIRDNHEPIISREEAEAVRKLCAYRKEQQCVENTEVYQNRYAFSSRIRCGVCGSTFRRQKIYMGKPYEKVQWCCHKHIQDRKVCGQKAIREDDIQCLFTRMWNRLAGNYEEILIPLLAGLKAVPRDPKQEKEIGELSHQIEELRKQSHMLRQVLVDGNIGSAVFIERRNQLDSELETAIHRRQLLEEDQFFEQEIMQTEYLLTVFRSRPARMEDYDEEAFLMIIDHVTVYPEKRVQFCLKNGLELEESLEEGDMADGRN

SEQ ID NO: 1160 - protein, 686 aa, synthetic construct
MNKIRAEHLSRLAYVYVRQSTLDQVQHNRESQLRQYGLADRARVLGWPEVTVIDDDLGRSGSGIHRPGFERLLAALCSGAVGAVFCIEASRLARNGRDWHTLLEFCRLVGTILVDEDGVYDPREPNDRLLLGMKGTLSEMELSTFRQRSQAALDQKAKRGELFMTAPIGYMRVPNNRIEKDPDLRIREALDLVFRKFREFGSVRQVLIWFRQERIELPAASYGPEGRYIVWKLPVYNTLWHVLTNPTYGGAYAFGKTKTIVRIESGRKRLYSGTHVNREEWQVLIVEHHAGYISWDEYDSNRKLITDNANMKGNMVRGAVKRGGSLLAGLIRCGHCGRKLHVAYSGTKGDIGRYSCQGSMINHGGPRCISFGALRVDQRVAEEVLHRLEPLGIRASLDAIERKRLSEDERVRHKELALEQARYEAARARRQYDAIDPDNRLVASELERRWNDALATQAQRQCELDALREQPADSLSAAARDELMRLGTDLPRLWNHPASAIEIKKRILRTVLKEIVVTKQDHTIRALLHWQGGDHTELEFETNRTGQHRWATDVETIDIVRALARTLADQGIAAVVNRLGKRTAKGLSWTAARICILRKDHAIAAYREGERQERNELNVTEVAALLGISTPTVFRLIRIKRLPATQACLGAPWILRRVDVETFITARSAIEGPQSADPNQLSIDLQ

SEQ ID NO: 1161 - protein, 422 aa, synthetic construct
MKRAALYLRQSKSSEAGIDRQRERTRQLAEDRGWTVVGEYEDNDVSASKARGAGTAWGRMLADATAGVFDVVVALDLDRLLRTTRDLNVLIDTGAKVITVDGELNLTTADGEFRATMLASIARFEVRRKGERQTRANAQRAAGGGVPKGVRLTGYATDGSVVEDEGRVVRALFEGFAAGDTLRSLSREHDRTPSTVRTILTNPRYAGRRVYKGEVVGTGSWDAIVDGATFDLVQRRLADPRRQTNRTGSTARKALGTSLFRCECGGTVRTAGSGGRYWCPSCGLVRTMAPVDDFVLRVLQRRLQQPDAERPADDAAPLHEEARSLRERRDGLASLLARGLMGLDAVEEQASALTVQIEDVERRIDAAAGPSRVLAESGAADVAGLSLDRQRALIDALLVVTLHRGVRGRRGFDPDTVTLEWR

SEQ ID NO: 1162 - protein, 461 aa, synthetic construct
MPTRAGIYCRISSDPTGLRAGVERQEVECRALAEREGWEVAAVFVDNDTSAYSGKPRPGYRALLAAMEQGQVDAVVAWHPDRLHRSPLELEGFIDLVARQGTQLATVQTGAWDLTTASGRMVARQLGAVARYESEHRSDRVRAKMKAMAEAGADHGGGSRPFGFEADRVTIREDEAALIRGAVDHVARGGALRAVARDWQARGISTVSGKPWTTQVLRRMLMSARIAGLREHRGTVVAEATWPAIVDRDAWEAARAVLAGRTRRGRPSSYLLTGGLARCGLCGAALVARPRSDGRRSYVCASGPNFKGCGKIRRLADPVEDLVRDMVLGILRGPVLEELADRAGDETEARRVMAEVSGYEARLDALGHAHFVEGTLTADEYARHRTSLLERIEDGRRALAAMPSPVAVPDPAHAREWWDGADTDARRAMVGLVVKRVVFQPARRGLNRFDPRAIEVTPRDD

SEQ ID NO: 1163 - DNA, 50 bp, synthetic construct
  source 1..50: mol_type = other DNA
cttgcttatctaaaccaaaaaaatatattgagtcctgacgataaaccatt

SEQ ID NO: 1164 - DNA, 50 bp, synthetic construct
  source 1..50: mol_type = other DNA
actttttttttaattattttttatttataaccgattgcgtcccaaaatat

SEQ ID NO: 1165 - DNA, 50 bp, synthetic construct
  source 1..50: mol_type = other DNA
tattaaaatcatttccacagaaaacgtttttgttggaaatgataaaaagc

SEQ ID NO: 1166 - DNA, 50 bp, synthetic construct
  source 1..50: mol_type = other DNA
caatatgccccatccgaaagactaccatctctttaaactggggcacgttt

SEQ ID NO: 1167 - DNA, 50 bp, synthetic construct
  source 1..50: mol_type = other DNA
aggttctatagtgttatacaaggcgttccttgttaaacactatagaaaaa

SEQ ID NO: 1168 - DNA, 50 bp, synthetic construct
  source 1..50: mol_type = other DNA
gatttttattttgcccatttcggcataaaaaaatataaaaacgaaaaatc

SEQ ID NO: 1169 - DNA, 50 bp, synthetic construct
  source 1..50: mol_type = other DNA
aaaatctttgttgctcatactgttcatgaaatctatggaacaagtattgg

SEQ ID NO: 1170 - DNA, 50 bp, synthetic construct
  source 1..50: mol_type = other DNA
ctcactttctatcatgctgtaggcatgcatacagtttaatagaaagtgag

SEQ ID NO: 1171 - DNA, 50 bp, synthetic construct
  source 1..50: mol_type = other DNA
aactgagctacgtccccgaaactttcaaatatcgggcgattaactcagtt

SEQ ID NO: 1172 - DNA, 50 bp, synthetic construct
  source 1..50: mol_type = other DNA
ctattgacacactcgtgagcggttgcaattgttcagtagacattatatag

SEQ ID NO: 1173 - DNA, 50 bp, synthetic construct
  source 1..50: mol_type = other DNA
gcaatcgaagctgtgtgatcgtgggcccacgatgatattatgtcctttta

SEQ ID NO: 1174 - DNA, 50 bp, synthetic construct
  source 1..50: mol_type = other DNA
cctatggcgatggctgccgctgcgcgggcagcggcagcgtgcggcacttg

SEQ ID NO: 1175 - DNA, 50 bp, synthetic construct
  source 1..50: mol_type = other DNA
ctgcacggttttgttgtaccattctttaatcgtatgataagaatgtgcaa

SEQ ID NO: 1176 - DNA, 50 bp, synthetic construct
  source 1..50: mol_type = other DNA
ttcatatctcatcactcctttgtttaaaacaatagatgttgagcaaataa

SEQ ID NO: 1177 - DNA, 50 bp, synthetic construct
  source 1..50: mol_type = other DNA
atactatatataactgtaaatgttaaaatatttgcagatatatctagtat

SEQ ID NO: 1178 - DNA, 50 bp, synthetic construct
  source 1..50: mol_type = other DNA
ccttctttatgtattccttgatttaggaatataaaacgctatcaagaatt

SEQ ID NO: 1179 - DNA, 50 bp, synthetic construct
  source 1..50: mol_type = other DNA
cttcataattgattttatttttattaataaaatgaacaataattatgaaa

SEQ ID NO: 1180 - DNA, 50 bp, synthetic construct
  source 1..50: mol_type = other DNA
atgcaaaaaaacgggctttcacggtactttgaaatgcaatttttccatat

SEQ ID NO: 1181 - DNA, 50 bp, synthetic construct
  source 1..50: mol_type = other DNA
tttagaccagtcgaacgctattccttccaatagcactcgactagtctaaa

SEQ ID NO: 1182 - DNA, 50 bp, synthetic construct
  source 1..50: mol_type = other DNA
ttttacgcaggcaacaattgatttactaataaatttttgctttttaaaaa

SEQ ID NO: 1183 - DNA, 50 bp, synthetic construct
  source 1..50: mol_type = other DNA
ttgttttattaacaattcccatttactgttctgtatcttttcaacaacgg

SEQ ID NO: 1184 - DNA, 50 bp, synthetic construct
  source 1..50: mol_type = other DNA
atttcttctttcataaatttttccattttaacttttataaaacaaaacat

SEQ ID NO: 1185 - DNA, 50 bp, synthetic construct
  source 1..50: mol_type = other DNA
aatcagtaaattaactatccagcattttctggtaaatcagtccactgact

SEQ ID NO: 1186 - DNA, 50 bp, synthetic construct
  source 1..50: mol_type = other DNA
tagaatattgtatgatttaaatacttgaagagaaaccagacatctttttc

SEQ ID NO: 1187 - DNA, 50 bp, synthetic construct
  source 1..50: mol_type = other DNA
tgattaactactcggattgtagggagacctacaatccctgtagcaaagcc

SEQ ID NO: 1188 - DNA, 50 bp, synthetic construct
  source 1..50: mol_type = other DNA
tgcaatcgctaacaagtaatctgagaacagattacgatggaaagattttc

SEQ ID NO: 1189 - DNA, 50 bp, synthetic construct
  source 1..50: mol_type = other DNA
aagtaacaagatggttaaataaatacctatatttgaatatcttgttactt

SEQ ID NO: 1190 - DNA, 50 bp, synthetic construct
  source 1..50: mol_type = other DNA
ctgccgataaaacctgaatttttcatgttatggacactcattcttttatt

SEQ ID NO: 1191 - DNA, 50 bp, synthetic construct
  source 1..50: mol_type = other DNA
tgctattttttgatttgcatatggatcggaatgcaaaaaacaaaaaagca

SEQ ID NO: 1192 - DNA, 50 bp, synthetic construct
  source 1..50: mol_type = other DNA
tctcatacttattatacatctttttgtttagctgtataatatgtatatcc

SEQ ID NO: 1193 - DNA, 50 bp, synthetic construct
  source 1..50: mol_type = other DNA
cccgggcatgcgcgcggtgctgaactgttaacagcgcagtcagcaacatc

SEQ ID NO: 1194 - DNA, 50 bp, synthetic construct
  source 1..50: mol_type = other DNA
atttatcaaatattcattggttattaataaccaactttaaaactataaag

SEQ ID NO: 1195 - DNA, 50 bp, synthetic construct
  source 1..50: mol_type = other DNA
taggtaaaaatacgataaaataaagcttttttctatcgctattttctttt

SEQ ID NO: 1196 - DNA, 50 bp, synthetic construct
  source 1..50: mol_type = other DNA
catgccgcatatgtacaccatgggtacccatcatgtacatatgccaagag

SEQ ID NO: 1197 - DNA, 50 bp, synthetic construct
  source 1..50: mol_type = other DNA
gaaaaataaactaaagtttttttatagagaaaatgagcatacaaaattaa

SEQ ID NO: 1198 - DNA, 50 bp, synthetic construct
  source 1..50: mol_type = other DNA
gctagatgtctgatgaaattatattaaaacaatcatatatgacatctatt

SEQ ID NO: 1199 - DNA, 50 bp, synthetic construct
  source 1..50: mol_type = other DNA
atttgccattttggacctcctaattaatatgggactagaatatgatgaag

SEQ ID NO: 1200 - DNA, 50 bp, synthetic construct
  source 1..50: mol_type = other DNA
agttagaagtcccaaatcaagaggaacctcttgatttacaacttcggttt

SEQ ID NO: 1201 - DNA, 50 bp, synthetic construct
  source 1..50: mol_type = other DNA
atacattggaatttctaaattcttataagcattttctaaatttgatgtat

SEQ ID NO: 1202 - DNA, 50 bp, synthetic construct
  source 1..50: mol_type = other DNA
cctcaaccaggcaaagcatataccgacctatgagctttcctttgagcagg

SEQ ID NO: 1203 - DNA, 50 bp, synthetic construct
  source 1..50: mol_type = other DNA
ttcggcctttttctatacctaattatagagtcaaaatacggacaatcaat

SEQ ID NO: 1204 - DNA, 50 bp, synthetic construct
  source 1..50: mol_type = other DNA
tcaattcatttggaaactatgatgacaattataccttccaaatgatttca

SEQ ID NO: 1205 - DNA, 50 bp, synthetic construct
  source 1..50: mol_type = other DNA
ggaaatccctttcactattgattgcacaatcaataggcatagggattttt

SEQ ID NO: 1206 - DNA, 50 bp, synthetic construct
  source 1..50: mol_type = other DNA
cgaacatggccgccggcgcgctggggccagcgcgggcccggcgagcgccc

SEQ ID NO: 1207 - DNA, 50 bp, synthetic construct
  source 1..50: mol_type = other DNA
gtggtcggtctaaattgatttttgaccaaaagcagatttataccgtttat

SEQ ID NO: 1208 - DNA, 50 bp, synthetic construct
  source 1..50: mol_type = other DNA
gagcgccgggaactggaacagcagctctgctgctccagcgtggcgagaac

SEQ ID NO: 1209 - DNA, 50 bp, synthetic construct
  source 1..50: mol_type = other DNA
accgcaaatatgaattaatatctagttcgacatcacaccattctggcgga

SEQ ID NO: 1210 - DNA, 50 bp, synthetic construct
  source 1..50: mol_type = other DNA
cttcttgtgccttaatttgttctaaataatacaaattaaaataaaaggta

SEQ ID NO: 1211 - DNA, 50 bp, synthetic construct
  source 1..50: mol_type = other DNA
caaagtgatcataacaatcctttgataaactcatatacatgatgcctttg

SEQ ID NO: 1212 - DNA, 50 bp, synthetic construct; identical to SEQ ID NO: 29
  source 1..50: mol_type = other DNA

SEQ ID NO: 1213 - DNA, 50 bp, synthetic construct
  source 1..50: mol_type = other DNA
cgctggtgctcatcaagctcctgggccgaggagatcgatgccggctggcc

SEQ ID NO: 1214 - DNA, 50 bp, synthetic construct
  source 1..50: mol_type = other DNA
gatgaagataccggctatggcagcaagtcaaaatagccgtcctctgtata

SEQ ID NO: 1215 - DNA, 50 bp, synthetic construct
  source 1..50: mol_type = other DNA
aaatcattccgaagaagaaccgatgagccggatcttcttactggtgcttt

SEQ ID NO: 1216 - DNA, 50 bp, synthetic construct
  source 1..50: mol_type = other DNA
accattcttttgtacaaatattcagttgagatttgatacaaaagaatggt

SEQ ID NO: 1217 - DNA, 50 bp, synthetic construct
  source 1..50: mol_type = other DNA
acacggttcgccgttacaaatgaatagtattgttggtttgcaaaaatcgt

SEQ ID NO: 1218 - DNA, 50 bp, synthetic construct
  source 1..50: mol_type = other DNA
ctatccaaattttcagaagatatatatctacaccttcaatataatattaa

SEQ ID NO: 1219 - DNA, 50 bp, synthetic construct
  source 1..50: mol_type = other DNA
tattgcagatatacaaagtctatgtgcatggactttgtatatctgcaatt

SEQ ID NO: 1220 - DNA, 50 bp, synthetic construct
  source 1..50: mol_type = other DNA
attaagatagttaagcaattgaatttcctagttattataactactttata

SEQ ID NO: 1221 - DNA, 50 bp, synthetic construct
  source 1..50: mol_type = other DNA
aaatcagatggaaatttgcggaatggattccgcaacagatcttctgatct

SEQ ID NO: 1222 - DNA, 50 bp, synthetic construct
  source 1..50: mol_type = other DNA
ggtgattttttatgcactccaattataattggagcgcagcacaaaaaacc

SEQ ID NO: 1223 - DNA, 50 bp, synthetic construct
  source 1..50: mol_type = other DNA
catataaataggaagaaaagctgtatactgctgaaaagccagcatatatg

SEQ ID NO: 1224 - DNA, 50 bp, synthetic construct
  source 1..50: mol_type = other DNA
ttttatatcaaaaccttcattcatcaattgttaaaggcggttggatagtg

SEQ ID NO: 1225 - DNA, 50 bp, synthetic construct
  source 1..50: mol_type = other DNA
tattctgattaacttataaaagggagaatttgtattcgttaagaacgata

SEQ ID NO: 1226 - DNA, 50 bp, synthetic construct
  source 1..50: mol_type = other DNA
gtcagatgaatgtattatacacgatatcgtaaatgcggccgtcaattttg

SEQ ID NO: 1227 - DNA, 50 bp, synthetic construct
  source 1..50: mol_type = other DNA
ttcccgtttttcatactcattcatataattatgcaaaaacaaaacgggtt

SEQ ID NO: 1228 - DNA, 50 bp, synthetic construct
  source 1..50: mol_type = other DNA
acaggaagccgttccagtgcgaaccgccgcgatgaagtccgccaaggtgg

SEQ ID NO: 1229 - DNA, 50 bp, synthetic construct
  source 1..50: mol_type = other DNA
cgggtctgacagcagatcggtcaccggggacggtgttgctgtcgcacacg

SEQ ID NO: 1230 - DNA, 50 bp, synthetic construct
  source 1..50: mol_type = other DNA
tttcataagtatatctcctttaaatattcaagtataccatatatattaac

SEQ ID NO: 1231 - DNA, 50 bp, synthetic construct
  source 1..50: mol_type = other DNA
tgtcgcagccgaaatgaataagaacgcagttaatcatctccctgacgatc

SEQ ID NO: 1232 - DNA, 50 bp, synthetic construct
  source 1..50: mol_type = other DNA
acactttaccctacgtttgcatgtgcacaaatatcaacctaaataagtta

SEQ ID NO: 1233 - DNA, 50 bp, synthetic construct
  source 1..50: mol_type = other DNA
aaaaaacaaatagtcttcatttttaatgcgaagaagcgtatttgtaagtt

SEQ ID NO: 1234 - DNA, 50 bp, synthetic construct
  source 1..50: mol_type = other DNA
tatcagcgtttgttgttaagaggatatgcttccgttaacacaggctgatg

SEQ ID NO: 1235 - DNA, 50 bp, synthetic construct
  source 1..50: mol_type = other DNA
gtcttaaatagtgagcatcagtggttgcgcttatcctccatatgtttgac

SEQ ID NO: 1236 - DNA, 50 bp, synthetic construct
  source 1..50: mol_type = other DNA
cgggtcgttcccgcggtgccggtcgcgtccgcggtgtcgaggacgccgcg

SEQ ID NO: 1237 - DNA, 50 bp, synthetic construct
  source 1..50: mol_type = other DNA
ctacccggccgcacgccgtcaagtcgtcttaaccgcgtgggaccgtcacg

SEQ ID NO: 1238 - DNA, 50 bp, synthetic construct
  source 1..50: mol_type = other DNA
tagaataccttctaaaataataacatcacattgaaaaaagctgtaatcta

SEQ ID NO: 1239 - DNA, 50 bp, synthetic construct
  source 1..50: mol_type = other DNA
ttcgtcgacccgggttacgcctacccgtaggcgcagtccaggtccttctt

SEQ ID NO: 1240 - DNA, 50 bp, synthetic construct
  source 1..50: mol_type = other DNA
tggtaacgcacatcccttccacgccagcgtggcgggtatggtcgttactt

SEQ ID NO: 1241 - DNA, 50 bp, synthetic construct
  source 1..50: mol_type = other DNA
cacggcactcccgacctgggcaagcgctgcccgggctagggttccccgct

SEQ ID NO: 1242 - DNA, 50 bp, synthetic construct
  source 1..50: mol_type = other DNA
caatatttcaatgatttctgcaccatggttattaaatcagccatatgttc

SEQ ID NO: 1243 - DNA, 50 bp, synthetic construct
  source 1..50: mol_type = other DNA
gtacaagaaaacatctcaaaagatagattgtttgaaacgtgggtttgtac

SEQ ID NO: 1244 - DNA, 50 bp, synthetic construct
  source 1..50: mol_type = other DNA
tcacgattcttctgggtcagcccaaacttgctgacccgctggaagcgtga

SEQ ID NO: 1245 - DNA, 50 bp, synthetic construct
  source 1..50: mol_type = other DNA
gactgttggacttcatcaattaagcctttgattgatgatactttcactct

SEQ ID NO: 1246 - DNA, 50 bp, synthetic construct
  source 1..50: mol_type = other DNA
actttcttataaatacataaaagaaaagttttgttattaaataagtaagt

SEQ ID NO: 1247 - DNA, 50 bp, synthetic construct
  source 1..50: mol_type = other DNA
atttctcctttccggcagactctctgaagagtataccgagtttcagaaat

SEQ ID NO: 1248 - DNA, 50 bp, synthetic construct
  source 1..50: mol_type = other DNA
gctgattatgctataattatagagtaccccatagccaaagcatattcttc

SEQ ID NO: 1249 - DNA, 50 bp, synthetic construct
  source 1..50: mol_type = other DNA
acctcggtaccgcagcgactccagtcctggctgggcaacggaggggcgac

SEQ ID NO: 1250 - DNA, 50 bp, synthetic construct
  source 1..50: mol_type = other DNA
ccgtgttcctcgatgaagcgggcggcccgaacaaagcgagaggagggcgg

SEQ ID NO: 1251 - DNA, 50 bp, synthetic construct
  source 1..50: mol_type = other DNA
ggtttcagtcgtttgtatgttgttgcaacaacatacaaacgacattatat

SEQ ID NO: 1252 - DNA, 50 bp, synthetic construct
  source 1..50: mol_type = other DNA
tttatgattttcatctaacaatctatagaagaagggatataaattataga

SEQ ID NO: 1253 - DNA, 50 bp, synthetic construct
  source 1..50: mol_type = other DNA
cggtcaatgccgcgcagatcgaatattttcgatcagcgagtagcctgttt

SEQ ID NO: 1254 - DNA, 50 bp, synthetic construct
  source 1..50: mol_type = other DNA
ttcacccagttcgtcgacccctcctacgatgggtcaacaaactgtgtgaa

SEQ ID NO: 1255 - DNA, 50 bp, synthetic construct
  source 1..50: mol_type = other DNA
cccacaaccgtctttgtctgggtgcccaccccaccgccgaagcacataag

SEQ ID NO: 1256 - DNA, 50 bp, synthetic construct
  source 1..50: mol_type = other DNA
gggcggccgtccgctggcgccggacgtcggcgcccccggcaccgcccccc

SEQ ID NO: 1257 - DNA, 50 bp, synthetic construct
  source 1..50: mol_type = other DNA
taaatgtatcaagtgaacactattaatatggtattcacttgatacatttt

SEQ ID NO: 1258 - DNA, 50 bp, synthetic construct
  source 1..50: mol_type = other DNA
tcttaaaaagctccataagctttttagtcgattttctttcctttttgatc

SEQ ID NO: 1259 - DNA, 50 bp, synthetic construct
  source 1..50: mol_type = other DNA
atcaatacttctttaacccaataaatttactggctaaataatcgaatgat

SEQ ID NO: 1260 - DNA, 50 bp, synthetic construct
  source 1..50: mol_type = other DNA
gcgtagacgcccgtgacgtgttcaggtgaacacgtcctacgccgtggcgg

SEQ ID NO: 1261 - DNA, 50 bp, synthetic construct
  source 1..50: mol_type = other DNA
cgacaagcagagtttccgcagctcagttatgactgaagctgccgtctacc

SEQ ID NO: 1262 - DNA, 50 bp, synthetic construct
  source 1..50: mol_type = other DNA
tacaagcagtatgaccgtgatgtttaaaaatcatgctccgtcctatatgt

SEQ ID NO: 1263 - DNA, 50 bp, synthetic construct
  source 1..50: mol_type = other DNA
ccaaaaagcgctcttttccatcactaattgttcgaaagcgcgattttttt

SEQ ID NO: 1264 - DNA, 50 bp, synthetic construct
  source 1..50: mol_type = other DNA
gctcggagagcaggtccgcgacggcgaaccaccggaactggtcgccgaaa

SEQ ID NO: 1265 - DNA, 50 bp, synthetic construct
  source 1..50: mol_type = other DNA
tggccgccaatctcgcagtggccgggcggtgaccgcgacgacggcggcgc

SEQ ID NO: 1266 - DNA, 50 bp, synthetic construct
  source 1..50: mol_type = other DNA
ccgtgtgtacaaccagacttgcaacgtagaatgtcgggtagtgtgcacgg

SEQ ID NO: 1267 - DNA, 50 bp, synthetic construct
  source 1..50: mol_type = other DNA
ataagacatgggatgtcaacctatcaataaccttatcgtgcatctcttcg

SEQ ID NO: 1268 - DNA, 50 bp, synthetic construct
  source 1..50: mol_type = other DNA
tgctcccacatgtccagctggaacagcttgacgctggtggatccgtcctc

SEQ ID NO: 1269 - DNA, 50 bp, synthetic construct
  source 1..50: mol_type = other DNA
tgcggaccggacacgtcttcatgccagcttggcgacgtgcccggtggcct

SEQ ID NO: 1270 - DNA, 50 bp, synthetic construct
  source 1..50: mol_type = other DNA
gtcattttttaatcaacccggtgcaaagagcgagatgataaaataaaaat

SEQ ID NO: 1271 - DNA, 50 bp, synthetic construct
  source 1..50: mol_type = other DNA
cacccggcgcggcctgggcgatggcgcccaccggaaggccgcgaagtgac

SEQ ID NO: 1272 - DNA, 50 bp, synthetic construct
  source 1..50: mol_type = other DNA
gaccttgcatcccgtatggggtgactcgaccccaagatgggcgccgggca

SEQ ID NO: 1273 - DNA, 50 bp, synthetic construct
  source 1..50: mol_type = other DNA
tgagttcaactgattatgtacattataaagtgcaaaaaaggcggatcact

SEQ ID NO: 1274 - DNA, 50 bp, synthetic construct
  source 1..50: mol_type = other DNA
taaaaataccgcaatataataaattaaattattttatttatataattttt

SEQ ID NO: 1275 - DNA, 50 bp, synthetic construct
  source 1..50: mol_type = other DNA
ccttcttttattccattataataaagtttttatgattcaattaaagaatt

SEQ ID NO: 1276 - DNA, 50 bp, synthetic construct
  source 1..50: mol_type = other DNA
ccagggtaaggagagctgtcgcaagcttgcgacagaactccagatacttg

SEQ ID NO: 1277 - DNA, 50 bp, synthetic construct
  source 1..50: mol_type = other DNA
tgaactagttcgctgccggtggtggtcaccacgcgcagccagtcgcgctg

SEQ ID NO: 1278 - DNA, 50 bp, synthetic construct
  source 1..50: mol_type = other DNA
tagatccactaagaattctgccaaatttggcaaaatcagcgtaggaagaa

SEQ ID NO: 1279 - DNA, 50 bp, synthetic construct
  source 1..50: mol_type = other DNA
ctgatcaacggcggcaccggcaccccgggaacgaactggaatccgagcgt

SEQ ID NO: 1280 - DNA, 50 bp, synthetic construct
  source 1..50: mol_type = other DNA
gagcgcgacgcgcatggctagagagcttcctggccacgggcgacctcttc

SEQ ID NO: 1281 - DNA, 50 bp, synthetic construct
  source 1..50: mol_type = other DNA
cagtcagtatctttaaaaacagctttatctgtttatcgagatactgacta

SEQ ID NO: 1282 - DNA, 50 bp, synthetic construct
  source 1..50: mol_type = other DNA
ggcggcctcttcaatcgcgcggctaagaatacgtaatgcaagacggcgac

SEQ ID NO: 1283 - DNA, 50 bp, synthetic construct
  source 1..50: mol_type = other DNA
atagaatagttctagcattagaagtaataccatggctattaagaacctat

SEQ ID NO: 1284 - DNA, 50 bp, synthetic construct
  source 1..50: mol_type = other DNA
tgtggtcacttttacaccacaattataaatgttcctcgaagtcattagca

SEQ ID NO: 1285 - DNA, 50 bp, synthetic construct
  source 1..50: mol_type = other DNA
atctattttgtaacccatattttctaggaaatatggcatataaaaatgtc

SEQ ID NO: 1286 - DNA, 50 bp, synthetic construct
  source 1..50: mol_type = other DNA
gatgtacaacattgctctttattttcaaatacagattaatgttgtataaa

SEQ ID NO: 1287 - DNA, 50 bp, synthetic construct
  source 1..50: mol_type = other DNA
taagcagcgatgccgagccgttggcgcctccggaggggataggcacgtca

SEQ ID NO: 1288 - DNA, 50 bp, synthetic construct
  source 1..50: mol_type = other DNA
cttccccggcggcctcggcaacacaccaggagccgaggtcatcgcggacg

SEQ ID NO: 1289 - DNA, 50 bp, synthetic construct
  source 1..50: mol_type = other DNA
cgtcctcacgaggcaccgccctgtagtcgaagcggagcttgtcgaggacg

SEQ ID NO: 1290 - DNA, 50 bp, synthetic construct
  source 1..50: mol_type = other DNA
tcgcgccttttgcggtgcgtagcgaacgtgacgcaccacaaaaggcgcac

SEQ ID NO: 1291 - DNA, 50 bp, synthetic construct
  source 1..50: mol_type = other DNA
attgagcgaaatcacttcttgccgagaggcaagaagggatagcgcgcgtt

SEQ ID NO: 1292 - DNA, 50 bp, synthetic construct
  source 1..50: mol_type = other DNA
agttgattaagataataaatcaaaattttattcatttttcaattgattat

SEQ ID NO: 1293 - DNA, 50 bp, synthetic construct
  source 1..50: mol_type = other DNA
ttttaatttagaatacttacacttataagtttagaatatctaaattaatg

SEQ ID NO: 1294 - DNA, 50 bp, synthetic construct
  source 1..50: mol_type = other DNA
acagttgattgtacaggaattgctgatacaattccgaaacgaataacatg

SEQ ID NO: 1295 - DNA, 50 bp, synthetic construct
  source 1..50: mol_type = other DNA
ttttttgaaagtgtaaaataaagtgtactttattttaccatataaagcac

SEQ ID NO: 1296 - DNA, 50 bp, synthetic construct
  source 1..50: mol_type = other DNA
acatcttaaagcatgaggattatgagcacgaacctcattcttgtagccat

SEQ ID NO: 1297 - DNA, 50 bp, synthetic construct
  source 1..50: mol_type = other DNA
taaaagggcatctttcctatcagtttgctgatatgaaagataataatgta

SEQ ID NO: 1298 - DNA, 50 bp, synthetic construct
  source 1..50: mol_type = other DNA
catataaataagaagaaactatcatatgatagtaaatgcccataaacagc

SEQ ID NO: 1299 - DNA, 50 bp, synthetic construct
  source 1..50: mol_type = other DNA
ggaatgagtcctttggctggcgctggccagcccaacagaggactcacaaa

SEQ ID NO: 1300 - DNA, 50 bp, synthetic construct
  source 1..50: mol_type = other DNA
aagaaataattcaaggtctttcgttaacaaaagaccttgaaaaattagga

SEQ ID NO: 1301 - DNA, 50 bp, synthetic construct
  source 1..50: mol_type = other DNA
ttgcttttctttttcttcttctagaaatagatatgcaaaaagaattaaaa

SEQ ID NO: 1302 - DNA, 50 bp, synthetic construct
  source 1..50: mol_type = other DNA
attgattaaatcctttttatttcttaactaataattaactattaaaacat

SEQ ID NO: 1303 - DNA, 50 bp, synthetic construct
  source 1..50: mol_type = other DNA
agatatcaaatctttcatcaaatactgttttgatgaactccttgaaatca

SEQ ID NO: 1304 - DNA, 50 bp, synthetic construct
  source 1..50: mol_type = other DNA
aatcaactaatggaaaatgcttctattacagtatttcctaatactttctt

SEQ ID NO: 1305 - DNA, 50 bp, synthetic construct
  source 1..50: mol_type = other DNA
atgaaaattaaatcagaattataaaatgatatttgacatttatttttacg

SEQ ID NO: 1306 - DNA, 50 bp, synthetic construct
  source 1..50: mol_type = other DNA
gcatatataacactccttttgaacatattgaaaaggagtgttatttatgc

SEQ ID NO: 1307 - DNA, 50 bp, synthetic construct
  source 1..50: mol_type = other DNA
agtgcatacaggccatggacattccggaattggtattgctggtatgatca

SEQ ID NO: 1308 - DNA, 50 bp, synthetic construct
  source 1..50: mol_type = other DNA
ttgcatacctacttggtgtagaccatgggcgaccccaatttgaccttcaa

SEQ ID NO: 1309 - DNA, 50 bp, synthetic construct
  source 1..50: mol_type = other DNA
tttttactttttatcattgtttaaatttgtaatatcgtaaaagctaaaaa

SEQ ID NO: 1310 - DNA, 50 bp, synthetic construct
  source 1..50: mol_type = other DNA
gataaattaattagccacaacatctcgatatatgagctaattaatttaaa

SEQ ID NO: 1311 - DNA, 50 bp, synthetic construct
  source 1..50: mol_type = other DNA
aaagtgagaatattttagtaagatatggtttaggtagtggttttcaattt

SEQ ID NO: 1312 - DNA, 50 bp, synthetic construct
  source 1..50: mol_type = other DNA
ggagcgccttcgtccgggccgaggagcctcaccccagcgccgggatctcg

SEQ ID NO: 1313 - DNA, 50 bp, synthetic construct
  source 1..50: mol_type = other DNA
accatgatcgcatcattgccgcgtccacgtcgctatgttgcgccccatgc

SEQ ID NO: 1314 - DNA, 50 bp, synthetic construct
  source 1..50: mol_type = other DNA
ttacttccttattagcccgccgcaaatgctgcgggctcataaggaagtat

SEQ ID NO: 1315 - DNA, 50 bp, synthetic construct
  source 1..50: mol_type = other DNA
atgttgctcgtaacatcaacatttataaaatatgatgttaaatcaattaa

SEQ ID NO: 1316 - DNA, 50 bp, synthetic construct
  source 1..50: mol_type = other DNA
ccgttcggccggtctggggcttcgccgaaagatcccgaccgcccagatga

SEQ ID NO: 1317 - DNA, 50 bp, synthetic construct
  source 1..50: mol_type = other DNA
atttagcttttcaattcggttttcatgaatacttgtttgaaggtaaaaaa

SEQ ID NO: 1318 - DNA, 50 bp, synthetic construct
  source 1..50: mol_type = other DNA
aaagtagaaaaccgccacctttaagtggtaattttgccgttttcaacttt

SEQ ID NO: 1319 - DNA, 50 bp, synthetic construct
  source 1..50: mol_type = other DNA
ctgtcatatcctattgaaaccgagaagtctatttcaagatgctaatcact

SEQ ID NO: 1320 - DNA, 50 bp, synthetic construct
  source 1..50: mol_type = other DNA
aatgttgcgctaaaataagacttcaaagagtcttattttagcgcaacaat

SEQ ID NO: 1321 - DNA, 50 bp, synthetic construct
  source 1..50: mol_type = other DNA
taaaaggggatattatcaagtcatttactacttgctaatacaccaatcaa

SEQ ID NO: 1322 - DNA, 50 bp, synthetic construct
  source 1..50: mol_type = other DNA
gcgagcaccggtaatctcacgcgcgagaccgtcggtgtgccggtggtcgc

SEQ ID NO: 1323 - DNA, 50 bp, synthetic construct
  source 1..50: mol_type = other DNA
aactccagttgtcggataggagtgtccactcctatccaactactggagtt

SEQ ID NO: 1324 - DNA, 50 bp, synthetic construct
  source 1..50: mol_type = other DNA
cgcataaaataaggttttttccttattatgcaaaaagcccgtatttacgg

SEQ ID NO: 1325 - DNA, 50 bp, synthetic construct
  source 1..50: mol_type = other DNA
taattttaatcgtttacattagccgcgcctaatgtaagcgattgatctga

SEQ ID NO: 1326 - DNA, 50 bp, synthetic construct
  source 1..50: mol_type = other DNA
cacgccaatggctaatataagggttagccattatattaggattctttatc

SEQ ID NO: 1327 - DNA, 50 bp, synthetic construct
  source 1..50: mol_type = other DNA
tggtatccctgctatcgaaaatatcactattttgcatagcatactgtatc

SEQ ID NO: 1328 - DNA, 50 bp, synthetic construct
  source 1..50: mol_type = other DNA
gaacctccgaccccctcgtcccgaactacgaatctgggggtcagaggttc

SEQ ID NO: 1329 - DNA, 50 bp, synthetic construct
  source 1..50: mol_type = other DNA
atgatggaggcaagagtacggcttcgcgtcctcaccgaggctgccatcat

SEQ ID NO: 1330 - DNA, 50 bp, synthetic construct
  source 1..50: mol_type = other DNA
aaggagataaaagacagtggttttgaaaaatcaatgaagattgcagcggc

SEQ ID NO: 1331 - DNA, 50 bp, synthetic construct
  source 1..50: mol_type = other DNA
agttcatttgctcgcaaacgatattgatatccagaatagtcaaatgaatt

SEQ ID NO: 1332 - DNA, 50 bp, synthetic construct
  source 1..50: mol_type = other DNA
gcagccttgtcctgatatttcaaatcttttaaatatctcgaataggctgg

SEQ ID NO: 1333 - DNA, 50 bp, synthetic construct
  source 1..50: mol_type = other DNA
gccttggcggcctgcagacgttcgctcgaagttctgcaccccgccgccaa

SEQ ID NO: 1334 - DNA, 50 bp, synthetic construct
  source 1..50: mol_type = other DNA
aatatctaatataagtcttacagatgaagaatggacttatattaattagc

SEQ ID NO: 1335 - DNA, 50 bp, synthetic construct
  source 1..50: mol_type = other DNA
tttgttcggattatacaactcactcttgatagctggatattagaaacaag

SEQ ID NO: 1336 - DNA, 50 bp, synthetic construct
  source 1..50: mol_type = other DNA
acagaagtaaatttataaggctgtaaacggccttcaatgccaactttgag

SEQ ID NO: 1337 - DNA, 50 bp, synthetic construct
  source 1..50: mol_type = other DNA
ccttataaacctgtcttatgcgctgctgtccataaaacaggttttgagaa

SEQ ID NO: 1338 - DNA, 50 bp, synthetic construct
  source 1..50: mol_type = other DNA
caccatcattctggagtcctgcgaatgcgcaggactatgccgagatgttg

SEQ ID NO: 1339 - DNA, 50 bp, synthetic construct
  source 1..50: mol_type = other DNA
cagaaaagggctgatatttatggagcagcctgtgctacagcaaagagctg

SEQ ID NO: 1340 - DNA, 50 bp, synthetic construct
  source 1..50: mol_type = other DNA
cccgccgatcgcctgacggtcgagcggaccgccgccagcacgtcgacggg

SEQ ID NO: 1341 - DNA, 50 bp, synthetic construct
  source 1..50: mol_type = other DNA
tgcgacaaaattgattactatatgtacagaaaataatcaaaattgtcgca

SEQ ID NO: 1342 - DNA, 50 bp, synthetic construct
  source 1..50: mol_type = other DNA
tatcagatcgtcaacggcatttaccagacgatgccgtataatatcttata

SEQ ID NO: 1343 - DNA, 50 bp, synthetic construct
  source 1..50: mol_type = other DNA
aatagtagccgtatttccggtcacggatgaccggaaatacagctactatt

SEQ ID NO: 1344 - DNA, 50 bp, synthetic construct
  source 1..50: mol_type = other DNA
aaataccttgaaaattatgtcaaacctttggcagatgcgtcaaggaattt

SEQ ID NO: 1345 - DNA, 50 bp, synthetic construct
  source 1..50: mol_type = other DNA
accactgacaccatacccctatcagttgataagcttatgaatgaggaggt

SEQ ID NO: 1346 - DNA, 50 bp, synthetic construct
  source 1..50: mol_type = other DNA
tacttgcaaaagcggtgtttagaatgttctcgacacagctattggaagaa

SEQ ID NO: 1347 - DNA, 50 bp, synthetic construct
  source 1..50: mol_type = other DNA
gaaacttgggaatctcacagcctcatgaatcaactccgctaccaaggttt

SEQ ID NO: 1348 - DNA, 50 bp, synthetic construct
  source 1..50: mol_type = other DNA
tcagcaaagaatgttataaccacaatactaagtataagttattttgacct

SEQ ID NO: 1349 - DNA, 50 bp, synthetic construct
  source 1..50: mol_type = other DNA
caccagcgcctaccagaagaagtcccaccaggttctggcgggcgcttaga

SEQ ID NO: 1350 - DNA, 50 bp, synthetic construct
  source 1..50: mol_type = other DNA
aacttatgtattaaaagcctgcgggaatgccggcatttacaagaaaagtc

SEQ ID NO: 1351 - DNA, 50 bp, synthetic construct
  source 1..50: mol_type = other DNA
cagataacggccccgataagccctgcaggggttatcagggccgttatttg

SEQ ID NO: 1352 - DNA, 50 bp, synthetic construct
  source 1..50: mol_type = other DNA
aattatatgcatttgaagtatggaggtccctattgcagatacatataatt

SEQ ID NO: 1353 - DNA, 50 bp, synthetic construct
  source 1..50: mol_type = other DNA
cgttatacgttcttgcagtatgggggttcatattgcaagaacgtataaac

SEQ ID NO: 1354 - DNA, 50 bp, synthetic construct
  source 1..50: mol_type = other DNA
gtttaaatatatttttaacacacatattggtgttaaaaatatatttgaaa

SEQ ID NO: 1355 - DNA, 50 bp, synthetic construct
  source 1..50: mol_type = other DNA
ttcatttactttctataagtcctttcaaggtgcttgttaaaataattgaa

SEQ ID NO: 1356 - DNA, 50 bp, synthetic construct
  source 1..50: mol_type = other DNA
tcttatatggtgttctaacagggttaacctcatccgaacacctttgaaca

SEQ ID NO: 1357 - DNA, 50 bp, synthetic construct
  source 1..50: mol_type = other DNA
aattttttctgttggctgtttcataatgataaaaaacacagcacaacata

SEQ ID NO: 1358 - DNA, 50 bp, synthetic construct
  source 1..50: mol_type = other DNA
atttaatattcactatattgaagatgacttgataataaagaactttagag

SEQ ID NO: 1359 - DNA, 50 bp, synthetic construct
  source 1..50: mol_type = other DNA
taccagcctgcagatagtttctacatgctgaaaatatcttcatccagaat

SEQ ID NO: 1360 - DNA, 50 bp, synthetic construct
  source 1..50: mol_type = other DNA
tgccttgatttttttataatcatatatatggatatttatactgcaaggca

SEQ ID NO: 1361 - DNA, 50 bp, synthetic construct
  source 1..50: mol_type = other DNA
attaaatgtttttaaattagttgtatacaactttttataatacatttaaa

SEQ ID NO: 1362 - DNA, 50 bp, synthetic construct
  source 1..50: mol_type = other DNA
tgatcggcccgcgcatgcgccctggctcgggtgcatgacgatccggagcc

SEQ ID NO: 1363 - DNA, 50 bp, synthetic construct
  source 1..50: mol_type = other DNA
agaagacaagatatatgcagctttcgaaagaagaatatgagcggtcttca

SEQ ID NO: 1364 - DNA, 50 bp, synthetic construct
  source 1..50: mol_type = other DNA
ggttttgcgtggcggtgtagaggggcccccgctattttgggagcgttttt

SEQ ID NO: 1365 - DNA, 50 bp, synthetic construct
  source 1..50: mol_type = other DNA
tcatttttcacttcttttttaagtgccgcccaaaattcagaaatcaatga

SEQ ID NO: 1366 - DNA, 50 bp, synthetic construct
  source 1..50: mol_type = other DNA
aacggaaggtcgcagcatacgcccgcggcaatatgccgccacacgcagag

SEQ ID NO: 1367 - DNA, 50 bp, synthetic construct
  source 1..50: mol_type = other DNA
gtgaaaatcgcagttaaatagttttaatgataggtaaaaattatttatac

SEQ ID NO: 1368 - DNA, 50 bp, synthetic construct
  source 1..50: mol_type = other DNA
agacatgacaaaaatagctgagccggttctccgctatttcatgcataata

SEQ ID NO: 1369 - DNA, 50 bp, synthetic construct
  source 1..50: mol_type = other DNA
atttaatgagtaaactcatcctattaaaaggacttccttatcaataaatt

SEQ ID NO: 1370 - DNA, 50 bp, synthetic construct
  source 1..50: mol_type = other DNA
ttaataaacagggagtggaatcatatatctcaaacctcccttgtttttat

SEQ ID NO: 1371 - DNA, 50 bp, synthetic construct
  source 1..50: mol_type = other DNA
catatgtatgataagcagccactggaagatggacgcttatcatacatata

SEQ ID NO: 1372 - DNA, 50 bp, synthetic construct
  source 1..50: mol_type = other DNA
catcctatgagaaatcctgcccgcatacgggcagaaattcggattcgatg

SEQ ID NO: 1373 - DNA, 50 bp, synthetic construct
  source 1..50: mol_type = other DNA
gcgcaataaacataacaccccggcgattcggagtgttatgaggatttaca

SEQ ID NO: 1374 - DNA, 50 bp, synthetic construct
  source 1..50: mol_type = other DNA
cttcaacaacaacagtatatcataagacatatataatgtaaacatataat

SEQ ID NO: 1375 - DNA, 50 bp, synthetic construct
  source 1..50: mol_type = other DNA
agttaacaaatgttaaaatttgattaacccgaatttaacaaatgttaaca

SEQ ID NO: 1376 - DNA, 50 bp, synthetic construct
  source 1..50: mol_type = other DNA
attgctaattccagtttctgaccttgaggttagatagtgatcttaatctt

SEQ ID NO: 1377 - DNA, 50 bp, synthetic construct
  source 1..50: mol_type = other DNA
atatcacaactattttataatatccacggcttcaaaaagccttaatatat

SEQ ID NO: 1378 - DNA, 50 bp, synthetic construct
  source 1..50: mol_type = other DNA
aacatctaccatcgagaaaagcacccgtgcttctctcgatggtagaggct

SEQ ID NO: 1379 - DNA, 50 bp, synthetic construct
  source 1..50: mol_type = other DNA
atataaatctctaccgcttcctccatgattgaagaaaaggagagagaaaa

SEQ ID NO: 1380 - DNA, 50 bp, synthetic construct
  source 1..50: mol_type = other DNA
tcacgacctccgcagcgccgtcgtccgggtcgatcctgcggacggcgttc

SEQ ID NO: 1381 - DNA, 50 bp, synthetic construct
  source 1..50: mol_type = other DNA
gtgtagggcgtgacatatccttttgcaaaaggatatagtaatgcgctatg

SEQ ID NO: 1382 - DNA, 50 bp, synthetic construct
  source 1..50: mol_type = other DNA
caaatttaagtcttatttctcggtgacccgccaaataaacctttatatat

SEQ ID NO: 1383 - DNA, 50 bp, synthetic construct
  source 1..50: mol_type = other DNA
ttcctcgacgacccgggccaggtcagatcctggccagggtcaccgaggag

SEQ ID NO: 1384 - DNA, 50 bp, synthetic construct
  source 1..50: mol_type = other DNA
taccccgcacaccgtggcgcccgccagcgaagatgacggtgagcggaagc

SEQ ID NO: 1385 - DNA, 50 bp, synthetic construct
  source 1..50: mol_type = other DNA
ttctttacgcctttaacccccatgatcatggatattaaaaaaatgaaagc

SEQ ID NO: 1386 - DNA, 50 bp, synthetic construct
  source 1..50: mol_type = other DNA
atgcacaagacctgaacttgcggcaggccgcaagttcaagtcttgtcacc

SEQ ID NO: 1387 - DNA, 50 bp, synthetic construct
  source 1..50: mol_type = other DNA
acaatgctacatgtgtatatattatataatatatatacagcttgcttttg

SEQ ID NO: 1388 - DNA, 50 bp, synthetic construct
  source 1..50: mol_type = other DNA
catatacaaaagggtgcggttacaattgtaacctcaatcttaggtgtatc

SEQ ID NO: 1389 - DNA, 50 bp, synthetic construct
  source 1..50: mol_type = other DNA
taatattaattaaggtggtgaatagataatcacctcttcaatttttatta

SEQ ID NO: 1390 - DNA, 50 bp, synthetic construct
  source 1..50: mol_type = other DNA
tgataagtataccagtaagacgaccgggtcgctaagtggtatacttaaat

SEQ ID NO: 1391 - DNA, 50 bp, synthetic construct
  source 1..50: mol_type = other DNA
aagttagagttattctagatgaaaattttgaactagaaagaggcttacca

SEQ ID NO: 1392 - DNA, 50 bp, synthetic construct
  source 1..50: mol_type = other DNA
tacttccatcttgtatgtgcaaacgaatcagcacatacaagatggaagta

SEQ ID NO: 1393 - DNA, 50 bp, synthetic construct
  source 1..50: mol_type = other DNA
gaatggggctgattcatgatataatactgtaaaatgaatcatttgcattt

SEQ ID NO: 1394 - DNA, 50 bp, synthetic construct
  source 1..50: mol_type = other DNA
cattatagggtattacaatacggtggtctgtattgtaataccctataatg

SEQ ID NO: 1395 - DNA, 50 bp, synthetic construct
  source 1..50: mol_type = other DNA
tatttccaaaagaaacgggattattctttatcccaattcttttggaaata

SEQ ID NO: 1396 - DNA, 50 bp, synthetic construct
  source 1..50: mol_type = other DNA
tcctctatggaggactatctggaaatttccagaatgtcttgacaagaggt

SEQ ID NO: 1397 - DNA, 50 bp, synthetic construct
  source 1..50: mol_type = other DNA
tacttccattttgtttccaaagtatcaactttagaaacaaaatacacaga

SEQ ID NO: 1398 - DNA, 50 bp, synthetic construct
  source 1..50: mol_type = other DNA
ggcgatcacctgaccgcacacgttgaaccgtgcgcaactatgtgattgcc

SEQ ID NO: 1399 - DNA, 50 bp, synthetic construct
  source 1..50: mol_type = other DNA
ttatttactgtagaaagcagagaaatttatctgctctcgttagaaaatac

SEQ ID NO: 1400 - DNA, 50 bp, synthetic construct
  source 1..50: mol_type = other DNA
acttagagtgcgggagaagggggtcgacccctcttctccgcaagataaaa

SEQ ID NO: 1401 - DNA, 50 bp, synthetic construct
  source 1..50: mol_type = other DNA
tcagatcggtcggcgcgccgggcagctcctgtgccatgcgcgcgatctga

SEQ ID NO: 1402 - DNA, 50 bp, synthetic construct
  source 1..50: mol_type = other DNA
gaattctacaccggtttcaaaagaatccgcttacaaccattgttgaattc

SEQ ID NO: 1403 - DNA, 50 bp, synthetic construct
  source 1..50: mol_type = other DNA
attccctccttctctaatcttctttaaagaagtattgagtagtatcttta

SEQ ID NO: 1404 - DNA, 50 bp, synthetic construct
  source 1..50: mol_type = other DNA
caacctggcaaagtgaaagacaggtacctatcctgatctttgcgtttcga

SEQ ID NO: 1405 - DNA, 50 bp, synthetic construct
  source 1..50: mol_type = other DNA
tcgccttacgagcggatgatccagcgtcgaccattccttttcgatagcgg

SEQ ID NO: 1406 - DNA, 50 bp, synthetic construct
  source 1..50: mol_type = other DNA
gatcctgagcacgaggtctcgcccgaatcggacgccccgggctcatcgtt

SEQ ID NO: 1407 - DNA, 50 bp, synthetic construct
  source 1..50: mol_type = other DNA
ctggttacctactcattcttttagtttcaaaagaactcgttgcaaactct

SEQ ID NO: 1408 - DNA, 50 bp, synthetic construct
  source 1..50: mol_type = other DNA
gctctgccgggaacaccttggacagctgtttaagggcgtcacggaggagc

SEQ ID NO: 1409 - DNA, 50 bp, synthetic construct
  source 1..50: mol_type = other DNA
tagagggctgcccgtctcacagcggccgctcacggacgagcagaagacgc

SEQ ID NO: 1410 - DNA, 50 bp, synthetic construct
  source 1..50: mol_type = other DNA
aaacttttccacaaacaccgaatcgcgatacctatttttacaaatacttt

SEQ ID NO: 1411 - DNA, 50 bp, synthetic construct
  source 1..50: mol_type = other DNA
gacggataacttttaggtactcacgaatgcgtacataaaagttatccgtc

SEQ ID NO: 1412 - DNA, 50 bp, synthetic construct
  source 1..50: mol_type = other DNA
ttcgtggcaaacgaaactatctccatggaattaagcaagttaggagcgat

SEQ ID NO: 1413 - DNA, 50 bp, synthetic construct
  source 1..50: mol_type = other DNA
gccaaaaggtggtttcagaatgttatttcattcctctgccacctcatttc

SEQ ID NO: 1414 - DNA, 50 bp, synthetic construct
  source 1..50: mol_type = other DNA
acatcaatttttagtacaaaaaactagtttgttttgcaatttactgtccc

SEQ ID NO: 1415 - DNA, 50 bp, synthetic construct
  source 1..50: mol_type = other DNA
ttctaccactaggtaaggtgatgaacccatcatattacctccttaaaggt

SEQ ID NO: 1416 - DNA, 50 bp, synthetic construct
  source 1..50: mol_type = other DNA
gacatcaactataacctctttatgtgcataaagagttttatacgagcgtt

SEQ ID NO: 1417 - DNA, 50 bp, synthetic construct
  source 1..50: mol_type = other DNA
ttgatcgccctgcatttgcaggatttgcgccgcacgatgagatcgaccga

SEQ ID NO: 1418 - DNA, 50 bp, synthetic construct
  source 1..50: mol_type = other DNA
ctgggagctaatttaagtctattattacatagaaataacccgctccccaa

SEQ ID NO: 1419 - DNA, 50 bp, synthetic construct
  source 1..50: mol_type = other DNA
tcgtggccgttgatcgcaaactcgttcgtcaaggagatcaccggcggcga

SEQ ID NO: 1420 - DNA, 50 bp, synthetic construct
  source 1..50: mol_type = other DNA
atctgagggcaacgataaacatcaaaagaaatttgacgaacttctcagca

SEQ ID NO: 1421 - DNA, 50 bp, synthetic construct
  source 1..50: mol_type = other DNA
ttcgcaatcatatttgaacgttcaattccggtttcaaatactctgtcgaa

SEQ ID NO: 1422 - DNA, 50 bp, synthetic construct
  source 1..50: mol_type = other DNA
atttcatcctgataacgaaagataattatcaatatctatcaccataagag

SEQ ID NO: 1423 - DNA, 50 bp, synthetic construct
  source 1..50: mol_type = other DNA
aataaaaacaccccgcgaaattgtatacaatgctagggcaaaaaaataac

SEQ ID NO: 1424 - DNA, 50 bp, synthetic construct
  source 1..50: mol_type = other DNA
attatatttttttagtttttgttatataactaaatattaaaaataaaaga

SEQ ID NO: 1425 - DNA, 50 bp, synthetic construct
  source 1..50: mol_type = other DNA
catctccgcaggcaccattgcccgcattggcaatgtccagctcgttgatg

SEQ ID NO: 1426 - DNA, 50 bp, synthetic construct
  source 1..50: mol_type = other DNA
acttctctatcagataaacgtattgtaataggttttattcttagagaaat

SEQ ID NO: 1427 - DNA, 50 bp, synthetic construct
  source 1..50: mol_type = other DNA
agtattaaagacgctatatcttcctcggaagatatagcgcctttaatact

SEQ ID NO: 1428 - DNA, 50 bp, synthetic construct
  source 1..50: mol_type = other DNA
gcctgatgtcttgatttttcataaaaccgtgtcaaaaatagcggtaatat

SEQ ID NO: 1429 - DNA, 50 bp, synthetic construct
  source 1..50: mol_type = other DNA
tattataggttactgcactttagaccgccgtagcgcagtaacctataata

SEQ ID NO: 1430 - DNA, 50 bp, synthetic construct
  source 1..50: mol_type = other DNA
attaaaaagtagtaactcttatacgtgtgcaagagttactactttaattt

SEQ ID NO: 1431 - DNA, 50 bp, synthetic construct
  source 1..50: mol_type = other DNA
ctgaagcaatcccctgccaagcagggatgtcgctcatgccagtgcttcca

SEQ ID NO: 1432 - DNA, 50 bp, synthetic construct
  source 1..50: mol_type = other DNA
ctggaatttctgacttctgaaaaaatattttatgaagctggtgatcgcag

SEQ ID NO: 1433 - DNA, 50 bp, synthetic construct
  source 1..50: mol_type = other DNA
tgttgtactaactataacgctcctgtaggtgcgttatagttagtacaaca

SEQ ID NO: 1434 - DNA, 50 bp, synthetic construct
  source 1..50: mol_type = other DNA
agcgaaatacctagggtaccttcggcctttctatgttgaggctgcaaaac

SEQ ID NO: 1435 - DNA, 50 bp, synthetic construct
  source 1..50: mol_type = other DNA
gtgttttttttgctttatttgatgtacatttaaaattacaaaaaagtgat

SEQ ID NO: 1436 - DNA, 50 bp, synthetic construct
  source 1..50: mol_type = other DNA
taactaccacctctaataatagttgtaatttttgccatcagaggcagtta

SEQ ID NO: 1437 - DNA, 50 bp, synthetic construct
  source 1..50: mol_type = other DNA
atttgaatgatgatatccagcatttccatgctggagcggatgaaagaaaa

SEQ ID NO: 1438 - DNA, 50 bp, synthetic construct
  source 1..50: mol_type = other DNA
atagacaaataagaactacaattttaaaatcagagttatcatcgtactac

SEQ ID NO: 1439 - DNA, 50 bp, synthetic construct
  source 1..50: mol_type = other DNA
ttggagtagtaaccagcgtacacggttgtgcacgctgtttactactcctg

SEQ ID NO: 1440 - DNA, 50 bp, synthetic construct
  source 1..50: mol_type = other DNA
aagagcagtatttacaaggcaaggatcattgccgagaggataagaaagtg

SEQ ID NO: 1441 - DNA, 50 bp, synthetic construct
  source 1..50: mol_type = other DNA
taactttgctcataatatgctgtttaatagatatacccgaatataaatta

SEQ ID NO: 1442 - DNA, 50 bp, synthetic construct
  source 1..50: mol_type = other DNA
gtcagaccgtttccgtgggcggctggcaacggatgcggaacgggtcttaa

SEQ ID NO: 1443 - DNA, 50 bp, synthetic construct
  source 1..50: mol_type = other DNA
cctggacggaagcagtcctgttcgatcagccagtacggcgggcccgacgg

SEQ ID NO: 1444 - DNA, 50 bp, synthetic construct
  source 1..50: mol_type = other DNA
gccgccgttttgatgccgattttgctgaaaatctccatcaatggcaatga

SEQ ID NO: 1445 - DNA, 50 bp, synthetic construct
  source 1..50: mol_type = other DNA
ctgagctgtgacagcttatcctcaatgaaggaaaaagcacgacagcgggc

SEQ ID NO: 1446 - DNA, 50 bp, synthetic construct
  source 1..50: mol_type = other DNA
agacaagcaaaaagagctttggctggagccagagctgttggcgcttatcc

SEQ ID NO: 1447 - DNA, 50 bp, synthetic construct
  source 1..50: mol_type = other DNA
gctcgcagtgacctacggcaccgcgatcggtggcggaggtttcgaacgcg

SEQ ID NO: 1448 - DNA, 50 bp, synthetic construct
  source 1..50: mol_type = other DNA
tcgcggccgcacacgaggccgaagcgcatcggcctcgccgccgccagcga

SEQ ID NO: 1449 - DNA, 50 bp, synthetic construct
  source 1..50: mol_type = other DNA
aatttgatttagaggtgtagtaaaatgttactacaccctataaaataaat

SEQ ID NO: 1450 - DNA, 50 bp, synthetic construct
  source 1..50: mol_type = other DNA
gccggaattcatattcctcccaggtacctgggaggaatggctataccgga

SEQ ID NO: 1451 - DNA, 50 bp, synthetic construct
  source 1..50: mol_type = other DNA
agcagccataaatctctagcaaaataccatagaaagtattaatgggtatt

SEQ ID NO: 1452 - DNA, 50 bp, synthetic construct
  source 1..50: mol_type = other DNA
aagaccggggaaaagcctgctccgccaggggcatcgggaatccgcttctt

SEQ ID NO: 1453 - DNA, 50 bp, synthetic construct
  source 1..50: mol_type = other DNA
ttccacacaagtgtaacacttgtgatcacaacttctacccccatttggaa

SEQ ID NO: 1454 - DNA, 50 bp, synthetic construct
  source 1..50: mol_type = other DNA
aagttttcctccattttttaaaattatgtttaaaaatgaatttaaagaca

SEQ ID NO: 1455 - DNA, 50 bp, synthetic construct
  source 1..50: mol_type = other DNA
tttatacaacctcactcattttcaacagtaaaagagagattttgtataaa

SEQ ID NO: 1456 - DNA, 50 bp, synthetic construct
  source 1..50: mol_type = other DNA
ggtgttccggcgcgaggacctggccggccagaggcgggagccgcaaaccc

SEQ ID NO: 1457 - DNA, 50 bp, synthetic construct
  source 1..50: mol_type = other DNA
cttcggcatcaggcagcctcgtggatcctcggggctgattgggtaggtga

SEQ ID NO: 1458 - DNA, 50 bp, synthetic construct
  source 1..50: mol_type = other DNA
tgagctcaatatcgcctgatggcggcccacatcagccaatatctgccgag

SEQ ID NO: 1459 - DNA, 50 bp, synthetic construct
  source 1..50: mol_type = other DNA
gcgaaatcctgagcttttccagcacgtgctgtcccgattccgcatcaccg

SEQ ID NO: 1460 - DNA, 50 bp, synthetic construct
  source 1..50: mol_type = other DNA
gtacaataaagcaccattgcaacataaaatgaaaaaatgctttatctatc

SEQ ID NO: 1461 - DNA, 50 bp, synthetic construct
  source 1..50: mol_type = other DNA
cattgggcgcgacacccgcggcgacgtttacgcgggtatcgcgcaatcct

SEQ ID NO: 1462 - DNA, 50 bp, synthetic construct
  source 1..50: mol_type = other DNA
agaaacttgtcgagtacgccatcgccggacggcgtggtcgatccgtccgg

SEQ ID NO: 1463 - DNA, 50 bp, synthetic construct
  source 1..50: mol_type = other DNA
agccatggaggatcataaaaatcaatgcaattttatataccattatgggc

SEQ ID NO: 1464 - DNA, 50 bp, synthetic construct
  source 1..50: mol_type = other DNA
agacccgttgtagagcgacacactatccggcaatcttcagcatcggcttc

SEQ ID NO: 1465 - DNA, 50 bp, synthetic construct
  source 1..50: mol_type = other DNA
gccgtgcggacaattcggcgcaggctcatgccctggcttgacgaactggt

SEQ ID NO: 1466 - DNA, 50 bp, synthetic construct
  source 1..50: mol_type = other DNA
ttcatttgcgcatgctcctttcttaaaaagaaggggatggaaggttggat

SEQ ID NO: 1467 - DNA, 50 bp, synthetic construct
  source 1..50: mol_type = other DNA
cggcgtctcctggctggccgcttcgcagcagggccagacgggcacgcaag

SEQ ID NO: 1468 - DNA, 50 bp, synthetic construct
  source 1..50: mol_type = other DNA
accttcaggttatgagcctgacgagcgggtcaggcgcagatcctgcgtgt

SEQ ID NO: 1469 - DNA, 50 bp, synthetic construct
  source 1..50: mol_type = other DNA
agtcgtttataggtaatatgaaggatccttgcaataacatataataggtt

SEQ ID NO: 1470 - DNA, 50 bp, synthetic construct
  source 1..50: mol_type = other DNA
tggccgggaaactcgatgctcacccgggtctgcatcggaacccagtccgg

SEQ ID NO: 1471 - DNA, 50 bp, synthetic construct
  source 1..50: mol_type = other DNA
caactgagaggcacgtcacgttgaggcggccgtgagcagcgcgtccgcgc

SEQ ID NO: 1472 - DNA, 50 bp, synthetic construct
  source 1..50: mol_type = other DNA
ccgcggcggcgagtccgagctgaccatccgccggctggccgccgtggcgt

SEQ ID NO: 1473 - DNA, 50 bp, synthetic construct
  source 1..50: mol_type = other DNA
gcgatcctgtctcgaaacggggcgcggccaacgacaatcggccggaccgc

SEQ ID NO: 1474 - DNA, 50 bp, synthetic construct
  source 1..50: mol_type = other DNA
atattgcagtgtttttttaactaaaagaagttaaagtaaacgattcatta

SEQ ID NO: 1475 - DNA, 50 bp, synthetic construct
  source 1..50: mol_type = other DNA
atcgctgtcaccgcacgacccgaggctttgggtagtgcggagtcagcctg

SEQ ID NO: 1476 - DNA, 50 bp, synthetic construct
  source 1..50: mol_type = other DNA
ttcatcttttgaaactttactgttatatatataatttttagaaaaatgaa

SEQ ID NO: 1477 - DNA, 50 bp, synthetic construct
  source 1..50: mol_type = other DNA
aaggtggtgtaaataatggctaaagttgaaggtattatcagtgccggttt

SEQ ID NO: 1478 - DNA, 50 bp, synthetic construct
  source 1..50: mol_type = other DNA
atttctctttcatcatctgtaccatatgtcaattgtgatgaaagataatc

SEQ ID NO: 1479 - DNA, 50 bp, synthetic construct
  source 1..50: mol_type = other DNA
cattgtcttttcctcctttctttttataaaataaggtctaaaagacaact

SEQ ID NO: 1480 - DNA, 50 bp, synthetic construct
  source 1..50: mol_type = other DNA
cggaccacgtgggtgtcctgcccgatcgggcaggaagggcaccgtcaggg

SEQ ID NO: 1481 - DNA, 50 bp, synthetic construct
  source 1..50: mol_type = other DNA
ctttcaattctttattattatataaattaatcataaaaaaatattgaaaa

SEQ ID NO: 1482 - DNA, 50 bp, synthetic construct
  source 1..50: mol_type = other DNA
aaatatcaaaggaagttatgccatatatggcttaagctatcttcattcat

SEQ ID NO: 1483 - DNA, 50 bp, synthetic construct
  source 1..50: mol_type = other DNA
tagacgaaaaagaagctcaaaaagtggtttttgagcgtgattttgctgtt

SEQ ID NO: 1484 - DNA, 50 bp, synthetic construct
  source 1..50: mol_type = other DNA
tatatgtaagcaaggtatcttagttaactgggatacccagcttacaaaat

SEQ ID NO: 1485 - DNA, 50 bp, synthetic construct
  source 1..50: mol_type = other DNA
tttactgttagaaaatttaataaaaaattattaaaagagttaaaagtaaa

SEQ ID NO: 1486 - DNA, 50 bp, synthetic construct
  source 1..50: mol_type = other DNA
gctggcgttcttcatctctgagtgcggcctcggagatcaaggacgccgag

SEQ ID NO: 1487 - DNA, 50 bp, synthetic construct
  source 1..50: mol_type = other DNA
acgagctggcggcacagatcgggtatacccgatcttcgcccggtaatccg

SEQ ID NO: 1488 - DNA, 50 bp, synthetic construct
  source 1..50: mol_type = other DNA
agtatgctggaacatattaatggcaagccatgtatataatatttcaacca

SEQ ID NO: 1489 - DNA, 50 bp, synthetic construct
  source 1..50: mol_type = other DNA
caatatttatatccttatctgttgtgcaacagataaagcattattatata

SEQ ID NO: 1490 - DNA, 50 bp, synthetic construct
  source 1..50: mol_type = other DNA
aaaatggaattcatgtaaatgaggaagcatattaacatgaattcggtgtt

SEQ ID NO: 1491 - DNA, 50 bp, synthetic construct
  source 1..50: mol_type = other DNA
ttcaatactgaaagaacctccgtcatgacgttggagtactcataaatgaa

SEQ ID NO: 1492 - DNA, 50 bp, synthetic construct
  source 1..50: mol_type = other DNA
acctgttggcgaacgccgtgaaacacgtcaggcggcgttcacttccaggg

SEQ ID NO: 1493 - DNA, 50 bp, synthetic construct
  source 1..50: mol_type = other DNA
gtattccctactttttaacactaaattatatgcgaaaagtcagcaaatta

SEQ ID NO: 1494 - DNA, 50 bp, synthetic construct
  source 1..50: mol_type = other DNA
cgataaaaataacattatcgacgtcacgctcgatgatgccacacttctgc

SEQ ID NO: 1495 - DNA, 50 bp, synthetic construct
  source 1..50: mol_type = other DNA
ttcgttaaaaggttttattgctaacattgataataaaattgaggaacttg

SEQ ID NO: 1496 - DNA, 50 bp, synthetic construct
  source 1..50: mol_type = other DNA
atattttatctaacttttatcattcaaatagtaaaagttagataaaaaag

SEQ ID NO: 1497 - DNA, 50 bp, synthetic construct
  source 1..50: mol_type = other DNA
aactatattttttaaatctatattataatagtgtaaaaaaattaaaagaa

SEQ ID NO: 1498 - DNA, 50 bp, synthetic construct
  source 1..50: mol_type = other DNA
ctttgtgcaaaaattagacaacactgagtttatctggccgttcgcgctgc

SEQ ID NO: 1499 - DNA, 50 bp, synthetic construct
  source 1..50: mol_type = other DNA
agcatccgttgatgcgcccgctggctccagcgggcgttctacgcggctca

SEQ ID NO: 1500 - DNA, 50 bp, synthetic construct
  source 1..50: mol_type = other DNA
tggcgctcctgacgctctcacagccggctgctgggcgaggcggcggacca

SEQ ID NO: 1501 - DNA, 50 bp, synthetic construct
  source 1..50: mol_type = other DNA
ttacatttgcagcaaatatagtgaatcagctctataggctgtaagatact

SEQ ID NO: 1502 - DNA, 50 bp, synthetic construct
  source 1..50: mol_type = other DNA
tataagaatatgctgttttcattttggcatcaaaaattcatgagtataaa

SEQ ID NO: 1503 - DNA, 50 bp, synthetic construct
  source 1..50: mol_type = other DNA
accattatcaaagataatagtttcgaaaaattggtatcctatcaaactgt

SEQ ID NO: 1504 - DNA, 50 bp, synthetic construct
  source 1..50: mol_type = other DNA
ataagagttattcaaccgattgttcatagaggccgttgaataaatgagca

SEQ ID NO: 1505 - DNA, 50 bp, synthetic construct
  source 1..50: mol_type = other DNA
tagctggataatgtttttcatttttagacatgaaaaaagttatcacgata

SEQ ID NO: 1506 - DNA, 50 bp, synthetic construct
  source 1..50: mol_type = other DNA
tatttaatatgtattacatttgtcataaaatattttatacattttaattc

SEQ ID NO: 1507 - DNA, 50 bp, synthetic construct
  source 1..50: mol_type = other DNA
ccaacggtacttgttaaatcattatcgttttatttaacaagtacattgat

SEQ ID NO: 1508 - DNA, 50 bp, synthetic construct
  source 1..50: mol_type = other DNA
taaagggtttataaaggaacagccaaagctaggcctttgtaaacctattt

SEQ ID NO: 1509 - DNA, 50 bp, synthetic construct
  source 1..50: mol_type = other DNA
tttgtgcctcgaagtatgattggttctcctattgtacttcgaggcacgat

SEQ ID NO: 1510 - DNA, 50 bp, synthetic construct
  source 1..50: mol_type = other DNA
ttccctataagaaaacgaaatagcttattatatcattctttactggttga

SEQ ID NO: 1511 - DNA, 50 bp, synthetic construct
  source 1..50: mol_type = other DNA
ctagcacaggatggccagagttctcgagcaccgtggccatcgtgggcacc

SEQ ID NO: 1512 - DNA, 50 bp, synthetic construct
  source 1..50: mol_type = other DNA
ccacctcgtatccgaatgtgctggtcgcagaacatttggaaacgaggtga

SEQ ID NO: 1513 - DNA, 50 bp, synthetic construct
  source 1..50: mol_type = other DNA
ccaaattcaaaaaataaaacaaaaatattagtttttttgttagagttgct

SEQ ID NO: 1514 - DNA, 50 bp, synthetic construct
  source 1..50: mol_type = other DNA
ggctctcacaagaaagaacagaggaataatacctcttgtttctgaggcta

SEQ ID NO: 1515 - DNA, 50 bp, synthetic construct
  source 1..50: mol_type = other DNA
aattaatcgtggtctccttttactatagtaaggggtgattatcataaaac

SEQ ID NO: 1516 - DNA, 50 bp, synthetic construct
  source 1..50: mol_type = other DNA
cggtcatcggaggggcgcatggtagccaacaagcgcctggccttcgaccg

SEQ ID NO: 1517 - DNA, 50 bp, synthetic construct
  source 1..50: mol_type = other DNA
gcgtggacaagtattcctaacgagcactttttaggagtacttgtgcgact

SEQ ID NO: 1518 - DNA, 50 bp, synthetic construct
  source 1..50: mol_type = other DNA
ttgctagttactaagagttttagatatctaaaactcttgattttttgcct

SEQ ID NO: 1519 - DNA, 50 bp, synthetic construct
  source 1..50: mol_type = other DNA
tctccttcatttagagcattcaatatggagcaaaatctaagagaaggagt

SEQ ID NO: 1520 - DNA, 50 bp, synthetic construct
  source 1..50: mol_type = other DNA
cggcgcgtcgtcgaaatccacgacgcgtcgtcttcttctgaccaaagact

SEQ ID NO: 1521 - DNA, 50 bp, synthetic construct
  source 1..50: mol_type = other DNA
taattagcttaaaagtgttgtgtaattacacagcatttttatggtaaact

SEQ ID NO: 1522 - DNA, 50 bp, synthetic construct
  source 1..50: mol_type = other DNA
tctcaagttctttcaaatactttaaagaaatcctcagtttgatgctgagg

SEQ ID NO: 1523 - DNA, 50 bp, synthetic construct
  source 1..50: mol_type = other DNA
aaattgcaaaagaagccgctatagttgagcttcagcttctttataattta

SEQ ID NO: 1524 - DNA, 50 bp, synthetic construct
  source 1..50: mol_type = other DNA
acttcacctgcaatatggaaaaattattatatccgcattgcaggaaaata

SEQ ID NO: 1525 - DNA, 50 bp, synthetic construct
  source 1..50: mol_type = other DNA
gacacctgacacgctttcctcaggcgtatgcggatagtatgtcagcatgg

SEQ ID NO: 1526 - DNA, 50 bp, synthetic construct
  source 1..50: mol_type = other DNA
gttttgagaatacaacagttaactgccattaacaagcgatttatcaaaac

SEQ ID NO: 1527 - DNA, 50 bp, synthetic construct
  source 1..50: mol_type = other DNA
tgtggaagataataaaagtgctggggctcccatgtttctggtctttgaca

SEQ ID NO: 1528 - DNA, 50 bp, synthetic construct
  source 1..50: mol_type = other DNA
tctctgacctgcaccgctatagtcatactggcggcgaggcacagcgaggg

SEQ ID NO: 1529 - DNA, 50 bp, synthetic construct
  source 1..50: mol_type = other DNA
agtcttttttatataattcacaactagtcattatttttttatgaaattat

SEQ ID NO: 1530 - DNA, 50 bp, synthetic construct
  source 1..50: mol_type = other DNA
aacaaattaaacaagcggattttcataatgatctttgtcactaaattgtc

SEQ ID NO: 1531 - DNA, 50 bp, synthetic construct
  source 1..50: mol_type = other DNA
ccttcggcccccgctggcgcggcagcccgcgcgcccttacaagccgcagg

SEQ ID NO: 1532 - DNA, 50 bp, synthetic construct
  source 1..50: mol_type = other DNA
gctgcggtggtcatagaacaaaggtacctcagttacggttgctagctcgg

SEQ ID NO: 1533 - DNA, 50 bp, synthetic construct
  source 1..50: mol_type = other DNA
cagtcctgctgatgaaatgaaccgaaaatttcagttccacacaagcggta

SEQ ID NO: 1534 - DNA, 50 bp, synthetic construct
  source 1..50: mol_type = other DNA
ttcctcacggcggaacccggcgggatctcgccgcgatcctggacgaggat

SEQ ID NO: 1535 - DNA, 50 bp, synthetic construct
  source 1..50: mol_type = other DNA
aaattaatcgtaatgttaaagctattaaattttgacattcttcttttaac

SEQ ID NO: 1536 - DNA, 50 bp, synthetic construct
  source 1..50: mol_type = other DNA
atatataatgaaactaacaccataaatctggtcatagagtcattatatta

SEQ ID NO: 1537 - DNA, 50 bp, synthetic construct
  source 1..50: mol_type = other DNA
ttcagctcctggtgcagcttggcaattctcaatgtttctaatgagatgaa

SEQ ID NO: 1538 - DNA, 50 bp, synthetic construct
  source 1..50: mol_type = other DNA
tgtctgccggcggtcagctgaaaaagtatccagacgaccttcagcaccat

SEQ ID NO: 1539 - DNA, 50 bp, synthetic construct
  source 1..50: mol_type = other DNA
gcaaccagcgacgccccgatgatggccatcgcccaatcacttgaaattgc

SEQ ID NO: 1540 - DNA, 50 bp, synthetic construct
  source 1..50: mol_type = other DNA
ggtcttgatttagctttgcaagtttgaacttgtagaagtcaatcagtttt

SEQ ID NO: 1541 - DNA, 50 bp, synthetic construct
  source 1..50: mol_type = other DNA
atgttgtaataagcgttacacactcaagtgtgttatgcttatacaaacaa

SEQ ID NO: 1542 - DNA, 50 bp, synthetic construct
  source 1..50: mol_type = other DNA
caccaccatggtctagttttgcgctggcgtaaaaccggtctatggtggtg

SEQ ID NO: 1543 - DNA, 50 bp, synthetic construct
  source 1..50: mol_type = other DNA
caaaagcctcctgtcattgcggtgatgaacgcaatgagtggcactttttg

SEQ ID NO: 1544 - DNA, 50 bp, synthetic construct
  source 1..50: mol_type = other DNA
ggatggcctgcacccgcgcgcgggaatcgcggcgctggtagccgccattg

SEQ ID NO: 1545 - DNA, 50 bp, synthetic construct
  source 1..50: mol_type = other DNA
gccgggctggccgtgccccggcagaagggcacccgcacctccagcccgga

SEQ ID NO: 1546 - DNA, 50 bp, synthetic construct
  source 1..50: mol_type = other DNA
ttcgaacccctgacctcctccttgcacacgcagggggtcagtggttcaaa

SEQ ID NO: 1547 - DNA, 50 bp, synthetic construct
  source 1..50: mol_type = other DNA
tattcgcatattggtatatcatctaaagattacatctggatatgttgaaa

SEQ ID NO: 1548 - DNA, 50 bp, synthetic construct
  source 1..50: mol_type = other DNA
ggagggtgcgctggacgtcctggtcggcaaggcccgtcagccgaccttcc

SEQ ID NO: 1549 - DNA, 50 bp, synthetic construct
  source 1..50: mol_type = other DNA
taataatattaagtacctttcattgaaatgactaatacttaatattattt

SEQ ID NO: 1550 - DNA, 50 bp, synthetic construct
  source 1..50: mol_type = other DNA
cgagccagttccacagtgctgaggcccctcagaacacggggcggcgctgg

SEQ ID NO: 1551 - DNA, 50 bp, synthetic construct
  source 1..50: mol_type = other DNA
acgctatcacagcccaggtccttgatgccgcgcatgggcggcgacgaact

SEQ ID NO: 1552 - DNA, 50 bp, synthetic construct
  source 1..50: mol_type = other DNA
gtgcaatgttggttgccactgccccggcgtactcatcgccaacatgctcg

SEQ ID NO: 1553 - DNA, 50 bp, synthetic construct
  source 1..50: mol_type = other DNA
tgaaggcggacaggtcgttgtccacgtggagtggctctgtgcccgcttcg

SEQ ID NO: 1554 - DNA, 50 bp, synthetic construct
  source 1..50: mol_type = other DNA
ttggtcgggtgatatgcccttacatatggctcatcatttcaccaaccttt

SEQ ID NO: 1555 - DNA, 50 bp, synthetic construct
  source 1..50: mol_type = other DNA
gaaaagaatatccatatacaggtaagttgctgtccatggatttgctaaag

SEQ ID NO: 1556 - DNA, 50 bp, synthetic construct
  source 1..50: mol_type = other DNA
gcttcatcttcctgttcatcctcttcagatgatgaagcgacggaggaagc

SEQ ID NO: 1557 - DNA, 50 bp, synthetic construct
  source 1..50: mol_type = other DNA
ccccaaggcccgatcaccacggtggtcgcgatggtgatcggcaacggcca

SEQ ID NO: 1558 - DNA, 50 bp, synthetic construct
  source 1..50: mol_type = other DNA
agtgcatcggccgaacggttatgcgcgcataaacgttcggacgctgcacc

SEQ ID NO: 1559 - DNA, 50 bp, synthetic construct
  source 1..50: mol_type = other DNA
cttttagactgctgaacgtcagactgacctgacacatagcagtttagtta

SEQ ID NO: 1560 - DNA, 50 bp, synthetic construct
  source 1..50: mol_type = other DNA
tactttaatttagcatagctaatggttcttagtacagctaaaataaagta

SEQ ID NO: 1561 - DNA, 50 bp, synthetic construct
  source 1..50: mol_type = other DNA
ttaacaggtctcttagaaaaccgaattcggcattgtagcattagccataa

SEQ ID NO: 1562 - DNA, 50 bp, synthetic construct
  source 1..50: mol_type = other DNA
atctatataatccccggcattgtgagcacaataccggagataatgcagcc

SEQ ID NO: 1563 - DNA, 50 bp, synthetic construct
  source 1..50: mol_type = other DNA
ttgtgtaacgctttccgtaatgatctacctataccgaaggtactccacat

SEQ ID NO: 1564 - DNA, 50 bp, synthetic construct
  source 1..50: mol_type = other DNA
aactgagagcggattaaagagttttaaaactcttcaatccactatcggtc

SEQ ID NO: 1565 - DNA, 50 bp, synthetic construct
  source 1..50: mol_type = other DNA
agggaccgccctccgcgtagtgcacgtcaagatgatcgaggcgaacgccg

SEQ ID NO: 1566 - DNA, 50 bp, synthetic construct
  source 1..50: mol_type = other DNA
atctcctgggtcgtttgtgttcaccggtgaacacaaacgacccaggagat

SEQ ID NO: 1567 - DNA, 50 bp, synthetic construct
  source 1..50: mol_type = other DNA
taagtcatttaaatcatcacctaatcggaggtgagcaagttcatgactgt

SEQ ID NO: 1568 - DNA, 50 bp, synthetic construct
  source 1..50: mol_type = other DNA
taatatctacatgtacatacccctttagcgatatgtacgtgtaggcattg

SEQ ID NO: 1569 - DNA, 50 bp, synthetic construct
  source 1..50: mol_type = other DNA
aaaagaaaacttacgaaaattatgtagatatatattttaagtttgcttca

SEQ ID NO: 1570 - DNA, 50 bp, synthetic construct
  source 1..50: mol_type = other DNA
tttgtagaactcttgaacaatcaagtatggttgatccaacgatctacatt

SEQ ID NO: 1571 - DNA, 50 bp, synthetic construct
  source 1..50: mol_type = other DNA
tgaggcaccgggaccgttaggcactagcatgcaacgcatgacctcactcc

SEQ ID NO: 1572 - DNA, 50 bp, synthetic construct
  source 1..50: mol_type = other DNA
ccagacattgagttttcctttcggctttgaaaataaagctttaatacttt

SEQ ID NO: 1573 - DNA, 50 bp, synthetic construct
  source 1..50: mol_type = other DNA
ctaagggtcgggaacgtcttccatgtggtgaaggcgtccgcgtcaccgaa

SEQ ID NO: 1574 - DNA, 50 bp, synthetic construct
  source 1..50: mol_type = other DNA
aattaaccaatttcttacactaactatagaaagttataatgaggttaatg

SEQ ID NO: 1575 - DNA, 50 bp, synthetic construct
  source 1..50: mol_type = other DNA
ttagtgtacaactgcgcaaccctagtaaggcttgcgcgttggtacacccc

SEQ ID NO: 1576 - DNA, 50 bp, synthetic construct
  source 1..50: mol_type = other DNA
aacgaatgtgcattcgtttttaaatatataaatcgtatcagcaaacactt

SEQ ID NO: 1577 - DNA, 50 bp, synthetic construct
  source 1..50: mol_type = other DNA
cacaggttaaacgctaccgtcttgatcaagtcggacgtataatacctgca

SEQ ID NO: 1578 - DNA, 50 bp, synthetic construct
  source 1..50: mol_type = other DNA
gccgccctggttctcgccgcctgcgggcagacggccatgacccgcgtcgc

SEQ ID NO: 1579 - DNA, 50 bp, synthetic construct
  source 1..50: mol_type = other DNA
tcacaacttgtaatagtgttggtaattaccaacactataacagaatgaat

SEQ ID NO: 1580 - DNA, 50 bp, synthetic construct
  source 1..50: mol_type = other DNA
ttttgggttaatggtccatttcctctagtaaatgtattattaacccaaaa

SEQ ID NO: 1581 - DNA, 50 bp, synthetic construct
  source 1..50: mol_type = other DNA
ccttttacatctgtacgggcttggaagcaggcacgtacggttgtaaaagg

SEQ ID NO: 1582 - DNA, 50 bp, synthetic construct
  source 1..50: mol_type = other DNA
gcgtagatcacggcggtcatggttgcaaccatgaccgccgtgatctacgc

SEQ ID NO: 1583 - DNA, 50 bp, synthetic construct
  source 1..50: mol_type = other DNA
ttatgcttaaagtattcaataaatattgaccttgaatactgtaaccatcc

SEQ ID NO: 1584 - DNA, 50 bp, synthetic construct
  source 1..50: mol_type = other DNA
cagcattacttcccaaagagaaatctttttctcaatgggaaagactatcc

SEQ ID NO: 1585 - DNA, 50 bp, synthetic construct
  source 1..50: mol_type = other DNA
ttttatttgtgtgtgattgaaagcatattttcaagtacgcacaaaaaaat

SEQ ID NO: 1586 - DNA, 50 bp, synthetic construct
  source 1..50: mol_type = other DNA
taaggcaagaatactagtgctttattgacagccctatgatggttaccact

SEQ ID NO: 1587 - DNA, 50 bp, synthetic construct
  source 1..50: mol_type = other DNA
aatattctaacacaaaaaaagctccggagctataacgcaggaagagtacg

SEQ ID NO: 1588 - DNA, 50 bp, synthetic construct
  source 1..50: mol_type = other DNA
acccggacatcgtcgaccgccacggctctgacctgcgaatatgtccggca

SEQ ID NO: 1589 - DNA, 50 bp, synthetic construct
  source 1..50: mol_type = other DNA
acgtaggccacgctcggcacgagggccctggtgcgcggctcggactgatc

SEQ ID NO: 1590 - DNA, 50 bp, synthetic construct
  source 1..50: mol_type = other DNA
agcagtgtgtgggcgagcacgtgcgccgtcgagcgcggccacggcctggt

SEQ ID NO: 1591 - DNA, 50 bp, synthetic construct
  source 1..50: mol_type = other DNA
ctagcgcgcaacggctctatagcagctgtcatagtgcggcagcgtttcta

SEQ ID NO: 1592 - DNA, 50 bp, synthetic construct
  source 1..50: mol_type = other DNA
gctcaggctcggggcgacgctgctgcgaccgcgacggcggctgcatcgac

SEQ ID NO: 1593 - DNA, 50 bp, synthetic construct
  source 1..50: mol_type = other DNA
ggggaggccctggcatgaggcgcacgttcgcctcatgcacagaacgcccc

SEQ ID NO: 1594 - DNA, 50 bp, synthetic construct
  source 1..50: mol_type = other DNA
attgacgatgatgggggagtaacagctgttcctccggcacgatctccaac

SEQ ID NO: 1595 - DNA, 50 bp, synthetic construct
  source 1..50: mol_type = other DNA
aggaattaataaaagtggacatatacatatgtccataataaatgaaaggc

SEQ ID NO: 1596 - DNA, 50 bp, synthetic construct
  source 1..50: mol_type = other DNA
ccatcggaggacgcaaatggagcaacttcttcataaccctccacagatgg

SEQ ID NO: 1597 - DNA, 50 bp, synthetic construct
  source 1..50: mol_type = other DNA
gattcctgccatactgtaaaacctcctggtctgtcagcgtacaacattct

SEQ ID NO: 1598 - DNA, 50 bp, synthetic construct
  source 1..50: mol_type = other DNA
ctaaatttagccgttttttacacttaataaaaaaacacactcgaaagtgt

SEQ ID NO: 1599 - DNA, 50 bp, synthetic construct
  source 1..50: mol_type = other DNA
tccgtattctccatcttggttagatacaatattaatttcggaaatataac

SEQ ID NO: 1600 - DNA, 50 bp, synthetic construct
  source 1..50: mol_type = other DNA
gcagcggttccaggatgccggcgccgggagaatcatcctggactgccacc

SEQ ID NO: 1601 - DNA, 50 bp, synthetic construct
  source 1..50: mol_type = other DNA
acgtacactttagtctcatccgcggtgccgagtgtgaccaaagtgtaagc

SEQ ID NO: 1602 - DNA, 50 bp, synthetic construct
  source 1..50: mol_type = other DNA
tttttttccaagaagaattgatattcccatcctttgcaattggaaggact

SEQ ID NO: 1603 - DNA, 50 bp, synthetic construct
  source 1..50: mol_type = other DNA
cccacgaacaagaaataaggtagtgcacaattgaatttcttcgtatcgcg

SEQ ID NO: 1604 - DNA, 50 bp, synthetic construct
  source 1..50: mol_type = other DNA
ttagtaagtgatcagcagttcgcctgggcgcactcccgatcaagccacat

SEQ ID NO: 1605 - DNA, 50 bp, synthetic construct
  source 1..50: mol_type = other DNA
tatagaaaaagaaattattgaaaacgtttttaatccttgacaattctaaa

SEQ ID NO: 1606 - DNA, 50 bp, synthetic construct
  source 1..50: mol_type = other DNA
ctgcggggatacccggagtatgccgccggccacgccgcgtatcaccggcc

SEQ ID NO: 1607 - DNA, 50 bp, synthetic construct
  source 1..50: mol_type = other DNA
gaatagccttaggcctcagctgcccgggacgctgggcgcgtttgccactc

SEQ ID NO: 1608 - DNA, 50 bp, synthetic construct
  source 1..50: mol_type = other DNA
taaagtctcttttttttgcggtgttaaccaagactgatgcgtcagtactt

SEQ ID NO: 1609 - DNA, 50 bp, synthetic construct
  source 1..50: mol_type = other DNA
ggctcgtcgtctggaccgcgcccacgtggtgccacaccttccttggagca

SEQ ID NO: 1610 - DNA, 50 bp, synthetic construct
  source 1..50: mol_type = other DNA
ctgagggttagcagcggggcaattgagtttgccccgcgtggttgcgatgg

SEQ ID NO: 1611 - DNA, 50 bp, synthetic construct
  source 1..50: mol_type = other DNA
gtgggcgcctgctggccttgctcgatcaggacgcaccagatggcgatcac

SEQ ID NO: 1612 - DNA, 50 bp, synthetic construct
  source 1..50: mol_type = other DNA
catcctaacattaccgacttcatcccgatatagtcggcactgttgggata

SEQ ID NO: 1613 - DNA, 50 bp, synthetic construct
  source 1..50: mol_type = other DNA
tttatggattataagaggtttattgggcaaaacctcttgaaatacataaa

SEQ ID NO: 1614 - DNA, 50 bp, synthetic construct
  source 1..50: mol_type = other DNA
cgggcacgacatccatgcgctgctcctcgaggccatcgacgtgacccccg

SEQ ID NO: 1615 - DNA, 50 bp, synthetic construct
  source 1..50: mol_type = other DNA
ttatttgccatacgccttagccgagctcgtatacatcgctaggcaaataa

SEQ ID NO: 1616 - DNA, 50 bp, synthetic construct
  source 1..50: mol_type = other DNA
taatgtaagggactaaaaccgcatcctcctggttctactccctaaaattc

SEQ ID NO: 1617 - DNA, 50 bp, synthetic construct
  source 1..50: mol_type = other DNA
atttaaaatccattttccatcgaacgttcgctgtaaaatggaattctcca

SEQ ID NO: 1618 - DNA, 50 bp, synthetic construct
  source 1..50: mol_type = other DNA
atggtgtaaaccactacattcgagtactcgaatgttagttattacaccca

SEQ ID NO: 1619 - DNA, 50 bp, synthetic construct
  source 1..50: mol_type = other DNA
gcgccaagaaggtgggggcgcgtccgtggacttccctacctgcgtggcgc

SEQ ID NO: 1620 - DNA, 50 bp, synthetic construct
  source 1..50: mol_type = other DNA
aagggttacatatgaaattgttgggagcaagtgttttctaagtaacccat

SEQ ID NO: 1621 - DNA, 50 bp, synthetic construct
  source 1..50: mol_type = other DNA
tatccctattaatctgttggaatatattatccagcaaattagtattgatc

SEQ ID NO: 1622 - DNA, 50 bp, synthetic construct
  source 1..50: mol_type = other DNA
ggccgagcgtcaagccgagcctgccgactatctgcgcttcccgctcggcg

SEQ ID NO: 1623 - DNA, 50 bp, synthetic construct
  source 1..50: mol_type = other DNA
tcacggcccgcggcaggcgccgccggggcggcccgcactgcgggccgttt

SEQ ID NO: 1624 - DNA, 50 bp, synthetic construct
  source 1..50: mol_type = other DNA
gtcgacgcgctcatggaccgccagatccggcgcaagatgtagtagtctgc

SEQ ID NO: 1625 - DNA, 50 bp, synthetic construct
  source 1..50: mol_type = other DNA
tagctattttcataatatacctccaaggagggatatcgtgaaaataggtg

SEQ ID NO: 1626 - DNA, 50 bp, synthetic construct
  source 1..50: mol_type = other DNA
gtagggacatcgggctgatgggcatggcaccatcagcattctgtcttcta

SEQ ID NO: 1627 - DNA, 50 bp, synthetic construct
  source 1..50: mol_type = other DNA
atttcgtttatttcaatcaaggtaaatactgataattgccaacacaatta

SEQ ID NO: 1628 - DNA, 50 bp, synthetic construct
  source 1..50: mol_type = other DNA
atactgataaacaaataaaaaagccataacgttaaattgtttatcagttt

SEQ ID NO: 1629 - DNA, 50 bp, synthetic construct
  source 1..50: mol_type = other DNA
ccgctcggtcgagctggagatcaccggtgatcgggtcgacgacctcgggg

SEQ ID NO: 1630 - DNA, 50 bp, synthetic construct
  source 1..50: mol_type = other DNA
cgctacatcttgaggggtctgctgtccggcaggtccctctttatgtagca

SEQ ID NO: 1631 - DNA, 50 bp, synthetic construct
  source 1..50: mol_type = other DNA
ttatgtcctgctatcatttgtatatcgatataaatgctgttattactcaa

SEQ ID NO: 1632 - DNA, 50 bp, synthetic construct
  source 1..50: mol_type = other DNA
attaacataaataggtatatcgtcatgacattttaactattcaaatggaa

SEQ ID NO: 1633 - DNA, 50 bp, synthetic construct
  source 1..50: mol_type = other DNA
ccaatgagattaattatcatgtgtgcacggatgataattaatatcaactg

SEQ ID NO: 1634 - DNA, 50 bp, synthetic construct
  source 1..50: mol_type = other DNA
aaaagaacaaataaggtgatgctgatcagaatcactttctttgatcattt

SEQ ID NO: 1635 - DNA, 50 bp, synthetic construct
  source 1..50: mol_type = other DNA
acccaattaaatcaccttcactttcgaagatgaagtagataaaattaagg

SEQ ID NO: 1636 - DNA, 50 bp, synthetic construct
  source 1..50: mol_type = other DNA
ctttatggtaatagttaaaaagaaaacaatcgttgactgttacgaccaaa

SEQ ID NO: 1637 - DNA, 50 bp, synthetic construct
  source 1..50: mol_type = other DNA
agtcagcctagggggaatcctctctagagaggatattgccaaggttctta

SEQ ID NO: 1638 - DNA, 50 bp, synthetic construct
  source 1..50: mol_type = other DNA
ggcaagccttggtgtcggcctgcgcatccaggccgtcagcgaggcgctgc

SEQ ID NO: 1639 - DNA, 50 bp, synthetic construct
  source 1..50: mol_type = other DNA
ctgctgtgtcgccgagttcttgactccacaagaagcgcacgactgtccaa

SEQ ID NO: 1640 - DNA, 50 bp, synthetic construct
  source 1..50: mol_type = other DNA
gctgaactcctttcttcaattcctatcagcatataaatttggactttttc

SEQ ID NO: 1641 - DNA, 50 bp, synthetic construct
  source 1..50: mol_type = other DNA
cttatatattccggaaggatgattataattttggagtgtgattagctatg

SEQ ID NO: 1642 - DNA, 50 bp, synthetic construct
  source 1..50: mol_type = other DNA
gttttcatcaattcaactcctttctaggaactacccatgaatatttaata

SEQ ID NO: 1643 - DNA, 50 bp, synthetic construct
  source 1..50: mol_type = other DNA
cggcgtaaagtgtttacatgtttcttggaactgtgatatgatttacgcca

SEQ ID NO: 1644 - DNA, 50 bp, synthetic construct
  source 1..50: mol_type = other DNA
taccttattactattaacttctatatatataagttaagattatcactatt

SEQ ID NO: 1645 - DNA, 50 bp, synthetic construct
  source 1..50: mol_type = other DNA
agcattttggtattgataggtgaagcacccactaacattaccggagctct

SEQ ID NO: 1646 - DNA, 50 bp, synthetic construct
  source 1..50: mol_type = other DNA
ttaggcgtcccctatacatgctcgccacagcatgtacaggtgacgcctag

SEQ ID NO: 1647 - DNA, 50 bp, synthetic construct
  source 1..50: mol_type = other DNA
aagcgtacatttctactgactaaaattatatattaagcgactgctcacgc

SEQ ID NO: 1648 - DNA, 50 bp, synthetic construct
  source 1..50: mol_type = other DNA
accagttggaggctcgctggtcgccgtggtttcttgaacgtccatctggc

SEQ ID NO: 1649 - DNA, 50 bp, synthetic construct
  source 1..50: mol_type = other DNA
aggacgaatgtggcggattctggcgagccaagccccgctcttcctgtctg

SEQ ID NO: 1650 - DNA, 50 bp, synthetic construct
  source 1..50: mol_type = other DNA
ggcatagatgcccgcgcgccgcatgcatgctgcgcgccgccaccggcacc

SEQ ID NO: 1651 - DNA, 50 bp, synthetic construct
  source 1..50: mol_type = other DNA
aaagtgtagaaattataggcttcttcctatcgttaaaaagtgtactcgac

SEQ ID NO: 1652 - DNA, 50 bp, synthetic construct
  source 1..50: mol_type = other DNA
catctgagacggctgcgaagatggaggcatcttccgaactgtcgaagatt

SEQ ID NO: 1653 - DNA, 50 bp, synthetic construct
  source 1..50: mol_type = other DNA
ggcgatacccatggcaacttccagcgctcaaaattcccgtgggtgtcgcc

SEQ ID NO: 1654 - DNA, 50 bp, synthetic construct
  source 1..50: mol_type = other DNA
tcattcatgtgcatatcctcctgtgcacaggaggaaattaacttggatcg

SEQ ID NO: 1655 - DNA, 50 bp, synthetic construct
  source 1..50: mol_type = other DNA
gggtgaccgccgtatcgagtgcgcgctatcactaattaccgcgccagacg

SEQ ID NO: 1656 - DNA, 50 bp, synthetic construct
  source 1..50: mol_type = other DNA
gtcaacaaatgatggcctcggtcttaatactttggctatatcctgctgaa

SEQ ID NO: 1657 - DNA, 50 bp, synthetic construct
  source 1..50: mol_type = other DNA
aaagatctttggaagttggttcttattagctacaaattccactcctgatt

SEQ ID NO: 1658 - DNA, 50 bp, synthetic construct
  source 1..50: mol_type = other DNA
ttttgtagctgttcaagaattagttccatacttctttccctgcaacaata

SEQ ID NO: 1659 - DNA, 50 bp, synthetic construct
  source 1..50: mol_type = other DNA
atgtaattatcataacaaaaacagagtaaattttcctttaagaattacac

SEQ ID NO: 1660 - DNA, 50 bp, synthetic construct
  source 1..50: mol_type = other DNA
acgccggtgatggcgcgcacggcggcgacccgccggcggtgatccgacag

SEQ ID NO: 1661 - DNA, 50 bp, synthetic construct
  source 1..50: mol_type = other DNA
agtgcccgcaagagttctgctgggtccgcagcagcccgcgcgcggaggct

SEQ ID NO: 1662 - DNA, 50 bp, synthetic construct
  source 1..50: mol_type = other DNA
agctcgggttcttcgtgttttgccacggcaaaacacgcagcgcctatgtg

SEQ ID NO: 1663 - DNA, 50 bp, synthetic construct
  source 1..50: mol_type = other DNA
cgacggcggactgttcaacgggatccatcccgtatccgtacgggccgacg

SEQ ID NO: 1664 - DNA, 50 bp, synthetic construct
  source 1..50: mol_type = other DNA
gcgctatagccccgaaagctatgtccgggtttctttgttgcgggtatcgc

SEQ ID NO: 1665 - DNA, 50 bp, synthetic construct
  source 1..50: mol_type = other DNA
cattctgatagtaaacacttttttcgaaaaacgtatccgcgatcagcatg

SEQ ID NO: 1666 - DNA, 50 bp, synthetic construct
  source 1..50: mol_type = other DNA
agcgttgccgtcgcgttagcgaccgtagtatgacttagcgcggcaacacg

SEQ ID NO: 1667 - DNA, 50 bp, synthetic construct
  source 1..50: mol_type = other DNA
gtgtactcggcgacgaggtcgccacctggcgactgcgcagcgtcgacttc

SEQ ID NO: 1668 - DNA, 50 bp, synthetic construct
  source 1..50: mol_type = other DNA
gcgaacatagtccacttagttccaccacgagtcaagtggtgtaactttct

SEQ ID NO: 1669 - DNA, 50 bp, synthetic construct
  source 1..50: mol_type = other DNA
aacagctcgtccagcaggtcggcgaagctggacgtgccggccgccctgcg

SEQ ID NO: 1670 - DNA, 50 bp, synthetic construct
  source 1..50: mol_type = other DNA
agaaaaaataaaaaatagttttattgatgaaagaaggctttatattgaaa

SEQ ID NO: 1671 - DNA, 50 bp, synthetic construct
  source 1..50: mol_type = other DNA
aaaaacaggttactttttatttataacgtaaaaaaacaagccgctaaatc

SEQ ID NO: 1672 - DNA, 50 bp, synthetic construct
  source 1..50: mol_type = other DNA
attactaccatattttatcgtttgatcaaactttacaccgtgttccgtat

SEQ ID NO: 1673 - DNA, 50 bp, synthetic construct
  source 1..50: mol_type = other DNA
ccctgctcgccccgctgcggcaccgcgctcatccagaaggccgagcagga

SEQ ID NO: 1674 - DNA, 50 bp, synthetic construct
  source 1..50: mol_type = other DNA
gtgatgcgtgttggatggcacttccgaaggtgtccccgaacacgcatcac

SEQ ID NO: 1675 - DNA, 50 bp, synthetic construct
  source 1..50: mol_type = other DNA
cgcgcggtccttcacactgaaggtgcaccttcaggatgcaggcccgtgcc

SEQ ID NO: 1676 - DNA, 50 bp, synthetic construct
  source 1..50: mol_type = other DNA
gctcggcgacctgttcaagaactggccagaagcttaaaagccgttcgagc

SEQ ID NO: 1677 - DNA, 50 bp, synthetic construct
  source 1..50: mol_type = other DNA
tcgggttgaccttgcccggcatgatctgttgccggaaaaaatctttccag

SEQ ID NO: 1678 - DNA, 50 bp, synthetic construct
  source 1..50: mol_type = other DNA
ttttgaattttcgtgtaacgccaagtcgaatcactgacgagaattcaatc

SEQ ID NO: 1679 - DNA, 50 bp, synthetic construct
  source 1..50: mol_type = other DNA
cagaaagcgtaatactggcctttccggaaagcccaggcatagctattctt

SEQ ID NO: 1680 - DNA, 50 bp, synthetic construct
  source 1..50: mol_type = other DNA
acggtcgtgttgaacgatcgagaggttggtcggggtcgtgccacgacctt

SEQ ID NO: 1681 - DNA, 50 bp, synthetic construct
  source 1..50: mol_type = other DNA
caccccccttttgtaattaataatgagattgtaattacaaaaggggggtg

SEQ ID NO: 1682 - DNA, 50 bp, synthetic construct
  source 1..50: mol_type = other DNA
cgcggcgcacagcggcgatttgcccggccaagcgtgcgctgctgctagcg

SEQ ID NO: 1683 - DNA, 50 bp, synthetic construct
  source 1..50: mol_type = other DNA
atttaaagttctattatatactgacatcagtattaaaaataagttagaac

SEQ ID NO: 1684 - DNA, 50 bp, synthetic construct
  source 1..50: mol_type = other DNA
tcaatgtgcttttgttcatagtgtgcttactatgtctaaaaaattcaata

SEQ ID NO: 1685 - DNA, 50 bp, synthetic construct
  source 1..50: mol_type = other DNA
gagccgttgataatactggttttcatggcggccagcattatctgtcgctc

SEQ ID NO: 1686 - DNA, 50 bp, synthetic construct
  source 1..50: mol_type = other DNA
aacgcataacggcaggtcagtgaacgttgcttgacatcgacacaccgtcc

SEQ ID NO: 1687 - DNA, 50 bp, synthetic construct
  source 1..50: mol_type = other DNA
ttacagtaaaacaccacagtctacatccatacttaaaggatttactggtc

SEQ ID NO: 1688 - DNA, 50 bp, synthetic construct
  source 1..50: mol_type = other DNA
tgtttgataatggtatgcatgtcatttgtcatgcataccattaacgagca

SEQ ID NO: 1689 - DNA, 50 bp, synthetic construct
  source 1..50: mol_type = other DNA
ttaaatcacttttgttatggtctaaaaagtatcatgttgaaggcgtttag

SEQ ID NO: 1690 - DNA, 50 bp, synthetic construct
  source 1..50: mol_type = other DNA
tttcacctttaggtgataagagcagatgctctaattatttaaaggtgaaa

SEQ ID NO: 1691 - DNA, 50 bp, synthetic construct
  source 1..50: mol_type = other DNA
taaaaaaaaaggcgctctttgatgtacatgaaaaagcgataattttaagt

SEQ ID NO: 1692 - DNA, 50 bp, synthetic construct
  source 1..50: mol_type = other DNA
tttgctgcttatagccttgagagaataatctcaaagataaatttgtaaaa

SEQ ID NO: 1693 - DNA, 50 bp, synthetic construct
  source 1..50: mol_type = other DNA
acaccaaccgaggccatcgtgccagctggcggcgtactccacgtcggtgt

SEQ ID NO: 1694 - DNA, 50 bp, synthetic construct
  source 1..50: mol_type = other DNA
tgacgaagcagtccgcgaatttccggtagatccagcggactgtttccgcc

SEQ ID NO: 1695 - DNA, 50 bp, synthetic construct
  source 1..50: mol_type = other DNA
aaagattaaaaaaatttataaattattttttaaattgttttttaatattt

SEQ ID NO: 1696 - DNA, 50 bp, synthetic construct
  source 1..50: mol_type = other DNA
actttctaaattcggaatataacgcggaaaattcaccgcatccagaattt

SEQ ID NO: 1697 - DNA, 50 bp, synthetic construct
  source 1..50: mol_type = other DNA
catccctccggtcgcgaagttcgtcgaagagcaccgagagcgggaggatg

SEQ ID NO: 1698 - DNA, 50 bp, synthetic construct
  source 1..50: mol_type = other DNA
ttgtgtaggtatgcttttccctgcaagcagggggaagcactcctacacac

SEQ ID NO: 1699 - DNA, 50 bp, synthetic construct
  source 1..50: mol_type = other DNA
atgtatttatcacctccaaacatgatcatgtttggaggtgataaaaaacc

SEQ ID NO: 1700 - DNA, 50 bp, synthetic construct
  source 1..50: mol_type = other DNA
atcgcagtcgacggcggggcgatcacatccgcgacgccgaaaacctagat

SEQ ID NO: 1701 - DNA, 50 bp, synthetic construct
  source 1..50: mol_type = other DNA
tagccgtctgttcgccggttccttgcaaggaaacgcgggttagacggtta

SEQ ID NO: 1702 - DNA, 50 bp, synthetic construct
  source 1..50: mol_type = other DNA
gaacgaccacttctccgtgctctgccagcagcacgagggccgggtcgttc

SEQ ID NO: 1703 - DNA, 50 bp, synthetic construct
  source 1..50: mol_type = other DNA
accagcccgtatgcttagaactggtagcagttctggagtgtcgtcatggt

SEQ ID NO: 1704 - DNA, 50 bp, synthetic construct
  source 1..50: mol_type = other DNA
ggacacatgtaaaagtaaaaagaatacccattttaacaaaaaatgaggtg

SEQ ID NO: 1705 - DNA, 50 bp, synthetic construct
  source 1..50: mol_type = other DNA
taacgtacaatcaaaaacgggtgcttccaggcgtttttgattgtacgtcc

SEQ ID NO: 1706 - DNA, 50 bp, synthetic construct
  source 1..50: mol_type = other DNA
ttagagtgacaaaagtggagggatttaccataatatttggtattatcaaa

SEQ ID NO: 1707 - DNA, 50 bp, synthetic construct
  source 1..50: mol_type = other DNA
agatataaacttagataaattaaaaagttaataaatataaaattgtatat

SEQ ID NO: 1708 - DNA, 50 bp, synthetic construct
  source 1..50: mol_type = other DNA
atcgctgcggcgtgcccttgcccagcttgggaagaccatgtcgcggcgct

SEQ ID NO: 1709 - DNA, 50 bp, synthetic construct
  source 1..50: mol_type = other DNA
tacagccaattaaacatttattccttaagccaacgttttaattgatcgct

SEQ ID NO: 1710 - DNA, 50 bp, synthetic construct
  source 1..50: mol_type = other DNA
tgagccgaccaacgatctcgacaccggggtcgggttccccatacggcttg

SEQ ID NO: 1711 - DNA, 50 bp, synthetic construct
  source 1..50: mol_type = other DNA
ctaactgccataacaaacctcctaaacagcctgagatttatgcacagtac

SEQ ID NO: 1712 - DNA, 50 bp, synthetic construct
  source 1..50: mol_type = other DNA
aaaaagccgtaagcaagacttacggcttgaagaaatgcttggtgatcttg

SEQ ID NO: 1713 - DNA, 50 bp, synthetic construct
  source 1..50: mol_type = other DNA
acatcactattaattttatataattaaataaaatacttataacaattgaa

SEQ ID NO: 1714 - DNA, 50 bp, synthetic construct
  source 1..50: mol_type = other DNA
gccgccttgcggaggatgctgtgatcgctgagcgcaattgccaaggccat

SEQ ID NO: 1715 - DNA, 50 bp, synthetic construct
  source 1..50: mol_type = other DNA
cagattgctttcctgttgacagaaattattttcaacaggatgcgaactgg

SEQ ID NO: 1716 - DNA, 50 bp, synthetic construct
  source 1..50: mol_type = other DNA
ccgtctcgatttcgagccggccgtcgaaggcactgccgatttcctcaccg

SEQ ID NO: 1717 - DNA, 50 bp, synthetic construct
  source 1..50: mol_type = other DNA
ttacctgctttgtactggttaagcgtgcttaataatgctggtacaggtag

SEQ ID NO: 1718 - DNA, 50 bp, synthetic construct
  source 1..50: mol_type = other DNA
aatctgtcatcatttcttcattcaattgaatgacgaaaggacagtacatt

SEQ ID NO: 1719 - DNA, 50 bp, synthetic construct
  source 1..50: mol_type = other DNA
ttgggtctttacgttcccatcgggacctcgtagatgacgtgaagaccccg

SEQ ID NO: 1720 - DNA, 50 bp, synthetic construct
  source 1..50: mol_type = other DNA
caacgaccgtatcttcacgtataatcataatcgttgctataagtaggttt

SEQ ID NO: 1721 - DNA, 50 bp, synthetic construct
  source 1..50: mol_type = other DNA
atttcaaacatctaagattctcctttaggagctgtttttatgcgtaaaaa

SEQ ID NO: 1722 - DNA, 50 bp, synthetic construct
  source 1..50: mol_type = other DNA
atgtgcatttttgataacgatataggtatatcgttttcaaaattgctcac

SEQ ID NO: 1723 - DNA, 50 bp, synthetic construct
  source 1..50: mol_type = other DNA
catgaccaactattggctggcgcccggaggtgagcgtcgagttcaagctg

SEQ ID NO: 1724 - DNA, 50 bp, synthetic construct
  source 1..50: mol_type = other DNA
atggaattaatgtagcacaatttgctgacattgtgctacattaatcgaag

SEQ ID NO: 1725 - DNA, 50 bp, synthetic construct
  source 1..50: mol_type = other DNA
gcgtgggtgggctcaaatattcgaccgcctctatcggagcccaccgtgca

SEQ ID NO: 1726 - DNA, 50 bp, synthetic construct
  source 1..50: mol_type = other DNA
caggacctccaggaccttgcgctcgattgcgcttcttcctggaggagcac

SEQ ID NO: 1727 - DNA, 50 bp, synthetic construct
  source 1..50: mol_type = other DNA
caccgagttcacctggacgtgccgggatgaacgtccgtcgaggagatgtg

SEQ ID NO: 1728 - DNA, 50 bp, synthetic construct
  source 1..50: mol_type = other DNA
gcgcgggcagtgaggcggcgtcgagctcgacgcgcccgaggtgggggcgc

SEQ ID NO: 1729 - DNA, 50 bp, synthetic construct
  source 1..50: mol_type = other DNA
gcgttagcgaatttacttgtagaattttcatttcttaaagtcgcttttgc

SEQ ID NO: 1730 - DNA, 50 bp, synthetic construct
  source 1..50: mol_type = other DNA
ccttgccatttacatcgcctcccttaaggtagaatatagaaacggggagg

SEQ ID NO: 1731 - DNA, 50 bp, synthetic construct
  source 1..50: mol_type = other DNA
gacggagtggtggcatgcccttgtcgacaacgacgtatccgccctcagtc

SEQ ID NO: 1732 - DNA, 50 bp, synthetic construct
  source 1..50: mol_type = other DNA
atgtgatccaccaaatggatgtccgctggcatccttttcatggtcgcaca

SEQ ID NO: 1733 - DNA, 50 bp, synthetic construct
  source 1..50: mol_type = other DNA
agccgggatcggcggcatgatcgcggtctggggtgcgggccatccgggct

SEQ ID NO: 1734 - DNA, 50 bp, synthetic construct
  source 1..50: mol_type = other DNA
atttgtaagattcaaaagttcaccaaagagaacttgaggatcttacaaag

SEQ ID NO: 1735 - DNA, 50 bp, synthetic construct
  source 1..50: mol_type = other DNA
atcgggtccgttgagaatactatcagcatgttgttttcacaagaccccaa

SEQ ID NO: 1736 - DNA, 50 bp, synthetic construct
  source 1..50: mol_type = other DNA
gcggcggatgtagacgcacacccggctggggattcgccgatccgcgccgc

SEQ ID NO: 1737 - DNA, 50 bp, synthetic construct
  source 1..50: mol_type = other DNA
ttttattttttgaattaacctactatagcctgttcatttaaaaaatcttt

SEQ ID NO: 1738 - DNA, 50 bp, synthetic construct
  source 1..50: mol_type = other DNA
atcttcctcgtaaatacgtgtaacgaatttagggggagtacggtgaagaa

SEQ ID NO: 1739 - DNA, 50 bp, synthetic construct
  source 1..50: mol_type = other DNA
ttgtcagcagcccctgcccgaggagctggcggcgcaggtcctgccggatg

SEQ ID NO: 1740 - DNA, 50 bp, synthetic construct
  source 1..50: mol_type = other DNA
attaaagattgaggttccacaactatacttgtagaatctcttccttttgg

SEQ ID NO: 1741 - DNA, 50 bp, synthetic construct
  source 1..50: mol_type = other DNA
catcattcagaaaggacggtagacatgtctagagtgctatctgtccagtc

SEQ ID NO: 1742 - DNA, 50 bp, synthetic construct
  source 1..50: mol_type = other DNA
gctagaaatttaacactacttttttttcaaaggcccggttttgttcggat

SEQ ID NO: 1743 - DNA, 50 bp, synthetic construct
  source 1..50: mol_type = other DNA
ggccggaagtactgccgcttatgcgaccataccgaaacgtagtcccggca

SEQ ID NO: 1744 - DNA, 50 bp, synthetic construct
  source 1..50: mol_type = other DNA
ttctaacttaattatctgtggggaattcccgtagcgaaatatacaaaaca

SEQ ID NO: 1745 - DNA, 50 bp, synthetic construct
  source 1..50: mol_type = other DNA
tctcgtaatttttttgcggtagacatgtcgtctatcagtcaattaaactg

SEQ ID NO: 1746 - DNA, 50 bp, synthetic construct
  source 1..50: mol_type = other DNA
ccgctcctccaacgtctgcgcggccggtagcacaagcggctctgaaccgc

SEQ ID NO: 1747 - DNA, 50 bp, synthetic construct
  source 1..50: mol_type = other DNA
gccacgcttcacctggcatttcccatgagaaaattgagttaaagtctctc

SEQ ID NO: 1748 - DNA, 50 bp, synthetic construct
  source 1..50: mol_type = other DNA
tcattctcttctaatagaaattttaaggaattaataaaagaaggatagga

SEQ ID NO: 1749 - DNA, 50 bp, synthetic construct
  source 1..50: mol_type = other DNA
gtaaatctaagaagtacgctatcggaagaaggcgtactagaactcgatga

SEQ ID NO: 1750 - DNA, 50 bp, synthetic construct
  source 1..50: mol_type = other DNA
tcatggcctgatggccgggggtcagctgccgcccggccatcagcagttcg

SEQ ID NO: 1751 - DNA, 50 bp, synthetic construct
  source 1..50: mol_type = other DNA
tttcatctgtttcaccacctctcccgggatgtgctgtcgaacagggcaaa

SEQ ID NO: 1752 - DNA, 50 bp, synthetic construct
  source 1..50: mol_type = other DNA
gatgccacaaccgaggcgatgacctacgtcatctacttggtgcgcaattg

SEQ ID NO: 1753 - DNA, 50 bp, synthetic construct
  source 1..50: mol_type = other DNA
cgtaggtcgtggcaagaacgagcgtctgctctttcttgccatgcttacat

SEQ ID NO: 1754 - DNA, 50 bp, synthetic construct
  source 1..50: mol_type = other DNA
tatgctgtgtgttgtcggagttattacatctcctgacaacacacaattaa

SEQ ID NO: 1755 - DNA, 50 bp, synthetic construct
  source 1..50: mol_type = other DNA
gattgcgtgggctaccgcagacaggcgtcaatgcggtggccgatcgattc

SEQ ID NO: 1756 - DNA, 50 bp, synthetic construct
  source 1..50: mol_type = other DNA
gcgcgaacggatcgtgctggccgaggctcgccacgtcgaccgggcggcgc

SEQ ID NO: 1757 - DNA, 50 bp, synthetic construct
  source 1..50: mol_type = other DNA
ctgcaattattccgccttatcatccagatggtagggcggattaatttctc

SEQ ID NO: 1758 - DNA, 50 bp, synthetic construct
  source 1..50: mol_type = other DNA
cttcaaactcatttctaaaattaaatttgatttccggaatatttttttct

SEQ ID NO: 1759 - DNA, 50 bp, synthetic construct
  source 1..50: mol_type = other DNA
tacgtatagagattgtgtacacattcgtatgcacacaatctctatacgta

SEQ ID NO: 1760 - DNA, 50 bp, synthetic construct
  source 1..50: mol_type = other DNA
tagtaccctattgtaatcaagaacgaaaacttcattacaataggggagtg

SEQ ID NO: 1761 - DNA, 50 bp, synthetic construct
  source 1..50: mol_type = other DNA
acttaactttctacattaattggcccacctattactttaaaaagttaagt

SEQ ID NO: 1762 - DNA, 50 bp, synthetic construct
  source 1..50: mol_type = other DNA
agttgtattggcatcgatcacctgcgcagctaatgactgcatgcttaact

SEQ ID NO: 1763 - DNA, 50 bp, synthetic construct
  source 1..50: mol_type = other DNA
ctaaaatacctaaatagttatacgatctttaatgactttactaacaaatt

SEQ ID NO: 1764 - DNA, 50 bp, synthetic construct
  source 1..50: mol_type = other DNA
atcagaaggagtcccacagtggtccggcgtgatcacctacgacttctcat

SEQ ID NO: 1765 - DNA, 50 bp, synthetic construct
  source 1..50: mol_type = other DNA
gaccagtgctgagggcgaagcgtctagacgctgcggaagatcagctcgcc

SEQ ID NO: 1766 - DNA, 50 bp, synthetic construct
  source 1..50: mol_type = other DNA
ggcgaggcgtcgtatcccttcgcggccggtaagcggatcgacatccgcga

SEQ ID NO: 1767 - DNA, 50 bp, synthetic construct
  source 1..50: mol_type = other DNA
ttcgccatcgggctggctccttcgtcgccgcgagccagcggaccaacgac

SEQ ID NO: 1768 - DNA, 50 bp, synthetic construct
  source 1..50: mol_type = other DNA
ctgcaggttggcgaaagggcacgcccgcggggtacgtcgccaacctgacc

SEQ ID NO: 1769 - DNA, 50 bp, synthetic construct
  source 1..50: mol_type = other DNA
tcgtcacgctccttcccggtggttgcgaccaccgacaaggaaacgggcga

SEQ ID NO: 1770 - DNA, 50 bp, synthetic construct
  source 1..50: mol_type = other DNA
gtcgtgacgggcttcaggccgatttcgatccgcttgacgctgcacacgag

SEQ ID NO: 1771 - DNA, 50 bp, synthetic construct
  source 1..50: mol_type = other DNA
cacagttaagcaacgggcatgacgcgtgtgatgcccgatgattaaccgtg

SEQ ID NO: 1772 - DNA, 50 bp, synthetic construct
  source 1..50: mol_type = other DNA
cactttctaaacgcctctaatgacatgtctatagggtagtaaagatttca

SEQ ID NO: 1773 - DNA, 50 bp, synthetic construct
  source 1..50: mol_type = other DNA
cctcgccgacgtcctcaggtacgccggagtcgctgctggcgatcacgagt

SEQ ID NO: 1774 - DNA, 50 bp, synthetic construct
  source 1..50: mol_type = other DNA
aaaatgaaagaatacaaagccaaaattatgttacatcctttcttcattta

SEQ ID NO: 1775 - DNA, 50 bp, synthetic construct
  source 1..50: mol_type = other DNA
agaaagagaaaaaatatctcttgatgattcgaggtaatattcatctacca

SEQ ID NO: 1776 - DNA, 50 bp, synthetic construct
  source 1..50: mol_type = other DNA
gttgaccatgagcttgatgacttcgcgaagccatcaccgtctgccagcgc

SEQ ID NO: 1777 - DNA, 50 bp, synthetic construct
  source 1..50: mol_type = other DNA
tataccttcgacatacaatctcatgtaagttttttcaaagcgaaggatta

SEQ ID NO: 1778 - DNA, 50 bp, synthetic construct
  source 1..50: mol_type = other DNA
tataaataaagaaaatgctacttttggattataaaagttctttatttata

SEQ ID NO: 1779 - DNA, 50 bp, synthetic construct
  source 1..50: mol_type = other DNA
acagtttttgacgctatactaatgtacattacatatgcgtaaataaatgg

SEQ ID NO: 1780 - DNA, 50 bp, synthetic construct
  source 1..50: mol_type = other DNA
tttgtcatttttatactgcgaataattattcactgtttaaaattcacatt

SEQ ID NO: 1781 - DNA, 50 bp, synthetic construct
  source 1..50: mol_type = other DNA
gtgtatcataagaaaggtgtaatcctgaagagacctttctattgatacac

SEQ ID NO: 1782 - DNA, 50 bp, synthetic construct
  source 1..50: mol_type = other DNA
cggcgccggcgaacagttcatggttggcctcgatgacgtcgggctcgccc

SEQ ID NO: 1783 - DNA, 50 bp, synthetic construct
  source 1..50: mol_type = other DNA
ttcatgtagtaaaaagattaacttaatagttagtcctgttactacatatt

SEQ ID NO: 1784 - DNA, 50 bp, synthetic construct
  source 1..50: mol_type = other DNA
gtattcttctaactgttctcaaattaatttgaggtatcgtataaccatat

SEQ ID NO: 1785 - DNA, 50 bp, synthetic construct
  source 1..50: mol_type = other DNA
ttccccggcccgcatacattccctgcagcttctgtacctgcgcacccgaa

SEQ ID NO: 1786 - DNA, 50 bp, synthetic construct
  source 1..50: mol_type = other DNA
tcctgcccatcaccatcgtcttcgcccggtcactcaactgatgggcaccg

SEQ ID NO: 1787 - DNA, 50 bp, synthetic construct
  source 1..50: mol_type = other DNA
tcccgggcagccgtcgtgccagcatcggctggcaggccggttgcacggca

SEQ ID NO: 1788 - DNA, 50 bp, synthetic construct
  source 1..50: mol_type = other DNA
gagcctggggaacaggttgcgggtgcgcccaacgccttctccagtgcccg

SEQ ID NO: 1789 - DNA, 50 bp, synthetic construct
  source 1..50: mol_type = other DNA
cacaaatggttgcttaattgcccgtactggtgatttgacaaccatttaaa

SEQ ID NO: 1790 - DNA, 50 bp, synthetic construct
  source 1..50: mol_type = other DNA
gtcggcgagatcgaggccaagattgcaacggacttgtcgctctgaccgat

SEQ ID NO: 1791 - DNA, 50 bp, synthetic construct
  source 1..50: mol_type = other DNA
gaagcaccatatgtaactgccaattggtaggtagtgccatatagtgcttc

SEQ ID NO: 1792 - DNA, 50 bp, synthetic construct
  source 1..50: mol_type = other DNA
aatctatgaaagattgcagaatcttttaattctaacgttagcaattaaag

SEQ ID NO: 1793 - DNA, 50 bp, synthetic construct
  source 1..50: mol_type = other DNA
tcataaagtatgcggaagaacataaatatgtaaaggagataacattatgg

SEQ ID NO: 1794 - DNA, 50 bp, synthetic construct
  source 1..50: mol_type = other DNA
taatttcaactagatattaagtagtactacattatttgtcgataaaaaag

SEQ ID NO: 1795 - DNA, 50 bp, synthetic construct
  source 1..50: mol_type = other DNA
ttcttttgttctatagataggtttataaaccggcgtctagtaattgctta

SEQ ID NO: 1796 - DNA, 50 bp, synthetic construct
  source 1..50: mol_type = other DNA
tctaatttttactttactactgtcgctatggaagtaaagagaaaattata

SEQ ID NO: 1797 - DNA, 50 bp, synthetic construct
  source 1..50: mol_type = other DNA
tatacttcaataggtttgctgcttcgctcgtccaaaccttcccaagactt

SEQ ID NO: 1798 - DNA, 50 bp, synthetic construct
  source 1..50: mol_type = other DNA
taaatgaaaagtgtcacaatgattttgttaatgatgacataattagttta

SEQ ID NO: 1799 - DNA, 50 bp, synthetic construct
  source 1..50: mol_type = other DNA
acatattctcgctgttttaatttgtacagattaaaaaaatttcaaacctt

SEQ ID NO: 1800 - DNA, 50 bp, synthetic construct
  source 1..50: mol_type = other DNA
ccaagcccgcattatataccgttctagaacggctattcgagcgggcaact

SEQ ID NO: 1801 - DNA, 50 bp, synthetic construct
  source 1..50: mol_type = other DNA
ctcacaaatcaattaggcatatcttaacatatgcctaagttatcgctaac

SEQ ID NO: 1802 - DNA, 50 bp, synthetic construct
  source 1..50: mol_type = other DNA
tgttacatgtagaggggtccgccagatagcagacccctctagatgtaacg

SEQ ID NO: 1803 - DNA, 50 bp, synthetic construct
  source 1..50: mol_type = other DNA
cgcgcgccgggcggcggagtcagagctctaagatcgacgcatgaagcgcg

SEQ ID NO: 1804 - DNA, 50 bp, synthetic construct
  source 1..50: mol_type = other DNA
acatatatataatagtacatataatatcacatttagagtgatatatagta

SEQ ID NO: 1805 - DNA, 50 bp, synthetic construct
  source 1..50: mol_type = other DNA
catgatgcggcttagtcggccgcatagcccgccgcagaagccgtcacctg

SEQ ID NO: 1806 - DNA, 50 bp, synthetic construct
  source 1..50: mol_type = other DNA
cggggcggcgtagccggggacgggggacccagcccggcccaccaaccccg

SEQ ID NO: 1807 - DNA, 50 bp, synthetic construct
  source 1..50: mol_type = other DNA
gattggaggtttgtaacaactatcctgatacctgatacacacttccaata

SEQ ID NO: 1808 - DNA, 50 bp, synthetic construct
  source 1..50: mol_type = other DNA
cttgatgtatcactatactttatcacgacaaatgttaatgatacatcaat

SEQ ID NO: 1809 - DNA, 50 bp, synthetic construct
  source 1..50: mol_type = other DNA
agaatattctttgaaaatgctaatgcaagatagtttttaaagatttttct

SEQ ID NO: 1810 - DNA, 50 bp, synthetic construct
  source 1..50: mol_type = other DNA
atgggttatctagccagtcggtaacattagctgctggctagataaccctc

SEQ ID NO: 1811 - DNA, 50 bp, synthetic construct
  source 1..50: mol_type = other DNA
tattattttctttcaaccacactttgtatataaataattctaaatatatg

SEQ ID NO: 1812 - DNA, 50 bp, synthetic construct
  source 1..50: mol_type = other DNA
cgttgaccagcgccggcttcttgccggaaagaaggccctgcgggtcgtgt

SEQ ID NO: 1813 - DNA, 50 bp, synthetic construct
  source 1..50: mol_type = other DNA
caaagtaaggagaaggaaattatgttgtatatttccttcggggtcgcgtg

SEQ ID NO: 1814 - DNA, 50 bp, synthetic construct
  source 1..50: mol_type = other DNA
gtgatccgtgttgtgtaacaggggtgcacctgttgcgacttctcttgtgg

SEQ ID NO: 1815 - DNA, 50 bp, synthetic construct
  source 1..50: mol_type = other DNA
tttcggagaattacaacgctatgccagcataagattgtattactccccaa

SEQ ID NO: 1816 - DNA, 50 bp, synthetic construct
  source 1..50: mol_type = other DNA
ttagtcttcgtcttgctcttctgaattcagaactacaaagctaaactagc

SEQ ID NO: 1817 - DNA, 50 bp, synthetic construct
  source 1..50: mol_type = other DNA
agaccctgaatttttatatgaagaaaacgtatattgaaaatgaagagggt

SEQ ID NO: 1818 - DNA, 50 bp, synthetic construct
  source 1..50: mol_type = other DNA
ttcaaattaatggtttgatatgttaatacatagaaaactattatccgcaa

SEQ ID NO: 1819 - DNA, 50 bp, synthetic construct
  source 1..50: mol_type = other DNA
ccgaaaccttgctgacgtagttcaattgaacttgttgatcaagcgtctga

SEQ ID NO: 1820 - DNA, 50 bp, synthetic construct
  source 1..50: mol_type = other DNA
ggataaagctatgatttcacttagattaaaaataaatcattgtttttaaa

SEQ ID NO: 1821 - DNA, 50 bp, synthetic construct
  source 1..50: mol_type = other DNA
gggaggccgtcagcgtcgcggacgagcccccgcctcgctcgcggcgagac

SEQ ID NO: 1822 - DNA, 50 bp, synthetic construct
  source 1..50: mol_type = other DNA
tctttagttgaattggctgcatcttaaataggagttgatacaatgaaaaa

SEQ ID NO: 1823 - DNA, 50 bp, synthetic construct
  source 1..50: mol_type = other DNA
cgctgacgctcgaccgacgttgactcgtcgacatcggtcgagctcaactg

SEQ ID NO: 1824 - DNA, 50 bp, synthetic construct
  source 1..50: mol_type = other DNA
accagaaacacagcaagagttgaacgcttaatctccgatgtgttgatggt

SEQ ID NO: 1825 - DNA, 50 bp, synthetic construct
  source 1..50: mol_type = other DNA
tgctgcaggccccgaccggaaatccgggatgacggtcctggagcgcaact

SEQ ID NO: 1826 - DNA, 50 bp, synthetic construct
  source 1..50: mol_type = other DNA
aactgtggtatacatgctaacagcgtgctgttccattgtaaaccactgta

SEQ ID NO: 1827 - DNA, 50 bp, synthetic construct
  source 1..50: mol_type = other DNA
cgtttgaaacgaattaagaggcggtcccgcctcttttcgctactatggtt

SEQ ID NO: 1828 - DNA, 50 bp, synthetic construct
  source 1..50: mol_type = other DNA
gttgcggtctataagttcgtggacaggtccatgaagacctgcgtgggccg

SEQ ID NO: 1829 - DNA, 50 bp, synthetic construct
  source 1..50: mol_type = other DNA
aaaaggactagaaagcgtaaagtatatttcttgtgccttagtgtcctttt

SEQ ID NO: 1830 - DNA, 50 bp, synthetic construct
  source 1..50: mol_type = other DNA
gtccttggggctaaggtacgtccagctggcgctagagcggagtcatccct

SEQ ID NO: 1831 - DNA, 50 bp, synthetic construct
  source 1..50: mol_type = other DNA
gggcgccgccgtacgcccggatgtcattttcagggagcacgtacgctacc

SEQ ID NO: 1832 - DNA, 50 bp, synthetic construct
  source 1..50: mol_type = other DNA
aatagatacctcaccagtttgtatttagctcgactagtcagggatagtat

SEQ ID NO: 1833 - DNA, 50 bp, synthetic construct
  source 1..50: mol_type = other DNA
atcatcgacctgaccacctgggaacgatccatcggaatcagttcgatggc

SEQ ID NO: 1834 - DNA, 50 bp, synthetic construct
  source 1..50: mol_type = other DNA
agattgcttatcgcactggttaaaaccgatgccagtgcgatatcggatgc

SEQ ID NO: 1835 - DNA, 50 bp, synthetic construct
  source 1..50: mol_type = other DNA
gaccacggccgcaaaggcgatggccgacggccgccgcggcggcggccgtc

SEQ ID NO: 1836 - DNA, 50 bp, synthetic construct
  source 1..50: mol_type = other DNA
cttaaacagcgttctttttacattttacaagaaaaagaaaaatccctaag

SEQ ID NO: 1837 - DNA, 50 bp, synthetic construct
  source 1..50: mol_type = other DNA
gcaataggtgtagtaaacactatgatcattaaagaaattctgactatggt

SEQ ID NO: 1838 - DNA, 50 bp, synthetic construct
  source 1..50: mol_type = other DNA
tcatatccgcacgctcgaccgatggccttcgaggagaccggcgtccgcct

SEQ ID NO: 1839 - DNA, 50 bp, synthetic construct
  source 1..50: mol_type = other DNA
cagcgccagttgtcgatggccacggccgcggcgatcaacctgttgcgctg

SEQ ID NO: 1840 - DNA, 50 bp, synthetic construct
  source 1..50: mol_type = other DNA
cacgctactttggggacgttaaaaaaatttaagtaattgaaataactgac

SEQ ID NO: 1841 - DNA, 50 bp, synthetic construct
  source 1..50: mol_type = other DNA
cactgcggtcttgaccgcggtgaagcgtcaccgcgaatgagaacgccgag

SEQ ID NO: 1842 - DNA, 50 bp, synthetic construct
  source 1..50: mol_type = other DNA
cgccgcgggcggccgtctccgatcccgaccaaaggtcgcatccggcggcg

SEQ ID NO: 1843 - DNA, 50 bp, synthetic construct
  source 1..50: mol_type = other DNA
gtcgttagaaaaagacatccatcctcaacgcgatgtttttttctaacgcc

SEQ ID NO: 1844 - DNA, 50 bp, synthetic construct
  source 1..50: mol_type = other DNA
cgaatgcgatgctctaccaactgagctctggtggaaatcaaccggatcga

SEQ ID NO: 1845 - DNA, 50 bp, synthetic construct
  source 1..50: mol_type = other DNA
caccccggcggccactcgctgaccagggtgggcgtcagcccgtcggggtc

SEQ ID NO: 1846 - DNA, 50 bp, synthetic construct
  source 1..50: mol_type = other DNA
ctcatgtcacagagtagccactcgggggagtggttacaacgtgacatgag

SEQ ID NO: 1847 - DNA, 50 bp, synthetic construct
  source 1..50: mol_type = other DNA
tgtatacatggtagagaattaaaccagtttaatactccaccatgtacaca

SEQ ID NO: 1848 - DNA, 50 bp, synthetic construct
  source 1..50: mol_type = other DNA
acgcgccgagctcgacgcggcggccggcttcggcgtcggcgtcggccgcg

SEQ ID NO: 1849 - DNA, 50 bp, synthetic construct
  source 1..50: mol_type = other DNA
gtactccaccataaataatatacatacctatattattttaactgcctggg

SEQ ID NO: 1850 - DNA, 50 bp, synthetic construct
  source 1..50: mol_type = other DNA
ttccgcttcaacgtgtagtcgggctcgcccgtgtacccggccatcaggag

SEQ ID NO: 1851 - DNA, 50 bp, synthetic construct
  source 1..50: mol_type = other DNA
ccggcggcggcctcgcgctggcaagcccgacaggcagcgcgcgatttcgt

SEQ ID NO: 1852 - DNA, 50 bp, synthetic construct
  source 1..50: mol_type = other DNA
gtgaccgtgctcttgtatcatatctcaatgtaataggccggcaacgtcac

SEQ ID NO: 1853 - DNA, 50 bp, synthetic construct
  source 1..50: mol_type = other DNA
ggcagtcgcagagtcgagagcctccaggccatctcgaagagcttctgcag

SEQ ID NO: 1854 - DNA, 50 bp, synthetic construct
  source 1..50: mol_type = other DNA
ggcggcctccgccccctgcgcagccgcagcggcacgggttcatcgccgcg

SEQ ID NO: 1855 - DNA, 50 bp, synthetic construct
  source 1..50: mol_type = other DNA
ccgtcccagaccgcgaggtcgccaggtgtttacggcgccggcgcggacct

SEQ ID NO: 1856 - DNA, 50 bp, synthetic construct
  source 1..50: mol_type = other DNA
ttttagtaccaagcatgaccgcagctgtttagacgctggaattattaaag

SEQ ID NO: 1857 - DNA, 50 bp, synthetic construct
  source 1..50: mol_type = other DNA
aacatcatgtcctttagcgaccgtcgacctgcgttcacagacatgatgga

SEQ ID NO: 1858 - DNA, 50 bp, synthetic construct
  source 1..50: mol_type = other DNA
aggtgggtcatgccgacggacttcatccttgccaccggaaggttccgcct

SEQ ID NO: 1859 - DNA, 50 bp, synthetic construct
  source 1..50: mol_type = other DNA
cgtctactggggaacgtgacagttgcagccaacacgttagcccatgaacg

SEQ ID NO: 1860 - DNA, 50 bp, synthetic construct
  source 1..50: mol_type = other DNA
cttagaactttggcagtatgggtgtaaacccatacgggcgttttgacgtt

SEQ ID NO: 1861 - DNA, 50 bp, synthetic construct
  source 1..50: mol_type = other DNA
cgaacgcgagcaggaaccaggagacgtttcctggttcctgctcgcgttcg

SEQ ID NO: 1862 - DNA, 50 bp, synthetic construct
  source 1..50: mol_type = other DNA
ttaaatattcctgatagtcaacatatgatttgactactgctttcatttca

SEQ ID NO: 1863 - DNA, 50 bp, synthetic construct
  source 1..50: mol_type = other DNA
caacggccgcgtcttcgaggagatcgatccgcgcgtagttgcggcccggg

SEQ ID NO: 1864 - DNA, 50 bp, synthetic construct
  source 1..50: mol_type = other DNA
acgctggactcgctgccgtctcccgccaggagaggcagcgactccagcgt

SEQ ID NO: 1865 - DNA, 50 bp, synthetic construct
  source 1..50: mol_type = other DNA
gttaactatcccagcgcgatggacagagccatcacatccgtctagaatgg

SEQ ID NO: 1866 - DNA, 50 bp, synthetic construct
  source 1..50: mol_type = other DNA
tttcataaaaacacctcaataattaagtttattcaagagttgatatgata

SEQ ID NO: 1867 - DNA, 50 bp, synthetic construct
  source 1..50: mol_type = other DNA
cgcgacgcggtccgagcgggcgggcggccgcagtgtcggcgcgcgatctt

SEQ ID NO: 1868 - DNA, 50 bp, synthetic construct
  source 1..50: mol_type = other DNA
agctatcgagcggctttataggtctgccgtgccgaagccgccgcctccga

SEQ ID NO: 1869 - DNA, 50 bp, synthetic construct
  source 1..50: mol_type = other DNA
tatgttagttgtgtcactgggtagacctaaatagtgacacaactgctatt

SEQ ID NO: 1870 - DNA, 50 bp, synthetic construct
  source 1..50: mol_type = other DNA
tatgttacaacattaatcactagttaattatggaaatccatagtattgta

SEQ ID NO: 1871 - DNA, 50 bp, synthetic construct
  source 1..50: mol_type = other DNA
ggtgaccaaaatgcgacaccgttcgtctaaagagtagcagtttggtaact

SEQ ID NO: 1872 - DNA, 50 bp, synthetic construct
  source 1..50: mol_type = other DNA
tatctatctgttgtgcggagcatgatcagctttagcacaacagctaggta

SEQ ID NO: 1873 - DNA, 50 bp, synthetic construct
  source 1..50: mol_type = other DNA
ctaaaagacgttgatacagatcagttgatgtatgtatcaactagaaaaat

SEQ ID NO: 1874 - DNA, 50 bp, synthetic construct
  source 1..50: mol_type = other DNA
gtgcaagacagaattaattatctttgttgataatgaattcatctgtgcta

SEQ ID NO: 1875 - DNA, 50 bp, synthetic construct
  source 1..50: mol_type = other DNA
tactcttcaatcaattgtgattcgtggtgtacacagcatattctttggct

SEQ ID NO: 1876 - DNA, 50 bp, synthetic construct
  source 1..50: mol_type = other DNA
ttttttagggtattgattttatttgcaaataaaaaaagctctacttccca

SEQ ID NO: 1877 - DNA, 50 bp, synthetic construct
  source 1..50: mol_type = other DNA
agcgtagattttgtggatgcatttggatatgctgacattccatttccatg

SEQ ID NO: 1878 - DNA, 50 bp, synthetic construct
  source 1..50: mol_type = other DNA
ggggcttgctgtacagtcctttttgcaaatcagagagaacagattaaaat

SEQ ID NO: 1879 - DNA, 50 bp, synthetic construct
  source 1..50: mol_type = other DNA
ttccaattgctgcacttttttatttaaagaaagacgtttcctaattggaa

SEQ ID NO: 1880 - DNA, 50 bp, synthetic construct
  source 1..50: mol_type = other DNA
atcgttttctgttggataatgtcatttgtctttatctaacattaaagaat

SEQ ID NO: 1881 - DNA, 50 bp, synthetic construct
  source 1..50: mol_type = other DNA
aaccggctacgcctcgcccgtggacgacggcgcggtaggcgcagcgctga

SEQ ID NO: 1882 - DNA, 50 bp, synthetic construct
  source 1..50: mol_type = other DNA
tacgtgcctattatactgactagatgtcctgtatgtataataggcacgac

SEQ ID NO: 1883 - DNA, 50 bp, synthetic construct
  source 1..50: mol_type = other DNA
agtataaaagaaaatatccaagacattgcaggttgattttcttaaattct

SEQ ID NO: 1884 - DNA, 50 bp, synthetic construct
  source 1..50: mol_type = other DNA
aatcaataacaccatcaatatctctgttgatattgaagatgagatagatt

SEQ ID NO: 1885 - DNA, 50 bp, synthetic construct
  source 1..50: mol_type = other DNA
attaggttcttattaaaacctgtctagaccagctgaaataattctctaag

SEQ ID NO: 1886 - DNA, 50 bp, synthetic construct
  source 1..50: mol_type = other DNA
atccatttgcgatttcctctcaatccagtgagcctggctagaaaacgcac

SEQ ID NO: 1887 - DNA, 50 bp, synthetic construct
  source 1..50: mol_type = other DNA
ctatcgtcgaatattaaggagtgttaacactcattaatatttgaaatgta

SEQ ID NO: 1888 - DNA, 50 bp, synthetic construct
  source 1..50: mol_type = other DNA
tcagtttaataatcgtaaataggcttgtctatttttagacaacaaaagag

SEQ ID NO: 1889 - DNA, 50 bp, synthetic construct
  source 1..50: mol_type = other DNA
gcggctgaggtgccttgggcggcccgggtatacgacatgacggtcgccgc

SEQ ID NO: 1890 - DNA, 50 bp, synthetic construct
  source 1..50: mol_type = other DNA
ccccgtgcgcctcccggtaggcgacgccgccgaccgcaccggcctcgagc

SEQ ID NO: 1891 - DNA, 50 bp, synthetic construct
  source 1..50: mol_type = other DNA
cccccaagccagtcttgtatcaaaattttgatacaaaagtatgagtgcga

SEQ ID NO: 1892 - DNA, 50 bp, synthetic construct
  source 1..50: mol_type = other DNA
aatttgacgaattttatacgcgttatcacagcttttaaattttccaaaaa

SEQ ID NO: 1893 - DNA, 50 bp, synthetic construct
  source 1..50: mol_type = other DNA
attataattcatattattaattaaaattaaagtaccctatgaattatcag

SEQ ID NO: 1894 - DNA, 50 bp, synthetic construct
  source 1..50: mol_type = other DNA
tgttgtatttatgaaacgttaccgactgataacgtttcataaacacaact

SEQ ID NO: 1895 - DNA, 50 bp, synthetic construct
  source 1..50: mol_type = other DNA
ttggcgtggccgagctggatgccggagggcccgcagctcagccaggctga

SEQ ID NO: 1896 - DNA, 50 bp, synthetic construct
  source 1..50: mol_type = other DNA
agtcgcgccgccccttgattgtttgcaaacacgccttccccgtgcaattg

SEQ ID NO: 1897 - DNA, 50 bp, synthetic construct
  source 1..50: mol_type = other DNA
ggacgctctcgatcttgcgcgcgcgagcgcctgccgctccgagagcgttg

SEQ ID NO: 1898 - DNA, 50 bp, synthetic construct
  source 1..50: mol_type = other DNA
cgatatttttcttttgtgagtaactaataaaaacactcccacacatatta

SEQ ID NO: 1899 - DNA, 50 bp, synthetic construct
  source 1..50: mol_type = other DNA
atattattaaatttatgtattcatttatgaatacataagtttataaattg

SEQ ID NO: 1900 - DNA, 50 bp, synthetic construct
  source 1..50: mol_type = other DNA
aaaacccaatacacaagtacatgggttcatgagaagatgtattatttttt

SEQ ID NO: 1901 - DNA, 50 bp, synthetic construct
  source 1..50: mol_type = other DNA
acccgagacataggtgacagttcgtacgaactgtcacctatgtctcgggt

SEQ ID NO: 1902 - DNA, 50 bp, synthetic construct
  source 1..50: mol_type = other DNA
gggaaggagccgtggtccacccggccgtaggtggacgacggcttcttctt

SEQ ID NO: 1903 - DNA, 50 bp, synthetic construct
  source 1..50: mol_type = other DNA
ccagcgtggccctaccgcgctggggctcgacacggtcaggaccacgcggg

SEQ ID NO: 1904 - DNA, 50 bp, synthetic construct
  source 1..50: mol_type = other DNA
gatagtctaacttgacaacccgtgaccacgggggtactagtaggactgtc

SEQ ID NO: 1905 - DNA, 50 bp, synthetic construct
  source 1..50: mol_type = other DNA
cacggcgcggtcgatgtcttccggcgcatgaattcaacgtcgccgccgtg

SEQ ID NO: 1906 - DNA, 50 bp, synthetic construct
  source 1..50: mol_type = other DNA
taatttacaacgagggataatcagtaccgattaagccaaaccaagtattt

SEQ ID NO: 1907 - DNA, 50 bp, synthetic construct
  source 1..50: mol_type = other DNA
ttacggtaactgaaaaaattttgttaacaagacatagacactaacacttt

SEQ ID NO: 1908 - DNA, 50 bp, synthetic construct
  source 1..50: mol_type = other DNA
tatttatggctgtgatatgtgggttaaccttggaatcaatagcttatcta

SEQ ID NO: 1909 - DNA, 50 bp, synthetic construct
  source 1..50: mol_type = other DNA
cgatgctgatccggcgcatgcgcggctggaggcggcccggccattgagcg

SEQ ID NO: 1910 - DNA, 50 bp, synthetic construct
  source 1..50: mol_type = other DNA
tttatacgaattgtgggtatggatgaatccctgcccacaagttgcataaa

SEQ ID NO: 1911 - DNA, 50 bp, synthetic construct
  source 1..50: mol_type = other DNA
gaaccttatctttattatactctaaaaagagaataatacctggacggttg

SEQ ID NO: 1912 - DNA, 50 bp, synthetic construct
  source 1..50: mol_type = other DNA
gcgcaacaggcacagaccctaccatccgaacgggtcagtcccgccctgct

SEQ ID NO: 1913 - DNA, 50 bp, synthetic construct
  source 1..50: mol_type = other DNA
aataaaactgacataaacaaaccgatatttttgttatagtcatttacatc

SEQ ID NO: 1914 - DNA, 50 bp, synthetic construct
  source 1..50: mol_type = other DNA
gaaagcgtcatgaagttcgggataatttgtccgaacttcagagctattat

SEQ ID NO: 1915 - DNA, 50 bp, synthetic construct
  source 1..50: mol_type = other DNA
gctcaaagctcacgccggaaaatccggtttcaccggaacgaattttgttg

SEQ ID NO: 1916 - DNA, 50 bp, synthetic construct
  source 1..50: mol_type = other DNA
ttgttcacgttcagtacgcaaatcatcatttccgcccttattaggaccag

SEQ ID NO: 1917 - DNA, 50 bp, synthetic construct
  source 1..50: mol_type = other DNA
tagtgataaattcttcactaaacctaaatatactgaagataatattttaa

SEQ ID NO: 1918 - DNA, 50 bp, synthetic construct
  source 1..50: mol_type = other DNA
attgctattttcattagatcacctcattgtgatggatttaaaattgtaaa

SEQ ID NO: 1919 - DNA, 50 bp, synthetic construct; identical to SEQ ID NO: 1191
  source 1..50: mol_type = other DNA

SEQ ID NO: 1920 - DNA, 50 bp, synthetic construct
  source 1..50: mol_type = other DNA
tttagataaattatattgtttatttagttagtcctcataatttacaaaaa

SEQ ID NO: 1921 - DNA, 50 bp, synthetic construct
  source 1..50: mol_type = other DNA
aatcctaattcaccgcgaacaagaattgatgtctaacatttttcgcaatt

SEQ ID NO: 1922 - DNA, 50 bp, synthetic construct
  source 1..50: mol_type = other DNA
ccagtttttcgaccgattctaataaccattagaatcaaggaatgaactgt

SEQ ID NO: 1923 - DNA, 50 bp, synthetic construct
  source 1..50: mol_type = other DNA
acaatattaatcacatcaccaaatattgatggtgaggttgaaacaatatt

SEQ ID NO: 1924 - DNA, 50 bp, synthetic construct
  source 1..50: mol_type = other DNA
agcttgggttcgcggttcttgaaccggttagctaaccacgaaccttcccg

SEQ ID NO: 1925 - DNA, 50 bp, synthetic construct
  source 1..50: mol_type = other DNA
cgctgaacagcgtgccggggtgcaaatacaccccggcgaactgttcacgc

SEQ ID NO: 1926 - DNA, 50 bp, synthetic construct
  source 1..50: mol_type = other DNA
ttccttttctataaatatagtatctagatggtatgagcttagaacaaata

SEQ ID NO: 1927 - DNA, 50 bp, synthetic construct
  source 1..50: mol_type = other DNA
gtcacccaggttatggaaaataaaatattgcatttcataaccttcatcac

SEQ ID NO: 1928 - DNA, 50 bp, synthetic construct
  source 1..50: mol_type = other DNA
tatatagctatcataaaatactccttggaaccttatagtatacaaaataa

SEQ ID NO: 1929 - DNA, 50 bp, synthetic construct
  source 1..50: mol_type = other DNA
gaatcaatgattactgtactttctatagaaaactccggcttcgctaatta

SEQ ID NO: 1930 - DNA, 50 bp, synthetic construct
  source 1..50: mol_type = other DNA
atagcattaagtcaggaattccactgaaattgatggtaaattaatgctaa

SEQ ID NO: 1931 - DNA, 50 bp, synthetic construct
  source 1..50: mol_type = other DNA
ttcgtttatattatggcgatgccattagaaagagggatgatataaatgaa

SEQ ID NO: 1932 - DNA, 50 bp, synthetic construct
  source 1..50: mol_type = other DNA
tttattatgccgtgaggcatggtgaacaaactacctgtaaaaatgcggtt

SEQ ID NO: 1933 - DNA, 50 bp, synthetic construct
  source 1..50: mol_type = other DNA
aagcgtttaaatttctattttcaaaccaagacatagaaatttctgtaccg

SEQ ID NO: 1934 - DNA, 50 bp, synthetic construct
  source 1..50: mol_type = other DNA
cgatgaatgtcccagcacccaatagctattggatactggaatgaaactcc

SEQ ID NO: 1935 - DNA, 50 bp, synthetic construct
  source 1..50: mol_type = other DNA
gttgcagcatttattaagaaccataacacatagttacaaaatccaccaca

SEQ ID NO: 1936 - DNA, 50 bp, synthetic construct
  source 1..50: mol_type = other DNA
atgttttaactgagatccaaccgtatacggttggcctaccattccaattt

SEQ ID NO: 1937 - DNA, 50 bp, synthetic construct
  source 1..50: mol_type = other DNA
accatatccgctaccgctccgatagttattgatgacagctgggatatgat

SEQ ID NO: 1938 - DNA, 50 bp, synthetic construct
  source 1..50: mol_type = other DNA
tttacttttaaatcttccttgtaatattaaaaggagtttctatttttaat

SEQ ID NO: 1939 - DNA, 50 bp, synthetic construct
  source 1..50: mol_type = other DNA
gcggaggatacggtgggcatatggccaaggatgccgacctgatcctcacc

SEQ ID NO: 1940 - DNA, 50 bp, synthetic construct
  source 1..50: mol_type = other DNA
cggctacttcgtcatcccggcgtccgaacgccgagaggatgacctcgcca

SEQ ID NO: 1941 - DNA, 50 bp, synthetic construct
  source 1..50: mol_type = other DNA
tatcatgtgatcagcctttctaataatggagaaaggctgcacattaagca

SEQ ID NO: 1942 - DNA, 50 bp, synthetic construct
  source 1..50: mol_type = other DNA
tggtgatctgggcactcgcggggccggccgccgtcgcgccgcctgctcgg

SEQ ID NO: 1943 - DNA, 50 bp, synthetic construct
  source 1..50: mol_type = other DNA
gtggcgaggacgagctggaaccgagccaggtcggcgatcgtccacgccac

SEQ ID NO: 1944 - DNA, 50 bp, synthetic construct
  source 1..50: mol_type = other DNA
tgggcgccgaggattcgggccaaagctcaactgcctctcctcggcgatcg

SEQ ID NO: 1945 - DNA, 50 bp, synthetic construct
  source 1..50: mol_type = other DNA
ccgggaggctcccgccgcgatcatcgatgagagcggccctgtacctgcgg

SEQ ID NO: 1946 - DNA, 50 bp, synthetic construct
  source 1..50: mol_type = other DNA
tcactttaaattttttgcttaatttaaagaaattaaaaaaattgtatcaa

SEQ ID NO: 1947 - DNA, 50 bp, synthetic construct
  source 1..50: mol_type = other DNA
acaatggccatcgtcgtgatcgcgtactcggccgagacgaaggccatccg

SEQ ID NO: 1948 - DNA, 50 bp, synthetic construct
  source 1..50: mol_type = other DNA
cgggggtgcactggccgtccgtggcgccacggacggccagtgcacccacg

SEQ ID NO: 1949 - DNA, 50 bp, synthetic construct
  source 1..50: mol_type = other DNA
gagtaaatttgtcagctatgcggatttctgtaaagctcactattttactc

SEQ ID NO: 1950 - DNA, 50 bp, synthetic construct
  source 1..50: mol_type = other DNA
ttatccatttgtcctccttgtctgtaataacatttaggagtaccgattat

SEQ ID NO: 1951 - DNA, 50 bp, synthetic construct
  source 1..50: mol_type = other DNA
cgttccaataggttgacaatggtattatccatcgtcaactatttggtaaa

SEQ ID NO: 1952 - DNA, 50 bp, synthetic construct
  source 1..50: mol_type = other DNA
tgaaagtcccttttgaaattaggtggacctaaaaacaaaagggacttaca

SEQ ID NO: 1953 - DNA, 50 bp, synthetic construct
  source 1..50: mol_type = other DNA
atattttctaattaattttttcttatagaaaaagattaattattaagcta

SEQ ID NO: 1954 - DNA, 50 bp, synthetic construct
  source 1..50: mol_type = other DNA
gtccaaaacgagaaaggtcttttacatatatcagctttctctgattgctt

SEQ ID NO: 1955 - DNA, 50 bp, synthetic construct
  source 1..50: mol_type = other DNA
agagaggcagttaattttatgcccattttttctttcttgaaagtccacta

SEQ ID NO: 1956 - DNA, 50 bp, synthetic construct
  source 1..50: mol_type = other DNA
ccgtgacctgcgcctcgttcatgccctctgaaaggaggccgtttccaatt

SEQ ID NO: 1957 - DNA, 50 bp, synthetic construct
  source 1..50: mol_type = other DNA
agtggcaaagaaacgtgtggccgcgtgcatcctgccctgcttttacgatg

SEQ ID NO: 1958 - DNA, 50 bp, synthetic construct
  source 1..50: mol_type = other DNA
attcccgcctcatacatgtgccgggaccgggcaatggctgaagcgggaat

SEQ ID NO: 1959 - DNA, 50 bp, synthetic construct
  source 1..50: mol_type = other DNA
tattatacattttaactcctttcgctagaaaggtgttaaaatgaaaacta

SEQ ID NO: 1960 - DNA, 50 bp, synthetic construct
  source 1..50: mol_type = other DNA
gcaggatctcgacggcgagataaggcccggagtcggcgtcccgcgcctgt

SEQ ID NO: 1961 - DNA, 50 bp, synthetic construct
  source 1..50: mol_type = other DNA
gacggctcaacgctgaagtaaacaaatgtttgttgaaaatgagaatggaa

SEQ ID NO: 1962 - DNA, 50 bp, synthetic construct
  source 1..50: mol_type = other DNA
tagcataggaaagataggtcttatcgctaataccactccatacgagctta

SEQ ID NO: 1963 - DNA, 50 bp, synthetic construct
  source 1..50: mol_type = other DNA
aaaagcatagatgtggtaaatggatgacaatttacgggtagtataaaagg

SEQ ID NO: 1964 - DNA, 50 bp, synthetic construct
  source 1..50: mol_type = other DNA
ataccggagaagcaataagctctccggagaagcaataagctctccggtat

SEQ ID NO: 1965 - DNA, 50 bp, synthetic construct
  source 1..50: mol_type = other DNA
attttaaagtagcatcatattgccacggtaatatgtgattactaaaggag

SEQ ID NO: 1966 - DNA, 50 bp, synthetic construct
  source 1..50: mol_type = other DNA
gctggtagtacaaataaaatcacctcctcgatttttttataaccgccaac

SEQ ID NO: 1967 - DNA, 50 bp, synthetic construct
  source 1..50: mol_type = other DNA
ggtgcgcgtaattttcgctccgttataagggaatcgttgttaatgagctg

SEQ ID NO: 1968 - DNA, 50 bp, synthetic construct
  source 1..50: mol_type = other DNA
tttgtatcgccatcctatgtccaacggtacgtataggcccgcgcaatgct

SEQ ID NO: 1969 - DNA, 50 bp, synthetic construct
  source 1..50: mol_type = other DNA
gaaagtttgtaaggtgtcttttgagaaaaaatcccaacaaacagactttc

SEQ ID NO: 1970 - DNA, 50 bp, synthetic construct
  source 1..50: mol_type = other DNA
atcatcagttccttcttccggttctggattatgaagaacaaaaagaattt

SEQ ID NO: 1971 - DNA, 50 bp, synthetic construct
  source 1..50: mol_type = other DNA
ttattctatgtaatcatctacacctaggtgtgagggatttttaaaattac

SEQ ID NO: 1972 - DNA, 50 bp, synthetic construct
  source 1..50: mol_type = other DNA
ggtgagaaatggcggactgcgtcacgttacggctcttgccatttctcacc

SEQ ID NO: 1973 - DNA, 50 bp, synthetic construct
  source 1..50: mol_type = other DNA
gtttccgcatagggtcaatggatgtccaccaaggtaaaatatgcctaacg

SEQ ID NO: 1974 - DNA, 50 bp, synthetic construct
  source 1..50: mol_type = other DNA
cggcatttcttaaagggcagcttcccaaagggaggtggaacgatatgcaa

SEQ ID NO: 1975 - DNA, 50 bp, synthetic construct
  source 1..50: mol_type = other DNA
tattataggtttctgccatacggtccaccatatagcagaaacctataata

SEQ ID NO: 1976 - DNA, 50 bp, synthetic construct
  source 1..50: mol_type = other DNA
atctttacattccccaaaattctttaaaactttttgaagaacagaaagtc

SEQ ID NO: 1977 - DNA, 50 bp, synthetic construct
  source 1..50: mol_type = other DNA
aatccgcgaggtaggcgcccttatgcatagagttcgattctccgcggtac

SEQ ID NO: 1978 - DNA, 50 bp, synthetic construct
  source 1..50: mol_type = other DNA
tatgatcttattatacaccaatattgatactggtcggtagcgtgatcgta

SEQ ID NO: 1979 - DNA, 50 bp, synthetic construct
  source 1..50: mol_type = other DNA
agataatgccataatattttcatagctatgaaaaaataaagttatgaaaa

SEQ ID NO: 1980 - DNA, 50 bp, synthetic construct
  source 1..50: mol_type = other DNA
aacctctaacatttaagttattgctgtcaaagcataaaatgttataggtt

SEQ ID NO: 1981 - DNA, 50 bp, synthetic construct
  source 1..50: mol_type = other DNA
ttcaataaagagactgtagaacaaggatattctaccatgtctcgcaagct

SEQ ID NO: 1982 - DNA, 50 bp, synthetic construct
  source 1..50: mol_type = other DNA
tatttataaaacggtcagtcttatgaaaaagactgaccgttttataatct

SEQ ID NO: 1983 - DNA, 50 bp, synthetic construct
  source 1..50: mol_type = other DNA
taaagtatagcagattttttgtcgttgataatgaactctgctatctcaaa

SEQ ID NO: 1984 - DNA, 50 bp, synthetic construct
  source 1..50: mol_type = other DNA
attattaaagaaatattaaattatattcaattccatatttattttcaata

SEQ ID NO: 1985 - DNA, 50 bp, synthetic construct
  source 1..50: mol_type = other DNA
tttatatccggtcaggcacttgtcccgcaaagtgccggacaggacggaaa

SEQ ID NO: 1986 - DNA, 50 bp, synthetic construct
  source 1..50: mol_type = other DNA
caaacggccccgaattctaccaaacgttgacaagatccagcatccgtttg

SEQ ID NO: 1987 - DNA, 50 bp, synthetic construct
  source 1..50: mol_type = other DNA
gcctactgaacagttggtggaggcgcggtatctataagtaataaaaaagc

SEQ ID NO: 1988 - DNA, 50 bp, synthetic construct
  source 1..50: mol_type = other DNA
tattttacttgtagtaatttgccatatgtcaatttactacaataaaaaag

SEQ ID NO: 1989 - DNA, 50 bp, synthetic construct
  source 1..50: mol_type = other DNA
ccgatactgacgaatcctccaagccgtgcaaagggagattcgatggtcga

SEQ ID NO: 1990 - DNA, 50 bp, synthetic construct
  source 1..50: mol_type = other DNA
tttgtcattgtgtaatgttccttttaatgaacatcctacaaaggctcaaa

SEQ ID NO: 1991 - DNA, 50 bp, synthetic construct
  source 1..50: mol_type = other DNA
gacaccgcaagaaattgcggtgttttgacaaaatagcctcttgcagttaa

SEQ ID NO: 1992 - DNA, 50 bp, synthetic construct
  source 1..50: mol_type = other DNA
gtatatggccttttgcaccaaggcccatgctggtgcaaaagggctaccgg

SEQ ID NO: 1993 - DNA, 50 bp, synthetic construct
  source 1..50: mol_type = other DNA
tgagcaggatcatggtacaatgaaattcgattttactatcgggatgctga

SEQ ID NO: 1994 - DNA, 50 bp, synthetic construct
  source 1..50: mol_type = other DNA
gacattggaaatctatatttgtgaattcacaaaataaagtgaataatatc

SEQ ID NO: 1995 - DNA, 50 bp, synthetic construct
  source 1..50: mol_type = other DNA
ttatgacatatactaataaaaagtatatgtcttacaaatatatccaataa

SEQ ID NO: 1996 - DNA, 50 bp, synthetic construct
  source 1..50: mol_type = other DNA
taatgtaacaacctgtactgtgtgtgcttccagtacaggttgttacaccg

SEQ ID NO: 1997 - DNA, 50 bp, synthetic construct
  source 1..50: mol_type = other DNA
aaatgcagctctcatatctgttacatgaaacagagctagcattttcattt

SEQ ID NO: 1998 - DNA, 50 bp, synthetic construct
  source 1..50: mol_type = other DNA
ttgtatcatccatatttacctattataaacaaacaaaaaactaggatttc

SEQ ID NO: 1999 - DNA, 50 bp, synthetic construct
  source 1..50: mol_type = other DNA
tttcttcatattctttcataggtcatattccatgaaaaaatttttgaaaa

SEQ ID NO: 2000 - DNA, 50 bp, synthetic construct
  source 1..50: mol_type = other DNA
gtggtcggcggtgtaccggatggccggcccagcgggaaaagaccgcatga

SEQ ID NO: 2001 - DNA, 50 bp, synthetic construct
  source 1..50: mol_type = other DNA
tttatatacatacgtttaaaaatgatcatttttatgtaacgaaggatggc

SEQ ID NO: 2002 - DNA, 50 bp, synthetic construct
  source 1..50: mol_type = other DNA
ttccttttagtatcgttcgtatcatattatatattccatactacttcaca

SEQ ID NO: 2003 - DNA, 50 bp, synthetic construct
  source 1..50: mol_type = other DNA
taaaataatgtcaagtccttatctatccattcggatttgacaagcctgag

SEQ ID NO: 2004 - DNA, 50 bp, synthetic construct
  source 1..50: mol_type = other DNA
tataatatgcttacagataaatagtactttgcatatattgacaaattata

SEQ ID NO: 2005 - DNA, 50 bp, synthetic construct
  source 1..50: mol_type = other DNA
cagacgctccgcccccaagcggttgtaaccgctgtatttgcacggttatg

SEQ ID NO: 2006 - DNA, 50 bp, synthetic construct
  source 1..50: mol_type = other DNA
agaagcattgaggattcgatgcttctcgctgtcggatttcaggcgctcca

SEQ ID NO: 2007 - DNA, 50 bp, synthetic construct
  source 1..50: mol_type = other DNA
tgcagcagcgcatgacgctggagcaggcgtatccgtcatgctatgccacc

SEQ ID NO: 2008 - DNA, 50 bp, synthetic construct
  source 1..50: mol_type = other DNA
aaaaatgaacacaaaatataaaaaattttttatttttcttccagtatttt

SEQ ID NO: 2009 - DNA, 50 bp, synthetic construct
  source 1..50: mol_type = other DNA
tataaccactatttgcagcgtggcggtccagactgcaaatagtggttata

SEQ ID NO: 2010 - DNA, 50 bp, synthetic construct
  source 1..50: mol_type = other DNA
taagcgaggtgtttcagatgcaagaaaatgctgatgaaacccctagcttc

SEQ ID NO: 2011 - DNA, 50 bp, synthetic construct
  source 1..50: mol_type = other DNA
ggccggaatatcaagcgttttccgatgttgatcagcttgatgttttgtca

SEQ ID NO: 2012 - DNA, 50 bp, synthetic construct
  source 1..50: mol_type = other DNA
gatattactttcttacgacccccgacgggtgctcataagaaagtaattcc

SEQ ID NO: 2013 - DNA, 50 bp, synthetic construct
  source 1..50: mol_type = other DNA
aaagtgaataaggtttgcaccttcatgaccgatagttcctttatgctttg

SEQ ID NO: 2014 - DNA, 50 bp, synthetic construct
  source 1..50: mol_type = other DNA
gtttcattgtctcgcctcctgtccttcgacgagaagcgaggcaataaccc

SEQ ID NO: 2015 - DNA, 50 bp, synthetic construct
  source 1..50: mol_type = other DNA
atcaattgataatgtttatattgtaaacaatatatacattaattatagat

SEQ ID NO: 2016 - DNA, 50 bp, synthetic construct
  source 1..50: mol_type = other DNA
aatttgtatagaattatttcttttcgccaacaagccattctggaaaaagc

SEQ ID NO: 2017 - DNA, 50 bp, synthetic construct
  source 1..50: mol_type = other DNA
aatgagtattacgatatcagttcgtagaatgtgatatcgatacaattgaa

SEQ ID NO: 2018 - DNA, 50 bp, synthetic construct
  source 1..50: mol_type = other DNA
tctttctggtagccatacggtgtaaattaccaggatgaatatcagaaagc

SEQ ID NO: 2019 - DNA, 50 bp, synthetic construct
  source 1..50: mol_type = other DNA
ataaagaaacacgcccagcctattaatcaaggcggggcgtgctgctattt

SEQ ID NO: 2020 - DNA, 50 bp, synthetic construct
  source 1..50: mol_type = other DNA
ccagtcccagcattagagtctgatccgctgtgcggtaatgctgttgcttt

SEQ ID NO: 2021 - DNA, 50 bp, synthetic construct
  source 1..50: mol_type = other DNA
tatgcgtaaagtaagtttatcggtgtagccatagacttattttacgcata

SEQ ID NO: 2022 - DNA, 50 bp, synthetic construct
  source 1..50: mol_type = other DNA
atatataagtgaaggcctccgggtaaggccggacgccccgtctgtgggag

SEQ ID NO: 2023 - DNA, 50 bp, synthetic construct
  source 1..50: mol_type = other DNA
ccttgcttcaatgttttcctaagtcaacatgaaaaagcagcccgacaaaa

SEQ ID NO: 2024 - DNA, 50 bp, synthetic construct
  source 1..50: mol_type = other DNA
cctgttgtgccatgtcaggccggactcgcaaatacactcggcagcgagta

SEQ ID NO: 2025 - DNA, 50 bp, synthetic construct
  source 1..50: mol_type = other DNA
tactggagatgatataattcacttggctctggataagatcatcgatttcg

SEQ ID NO: 2026 - DNA, 50 bp, synthetic construct
  source 1..50: mol_type = other DNA
ggataccgggaaaggcgtaaagcaggcctttttttggttttacggtaatg

SEQ ID NO: 2027 - DNA, 50 bp, synthetic construct
  source 1..50: mol_type = other DNA
aatgctatttcagcatctcatagcgcagtatattccgctgaaatggctgg

SEQ ID NO: 2028 - DNA, 50 bp, synthetic construct
  source 1..50: mol_type = other DNA
gctttcacggtcatagccgacggtcatcgatcggctggattcgcgcatga

SEQ ID NO: 2029 - DNA, 50 bp, synthetic construct
  source 1..50: mol_type = other DNA
gggttaactcaccgccgaaaaaagctgttttttcggcatttaggcaacct

SEQ ID NO: 2030 - DNA, 50 bp, synthetic construct
  source 1..50: mol_type = other DNA
taataggtactttctcgcattccaaccggaagtatagaaagttcctgccg

SEQ ID NO: 2031 - DNA, 50 bp, synthetic construct
  source 1..50: mol_type = other DNA
tcctaattatcatacatacgaaaatgacctcgtatctatgatagaataaa

SEQ ID NO: 2032 - DNA, 50 bp, synthetic construct
  source 1..50: mol_type = other DNA
catcgtagtttaatgaagtaaggcccgccatactccattagactatgatt

SEQ ID NO: 2033 - DNA, 50 bp, synthetic construct
  source 1..50: mol_type = other DNA
tttttaattggtgtaccataacactagtattgaggtttaaaaaataaaaa

SEQ ID NO: 2034 - DNA, 50 bp, synthetic construct
  source 1..50: mol_type = other DNA
gtagattttttgtaaattattttgtacaaaataaatttaaactaagatga

SEQ ID NO: 2035 - DNA, 50 bp, synthetic construct
  source 1..50: mol_type = other DNA
tcttcggttttaggttgtgtgttctaaaacaagcaacactaaaatatccg

SEQ ID NO: 2036 - DNA, 50 bp, synthetic construct
  source 1..50: mol_type = other DNA
atcttttctagttacaaatgtacgatcgtacatttgtaatcggaaactgt

SEQ ID NO: 2037 - DNA, 50 bp, synthetic construct
  source 1..50: mol_type = other DNA
tatcatctggtattgcattccggtggtccggagttcaataccagatgata

SEQ ID NO: 2038 - DNA, 50 bp, synthetic construct
  source 1..50: mol_type = other DNA
attcaatattatatacaaatgggtgtaccgatctgtatataatattgaat

SEQ ID NO: 2039 - DNA, 50 bp, synthetic construct
  source 1..50: mol_type = other DNA
tatgtaagtgctaataataaatgcgcacatttctacacaaaggaggaata

SEQ ID NO: 2040 - DNA, 50 bp, synthetic construct
  source 1..50: mol_type = other DNA
caagaaaaagcctaccggctgtcccctaccacgaggcaggccacgctgtg

SEQ ID NO: 2041 - DNA, 50 bp, synthetic construct
  source 1..50: mol_type = other DNA
cataaattataccgcattatctccatgaataaagcgcgttataatttagt

SEQ ID NO: 2042 - DNA, 50 bp, synthetic construct
  source 1..50: mol_type = other DNA
ttttctaaaaatgtattgtctataaatatacagattacctttagtgattt

SEQ ID NO: 2043 - DNA, 50 bp, synthetic construct
  source 1..50: mol_type = other DNA
tttccttcatcctttgccacctcgataaaggtggtaaatcatgaacgaaa

SEQ ID NO: 2044 - DNA, 50 bp, synthetic construct
  source 1..50: mol_type = other DNA
tgttgaagaagacataagtatatgggtagaggataatgagagattcaaag

SEQ ID NO: 2045 - DNA, 50 bp, synthetic construct
  source 1..50: mol_type = other DNA
aatttaaaaattaatactttatgaactaataaagccttaaaagataagag

SEQ ID NO: 2046 - DNA, 50 bp, synthetic construct
  source 1..50: mol_type = other DNA
caaggcctgaaaacggtgcaaaagtaggtatggacgaatatcaggcactg

SEQ ID NO: 2047 - DNA, 50 bp, synthetic construct
  source 1..50: mol_type = other DNA
ctataatgcttttattaatcatgttaaaaaaattatggaaagtatgatag

SEQ ID NO: 2048 - DNA, 50 bp, synthetic construct
  source 1..50: mol_type = other DNA
cagtattttactcgccgccattgcgagcaataagttcgagtacaatattt

SEQ ID NO: 2049 - DNA, 50 bp, synthetic construct
  source 1..50: mol_type = other DNA
ggactttcttcgggcgcagtttgttaaaggactttgcaaaaagaaactgg

SEQ ID NO: 2050 - DNA, 50 bp, synthetic construct
  source 1..50: mol_type = other DNA
gatctgcatgctttgccatgatgtagatgaactgaaaaaattcgcagaac

SEQ ID NO: 2051 - DNA, 50 bp, synthetic construct
  source 1..50: mol_type = other DNA
aatctgccttgtaatgatttctatctattgacatcattatgattaagatt

SEQ ID NO: 2052 - DNA, 50 bp, synthetic construct
  source 1..50: mol_type = other DNA
gtgttgattcgctttttcatgccgtctaatggaaaaacgcatcatcacca

SEQ ID NO: 2053 - DNA, 50 bp, synthetic construct
  source 1..50: mol_type = other DNA
acggctgcgccacgattaaagaggatccttataaatcggattcgggctca

SEQ ID NO: 2054 - DNA, 50 bp, synthetic construct
  source 1..50: mol_type = other DNA
gtctaccagttccagcttctgctccggagcagaagcagttggagaccgag

SEQ ID NO: 2055 - DNA, 50 bp, synthetic construct
  source 1..50: mol_type = other DNA
aagtttctttaagtaagggaaacgggcctttcccatagttaaagaagcgg

SEQ ID NO: 2056 - DNA, 50 bp, synthetic construct
  source 1..50: mol_type = other DNA
tttaaataaggcatctataagttgtacccggtaaagattgcaaacccaaa

SEQ ID NO: 2057 - DNA, 50 bp, synthetic construct
  source 1..50: mol_type = other DNA
agttgtgctaatgagcatgagacttaagtctgttatcaatatgcacaacc

SEQ ID NO: 2058 - DNA, 50 bp, synthetic construct
  source 1..50: mol_type = other DNA
atatcccggcatttcattaccgaaatatctgttgaccgatgccgggattc

SEQ ID NO: 2059 - DNA, 50 bp, synthetic construct
  source 1..50: mol_type = other DNA
tccacagaggaaaagcaatacagtaaatgacattggatttgcaatggtat

SEQ ID NO: 2060 - DNA, 50 bp, synthetic construct
  source 1..50: mol_type = other DNA
tttcaaaggctttgtggtattgttataatattactgcaattttgaaaaaa

SEQ ID NO: 2061 - DNA, 50 bp, synthetic construct
  source 1..50: mol_type = other DNA
caaatttatctccaacatcataacgatttttatgtatgcagataattatc

SEQ ID NO: 2062 - DNA, 50 bp, synthetic construct
  source 1..50: mol_type = other DNA
acttcaacacggtagatgccgtcgtcttgtggcacaaagttttgtgtttc

SEQ ID NO: 2063 - DNA, 50 bp, synthetic construct
  source 1..50: mol_type = other DNA
ttaaaagggtacttgcaaaaacaagtaggttttattcatattcctgctgt

SEQ ID NO: 2064 - DNA, 50 bp, synthetic construct
  source 1..50: mol_type = other DNA
ccagaaagttaatggcttttgattgcaaccagaagccattagcacctgaa

SEQ ID NO: 2065 - DNA, 50 bp, synthetic construct
  source 1..50: mol_type = other DNA
caccaattcactctgacttgacactagtgtcaagttagtgagaagccagt

SEQ ID NO: 2066 - DNA, 50 bp, synthetic construct
  source 1..50: mol_type = other DNA
ttagagatttcaatgtcatatgtaccaaaagaaggatacaaaatcacttc

SEQ ID NO: 2067 - DNA, 50 bp, synthetic construct
  source 1..50: mol_type = other DNA
tgactgagacttataaattctcgcttgcgagattatttacgccctcaatt

SEQ ID NO: 2068 - DNA, 50 bp, synthetic construct
  source 1..50: mol_type = other DNA
cttatgtatcttgttgccatagctgtatagatagcaacaagatacataac

SEQ ID NO: 2069 - DNA, 50 bp, synthetic construct
  source 1..50: mol_type = other DNA
taagtcctaaaactattgctggttataaccatcaaatttattattatttt

SEQ ID NO: 2070 - DNA, 50 bp, synthetic construct
  source 1..50: mol_type = other DNA
gctcggagatataatagctgtactgttcttcagcttttgcatctctatca

SEQ ID NO: 2071 - DNA, 50 bp, synthetic construct
  source 1..50: mol_type = other DNA
ggaaaggtaaagatgctctatttaattacataataccttcttatacaagt

SEQ ID NO: 2072 - DNA, 50 bp, synthetic construct
  source 1..50: mol_type = other DNA
gcccatccggccaggtgcaaaacgcccgttttcaccccgaaaatcgggga

SEQ ID NO: 2073 - DNA, 50 bp, synthetic construct
  source 1..50: mol_type = other DNA
tctctccgcctcctttcctcgggtcgaaaatgcattgggaggcggagaga

SEQ ID NO: 2074 - DNA, 50 bp, synthetic construct
  source 1..50: mol_type = other DNA
caaaaaacttgcttttttcaaagcaacctttgaaaaatacagcatttttg

SEQ ID NO: 2075 - DNA, 50 bp, synthetic construct
  source 1..50: mol_type = other DNA
tcttttcgtgctttataagagtttataaaagccaaaaacaacggaaatac

SEQ ID NO: 2076 - DNA, 50 bp, synthetic construct
  source 1..50: mol_type = other DNA
tcatcgccttctacttttttctcatttttcaaaaaaatagtatatctttg

SEQ ID NO: 2077 - DNA, 50 bp, synthetic construct
  source 1..50: mol_type = other DNA
atcagcccgtccaccgccttgccgatcggcgcggcggtaaatctgctgac

SEQ ID NO: 2078 - DNA, 50 bp, synthetic construct
  source 1..50: mol_type = other DNA
caactttatttctatcattaatgagctcgtaaatgatagaaataaaaaga

SEQ ID NO: 2079 - DNA, 50 bp, synthetic construct
  source 1..50: mol_type = other DNA
gcgtttaatgcttccggcattattataataacgcggagtatattactacg

SEQ ID NO: 2080 - DNA, 50 bp, synthetic construct
  source 1..50: mol_type = other DNA
ttttgttaatcataacatttggagtatcccaaaagttataattcaaaaac

SEQ ID NO: 2081 - DNA, 50 bp, synthetic construct
  source 1..50: mol_type = other DNA
taagaccgaaatcttaactcttttattcatcaccatatatccttattata

SEQ ID NO: 2082 - DNA, 50 bp, synthetic construct
  source 1..50: mol_type = other DNA
tatttaaatatttttatcaattccatggaacttgtggtgtaacttattta

SEQ ID NO: 2083 - DNA, 50 bp, synthetic construct
  source 1..50: mol_type = other DNA
ttacaatacaaaaaaaaacattcatttttatgtaacatttttaaatgtaa

SEQ ID NO: 2084 - DNA, 50 bp, synthetic construct
  source 1..50: mol_type = other DNA
cggattgcttccgtagcggaggacggattctccgcacgtagcatcttccg

SEQ ID NO: 2085 - DNA, 50 bp, synthetic construct
  source 1..50: mol_type = other DNA
ttattattaaactcttattattaaatttaattacctatagttaatatttc

SEQ ID NO: 2086 - DNA, 50 bp, synthetic construct
  source 1..50: mol_type = other DNA
aaaggtcgaatatatgtaacgttaaataaagtatatcttatggcacgatt

SEQ ID NO: 2087 - DNA, 50 bp, synthetic construct
  source 1..50: mol_type = other DNA
gacgcacggatattgtggtataatatattatgccagaatcgaaggtagtc

SEQ ID NO: 2088 - DNA, 50 bp, synthetic construct
  source 1..50: mol_type = other DNA
ttaagtttacggatactctcattgtcaaattggaatttcattccgtggtc

SEQ ID NO: 2089 - DNA, 50 bp, synthetic construct
  source 1..50: mol_type = other DNA
atatcgtgagaaaggagcctaagcataatgagcctccttactttaataag

SEQ ID NO: 2090 - DNA, 50 bp, synthetic construct
  source 1..50: mol_type = other DNA
caacgcttttttgaaaaaaataaaaattaaacaacttaaagaaaagcctg

SEQ ID NO: 2091 - DNA, 50 bp, synthetic construct
  source 1..50: mol_type = other DNA
cttaaagaaaaggtggtgagataaatctattccaccaccttttatcgaag

SEQ ID NO: 2092 - DNA, 50 bp, synthetic construct
  source 1..50: mol_type = other DNA
atgattttaatctccgcaaaaaccaagagttttccattgagaaaaatccg

SEQ ID NO: 2093 - DNA, 50 bp, synthetic construct
  source 1..50: mol_type = other DNA
ctaaatacaatgcaagttcagtaattttacctaatttatttgataattaa

SEQ ID NO: 2094 - DNA, 50 bp, synthetic construct
  source 1..50: mol_type = other DNA
tgctttctctgatgcgagtgcagcttgctccactcgaaacacagaatctt

SEQ ID NO: 2095 - DNA, 50 bp, synthetic construct
  source 1..50: mol_type = other DNA
ccatatttttacctccggttgaaattttgcaaggcttagttgaaaggaag

SEQ ID NO: 2096 - DNA, 50 bp, synthetic construct
  source 1..50: mol_type = other DNA
ccagcagcgtgacctcgggcagatccctgatgtgatggaaatgctgctgc

SEQ ID NO: 2097 - DNA, 50 bp, synthetic construct
  source 1..50: mol_type = other DNA
ctcgtatgtatattttcctgttttgcaaatgtcaaaaaaatacgcattca

SEQ ID NO: 2098 - DNA, 50 bp, synthetic construct
  source 1..50: mol_type = other DNA
ttttgagtgttccttattaaagccgcggcacaaatagggaacgtccctaa

SEQ ID NO: 2099 - DNA, 50 bp, synthetic construct
  source 1..50: mol_type = other DNA
attatttgaattttcttataatattggagttataagaaaaaataaaggta

SEQ ID NO: 2100 - DNA, 50 bp, synthetic construct
  source 1..50: mol_type = other DNA
gttatatcatttggtttactgcttaaaagcagtaaattcaactattgtat

SEQ ID NO: 2101 - DNA, 50 bp, synthetic construct
  source 1..50: mol_type = other DNA
aatcatttttagcatttataaaagcatatttataaatgcgctcgcctttt

SEQ ID NO: 2102 - DNA, 50 bp, synthetic construct
  source 1..50: mol_type = other DNA
atatatgaattgccttttctttttccaaaaagaaaaagtttttcgagtat

SEQ ID NO: 2103 - DNA, 50 bp, synthetic construct
  source 1..50: mol_type = other DNA
atgttgtcgataggcagccgacaggaccctgagctgtttaactacaactg

SEQ ID NO: 2104 - DNA, 50 bp, synthetic construct
  source 1..50: mol_type = other DNA
atctggtctcccgtgaacatacgggatgcgatgttcattggagaccagat

SEQ ID NO: 2105 - DNA, 50 bp, synthetic construct
  source 1..50: mol_type = other DNA
attcgacctccacagaattgtccattaagacaatcctgtgtgggaaaacg

SEQ ID NO: 2106 - DNA, 50 bp, synthetic construct
  source 1..50: mol_type = other DNA
ttcaccatatgatttataaaattaaatatcatcataaatcatatccataa

SEQ ID NO: 2107 - DNA, 50 bp, synthetic construct
  source 1..50: mol_type = other DNA
ttgtttactaacacactataaccgacgggttatagtgtgttagtaaacgt

SEQ ID NO: 2108 - DNA, 50 bp, synthetic construct
  source 1..50: mol_type = other DNA
atgtatgcagattttgaaaagttaatgatttctaaaaaatctgaaatgat

SEQ ID NO: 2109 - DNA, 50 bp, synthetic construct
  source 1..50: mol_type = other DNA
aagtgattcatcaataggtatttcttgaagtactaatttatacctcaatt

SEQ ID NO: 2110 - DNA, 50 bp, synthetic construct; identical to SEQ ID NO: 2063
  source 1..50: mol_type = other DNA

SEQ ID NO: 2111 - DNA, 50 bp, synthetic construct
  source 1..50: mol_type = other DNA
atcctttactattttttccatagttgactatcttcaaaataaaaaagtgc

SEQ ID NO: 2112 - DNA, 50 bp, synthetic construct
  source 1..50: mol_type = other DNA
ttgtctagctttttctttcatatcatgaaataggtgaaaaagtataccaa

SEQ ID NO: 2113 - DNA, 50 bp, synthetic construct
  source 1..50: mol_type = other DNA
aagaatttctacgctttcaacccatcacagctgaaattgtagaaatcaat

SEQ ID NO: 2114 - DNA, 50 bp, synthetic construct
  source 1..50: mol_type = other DNA
ttaacaatgaaaaataatgttagatttatgccatcgtttttcattagtat

SEQ ID NO: 2115 - DNA, 50 bp, synthetic construct
  source 1..50: mol_type = other DNA
gatataaaatcgaaaagggtcttccggaaggtataacgggaggttatctc

SEQ ID NO: 2116 - DNA, 50 bp, synthetic construct
  source 1..50: mol_type = other DNA
gaaagttacagcataacaaaccaacgtttatttggatatcgacttgagaa

SEQ ID NO: 2117 - DNA, 50 bp, synthetic construct
  source 1..50: mol_type = other DNA
aaaaattgtacttcatactgtgtctagacgctgtatgaagtacaacaaaa

SEQ ID NO: 2118 - DNA, 50 bp, synthetic construct
  source 1..50: mol_type = other DNA
atgttgaagtagtgcttgtaacattaatgttacaagcatagaataaaaat

SEQ ID NO: 2119 - DNA, 50 bp, synthetic construct
  source 1..50: mol_type = other DNA
cggccaagaaccaacaaaagttagatctaacttttgttggttttgaaaaa

SEQ ID NO: 2120 - DNA, 50 bp, synthetic construct
  source 1..50: mol_type = other DNA
accacatgttgatactgttaaagaattgttcaactgtattaacctgattt

SEQ ID NO: 2121 - DNA, 50 bp, synthetic construct
  source 1..50: mol_type = other DNA
ttacttgcagctaaacgtgaattacataatacaccttgatatttacgcga

SEQ ID NO: 2122 - DNA, 50 bp, synthetic construct
  source 1..50: mol_type = other DNA
ttacatcctattcggtttcgaacaattgtcagaaaatatttcttttacaa

SEQ ID NO: 2123 - DNA, 50 bp, synthetic construct
  source 1..50: mol_type = other DNA
tcttataagttctttaccttcatccaaatgaggaatttgtggaaataaga

SEQ ID NO: 2124 - DNA, 50 bp, synthetic construct
  source 1..50: mol_type = other DNA
tggcatcttaaatgagaaaagttaagcatcatttttaattctagtaagtt

SEQ ID NO: 2125 - DNA, 50 bp, synthetic construct
  source 1..50: mol_type = other DNA
ttgatttttaatttttttcataaaaagttgcggaaaagcttagaaatatg

SEQ ID NO: 2126 - DNA, 50 bp, synthetic construct
  source 1..50: mol_type = other DNA
ccggctgatcacggaccccgccagcactggcggtctgcgggatcaccgct

SEQ ID NO: 2127 - DNA, 50 bp, synthetic construct
  source 1..50: mol_type = other DNA
attttaaggacgaaaaaagcacggtatattgcacttttgcaaagaaaaaa

SEQ ID NO: 2128 - DNA, 50 bp, synthetic construct
  source 1..50: mol_type = other DNA
atacttcatcgcaagctcatgtatctatacacctacttggcatgaacata

SEQ ID NO: 2129 - DNA, 50 bp, synthetic construct
  source 1..50: mol_type = other DNA
cccggcagatactgccgaagcaatatcgcgcagctggagtttctggcgga

SEQ ID NO: 2130 - DNA, 50 bp, synthetic construct
  source 1..50: mol_type = other DNA
ggagttttggggtaatatggtgggttccctatatactttatcaaaatttc

SEQ ID NO: 2131 - DNA, 50 bp, synthetic construct
  source 1..50: mol_type = other DNA
tctagatgccacttattaccttttgaaaaagtgaataagtatcatctata

SEQ ID NO: 2132 - DNA, 50 bp, synthetic construct
  source 1..50: mol_type = other DNA
tgtcgtcaccttgttggtgtaattaggtttacaccaacaaggtgacaaca

SEQ ID NO: 2133 - DNA, 50 bp, synthetic construct
  source 1..50: mol_type = other DNA
tgctcgccccgcactggacgaagcgctggtcatcgggtgcgctccggggg

SEQ ID NO: 2134 - DNA, 50 bp, synthetic construct
  source 1..50: mol_type = other DNA
cgtgcgggcgcgataaataagggccggcgcttcgccgaggcgtccgcacc

SEQ ID NO: 2135 - DNA, 50 bp, synthetic construct
  source 1..50: mol_type = other DNA
gggtgtacatacttgactaactaggagcagttatgatagtatgtacaccc

SEQ ID NO: 2136 - DNA, 50 bp, synthetic construct
  source 1..50: mol_type = other DNA
tcctggcgacctttattcgccgtatttacatatgatggggggatcagcga

SEQ ID NO: 2137 - DNA, 50 bp, synthetic construct
  source 1..50: mol_type = other DNA
atttagaacgtcacttaaccaaagatctttcgtagaataacgtgcataaa

SEQ ID NO: 2138 - DNA, 50 bp, synthetic construct
  source 1..50: mol_type = other DNA
atcatcgtgtggagatatttggtcatgaccagttttcttcacacgatggt

SEQ ID NO: 2139 - DNA, 50 bp, synthetic construct
  source 1..50: mol_type = other DNA
tctgtggacatgcgcagatactcggccgacgcgctgagcgccgtcagagc

SEQ ID NO: 2140 - DNA, 50 bp, synthetic construct
  source 1..50: mol_type = other DNA
ttatttaggtattagtctaatgtagcgtgattagacagaatatctaatat

SEQ ID NO: 2141 - DNA, 50 bp, synthetic construct
  source 1..50: mol_type = other DNA
ttttaaatagaagtttcaccagattaacttggtgaaacttgaattatata

SEQ ID NO: 2142 - DNA, 50 bp, synthetic construct
  source 1..50: mol_type = other DNA
aatgaaagttttgaacacaggccgtttgggttgtgtggaagcattgaatc

SEQ ID NO: 2143 - DNA, 50 bp, synthetic construct
  source 1..50: mol_type = other DNA
ttttacataatttcgtatattaggtacctaatatacgaaaaaggtgtaaa

SEQ ID NO: 2144 - DNA, 50 bp, synthetic construct
  source 1..50: mol_type = other DNA
gttccgtcgcattatcccgcgatcgagatagcgcgataatcggaccagtt

SEQ ID NO: 2145 - DNA, 50 bp, synthetic construct
  source 1..50: mol_type = other DNA
tcgacaggggtaaaatacccttcacatgattggtattgtgaccccatcag

SEQ ID NO: 2146 - DNA, 50 bp, synthetic construct
  source 1..50: mol_type = other DNA
atttttttgactatctgtcatatttaaatatggcatttaatagttggaaa

SEQ ID NO: 2147 - DNA, 50 bp, synthetic construct
  source 1..50: mol_type = other DNA
catctactttaattatactttggctggctaaaagataatgaaggtagata

SEQ ID NO: 2148 - DNA, 50 bp, synthetic construct
  source 1..50: mol_type = other DNA
agcgcacaaccaacgttgtgtattatgcttgacaaagagcatgaagcgga

SEQ ID NO: 2149 - DNA, 50 bp, synthetic construct; identical to SEQ ID NO: 1187
  source 1..50: mol_type = other DNA

SEQ ID NO: 2150 - DNA, 50 bp, synthetic construct
  source 1..50: mol_type = other DNA
aatatatggtaacctgcttatactctgctataacgaggttagaatcatac

SEQ ID NO: 2151 - DNA, 50 bp, synthetic construct
  source 1..50: mol_type = other DNA
aggatgcggccacgtgcgcgtcgatgccgccgcgaccgtcgcacgcgcct

SEQ ID NO: 2152 - DNA, 50 bp, synthetic construct
  source 1..50: mol_type = other DNA
gaggatcagccatccctgtcccgccggcgggtgaggaatggtccttcccg

SEQ ID NO: 2153 - DNA, 50 bp, synthetic construct
  source 1..50: mol_type = other DNA
ggggcgaccgatcgcgcgaggcggcgtcacgatctccgacacgtcgccgg

SEQ ID NO: 2154 - DNA, 50 bp, synthetic construct
  source 1..50: mol_type = other DNA
gtcattgataaggttacctacgttcttattcaggaaacccgcagaatgga

SEQ ID NO: 2155 - DNA, 50 bp, synthetic construct
  source 1..50: mol_type = other DNA
gacggcccgcacctcgtcgagatagctgcctcgtgaagctccgcggcgtc

SEQ ID NO: 2156 - DNA, 50 bp, synthetic construct
  source 1..50: mol_type = other DNA
ccactgcatttgaccataaatggatttccttttatgttccaatagccttg

SEQ ID NO: 2157 - DNA, 50 bp, synthetic construct
  source 1..50: mol_type = other DNA
tgatccatcttctaagagcaaaagaagttaagctcttgtatgatgatttc

SEQ ID NO: 2158 - DNA, 50 bp, synthetic construct
  source 1..50: mol_type = other DNA
gtatttcatgccgcctgttaaatgcacatttcacaggcggcttgataatc

SEQ ID NO: 2159 - DNA, 50 bp, synthetic construct
  source 1..50: mol_type = other DNA
agccaacaggtttctttcagttccaggaaaggagaagaaaaatgaaggca

SEQ ID NO: 2160 - DNA, 50 bp, synthetic construct
  source 1..50: mol_type = other DNA
tggcccgaacagaaggaccgtggcgctcgtcggtgtacctggaagggcgc

SEQ ID NO: 2161 - DNA, 50 bp, synthetic construct
  source 1..50: mol_type = other DNA
aataggtctagctgtgacggaactcccacatggtcacagctcgtccaccc

SEQ ID NO: 2162 - DNA, 50 bp, synthetic construct
  source 1..50: mol_type = other DNA
ggaccacgggggttgtgagatttcggcagacgcaccgcccctcggcgtcg

SEQ ID NO: 2163 - DNA, 50 bp, synthetic construct
  source 1..50: mol_type = other DNA
aaatgtcagatctatatccggacgatcgtccggatattttgcggccggtt

SEQ ID NO: 2164 - DNA, 50 bp, synthetic construct
  source 1..50: mol_type = other DNA
agctttacggcgtacctatcgaatttattcgatgctatctttaaaaagct

SEQ ID NO: 2165 - DNA, 50 bp, synthetic construct
  source 1..50: mol_type = other DNA
tccatgtgtgccagctctttatcccgggataaatcctcggtgccgatgtc

SEQ ID NO: 2166 - DNA, 50 bp, synthetic construct
  source 1..50: mol_type = other DNA
gtgtgagaagcgagtagagctgcacctgcaggtgtttcggcttagcgagg

SEQ ID NO: 2167 - DNA, 50 bp, synthetic construct
  source 1..50: mol_type = other DNA
cctgaagtctatacagagcaaggcgtgccggtaatggccgacggaaccgc

SEQ ID NO: 2168 - DNA, 50 bp, synthetic construct
  source 1..50: mol_type = other DNA
ggatatttcccgagcaaatataccatattattcaacctcggttaatactg

SEQ ID NO: 2169 - DNA, 50 bp, synthetic construct
  source 1..50: mol_type = other DNA
aataatcaaatacttggaaaggaacattcctttgcaagtattgcttctgt

SEQ ID NO: 2170 - DNA, 50 bp, synthetic construct
  source 1..50: mol_type = other DNA
ctgatccgttccaacaagccgaatatattccgcctgcttaaaaggatcat

SEQ ID NO: 2171 - DNA, 50 bp, synthetic construct
  source 1..50: mol_type = other DNA
caacgaatttcaaaacataaaacatcttgactattttatcagattttttt

SEQ ID NO: 2172 - DNA, 50 bp, synthetic construct
  source 1..50: mol_type = other DNA
attttctcgctccaccaaaatggggccccattttgcaggacggtaagctg

SEQ ID NO: 2173 - DNA, 50 bp, synthetic construct
  source 1..50: mol_type = other DNA
aaacaaaatatatcgcggaagaccgcggtcttatcgtgaagaatatgttg

SEQ ID NO: 2174 - DNA, 50 bp, synthetic construct
  source 1..50: mol_type = other DNA
tcgccgcccagacgaatgctccggcgcattcataaagctacgggcgcacc

SEQ ID NO: 2175 - DNA, 50 bp, synthetic construct
  source 1..50: mol_type = other DNA
acgcagacaaagaaaagaacagaattcgttgttcttttcaactgattttg

SEQ ID NO: 2176 - DNA, 50 bp, synthetic construct
  source 1..50: mol_type = other DNA
aagatatttaaatgattcaaaaaatattttatgaaaaatgagtataaaaa

SEQ ID NO: 2177 - DNA, 50 bp, synthetic construct
  source 1..50: mol_type = other DNA
acatatcgtctattggtagtagataaatctactacatatgaataatatga

SEQ ID NO: 2178 - DNA, 50 bp, synthetic construct
  source 1..50: mol_type = other DNA
gactttcttctaaattcagatgaaagttaatgatatgaaagaagaaagtt

SEQ ID NO: 2179 - DNA, 50 bp, synthetic construct
  source 1..50: mol_type = other DNA
aacgaatattcgcaataaggagagtaattgtaccatttggtttaattatt

SEQ ID NO: 2180 - DNA, 50 bp, synthetic construct
  source 1..50: mol_type = other DNA
tttaataaagttctcaggcgacgatatcgtcttgcagtcactgccggtat

SEQ ID NO: 2181 - DNA, 50 bp, synthetic construct
  source 1..50: mol_type = other DNA
gtcttaaactttctacttatgctgtttaattgttggagaaattaaaagat

SEQ ID NO: 2182 - DNA, 50 bp, synthetic construct
  source 1..50: mol_type = other DNA
atataacaatggtaaattattttgacctccataataccacattgcaaaat

SEQ ID NO: 2183 - DNA, 50 bp, synthetic construct
  source 1..50: mol_type = other DNA
aaaaatcagatcaacaaaccggtaactaccggtttgacgatctcataatc

SEQ ID NO: 2184 - DNA, 50 bp, synthetic construct
  source 1..50: mol_type = other DNA
cgccacaagccgcataaatacggcatgccttctttatgtagacgctgaag

SEQ ID NO: 2185 - DNA, 50 bp, synthetic construct
  source 1..50: mol_type = other DNA
ctgtaaagcgtatactttcattgatttcaactaaagtaaatccttttttt

SEQ ID NO: 2186 - DNA, 50 bp, synthetic construct
  source 1..50: mol_type = other DNA
tttctgcgttctttagtgatttgttttgtaatcactaaagtacgaattaa

SEQ ID NO: 2187 - DNA, 50 bp, synthetic construct
  source 1..50: mol_type = other DNA
aatgtcgattttcctacgttaggaagacctacaatcccgcatgatgcacc

SEQ ID NO: 2188 - DNA, 50 bp, synthetic construct
  source 1..50: mol_type = other DNA
ctatcaaagagcgcattgaaaatggattatttgaatgcgttgcataatat

SEQ ID NO: 2189 - DNA, 50 bp, synthetic construct
  source 1..50: mol_type = other DNA
catgccaccggctggatattctttactaagaatagaacgacaagagcatc

SEQ ID NO: 2190 - DNA, 50 bp, synthetic construct
  source 1..50: mol_type = other DNA
agtatgagtgttcataacggatttataaatccgttatgaacactcgtacc

SEQ ID NO: 2191 - DNA, 50 bp, synthetic construct
  source 1..50: mol_type = other DNA
aattataacatgataagcgtagaaatcaaagccattatcttttaatactt

SEQ ID NO: 2192 - DNA, 50 bp, synthetic construct
  source 1..50: mol_type = other DNA
ttaagtttatctttacaaaactactgatactatgtaaacccattacttat

SEQ ID NO: 2193 - DNA, 50 bp, synthetic construct
  source 1..50: mol_type = other DNA
acaacatttttgctttcactgctgctaagcagctaatgcgaaattgttgt

SEQ ID NO: 2194 - DNA, 50 bp, synthetic construct
  source 1..50: mol_type = other DNA
tactgttacaaatgtcacggtaactagttaccgtgataaatacgacagtt

SEQ ID NO: 2195 - DNA, 50 bp, synthetic construct
  source 1..50: mol_type = other DNA
ttttggaataaggcctaccgttttgctaaagtgtatgaaaacgttcaatt

SEQ ID NO: 2196 - DNA, 50 bp, synthetic construct
  source 1..50: mol_type = other DNA
aggcagtaggtcagctcacacacctatgtaggttcgtcggcctcggtccg

SEQ ID NO: 2197 - DNA, 50 bp, synthetic construct
  source 1..50: mol_type = other DNA
tgcagggaataagattgttcaagttaacttgaacaatcttgcgataaaga

SEQ ID NO: 2198 - DNA, 50 bp, synthetic construct
  source 1..50: mol_type = other DNA
tagctatgcaacgtgcttactgtttaaaaactgaagatgtgtcatatgac

SEQ ID NO: 2199 - DNA, 50 bp, synthetic construct
  source 1..50: mol_type = other DNA
tcatattcttagcaattttaaaaatattttttaaatttaataaaatttgc

SEQ ID NO: 2200 - DNA, 50 bp, synthetic construct
  source 1..50: mol_type = other DNA
taagacgctaatctttcgttccacaatggaaacataaatatgaaattgat

SEQ ID NO: 2201 - DNA, 50 bp, synthetic construct
  source 1..50: mol_type = other DNA
agcagctgcctgatttgccatatcataagctggcagcgggtatgcctgat

SEQ ID NO: 2202 - DNA, 50 bp, synthetic construct
  source 1..50: mol_type = other DNA
tacaattcagaccgaggacggcaagattgatgtcctcgagaagatatgta

SEQ ID NO: 2203 - DNA, 50 bp, synthetic construct
  source 1..50: mol_type = other DNA
cggcgggctgtattgcatttagatatatctaaatgcaataaagaggcccg

SEQ ID NO: 2204 - DNA, 50 bp, synthetic construct
  source 1..50: mol_type = other DNA
cttcaccaaaacaaacaaaatataacagtatttacacagcattccttaat

SEQ ID NO: 2205 - DNA, 50 bp, synthetic construct
  source 1..50: mol_type = other DNA
gaagtttgctgcaaaaagagaaggcataatcgccgatgctcgtcacacta

SEQ ID NO: 2206 - DNA, 50 bp, synthetic construct
  source 1..50: mol_type = other DNA
gctgatcgcctgctggaacaggtcggaacctgttcggcgaggccgtcgcc

SEQ ID NO: 2207 - DNA, 50 bp, synthetic construct
  source 1..50: mol_type = other DNA
aaagataacggtataattcatgctactgctaatatgatataattaatcaa

SEQ ID NO: 2208 - DNA, 50 bp, synthetic construct
  source 1..50: mol_type = other DNA
cggaatccggtctgacctttgcgtctgcgcagggaatcgaccggacgaac

SEQ ID NO: 2209 - DNA, 50 bp, synthetic construct
  source 1..50: mol_type = other DNA
aagtgataagctcatcaattaaaggtcttttgttgataaaattttaactt

SEQ ID NO: 2210 - DNA, 50 bp, synthetic construct
  source 1..50: mol_type = other DNA
ttataggtaaatggtaaggttgtaaattaatgctatccatttttcctcct

SEQ ID NO: 2211 - DNA, 50 bp, synthetic construct
  source 1..50: mol_type = other DNA
acaatttcgcattcatagttttttataacaaaatatatcctcctggctgt

SEQ ID NO: 2212 - DNA, 50 bp, synthetic construct; identical to SEQ ID NO: 30
  source 1..50: mol_type = other DNA

SEQ ID NO: 2213 - DNA, 50 bp, synthetic construct
  source 1..50: mol_type = other DNA
ttcggggtctgggagggactgaccgcgtgaagtccatccgcgatgtgcag

SEQ ID NO: 2214 - DNA, 50 bp, synthetic construct
  source 1..50: mol_type = other DNA
ttgccgatgaaggcagaggcgtgaaaggcggaaagtgacagcatcggcaa

SEQ ID NO: 2215 - DNA, 50 bp, synthetic construct
  source 1..50: mol_type = other DNA
catcacatccacctgacttttcaggattgaaattgcagatatagaggcgc

SEQ ID NO: 2216 - DNA, 50 bp, synthetic construct
  source 1..50: mol_type = other DNA
aatatatcaaccctcgaagacccagttgaggtaacaatgaaggggataaa

SEQ ID NO: 2217 - DNA, 50 bp, synthetic construct
  source 1..50: mol_type = other DNA
ttgctggatattataggaattatgtacataatttccataatatcaaaaca

SEQ ID NO: 2218 - DNA, 50 bp, synthetic construct
  source 1..50: mol_type = other DNA
ttttagtaaaaatgataggtgcaatattgcatactttcttttgaataaaa

SEQ ID NO: 2219 - DNA, 50 bp, synthetic construct
  source 1..50: mol_type = other DNA
tgcggcaagcaggcgctgactatgtgcatgggatttggctgtaacgctgt

SEQ ID NO: 2220 - DNA, 50 bp, synthetic construct
  source 1..50: mol_type = other DNA
atatctttatttaaaataattatatttaaaattatcttactaaacgttat

SEQ ID NO: 2221 - DNA, 50 bp, synthetic construct
  source 1..50: mol_type = other DNA
agtaactcttacttttgcaggaaaggttttctgatgtcagtctggattat

SEQ ID NO: 2222 - DNA, 50 bp, synthetic construct
  source 1..50: mol_type = other DNA
tggcggacttaattgcaaaaactgatcagcttttgcaatttggcggacca

SEQ ID NO: 2223 - DNA, 50 bp, synthetic construct
  source 1..50: mol_type = other DNA
cgggccaccatacttcaataaggtatatcttattgaagtatggtccacca

SEQ ID NO: 2224 - DNA, 50 bp, synthetic construct
  source 1..50: mol_type = other DNA
tgttataattgaatggattaatttcactattcacccattctattatttca

SEQ ID NO: 2225 - DNA, 50 bp, synthetic construct
  source 1..50: mol_type = other DNA
gcaggaatacccttgtattgtgggagcaaacaatatatggatattattgg

SEQ ID NO: 2226 - DNA, 50 bp, synthetic construct
  source 1..50: mol_type = other DNA
cctccatttaataccattcgctcatatgagcgaaacatgcaagatgcttt

SEQ ID NO: 2227 - DNA, 50 bp, synthetic construct
  source 1..50: mol_type = other DNA
ctatgtcaagttattgaaaaggttataagcattgcaatcaccaagaccac

SEQ ID NO: 2228 - DNA, 50 bp, synthetic construct
  source 1..50: mol_type = other DNA
cccggcgaacgcgctggagatcaccggtgatcgccgtcgcgaccgccgaa

SEQ ID NO: 2229 - DNA, 50 bp, synthetic construct
  source 1..50: mol_type = other DNA
cgatcgcccggagcaacgacgcttcgagaggccgtagccggcagcgagtc

SEQ ID NO: 2230 - DNA, 50 bp, synthetic construct
  source 1..50: mol_type = other DNA
agttggaatttgccatctgaattttataattaaagaagcaaatttaatct

SEQ ID NO: 2231 - DNA, 50 bp, synthetic construct
  source 1..50: mol_type = other DNA
aggcgaccgtagacgcgaactttacgaaaacttcggctcggcggtcgaca

SEQ ID NO: 2232 - DNA, 50 bp, synthetic construct
  source 1..50: mol_type = other DNA
atgaactgcaatatacaattgcgtgcacttaattgtatagtgtagggagc

SEQ ID NO: 2233 - DNA, 50 bp, synthetic construct
  source 1..50: mol_type = other DNA
taaagcaattgcttgtcgagctgtaactagctctaggccgttttgcaggc

SEQ ID NO: 2234 - DNA, 50 bp, synthetic construct
  source 1..50: mol_type = other DNA
atatggtgaagattttaactggtatatattgagcgaaattttgaaaatta

SEQ ID NO: 2235 - DNA, 50 bp, synthetic construct
  source 1..50: mol_type = other DNA
ccggcgaggattaaaatgaattcgttactattctttttaagccatagcca

SEQ ID NO: 2236 - DNA, 50 bp, synthetic construct
  source 1..50: mol_type = other DNA
gcgggggagctgaccagcacgagcgccgtcgtgccggacacctcggccga

SEQ ID NO: 2237 - DNA, 50 bp, synthetic construct
  source 1..50: mol_type = other DNA
caccgcgtacctgaaccaggaaggcgccttcccggccgcggctgtccgtc

SEQ ID NO: 2238 - DNA, 50 bp, synthetic construct
  source 1..50: mol_type = other DNA
attgcataacgatagaaaggagtgatcacaagattctataattacagtct

SEQ ID NO: 2239 - DNA, 50 bp, synthetic construct
  source 1..50: mol_type = other DNA
ccgttgacgagcatgcagaggtggccggctctctccttcgtcgtgctcgg

SEQ ID NO: 2240 - DNA, 50 bp, synthetic construct
  source 1..50: mol_type = other DNA
aatcggcctggagtcaaaccggttcataagaatttttcctatgtccggta

SEQ ID NO: 2241 - DNA, 50 bp, synthetic construct
  source 1..50: mol_type = other DNA
ccctgctgagtgatccgccctgttcgaaacgggcggatacgtcgatccgg

SEQ ID NO: 2242 - DNA, 50 bp, synthetic construct
  source 1..50: mol_type = other DNA
atgtattacaaagagctgtggatcattttccacaggggcaaatactgcac

SEQ ID NO: 2243 - DNA, 50 bp, synthetic construct
  source 1..50: mol_type = other DNA
attcaggatatacccctccagtacagcctcttttgaaagttttcctgaat

SEQ ID NO: 2244 - DNA, 50 bp, synthetic construct
  source 1..50: mol_type = other DNA
gctcgggagttgggcatcgggcccaaaaaccgcgggccggaccagcgggt

SEQ ID NO: 2245 - DNA, 50 bp, synthetic construct
  source 1..50: mol_type = other DNA
atcaagaaaatcattcaggaaataccatattcacgtaaggttttcttgat

SEQ ID NO: 2246 - DNA, 50 bp, synthetic construct
  source 1..50: mol_type = other DNA
aaagatgcaatacaaattgacttaaaatggagaatttgtagttaatcttc

SEQ ID NO: 2247 - DNA, 50 bp, synthetic construct
  source 1..50: mol_type = other DNA
aggtgtgtttatggctaaagcaattgtctgccttattaccgcttatccct

SEQ ID NO: 2248 - DNA, 50 bp, synthetic construct
  source 1..50: mol_type = other DNA
tgtaaccccttagctgtggctttataatcagcccgaggtgggttattaca

SEQ ID NO: 2249 - DNA, 50 bp, synthetic construct
  source 1..50: mol_type = other DNA
ttccgggcttcgtcgagtgagacgtccctctaactcgacgaagaccgggt

SEQ ID NO: 2250 - DNA, 50 bp, synthetic construct
  source 1..50: mol_type = other DNA
tggtgcgcctgccctagcacccccgcgtgggtgcccggttcggcgttgat

SEQ ID NO: 2251 - DNA, 50 bp, synthetic construct
  source 1..50: mol_type = other DNA
gtgcccgaactggatggcctaattgctatttgggtgacacaatggggctc

SEQ ID NO: 2252 - DNA, 50 bp, synthetic construct
  source 1..50: mol_type = other DNA
ttagtagacatactttctatacttataagtaccttctgtaaaaatatcat

SEQ ID NO: 2253 - DNA, 50 bp, synthetic construct
  source 1..50: mol_type = other DNA
cgcgtccagcaccggattgccgacatgtcggcaccctcgcgcggatcggc

SEQ ID NO: 2254 - DNA, 50 bp, synthetic construct
  source 1..50: mol_type = other DNA
acgaaggacagggctggcattccatacggcgcccccgtcatctccttcgc

SEQ ID NO: 2255 - DNA, 50 bp, synthetic construct
  source 1..50: mol_type = other DNA
tggatttaccggggcaatctgcacccgtcctccttgacccggtaaatggg

SEQ ID NO: 2256 - DNA, 50 bp, synthetic construct
  source 1..50: mol_type = other DNA
ggccgacgggtgcgagatcctcctcgaagagcagtccgcacccgaggccg

SEQ ID NO: 2257 - DNA, 50 bp, synthetic construct
  source 1..50: mol_type = other DNA
ggttgagctgttagtcgtccaattaatatgactttgttatacatgttttt

SEQ ID NO: 2258 - DNA, 50 bp, synthetic construct
  source 1..50: mol_type = other DNA
gtatttaggaaagaaaacgattcttaagaatcagttttatctataaagag

SEQ ID NO: 2259 - DNA, 50 bp, synthetic construct
  source 1..50: mol_type = other DNA
aaaataaccgatgtaaaattttttattagaaatttaacagatatcaaatt

SEQ ID NO: 2260 - DNA, 50 bp, synthetic construct
  source 1..50: mol_type = other DNA
ccctcgtcgaggcggccgagcaccggcaaccctggcggactcgtcggtga

SEQ ID NO: 2261 - DNA, 50 bp, synthetic construct
  source 1..50: mol_type = other DNA
atctgatttctatagtacgtttctagagaaacgtactttagcaatcagca

SEQ ID NO: 2262 - DNA, 50 bp, synthetic construct
  source 1..50: mol_type = other DNA
ttttagcgacaaacttcaacgggatatcccgttccggttgtcacctatga

SEQ ID NO: 2263 - DNA, 50 bp, synthetic construct
  source 1..50: mol_type = other DNA
gcctgacgccaggaattgcccgcgtacatgggcatttcgcggctgctcgc

SEQ ID NO: 2264 - DNA, 50 bp, synthetic construct
  source 1..50: mol_type = other DNA
cgccaccggacgtctggctcctgacggacaccgccagctcacccgtggcc

SEQ ID NO: 2265 - DNA, 50 bp, synthetic construct
  source 1..50: mol_type = other DNA
ggccttggtgctcggcgacacctcggctgattccgccgatcaccgtgctc

SEQ ID NO: 2266 - DNA, 50 bp, synthetic construct
  source 1..50: mol_type = other DNA
gggcgtgcgcaagcacgatcgggtcggtcagtaattcgttgcgcacgtag

SEQ ID NO: 2267 - DNA, 50 bp, synthetic construct
  source 1..50: mol_type = other DNA
aaaattcacgttctataaacgttccagactgtgtatagaaccttgattac

SEQ ID NO: 2268 - DNA, 50 bp, synthetic construct
  source 1..50: mol_type = other DNA
tagcggccggtgacggcgatccgcagcgggatcgtcgccaccggcacacc

SEQ ID NO: 2269 - DNA, 50 bp, synthetic construct
  source 1..50: mol_type = other DNA
gagctagacgctcagatcgcggcgcaggcgtcgaacgtgtcgtcgtcact

SEQ ID NO: 2270 - DNA, 50 bp, synthetic construct
  source 1..50: mol_type = other DNA
ggacatttgaatgtatccgttgcaaatggaacgtatagcgtaacatgtct

SEQ ID NO: 2271 - DNA, 50 bp, synthetic construct
  source 1..50: mol_type = other DNA
cgagatcggcaccgagttctgccacgtgctcgaactcgaggtaggactcg

SEQ ID NO: 2272 - DNA, 50 bp, synthetic construct
  source 1..50: mol_type = other DNA
ctgcgcctcggagacgtcacttaccttcgcgtgcccgctcatcggcgcac

SEQ ID NO: 2273 - DNA, 50 bp, synthetic construct
  source 1..50: mol_type = other DNA
tcggatttccgaatgtatcaatagatttattgttactatcggattggcga

SEQ ID NO: 2274 - DNA, 50 bp, synthetic construct
  source 1..50: mol_type = other DNA
tagacatattaaatcacctaactgtatggtcatgcttggttatatgatgt

SEQ ID NO: 2275 - DNA, 50 bp, synthetic construct
  source 1..50: mol_type = other DNA
aaactctttctcatttttagaaagagcttctaataaatgaaatcttcgtt

SEQ ID NO: 2276 - DNA, 50 bp, synthetic construct
  source 1..50: mol_type = other DNA
gataggtgcggttgaggaaccagggccctcccgtggaggaatgccttacc

SEQ ID NO: 2277 - DNA, 50 bp, synthetic construct
  source 1..50: mol_type = other DNA
cgccaccgttcgcgcatcggcgtcgtcacgccactgcccctgtagtgtgt

SEQ ID NO: 2278 - DNA, 50 bp, synthetic construct
  source 1..50: mol_type = other DNA
cttctttctagtctgaacatcctcatgaggaactcgttatcgacaagaat

SEQ ID NO: 2279 - DNA, 50 bp, synthetic construct
  source 1..50: mol_type = other DNA
agcgcccgcgccgcttgggagaggcccctcgtccaagcggcacgggggcg

SEQ ID NO: 2280 - DNA, 50 bp, synthetic construct
  source 1..50: mol_type = other DNA
tcggctggaccgacgacgtcgccggctttggactcggtccgcccagccgc

SEQ ID NO: 2281 - DNA, 50 bp, synthetic construct
  source 1..50: mol_type = other DNA
attgtgtttacaggggacacagctttatctgtactgatattgatgacatg

SEQ ID NO: 2282 - DNA, 50 bp, synthetic construct
  source 1..50: mol_type = other DNA
caggaaagctgcgccaagagggcaaatggcctctctgcgcggatttcacg

SEQ ID NO: 2283 - DNA, 50 bp, synthetic construct
  source 1..50: mol_type = other DNA
taatacttctaatcttatttcctttaaagggaataaagactaaaaattta

SEQ ID NO: 2284 - DNA, 50 bp, synthetic construct
  source 1..50: mol_type = other DNA
aatttatccgaatccatatacgatataccgtatctgaattcgaataaaag

SEQ ID NO: 2285 - DNA, 50 bp, synthetic construct
  source 1..50: mol_type = other DNA
gttgcaaatgctaatataagaatgtatattctttaagcaagttttgtatg

SEQ ID NO: 2286 - DNA, 50 bp, synthetic construct
  source 1..50: mol_type = other DNA
ccatgatgcgccacttccgaaatttcaaaaagatcagtggtcaaacagct

SEQ ID NO: 2287 - DNA, 50 bp, synthetic construct
  source 1..50: mol_type = other DNA
atcaagcttcatgcactccaacggcgaccagcagcagcatgaagcttgca

SEQ ID NO: 2288 - DNA, 50 bp, synthetic construct
  source 1..50: mol_type = other DNA
cgtggatggtctcggggtcgaaccacgccgggaccccgaggcgttcgcga

SEQ ID NO: 2289 - DNA, 50 bp, synthetic construct
  source 1..50: mol_type = other DNA
gcccgctgatccagtgccggacgtagccgaccggcacgcgcccaccgagc

SEQ ID NO: 2290 - DNA, 50 bp, synthetic construct
  source 1..50: mol_type = other DNA
ctggacccgccgtacgtgatcgttaagaccgcgcatcacggcagcgccga

SEQ ID NO: 2291 - DNA, 50 bp, synthetic construct
  source 1..50: mol_type = other DNA
gggtaccgaaccgaggacagcgagagtgagcggaaagtggtgcctcgccc

SEQ ID NO: 2292 - DNA, 50 bp, synthetic construct
  source 1..50: mol_type = other DNA
tcttatgtcaaggaattgacgaaaattatctgcaattccttgaaggaaac

SEQ ID NO: 2293 - DNA, 50 bp, synthetic construct
  source 1..50: mol_type = other DNA
tattatcaatctacctaaaagaagataacacttttacaaatataatgcta

SEQ ID NO: 2294 - DNA, 50 bp, synthetic construct
  source 1..50: mol_type = other DNA
tttgttaattatatccatcctaatgaaataacagtaagagaattaaaaaa

SEQ ID NO: 2295 - DNA, 50 bp, synthetic construct
  source 1..50: mol_type = other DNA
aaacttcgcctaaagtccttttacgtgtaagttattggtaatatcactta

SEQ ID NO: 2296 - DNA, 50 bp, synthetic construct
  source 1..50: mol_type = other DNA
ttcagctccatatttattgagaagagcttgtagatatctatgcggatgaa

SEQ ID NO: 2297 - DNA, 50 bp, synthetic construct
  source 1..50: mol_type = other DNA
catatgattcatcaagaaaaggagtttagtttttctaagcgattgtgatt

SEQ ID NO: 2298 - DNA, 50 bp, synthetic construct
  source 1..50: mol_type = other DNA
gctcattagctccacgcagttggatatccaactgcgtggtgctaattcct

SEQ ID NO: 2299 - DNA, 50 bp, synthetic construct
  source 1..50: mol_type = other DNA
ggctcaggccgcagcgcgtcacccggatgtttggcgcgatggcggttccc

SEQ ID NO: 2300 - DNA, 50 bp, synthetic construct
  source 1..50: mol_type = other DNA
gactcatcatgaccagcttgaagttaactttcttagggtaaaattgaaca

SEQ ID NO: 2301 - DNA, 50 bp, synthetic construct
  source 1..50: mol_type = other DNA
attctctggtgtccatttttgaataaatgtttcaaattccttaagagaaa

SEQ ID NO: 2302 - DNA, 50 bp, synthetic construct
  source 1..50: mol_type = other DNA
gtgtcattaatggaggcgtagatttaattcaacgctagcatcaattgcct

SEQ ID NO: 2303 - DNA, 50 bp, synthetic construct
  source 1..50: mol_type = other DNA
tcccataacccatgaattaataagctggatttaaatcatcttttataaat

SEQ ID NO: 2304 - DNA, 50 bp, synthetic construct
  source 1..50: mol_type = other DNA
gctcctaaatctttaacagtttctatagatgaaattaaagctgcaggctt

SEQ ID NO: 2305 - DNA, 50 bp, synthetic construct
  source 1..50: mol_type = other DNA
aaaaatatcatttcctcttacaagaatcggtaattacaaaatgtattgat

SEQ ID NO: 2306 - DNA, 50 bp, synthetic construct
  source 1..50: mol_type = other DNA
aaaaatgcgcatcttacttagtcgatatgtttgcatagagtgggctaaaa

SEQ ID NO: 2307 - DNA, 50 bp, synthetic construct
  source 1..50: mol_type = other DNA
gaagcacagccctgaaattcttaccggtaagggtgagagtgccgttttta

SEQ ID NO: 2308 - DNA, 50 bp, synthetic construct
  source 1..50: mol_type = other DNA
agcacgatgggtctgtatcaggtcatagaggccgtggaccccatcgtgct

SEQ ID NO: 2309 - DNA, 50 bp, synthetic construct
  source 1..50: mol_type = other DNA
ttatcaatgcagactattggcaggatttcctataaattcagcattgattg

SEQ ID NO: 2310 - DNA, 50 bp, synthetic construct
  source 1..50: mol_type = other DNA
gtcgcgccgggcaagatgggcatgtccattgtcggcttgccggacaaagc

SEQ ID NO: 2311 - DNA, 50 bp, synthetic construct
  source 1..50: mol_type = other DNA
atatttaataaatagctaccacttataagtcaaagcagtttataaaaata

SEQ ID NO: 2312 - DNA, 50 bp, synthetic construct
  source 1..50: mol_type = other DNA
ggtgtcggtgccgggcgtgcgctgaggcgcggatcgtcggcaccggcgag

SEQ ID NO: 2313 - DNA, 50 bp, synthetic construct
  source 1..50: mol_type = other DNA
caagcgatgcttggcaatccgcatccggcgtccttgcccagcatcggtga

SEQ ID NO: 2314 - DNA, 50 bp, synthetic construct
  source 1..50: mol_type = other DNA
aaatcaaaaaaacgccggaagcctaatgcttccagcgtcttatttgggag

SEQ ID NO: 2315 - DNA, 50 bp, synthetic construct
  source 1..50: mol_type = other DNA
gcaagagatttaaaattattaaaaatattcactatatttaagtctcgagc

SEQ ID NO: 2316 - DNA, 50 bp, synthetic construct
  source 1..50: mol_type = other DNA
cggggccgctcagaccggctcgcgcctgcgggttgacctgagctgacccc

SEQ ID NO: 2317 - DNA, 50 bp, synthetic construct
  source 1..50: mol_type = other DNA
gtgccatcgtatatggagcctttaatttcatgctccacatacagcatgaa

SEQ ID NO: 2318 - DNA, 50 bp, synthetic construct
  source 1..50: mol_type = other DNA
atgatttcagcttcctgcagctgggtaaggctcttttaagctgcgcacga

SEQ ID NO: 2319 - DNA, 50 bp, synthetic construct
  source 1..50: mol_type = other DNA
aagggtcttttatttgaagacctaaatattaggagaaataaaagaggtgt

SEQ ID NO: 2320 - DNA, 50 bp, synthetic construct
  source 1..50: mol_type = other DNA
tgaaaaatgttgcggtatgaacgcaaagtttcatactgcaacatttgtat

SEQ ID NO: 2321 - DNA, 50 bp, synthetic construct
  source 1..50: mol_type = other DNA
tcaaaaaattgatttaaatcgatattaaacgatataaactcgtttctttt

SEQ ID NO: 2322 - DNA, 50 bp, synthetic construct
  source 1..50: mol_type = other DNA
acctcggccgccaccgtggcgccggacggcgctcaaagagcggtaggtcc

SEQ ID NO: 2323 - DNA, 50 bp, synthetic construct
  source 1..50: mol_type = other DNA
actgtaactacagtatggtttctctccactcctatccaataactggagtt

SEQ ID NO: 2324 - DNA, 50 bp, synthetic construct
  source 1..50: mol_type = other DNA
ttcgtcagtacatggatgttggacatgtctaacatccatgtacagattcc

SEQ ID NO: 2325 - DNA, 50 bp, synthetic construct
  source 1..50: mol_type = other DNA
tctcgatgcgggatacatagcaccgcgctcctaccctcgtaacacaccga

SEQ ID NO: 2326 - DNA, 50 bp, synthetic construct
  source 1..50: mol_type = other DNA
tgataattttgtcactctctggcatattccagcgacagagcaaatagtat

SEQ ID NO: 2327 - DNA, 50 bp, synthetic construct
  source 1..50: mol_type = other DNA
atttgctgtcgtttattgttacttcaatgtaaaaagctcggacgtacaag

SEQ ID NO: 2328 - DNA, 50 bp, synthetic construct
  source 1..50: mol_type = other DNA
tagctcagctggatagagcaccagacgaggtgcgctaccaggctgcgcta

SEQ ID NO: 2329 - DNA, 50 bp, synthetic construct
  source 1..50: mol_type = other DNA
gccgcctccttccaggaaacgacccgggaagtttggcggaagtacccgca

SEQ ID NO: 2330 - DNA, 50 bp, synthetic construct
  source 1..50: mol_type = other DNA
ttaaatatgtcaagaaaataggaggacacctattttgttgaccacactac

SEQ ID NO: 2331 - DNA, 50 bp, synthetic construct
  source 1..50: mol_type = other DNA
gtaaaatattcacctcgaacaacctgatttgctgtttcttgttcttttac

SEQ ID NO: 2332 - DNA, 50 bp, synthetic construct
  source 1..50: mol_type = other DNA
gttcttattaacagtacgcccatctccacttggactctcttaccttcaaa

SEQ ID NO: 2333 - DNA, 50 bp, synthetic construct
  source 1..50: mol_type = other DNA
cgcaaacttcaccagcttgatcgcctgccctgaagacggtcggcatcggt

SEQ ID NO: 2334 - DNA, 50 bp, synthetic construct
  source 1..50: mol_type = other DNA
aactaattagaaaaataatatctttgaagaaattgcggttcttggaactg

SEQ ID NO: 2335 - DNA, 50 bp, synthetic construct
  source 1..50: mol_type = other DNA
aaaatattattgataaaaagtcagctctttatttttatcattcgcatggt

SEQ ID NO: 2336 - DNA, 50 bp, synthetic construct
  source 1..50: mol_type = other DNA
ctctattagatgatgccattataaaataataatgtcatgcattattatta

SEQ ID NO: 2337 - DNA, 50 bp, synthetic construct
  source 1..50: mol_type = other DNA
gtcaaaagagatgcccggcgggtagctacccgcggcgtgcaacttttggc

SEQ ID NO: 2338 - DNA, 50 bp, synthetic construct
  source 1..50: mol_type = other DNA
agaccttggagattgagtttgcgcatactgcaactcgtttctgaacttct

SEQ ID NO: 2339 - DNA, 50 bp, synthetic construct
  source 1..50: mol_type = other DNA
gtaatagtggttcgagcagcagctgcatctcctgctcgaaagtctggtac

SEQ ID NO: 2340 - DNA, 50 bp, synthetic construct
  source 1..50: mol_type = other DNA
aacttgccccgcgcttcgatcttgcgcaacgcggatccgtggttcaaggc

SEQ ID NO: 2341 - DNA, 50 bp, synthetic construct
  source 1..50: mol_type = other DNA
gaattggcctccatcgcatctttgtaaaggtcgtcgagaatgaagcagtc

SEQ ID NO: 2342 - DNA, 50 bp, synthetic construct
  source 1..50: mol_type = other DNA
gaaaatctgcatttgacgaaggtacacaccgtcgtctcccgcgatattgt

SEQ ID NO: 2343 - DNA, 50 bp, synthetic construct
  source 1..50: mol_type = other DNA
gtattggatgcggggcatggtgggggtggtgcgaaccccggggccaccta

SEQ ID NO: 2344 - DNA, 50 bp, synthetic construct
  source 1..50: mol_type = other DNA
caacacgccttttctgcacggatgccgtgctataataaaaaggtaactta

SEQ ID NO: 2345 - DNA, 50 bp, synthetic construct
  source 1..50: mol_type = other DNA
aaaattaaagaatatgaaaaagaagtgcgcttttcataaaaagcaattta

SEQ ID NO: 2346 - DNA, 50 bp, synthetic construct
  source 1..50: mol_type = other DNA
ggtttcaatgaaggcatcgcttgatgatataatatggcttgcttagggcg

SEQ ID NO: 2347 - DNA, 50 bp, synthetic construct
  source 1..50: mol_type = other DNA
cccaggccaatccaggtgcgccggatctggcgcaccggcacgcaggcggg

SEQ ID NO: 2348 - DNA, 50 bp, synthetic construct
  source 1..50: mol_type = other DNA
aaattgttacttctataataattcataaagtattccagaagtaaaaactc

SEQ ID NO: 2349 - DNA, 50 bp, synthetic construct
  source 1..50: mol_type = other DNA
accactccaagactacgcgagcgcccgcgcactcgcccggctggcgtcgg

SEQ ID NO: 2350 - DNA, 50 bp, synthetic construct
  source 1..50: mol_type = other DNA
caaaaaaggaaaggggatgaggaagattccgcgggctttttaaagtttta

SEQ ID NO: 2351 - DNA, 50 bp, synthetic construct
  source 1..50: mol_type = other DNA
ggaactgaaagagaccgaatagtagctactatttgacctctctgctttcc

SEQ ID NO: 2352 - DNA, 50 bp, synthetic construct
  source 1..50: mol_type = other DNA
aagttcataataagtcagtacggaggtccctattgcagatacatataatt

SEQ ID NO: 2353 - DNA, 50 bp, synthetic construct
  source 1..50: mol_type = other DNA
caaatagtaataagtcagtatgggggtcctgacggagaagcaggggccgc

SEQ ID NO: 2354 - DNA, 50 bp, synthetic construct
  source 1..50: mol_type = other DNA
attctttaagttaacacctacttctatctgtagcaacttcatatttgaat

SEQ ID NO: 2355 - DNA, 50 bp, synthetic construct
  source 1..50: mol_type = other DNA
ttttattaaaaataaggccaacaatcttttttgctagatttataatatct

SEQ ID NO: 2356 - DNA, 50 bp, synthetic construct
  source 1..50: mol_type = other DNA
tcaatagaaaatcatgcctttgcttaaacaaaggtgcctttaacaaatgc

SEQ ID NO: 2357 - DNA, 50 bp, synthetic construct
  source 1..50: mol_type = other DNA
accaaaatcattggaggattttcaaatgaaattcctcctgtaatttcgga

SEQ ID NO: 2358 - DNA, 50 bp, synthetic construct
  source 1..50: mol_type = other DNA
caaaggtaatttataccgtcaaaatgattttgatgtattcgttgcttttg

SEQ ID NO: 2359 - DNA, 50 bp, synthetic construct
  source 1..50: mol_type = other DNA
tctaccagttcattgggattcataatttgcggtccaagggaactggtcca

SEQ ID NO: 2360 - DNA, 50 bp, synthetic construct
  source 1..50: mol_type = other DNA
tacgttctcctagacaggaggagctattgacatctaactactatgtggta

SEQ ID NO: 2361 - DNA, 50 bp, synthetic construct
  source 1..50: mol_type = other DNA
attaatgcttcaatttgaacgccgatgccagcagaacgcatacattttat

SEQ ID NO: 2362 - DNA, 50 bp, synthetic construct
  source 1..50: mol_type = other DNA
atgctcgacatggcccgcgccgatgcaagtgcacgcgcaagatcgagcag

SEQ ID NO: 2363 - DNA, 50 bp, synthetic construct
  source 1..50: mol_type = other DNA
gacaccgcctgtatacggcgatgccgacatcgcttggaaccatatcgtgg

SEQ ID NO: 2364 - DNA, 50 bp, synthetic construct
  source 1..50: mol_type = other DNA
aacctaccgttccacgacggcaacgcgttgccgctgtgggagggtggata

SEQ ID NO: 2365 - DNA, 50 bp, synthetic construct
  source 1..50: mol_type = other DNA
gcacatatgtcctcattttggggtgcacaacaaaatgaactaatacaata

SEQ ID NO: 2366 - DNA, 50 bp, synthetic construct
  source 1..50: mol_type = other DNA
ctgttcttcatcgtctgtgctgacgcgtcagcacagaccacgaggaacag

SEQ ID NO: 2367 - DNA, 50 bp, synthetic construct
  source 1..50: mol_type = other DNA
ttcctttagctcctgcaatgcatgtatatggagtgttgtagctaaaagtt

SEQ ID NO: 2368 - DNA, 50 bp, synthetic construct
  source 1..50: mol_type = other DNA
taagcggagagccttatttttcaaggttgcgaaaagtgatttgccgcaga

SEQ ID NO: 2369 - DNA, 50 bp, synthetic construct
  source 1..50: mol_type = other DNA
aggaaatcctctttaattttaacatattttaaaattctcttcgtactcat

SEQ ID NO: 2370 - DNA, 50 bp, synthetic construct
  source 1..50: mol_type = other DNA
gaaaaatacggattaccatactgcataaagtataacacctcatataaatc

SEQ ID NO: 2371 - DNA, 50 bp, synthetic construct
  source 1..50: mol_type = other DNA
atcgaagcactcagacagccattggaagatggaacgatcgatatcaccag

SEQ ID NO: 2372 - DNA, 50 bp, synthetic construct
  source 1..50: mol_type = other DNA
aggacgttcaaacggcgatgcgcaatcggtcatttccggtgcaaatctct

SEQ ID NO: 2373 - DNA, 50 bp, synthetic construct
  source 1..50: mol_type = other DNA
gagcaggaaaactctacttgttctgatcatcaagtatcctttctggcgga

SEQ ID NO: 2374 - DNA, 50 bp, synthetic construct
  source 1..50: mol_type = other DNA
gtaaataattgacttttaaaacgcagttgttttgcttatcaattatgcga

SEQ ID NO: 2375 - DNA, 50 bp, synthetic construct
  source 1..50: mol_type = other DNA
tggtgatgccatgcttatagatggtacaaactataagcattcgggatgga

SEQ ID NO: 2376 - DNA, 50 bp, synthetic construct
  source 1..50: mol_type = other DNA
atattcttgatatatagtttgccttgttgcaaggtattgttcaaaaactc

SEQ ID NO: 2377 - DNA, 50 bp, synthetic construct
  source 1..50: mol_type = other DNA
tctgagaaaaataagcataagtcgcagctattatgctgattttttgaaat

SEQ ID NO: 2378 - DNA, 50 bp, synthetic construct
  source 1..50: mol_type = other DNA
gtggggcaccgatgccagaagcacccccgaatctcgatggcgagcttgcg

SEQ ID NO: 2379 - DNA, 50 bp, synthetic construct
  source 1..50: mol_type = other DNA
gatgagttttctgcgttgtacgaaatttcggaaacgaggataaactcgtc

SEQ ID NO: 2380 - DNA, 50 bp, synthetic construct
  source 1..50: mol_type = other DNA
cggccacgcggcgcttctttacgaccgcgtacagaatcgcttcgttcagt

SEQ ID NO: 2381 - DNA, 50 bp, synthetic construct
  source 1..50: mol_type = other DNA
ttacccagttgggcggtgctaattgcaattagcaccgccaaactgtaaat

SEQ ID NO: 2382 - DNA, 50 bp, synthetic construct
  source 1..50: mol_type = other DNA
gagccttttttgcatacacaaaaagaattttttacatcaaaaaaagaatg

SEQ ID NO: 2383 - DNA, 50 bp, synthetic construct
  source 1..50: mol_type = other DNA
tgttcgccgagatcgtccgggagaagtcaacttgttgaacatatgctccc

SEQ ID NO: 2384 - DNA, 50 bp, synthetic construct
  source 1..50: mol_type = other DNA
tgattgcggccaggccggggaagacatcgtccccgtcatcggagcacccg

SEQ ID NO: 2385 - DNA, 50 bp, synthetic construct
  source 1..50: mol_type = other DNA
cggaaccgaggaattatattatccatggatgttataatgaacttgctcac

SEQ ID NO: 2386 - DNA, 50 bp, synthetic construct
  source 1..50: mol_type = other DNA
tagagcgctgcgttcgggacgcagaggcttctccgaattcgacgagctaa

SEQ ID NO: 2387 - DNA, 50 bp, synthetic construct
  source 1..50: mol_type = other DNA
attcctaatgtagcacttgcagcatatcgctcacaaatagcattgtccat

SEQ ID NO: 2388 - DNA, 50 bp, synthetic construct
  source 1..50: mol_type = other DNA
taattactttcttcatcaggctccatctagctttgcttttgaaagtatca

SEQ ID NO: 2389 - DNA, 50 bp, synthetic construct
  source 1..50: mol_type = other DNA
ttcatcataaggtaaatttgacatgaatgcagaataaaatagataaatta

SEQ ID NO: 2390 - DNA, 50 bp, synthetic construct
  source 1..50: mol_type = other DNA
catctacgacaaggccatgacacacgtgcgctggcgcaccgtcagcaaga

SEQ ID NO: 2391 - DNA, 50 bp, synthetic construct
  source 1..50: mol_type = other DNA
tttacgaatatatggtttcacacaataaagcagaacgtcatattcgtggc

SEQ ID NO: 2392 - DNA, 50 bp, synthetic construct
  source 1..50: mol_type = other DNA
attttaaccgatattggcacagaggaacttgcccacatggaaatgatatg

SEQ ID NO: 2393 - DNA, 50 bp, synthetic construct
  source 1..50: mol_type = other DNA
cgatgtaggccgtatgatcgtccctaataacgtaaatcagcccttcatct

SEQ ID NO: 2394 - DNA, 50 bp, synthetic construct
  source 1..50: mol_type = other DNA
tcttttattataagtcagtacggtggtcccgatggcgaaatgggagcttc

SEQ ID NO: 2395 - DNA, 50 bp, synthetic construct
  source 1..50: mol_type = other DNA
cagatcatctccatatgggcaagttcttctgtaccaatatcagtcagtat

SEQ ID NO: 2396 - DNA, 50 bp, synthetic construct
  source 1..50: mol_type = other DNA
tctttctcgcaaattgattatatcatgatctgccgcctcagccaggacgg

SEQ ID NO: 2397 - DNA, 50 bp, synthetic construct
  source 1..50: mol_type = other DNA
cctaactccttccagtcaatactgtccacatcccactgtatagcatagta

SEQ ID NO: 2398 - DNA, 50 bp, synthetic construct
  source 1..50: mol_type = other DNA
aatgaatttcagggaaaggcggtggacaccggctttctgtggaagatggc

SEQ ID NO: 2399 - DNA, 50 bp, synthetic construct
  source 1..50: mol_type = other DNA
atataagaaaaaacatgatttcatatcagacgttcaaattcatctgcaaa

SEQ ID NO: 2400 - DNA, 50 bp, synthetic construct
  source 1..50: mol_type = other DNA
gaaccgtcgggcggtcgtgctgttcgaaccctcactccgttggaactggt

SEQ ID NO: 2401 - DNA, 50 bp, synthetic construct
  source 1..50: mol_type = other DNA
cgtgacgcgcgaggaagtctccgtgcacgccggcgaacacgcgccagccg

SEQ ID NO: 2402 - DNA, 50 bp, synthetic construct
  source 1..50: mol_type = other DNA
aaaggtaaaccaatatcaaaaataattattttgtttttttaaaaactcaa

SEQ ID NO: 2403 - DNA, 50 bp, synthetic construct
  source 1..50: mol_type = other DNA
tcatttggcaaccgtatgtagaaatatttctacatacggtcaaccccagg

SEQ ID NO: 2404 - DNA, 50 bp, synthetic construct
  source 1..50: mol_type = other DNA
cctcctccgctaccaacggtaagatatctttccgttcaacgcgttcctcc

SEQ ID NO: 2405 - DNA, 50 bp, synthetic construct
  source 1..50: mol_type = other DNA
atggctggcgtgagaaaggcgaggcggctcgcgtttctcgcgccggatat

SEQ ID NO: 2406 - DNA, 50 bp, synthetic construct
  source 1..50: mol_type = other DNA
tttgcaagaccacgatgggccgtcgaagcggcccatcgaggtagacgtat

SEQ ID NO: 2407 - DNA, 50 bp, synthetic construct
  source 1..50: mol_type = other DNA
caattatggtcttactatcaattgttagtcttctagtaataccattttta

SEQ ID NO: 2408 - DNA, 50 bp, synthetic construct
  source 1..50: mol_type = other DNA
gatcaactttgtggcctcccgcgagctcgataaagcagccagacagggtg

SEQ ID NO: 2409 - DNA, 50 bp, synthetic construct
  source 1..50: mol_type = other DNA
cgacaatggcatcttcaaggggatgcatcccgtctaacaggtagttggcg

SEQ ID NO: 2410 - DNA, 50 bp, synthetic construct
  source 1..50: mol_type = other DNA
aaacaataaaattaataaaaaggtgcgtctttttgataattttttccctg

SEQ ID NO: 2411 - DNA, 50 bp, synthetic construct
  source 1..50: mol_type = other DNA
atgttaacggatatcggaacggaagagcttgctcatttggaaatggtatc

SEQ ID NO: 2412 - DNA, 50 bp, synthetic construct
  source 1..50: mol_type = other DNA
tacatggtttctgacttctattcgatcgtggagaacgcaggactcatggg

SEQ ID NO: 2413 - DNA, 50 bp, synthetic construct
  source 1..50: mol_type = other DNA
aaatcgaccttgtataactgacccataggtataaggacaattctcgattt

SEQ ID NO: 2414 - DNA, 50 bp, synthetic construct
  source 1..50: mol_type = other DNA
cgtgctggggtatctcttgtgtagtactacacaaacgatacccctctgtg

SEQ ID NO: 2415 - DNA, 50 bp, synthetic construct
  source 1..50: mol_type = other DNA
tattttataaccaagtggtgtatgacaatatcccactttggtatttaatt

SEQ ID NO: 2416 - DNA, 50 bp, synthetic construct
  source 1..50: mol_type = other DNA
cataacacgcaaagatgtacattttgcaatgttagtctttcggtaattcc

SEQ ID NO: 2417 - DNA, 50 bp, synthetic construct
  source 1..50: mol_type = other DNA
cattggccgacgatttgcgccgtgttcccggcggaagtcttcggccatgc

SEQ ID NO: 2418 - DNA, 50 bp, synthetic construct
  source 1..50: mol_type = other DNA
caatttaaatgaaatcaatggttatttgctttttgaatccatttgcgtta

SEQ ID NO: 2419 - DNA, 50 bp, synthetic construct
  source 1..50: mol_type = other DNA
gataaccgtcgactggccgagtcgttcgacaccgccagcatgcggcactc

SEQ ID NO: 2420 - DNA, 50 bp, synthetic construct
  source 1..50: mol_type = other DNA
tatgacaaaactgctgggcggcaaaattgtcgcccaatcgttgctgtttg

SEQ ID NO: 2421 - DNA, 50 bp, synthetic construct
  source 1..50: mol_type = other DNA
acctttgaaaattcctccggaaacatgtgatatccaatcttttcataaat

SEQ ID NO: 2422 - DNA, 50 bp, synthetic construct
  source 1..50: mol_type = other DNA
gtatacatcatttatggatttgaaatttctatccgatgatcctcatatac

SEQ ID NO: 2423 - DNA, 50 bp, synthetic construct
  source 1..50: mol_type = other DNA
ggttccgggcggcacagtacactaataaaggtactatgccgcgcggcgtt

SEQ ID NO: 2424 - DNA, 50 bp, synthetic construct
  source 1..50: mol_type = other DNA
ccaccgggttaaaacaagttactgtatagtaactagccgcaaccaccagg

SEQ ID NO: 2425 - DNA, 50 bp, synthetic construct
  source 1..50: mol_type = other DNA
catcggaaagcgacaggtcgaaggcaccgcctgcctgctgctggccctga

SEQ ID NO: 2426 - DNA, 50 bp, synthetic construct
  source 1..50: mol_type = other DNA
gtacttgctgcggttacaggtggtgtagcattgttaaaatcaacatcgga

SEQ ID NO: 2427 - DNA, 50 bp, synthetic construct
  source 1..50: mol_type = other DNA
cgcaggtcctcgatacagtctttatccttgcaggaatcaaaaatcttttt

SEQ ID NO: 2428 - DNA, 50 bp, synthetic construct
  source 1..50: mol_type = other DNA
aaagagaaaataaaaagggggaataatttccccttttttattgtttcttt

SEQ ID NO: 2429 - DNA, 50 bp, synthetic construct
  source 1..50: mol_type = other DNA
gaggctccgatttcgccgtcaggaccgccatactggctcattatatattg

SEQ ID NO: 2430 - DNA, 50 bp, synthetic construct
  source 1..50: mol_type = other DNA
gagtatactcatactttaatacaagttaattaaggcaggagaggatatac

SEQ ID NO: 2431 - DNA, 50 bp, synthetic construct
  source 1..50: mol_type = other DNA
cgggctcgccggtcttctggatgcggccgatgggaagaccggcgtcccgc

SEQ ID NO: 2432 - DNA, 50 bp, synthetic construct
  source 1..50: mol_type = other DNA
ggggcttatttccatgcttctgggatcccaaagttgtgtaaattaaagct

SEQ ID NO: 2433 - DNA, 50 bp, synthetic construct
  source 1..50: mol_type = other DNA
gtcgagcgggagtccagcgctcctgtcggttcatcggctaagatcagctg

SEQ ID NO: 2434 - DNA, 50 bp, synthetic construct
  source 1..50: mol_type = other DNA
cggcccgcgccaatcaaggcgcgggcccgcgccttgattggcgcgggccg

SEQ ID NO: 2435 - DNA, 50 bp, synthetic construct
  source 1..50: mol_type = other DNA
cagtttgttatcgtgtcggtgctgtatagcatcaatatgataatttgtta

SEQ ID NO: 2436 - DNA, 50 bp, synthetic construct
  source 1..50: mol_type = other DNA
atctaaactataaaagttagtattgttctaccaacttttgtaagttttct

SEQ ID NO: 2437 - DNA, 50 bp, synthetic construct
  source 1..50: mol_type = other DNA
catcttgatgccaatgataccatatcctttttatcggttttatctgaatg

SEQ ID NO: 2438 - DNA, 50 bp, synthetic construct
  source 1..50: mol_type = other DNA
cggattataacggttgctttgtattaatacaatgcaaagtcactgatttc

SEQ ID NO: 2439 - DNA, 50 bp, synthetic construct
  source 1..50: mol_type = other DNA
tcgggtgggcagggagatttttcggttgagttcgagccccacgccacctc

SEQ ID NO: 2440 - DNA, 50 bp, synthetic construct
  source 1..50: mol_type = other DNA
ttgacagcagttcctgcttgtggtataccacgccagaccaccgttgtcac

SEQ ID NO: 2441 - DNA, 50 bp, synthetic construct
  source 1..50: mol_type = other DNA
tgtacctttgcattatgaatgaaatatctgttttctaatgcaaaggtaca

SEQ ID NO: 2442 - DNA, 50 bp, synthetic construct
  source 1..50: mol_type = other DNA
cttcagaacattgccggtgatggtgggtccgcaccatccgggatctgaag

SEQ ID NO: 2443 - DNA, 50 bp, synthetic construct
  source 1..50: mol_type = other DNA
aaccccaagctggcggccctcatcatgaggatggcagccagctgtgctgc

SEQ ID NO: 2444 - DNA, 50 bp, synthetic construct
  source 1..50: mol_type = other DNA
tcgtttgagaaaataggcaacgacctgtcagtgccagaattcggcaaatg

SEQ ID NO: 2445 - DNA, 50 bp, synthetic construct
  source 1..50: mol_type = other DNA
agagcagaaagctggacgcctgaaatttcaagcaagtttctttcatagct

SEQ ID NO: 2446 - DNA, 50 bp, synthetic construct
  source 1..50: mol_type = other DNA
gcttcggaaggccggacgcgatcaggtggcacagtcaaagcccagaaagg

SEQ ID NO: 2447 - DNA, 50 bp, synthetic construct
  source 1..50: mol_type = other DNA
gtgcaaaggcagcggtcgaggcgagatcgccgtgaccgctgctaccaacg

SEQ ID NO: 2448 - DNA, 50 bp, synthetic construct
  source 1..50: mol_type = other DNA
caggcgatgcatcaggtgcacaagcgcggttcaacgcgtcccattgggcg

SEQ ID NO: 2449 - DNA, 50 bp, synthetic construct
  source 1..50: mol_type = other DNA
ggctcgaattcaacggatacatatatttatttatcaacggtgaaatcgcc

SEQ ID NO: 2450 - DNA, 50 bp, synthetic construct
  source 1..50: mol_type = other DNA
atttatatatcccatatccttccataatggcggccaacctgtataaataa

SEQ ID NO: 2451 - DNA, 50 bp, synthetic construct
  source 1..50: mol_type = other DNA
ctaccgattcataaatccaattaataataattggttttataaatgatttt

SEQ ID NO: 2452 - DNA, 50 bp, synthetic construct
  source 1..50: mol_type = other DNA
gcgacaattcgattcgggtgctccccggagcggatccctcgaatttcgcg

SEQ ID NO: 2453 - DNA, 50 bp, synthetic construct
  source 1..50: mol_type = other DNA
gcccgggatggagtataaaataacatgtatctttgtacactatcttaccg

SEQ ID NO: 2454 - DNA, 50 bp, synthetic construct
  source 1..50: mol_type = other DNA
aacaactttaaatacgtatactcatatgagtagccacttttactattttt

SEQ ID NO: 2455 - DNA, 50 bp, synthetic construct
  source 1..50: mol_type = other DNA
tgtatgataaaattaaagatctacactttggcttttaatacttctatcaa

SEQ ID NO: 2456 - DNA, 50 bp, synthetic construct
  source 1..50: mol_type = other DNA
tcttcttcggcatcgccgatgccgcgcgtactcggtggagcccttcgagt

SEQ ID NO: 2457 - DNA, 50 bp, synthetic construct
  source 1..50: mol_type = other DNA
gagcttgctcagcgcggacgccagatctggtgttcgacggccaggagctg

SEQ ID NO: 2458 - DNA, 50 bp, synthetic construct
  source 1..50: mol_type = other DNA
tgcgtctctgggattatctgaattgcaatccaagaaacccgagcagatca

SEQ ID NO: 2459 - DNA, 50 bp, synthetic construct
  source 1..50: mol_type = other DNA
cctccgcggcgccattcgcaccgacgttggccggaatgtggtagcggatt

SEQ ID NO: 2460 - DNA, 50 bp, synthetic construct
  source 1..50: mol_type = other DNA
tagttatcatgaataggataacaatattgctggtgtattcaaagctaatg

SEQ ID NO: 2461 - DNA, 50 bp, synthetic construct
  source 1..50: mol_type = other DNA
acggcttgactctggggcagacgccgatgacgaggtcgcagtccagacgg

SEQ ID NO: 2462 - DNA, 50 bp, synthetic construct
  source 1..50: mol_type = other DNA
tccttgggcggcggaggcggcgagccaccctggccgccgccgcgctggcg

SEQ ID NO: 2463 - DNA, 50 bp, synthetic construct
  source 1..50: mol_type = other DNA
aataactatttcaaaggagattaaatttatcctcatattggcagggtatt

SEQ ID NO: 2464 - DNA, 50 bp, synthetic construct
  source 1..50: mol_type = other DNA
cgctggtgacgacgatgttcggcgatcgccgaacaatcccgagctcagcg

SEQ ID NO: 2465 - DNA, 50 bp, synthetic construct
  source 1..50: mol_type = other DNA
ctcggggaggatcgtgtgggaatgctcaggccgactcggccctccccgag

SEQ ID NO: 2466 - DNA, 50 bp, synthetic construct
  source 1..50: mol_type = other DNA
aaaagatacttgttagaaatggagaactaaatttctatatcatatgtttt

SEQ ID NO: 2467 - DNA, 50 bp, synthetic construct
  source 1..50: mol_type = other DNA
ccgcgccgagcagcaatatggcgggcccgtgtggattctgggcggcgcga

SEQ ID NO: 2468 - DNA, 50 bp, synthetic construct
  source 1..50: mol_type = other DNA
gaccacggagggggattgccgcgcgctaccgggctgctccatcccgcgtc

SEQ ID NO: 2469 - DNA, 50 bp, synthetic construct
  source 1..50: mol_type = other DNA
acaaacttcttcactaatattattatactgctattatgatagtggtatcc

SEQ ID NO: 2470 - DNA, 50 bp, synthetic construct
  source 1..50: mol_type = other DNA
ccggtgccctccaacccggcctgccggctggccgtgtcggtcggggtcag

SEQ ID NO: 2471 - DNA, 50 bp, synthetic construct
  source 1..50: mol_type = other DNA
ccccatccgcgccgcggccgactcgggagtcggcctcgccgagaactcgg

SEQ ID NO: 2472 - DNA, 50 bp, synthetic construct
  source 1..50: mol_type = other DNA
cggggccaacgccaagcaccaggccagcctggtgctcagcgagtcgcacg

SEQ ID NO: 2473 - DNA, 50 bp, synthetic construct
  source 1..50: mol_type = other DNA
gggaggcgtacgaggcgaggcttgcgcaagccgcgccccgtcaacctgca

SEQ ID NO: 2474 - DNA, 50 bp, synthetic construct
  source 1..50: mol_type = other DNA
atttaaaactattattcacttcaaaatttcagtaattaaatgtactaaat

SEQ ID NO: 2475 - DNA, 50 bp, synthetic construct
  source 1..50: mol_type = other DNA
gcggacccgacgggattgcgcaccgcggacccgacgggattcgaacccgc

SEQ ID NO: 2476 - DNA, 50 bp, synthetic construct
  source 1..50: mol_type = other DNA
taatgaaaataacttacaaattttatattctttgagattacgtgcattta

SEQ ID NO: 2477 - DNA, 50 bp, synthetic construct
  source 1..50: mol_type = other DNA
aatttcgttgatgttcgcgatgtagttacagtgattccatcaacgatcaa

SEQ ID NO: 2478 - DNA, 50 bp, synthetic construct
  source 1..50: mol_type = other DNA
ttacctattattggccctattaagtacttaatgtatttaaacagcgtcaa

SEQ ID NO: 2479 - DNA, 50 bp, synthetic construct
  source 1..50: mol_type = other DNA
agtcaaagtgaaatctgtaaaagatatcccttatttcgcatcacgcggca

SEQ ID NO: 2480 - DNA, 50 bp, synthetic construct
  source 1..50: mol_type = other DNA
gcggcgataccaggcccgccgcagatctggcccgagctgaggttcgccgg

SEQ ID NO: 2481 - DNA, 50 bp, synthetic construct
  source 1..50: mol_type = other DNA
ttatattagagatcatttctaagaaatattaaccatgcacgaaaacattt

SEQ ID NO: 2482 - DNA, 50 bp, synthetic construct
  source 1..50: mol_type = other DNA
ataattttttcttccgataaatgaattcatttagtctttgaacatatcat

SEQ ID NO: 2483 - DNA, 50 bp, synthetic construct
  source 1..50: mol_type = other DNA
tgcctgttctaatctgggttctcttgagagaacttttccgtaaattctta

SEQ ID NO: 2484 - DNA, 50 bp, synthetic construct
  source 1..50: mol_type = other DNA
cacttgtctcacgcctaggtgttgtactaaatattaacgtgatgcaaagt

SEQ ID NO: 2485 - DNA, 50 bp, synthetic construct
  source 1..50: mol_type = other DNA
atggtgaaaactatgaaatcagataaagttgttgaataagaatttacaat

SEQ ID NO: 2486 - DNA, 50 bp, synthetic construct
  source 1..50: mol_type = other DNA
tccacgacggtcccgagcgcgtgacgtcgagctggcgcatccacgcgcct

SEQ ID NO: 2487 - DNA, 50 bp, synthetic construct
  source 1..50: mol_type = other DNA
ataaagactctgctgctgtggcatatactccatcctccctgagccgtatg

SEQ ID NO: 2488 - DNA, 50 bp, synthetic construct
  source 1..50: mol_type = other DNA
atctatcatttattgaatccctttaaaaaaatatcctacacccgatagat

SEQ ID NO: 2489 - DNA, 50 bp, synthetic construct
  source 1..50: mol_type = other DNA
tgtgcttattgccaaccttaaagctgtctttcagaagcaatgcaagcttc

SEQ ID NO: 2490 - DNA, 50 bp, synthetic construct
  source 1..50: mol_type = other DNA
taaatcatatcgcttatacgaagtaagagacggttactattttagatttt

SEQ ID NO: 2491 - DNA, 50 bp, synthetic construct
  source 1..50: mol_type = other DNA
atgtacgtgatacaatcggaatagatcagcaacctttacatcacctatgt

SEQ ID NO: 2492 - DNA, 50 bp, synthetic construct
  source 1..50: mol_type = other DNA
gcacgaggacgggaaggtcgggaaacaccccggccggtacgcccatctgg

SEQ ID NO: 2493 - DNA, 50 bp, synthetic construct
  source 1..50: mol_type = other DNA
atatatggtatcagaaaggaagtgatcccctccttaaaaatattataaac

SEQ ID NO: 2494 - DNA, 50 bp, synthetic construct
  source 1..50: mol_type = other DNA
cagacttcggcttattgtagttttcaagatttacaataaactgcggtctg

SEQ ID NO: 2495 - DNA, 50 bp, synthetic construct
  source 1..50: mol_type = other DNA
atttactcaagtaattaaagccatcagacaatttatgtaactgaataaaa

SEQ ID NO: 2496 - DNA, 50 bp, synthetic construct
  source 1..50: mol_type = other DNA
ttttgtcatattcggttgcttcagcatttcaccgatcagttgttctaatt

SEQ ID NO: 2497 - DNA, 50 bp, synthetic construct
  source 1..50: mol_type = other DNA
aaagtgctgactttaacaaagaggatcctctatgtaaggcttaataattt

SEQ ID NO: 2498 - DNA, 50 bp, synthetic construct
  source 1..50: mol_type = other DNA
ctttaccggccagatcagctggtatgaaccagctatgtctgccggtaaca

SEQ ID NO: 2499 - DNA, 50 bp, synthetic construct
  source 1..50: mol_type = other DNA
agcacccaacaacccttcctgacgctggtcagggtcggttgatagaaccc

SEQ ID NO: 2500 - DNA, 50 bp, synthetic construct
  source 1..50: mol_type = other DNA
ctgctctacgagggcgtcgattaccgggtgtagacgccaaggtggaccag

SEQ ID NO: 2501 - DNA, 50 bp, synthetic construct
  source 1..50: mol_type = other DNA
ggaattagtaaggttaaacagaatatttattgtttaactgtaataattag

SEQ ID NO: 2502 - DNA, 50 bp, synthetic construct
  source 1..50: mol_type = other DNA
aaccaagccaaaatgttcaactaatgatagtatgtcattttgagttagta

SEQ ID NO: 2503 - DNA, 50 bp, synthetic construct
  source 1..50: mol_type = other DNA
tggaaggcgactcaacaaatcagagatctgattgcggtagaagccatcgt

SEQ ID NO: 2504 - DNA, 50 bp, synthetic construct
  source 1..50: mol_type = other DNA
tttgcaaatctttcaacattccttcaaaggaactttggaggagttgcctg

SEQ ID NO: 2505 - DNA, 50 bp, synthetic construct
  source 1..50: mol_type = other DNA
cacgtcatcattcagaaaggacggtagctatttttatgattgaccgctaa

SEQ ID NO: 2506 - DNA, 50 bp, synthetic construct
  source 1..50: mol_type = other DNA
tatccaaattatagttattagtgaattcatgcattaccataatttcctgc

SEQ ID NO: 2507 - DNA, 50 bp, synthetic construct
  source 1..50: mol_type = other DNA
tcttgacaggaattatttcagctatcttgaccaagcacctgagttcaaga

SEQ ID NO: 2508 - DNA, 50 bp, synthetic construct
  source 1..50: mol_type = other DNA
tccattaaaggtattggtgaagcgaaagctgtacaaattatatctgcact

SEQ ID NO: 2509 - DNA, 50 bp, synthetic construct
  source 1..50: mol_type = other DNA
tcttcgtacaggtcggcaatcgggtcgcccttggcctggatgtacgccgc

SEQ ID NO: 2510 - DNA, 50 bp, synthetic construct
  source 1..50: mol_type = other DNA
taagatataatatcacccacaaacttttttgtctttgatattataaacat

SEQ ID NO: 2511 - DNA, 50 bp, synthetic construct
  source 1..50: mol_type = other DNA
cgctcgccgctgcgcggagaccgtcgacgtacagcgtgaagagatagtca

SEQ ID NO: 2512 - DNA, 50 bp, synthetic construct
  source 1..50: mol_type = other DNA
gcccattccatcggcacttgctggtcaagcagcatgccggtcagcgcggc

SEQ ID NO: 2513 - DNA, 50 bp, synthetic construct
  source 1..50: mol_type = other DNA
cccttgcagtttttaacgattgctataaatatcgttgaatatgaaaaata

SEQ ID NO: 2514 - DNA, 50 bp, synthetic construct
  source 1..50: mol_type = other DNA
tatagaagaagatgtatttaaaacaatggaggaataaatcatcttctatt

SEQ ID NO: 2515 - DNA, 50 bp, synthetic construct
  source 1..50: mol_type = other DNA
ttaaataaatttatactatactttataaagttttttaggaaaaatagcat

SEQ ID NO: 2516 - DNA, 50 bp, synthetic construct
  source 1..50: mol_type = other DNA
accctggccaagaagcccaccgtcgcgcgggcctgctggcgggccttcgc

SEQ ID NO: 2517 - DNA, 50 bp, synthetic construct
  source 1..50: mol_type = other DNA
cctctgcgtggtcagcggactcatcaatgagcggggcgaatttcacgatc

SEQ ID NO: 2518 - DNA, 50 bp, synthetic construct
  source 1..50: mol_type = other DNA
ggttcactctggtggagataagcatacgctaattgaaatgttagttgttt

SEQ ID NO: 2519 - DNA, 50 bp, synthetic construct
  source 1..50: mol_type = other DNA
ttagctgggttgctttatgatataattatatctaaggaaagacctgtaat

SEQ ID NO: 2520 - DNA, 50 bp, synthetic construct
  source 1..50: mol_type = other DNA
acaagtcgcaccagggcaagtggcgcgcagctgtcccttcgccgacacgt

SEQ ID NO: 2521 - DNA, 50 bp, synthetic construct
  source 1..50: mol_type = other DNA
tttatgtctttagataaggttaatatgttgactatatctttcatagtaaa

SEQ ID NO: 2522 - DNA, 50 bp, synthetic construct
  source 1..50: mol_type = other DNA
agttccaaaattaacagttctataaagagataactgctaatttttctact

SEQ ID NO: 2523 - DNA, 50 bp, synthetic construct
  source 1..50: mol_type = other DNA
tataccaattacatcaatactaaattgaaaatattgatgtttatggaatt

SEQ ID NO: 2524 - DNA, 50 bp, synthetic construct
  source 1..50: mol_type = other DNA
aaagcagccaatggaaaggcatggtaccatgctttttaccggagatctgg

SEQ ID NO: 2525 - DNA, 50 bp, synthetic construct
  source 1..50: mol_type = other DNA
ccacggccgccaaggttgcgatggcgtcatcgttgcctcgttcttcgtca

SEQ ID NO: 2526 - DNA, 50 bp, synthetic construct
  source 1..50: mol_type = other DNA
acgcggtccttgctctcgcgcaccgcggtttccggcaggccgaccagggt

SEQ ID NO: 2527 - DNA, 50 bp, synthetic construct
  source 1..50: mol_type = other DNA
gtcgatagccatttttctaaggtaggtacctgattggaatggtcaggtac

SEQ ID NO: 2528 - DNA, 50 bp, synthetic construct
  source 1..50: mol_type = other DNA
actacgtggttcgtccaccctgtcatgacagggtgcgcaaaccacgtacg

SEQ ID NO: 2529 - DNA, 50 bp, synthetic construct
  source 1..50: mol_type = other DNA
ccaggagttcctagtggttttaaatatttgaaaccactacgagtccctgg

SEQ ID NO: 2530 - DNA, 50 bp, synthetic construct
  source 1..50: mol_type = other DNA
cttgcattttttcaaatacatagtattcactgtattttcagaattgcaaa

SEQ ID NO: 2531 - DNA, 50 bp, synthetic construct
  source 1..50: mol_type = other DNA
cgcgcactacggcgtggcgatcctgcagccccgccagtccgtcgcgggca

SEQ ID NO: 2532 - DNA, 50 bp, synthetic construct
  source 1..50: mol_type = other DNA
cccggttgaccaaagatatttaggtacctaaatatccttggctgggtcat

SEQ ID NO: 2533 - DNA, 50 bp, synthetic construct
  source 1..50: mol_type = other DNA
caatggcaatcatgctgccatctaaagagaaaataccatgattgcgattg

SEQ ID NO: 2534 - DNA, 50 bp, synthetic construct
  source 1..50: mol_type = other DNA
tgatcgtgcttcacctcggcgcagatcaaggcgatcgtcaagaacgagcg

SEQ ID NO: 2535 - DNA, 50 bp, synthetic construct
  source 1..50: mol_type = other DNA
tgtaggatttagtaactttaatatttgttgaaatgttacaaaatcatcca

SEQ ID NO: 2536 - DNA, 50 bp, synthetic construct
  source 1..50: mol_type = other DNA
ttcacttcctaaaacaccctttataatgttgaagtgtttattctatactc

SEQ ID NO: 2537 - DNA, 50 bp, synthetic construct
  source 1..50: mol_type = other DNA
ctggttgtagttatgtgctaaaatatatgcaggcgcatatcgacccgcag

SEQ ID NO: 2538 - DNA, 50 bp, synthetic construct
  source 1..50: mol_type = other DNA
agcttttttacgactgtccttacgaggcaaaggacattcgggttgccgct

SEQ ID NO: 2539 - DNA, 50 bp, synthetic construct
  source 1..50: mol_type = other DNA
ctcgcaccatatgacaaagtgtgcgcgcacacgaagccgacggccgcgag

SEQ ID NO: 2540 - DNA, 50 bp, synthetic construct
  source 1..50: mol_type = other DNA
atcacaaatagagaaaatgctgattgatcagtttgttcagttcctgtagg

SEQ ID NO: 2541 - DNA, 50 bp, synthetic construct
  source 1..50: mol_type = other DNA
aacctttttttcctgataatcatacaaataagtgccattacaacaaattg

SEQ ID NO: 2542 - DNA, 50 bp, synthetic construct
  source 1..50: mol_type = other DNA
agcgcggcgatgagccgattgcgctgcaagaaacgccacttcgtcggcgc

SEQ ID NO: 2543 - DNA, 50 bp, synthetic construct
  source 1..50: mol_type = other DNA
atgagccacgaaatccgcaccccgatcggcatgctcgaactgaccctcaa

SEQ ID NO: 2544 - DNA, 50 bp, synthetic construct
  source 1..50: mol_type = other DNA
tgacggctcgtcgctcagcccggcaagcgggaacctgcgacgtcacgcgg

SEQ ID NO: 2545 - DNA, 50 bp, synthetic construct
  source 1..50: mol_type = other DNA
tactccagcagccggtgatccgcaaacggcaagaacgtgtgtctggaggg

SEQ ID NO: 2546 - DNA, 50 bp, synthetic construct
  source 1..50: mol_type = other DNA
gctcagtggttagagcacctgcttcaaaggaggcgctctcccgactaagc

SEQ ID NO: 2547 - DNA, 50 bp, synthetic construct
  source 1..50: mol_type = other DNA
caggtacaatagctaaaccaatgtaagcatatgttgaaatattcatactg

SEQ ID NO: 2548 - DNA, 50 bp, synthetic construct
  source 1..50: mol_type = other DNA
agcgccgtgtcattcgtaatgcgccggcgagttgagaatcggtgcgcatc

SEQ ID NO: 2549 - DNA, 50 bp, synthetic construct
  source 1..50: mol_type = other DNA
tttgaaaaatggcactcagcgattgaaatgcgacgctacattatgcgatt

SEQ ID NO: 2550 - DNA, 50 bp, synthetic construct
  source 1..50: mol_type = other DNA
cacgtccaggtaggtgttgcgcttccgagcgcgaccttggactggctgta

SEQ ID NO: 2551 - DNA, 50 bp, synthetic construct
  source 1..50: mol_type = other DNA
ggaatcgtcgtggccgatctcgacatgatcgagtcggccacgacgcgagc

SEQ ID NO: 2552 - DNA, 50 bp, synthetic construct
  source 1..50: mol_type = other DNA
caactccatcgacctgcaatcggccggccttgtggctctggatgcggttg

SEQ ID NO: 2553 - DNA, 50 bp, synthetic construct
  source 1..50: mol_type = other DNA
ggccccgacccctacccccgaagacgtacatgcggtgcagggtcagggcc

SEQ ID NO: 2554 - DNA, 50 bp, synthetic construct
  source 1..50: mol_type = other DNA
tttgaatgttatatccaaaaggtatataccttttccttaccagcattggg

SEQ ID NO: 2555 - DNA, 50 bp, synthetic construct
  source 1..50: mol_type = other DNA
tggatcaccttttgcttgaatataagtttattgatgtaaaagatgacttt

SEQ ID NO: 2556 - DNA, 50 bp, synthetic construct
  source 1..50: mol_type = other DNA
gcgagattgctacgccgaggaagttcggttccttcctggagcgggccggg

SEQ ID NO: 2557 - DNA, 50 bp, synthetic construct
  source 1..50: mol_type = other DNA
gacctcgcggtgtgggacggccacgtcgggccttcttatgtctcgagatc

SEQ ID NO: 2558 - DNA, 50 bp, synthetic construct
  source 1..50: mol_type = other DNA
ccggatcagcgcatcgtcctctacgcacgaccgcggctgcacccatccgg

SEQ ID NO: 2559 - DNA, 50 bp, synthetic construct
  source 1..50: mol_type = other DNA
attataaaaaaatcgcgaaaagtctgcctaaatcgcgattttttctttat

SEQ ID NO: 2560 - DNA, 50 bp, synthetic construct
  source 1..50: mol_type = other DNA
ggattcacacttattgagctgatggtagtcatcggtattattgcgattct

SEQ ID NO: 2561 - DNA, 50 bp, synthetic construct
  source 1..50: mol_type = other DNA
atcaagggtcattgtattgtagctatagactttattcaatggtcattgaa

SEQ ID NO: 2562 - DNA, 50 bp, synthetic construct
  source 1..50: mol_type = other DNA
ggcatcagaccatacagcgaacccagcaattgattgtacaaaaaaatgtc

SEQ ID NO: 2563 - DNA, 50 bp, synthetic construct
  source 1..50: mol_type = other DNA
acaggaacaaataatgaaaaactgctaagtatttgattataaagggttgt

SEQ ID NO: 2564 - DNA, 50 bp, synthetic construct
  source 1..50: mol_type = other DNA
tactatatagtccatctttacctctagaggtaaagatggcttatatagta

SEQ ID NO: 2565 - DNA, 50 bp, synthetic construct
  source 1..50: mol_type = other DNA
cgatggtgacgtgagcatcgatctcgagatcgcgcatcacgtcccaatga

SEQ ID NO: 2566 - DNA, 50 bp, synthetic construct
  source 1..50: mol_type = other DNA
ttctgctggaagcgctgggcagaccggtctgcccagcgcttccagcagaa

SEQ ID NO: 2567 - DNA, 50 bp, synthetic construct
  source 1..50: mol_type = other DNA
caaaaacagaacatacgtactatttccatcaactttattttctattttct

SEQ ID NO: 2568 - DNA, 50 bp, synthetic construct
  source 1..50: mol_type = other DNA
gtccctatgtctgtcaatatcgctttagctccatctgttggcatactata

SEQ ID NO: 2569 - DNA, 50 bp, synthetic construct
  source 1..50: mol_type = other DNA
tttatgtatatccagagcagaaaatagatggtgttctggataaagaagaa

SEQ ID NO: 2570 - DNA, 50 bp, synthetic construct
  source 1..50: mol_type = other DNA
ttgtggagggtgtaattttattcagtatgataaaagaacaagtcaaaaaa

SEQ ID NO: 2571 - DNA, 50 bp, synthetic construct
  source 1..50: mol_type = other DNA
gtggggcatgtcaggttgcctctgtacagagttaacgtgacacagggcga

SEQ ID NO: 2572 - DNA, 50 bp, synthetic construct
  source 1..50: mol_type = other DNA
aaacattggaaggaacagcaaaacctactttgccggagatatcaatgttg

SEQ ID NO: 2573 - DNA, 50 bp, synthetic construct
  source 1..50: mol_type = other DNA
ttgcgctccaggtcgtccatgagggtcctttggtgggacccggagcacaa

SEQ ID NO: 2574 - DNA, 50 bp, synthetic construct
  source 1..50: mol_type = other DNA
tcaaaaatcaaagtttatatatgatattctatcaaaactttttttaaata

SEQ ID NO: 2575 - DNA, 50 bp, synthetic construct
  source 1..50: mol_type = other DNA
cgcttggtggcttgggccagggcggtcagcgtcgtccacccctccagaca

SEQ ID NO: 2576 - DNA, 50 bp, synthetic construct
  source 1..50: mol_type = other DNA
ttagaatgggcgtcatcgctaaaatattttagtaatgccgccccgattag

SEQ ID NO: 2577 - DNA, 50 bp, synthetic construct
  source 1..50: mol_type = other DNA
cacggcccgggcaatgccgtgctgatcaaatcggcctatccctgggtcga

SEQ ID NO: 2578 - DNA, 50 bp, synthetic construct
  source 1..50: mol_type = other DNA
catcgccgatcgcgtccatcgggaggggccaatggacaggatgaggcgcc

SEQ ID NO: 2579 - DNA, 50 bp, synthetic construct
  source 1..50: mol_type = other DNA
tttactatgaaagatgtataacccatgaagattttatctaaagacataaa

SEQ ID NO: 2580 - DNA, 50 bp, synthetic construct
  source 1..50: mol_type = other DNA
aagattttaggacgatcaaattcactatgatacgctcttccgaaagctga

SEQ ID NO: 2581 - DNA, 50 bp, synthetic construct
  source 1..50: mol_type = other DNA
gcgcccccggcggtccagagcaggaagcggacatggcccatgcggaagag

SEQ ID NO: 2582 - DNA, 50 bp, synthetic construct
  source 1..50: mol_type = other DNA
aagtcgaatacgcgccaaggaggtgcacctccttggcgcgtattcgactt

SEQ ID NO: 2583 - DNA, 50 bp, synthetic construct
  source 1..50: mol_type = other DNA
gacaatactctgtaagttgattcaatataaatgacagtaaaagtatgttt

SEQ ID NO: 2584 - DNA, 50 bp, synthetic construct
  source 1..50: mol_type = other DNA
gtgattgatggttatagtaatttccttaaagaactatatcagttcaagag

SEQ ID NO: 2585 - DNA, 50 bp, synthetic construct
  source 1..50: mol_type = other DNA
gaggaaccatatctccaacatcgtatatcatgaacgtgatgcagaagctg

SEQ ID NO: 2586 - DNA, 50 bp, synthetic construct
  source 1..50: mol_type = other DNA
tatcagcaactgaaaacatggaatttattccatgtacggacatattgaaa

SEQ ID NO: 2587 - DNA, 50 bp, synthetic construct
  source 1..50: mol_type = other DNA
ggaatacaaaagcctgctcgattgcgaaatgatcggagcttttggtttta

SEQ ID NO: 2588 - DNA, 50 bp, synthetic construct
  source 1..50: mol_type = other DNA
gagggttgcacacttccctaagcggccgcacgtggacgtggttcgggcga

SEQ ID NO: 2589 - DNA, 50 bp, synthetic construct
  source 1..50: mol_type = other DNA
cagcgcgccgctgctgcccgcaccgcatcgcgcacacgcgcggtgccctt

SEQ ID NO: 2590 - DNA, 50 bp, synthetic construct
  source 1..50: mol_type = other DNA
catctcgatgtccacggccgtcacgcgtgacggcgaatctcctcgatctc

SEQ ID NO: 2591 - DNA, 50 bp, synthetic construct
  source 1..50: mol_type = other DNA
cggccatgatcatcaaccttgtgcgcccaaaaggttgatgatcatggtgt

SEQ ID NO: 2592 - DNA, 50 bp, synthetic construct
  source 1..50: mol_type = other DNA
gcggcagcgagcagttcagcttcggcgcgtgcggaacgactcgctgccgc

SEQ ID NO: 2593 - DNA, 50 bp, synthetic construct
  source 1..50: mol_type = other DNA
cgactccccggggaactcgagcgtcgacgctggaatttcctggggagccg

SEQ ID NO: 2594 - DNA, 50 bp, synthetic construct
  source 1..50: mol_type = other DNA
gcgtaaaggccatgctgacggtccgccgtttcgcagcagatcctcttcca

SEQ ID NO: 2595 - DNA, 50 bp, synthetic construct
  source 1..50: mol_type = other DNA
cgatgcaacacaatctaaataacaactgttatttagaataggttgcagat

SEQ ID NO: 2596 - DNA, 50 bp, synthetic construct
  source 1..50: mol_type = other DNA
aggctgcagtgcggctgctggcggacccgccacactgtccagcgccgctc

SEQ ID NO: 2597 - DNA, 50 bp, synthetic construct
  source 1..50: mol_type = other DNA
tgctggaacagatcggacagatttccgtatctgtcctatctgttttcatg

SEQ ID NO: 2598 - DNA, 50 bp, synthetic construct
  source 1..50: mol_type = other DNA
ttttagttcttggttttattcaggtacctgaataaaactaagtattttcc

SEQ ID NO: 2599 - DNA, 50 bp, synthetic construct
  source 1..50: mol_type = other DNA
ggctttttccgtttctgtaaaaactagtcatcacagaaacttaaaaagtt

SEQ ID NO: 2600 - DNA, 50 bp, synthetic construct
  source 1..50: mol_type = other DNA
gggcaccaggtctaccggacgcaacggtgagctcggtctgcagggtgcgc

SEQ ID NO: 2601 - DNA, 50 bp, synthetic construct
  source 1..50: mol_type = other DNA
tccccggacatgctcgtgttcgcggtgctgcagccgatcatgttcgtgtt

SEQ ID NO: 2602 - DNA, 50 bp, synthetic construct
  source 1..50: mol_type = other DNA
ttgatagaggaggattggccattatctaattcagcaaactcttccatcaa

SEQ ID NO: 2603 - DNA, 50 bp, synthetic construct
  source 1..50: mol_type = other DNA
ttacagggtccagatccgcttcatgcatgaagaaataaaggaaagcataa

SEQ ID NO: 2604 - DNA, 50 bp, synthetic construct
  source 1..50: mol_type = other DNA
ctgcgggcgtcgatcctgaacggctgcgcgttctgtgtggacctgcacag

SEQ ID NO: 2605 - DNA, 50 bp, synthetic construct
  source 1..50: mol_type = other DNA
ttaacgtgtgggttttgactcacacgtcaaaaataaagttatagaattaa

SEQ ID NO: 2606 - DNA, 50 bp, synthetic construct
  source 1..50: mol_type = other DNA
cgcgagcgcgtcgaagccgacctcgcgaggtgtcgcccactgcgccgttg

SEQ ID NO: 2607 - DNA, 50 bp, synthetic construct
  source 1..50: mol_type = other DNA
gcgccgcttctggcgtggcgatgccggcaacgccagcacgtcaaaggcga

SEQ ID NO: 2608 - DNA, 50 bp, synthetic construct
  source 1..50: mol_type = other DNA
acgaaagcatacaaacgcaagtaatattacttgcgtttgtaatgggccat

SEQ ID NO: 2609 - DNA, 50 bp, synthetic construct
  source 1..50: mol_type = other DNA
gccccgcgtcctggaagcccgagccggccctgccccgcagcacgccgggc

SEQ ID NO: 2610 - DNA, 50 bp, synthetic construct
  source 1..50: mol_type = other DNA
agggtaggaagcgcaacatcactggatagcactgttgccctacatacaga

SEQ ID NO: 2611 - DNA, 50 bp, synthetic construct
  source 1..50: mol_type = other DNA
gtcgcggggcccgtcgtcgtgatcatgcggacgaccgagggccggtcgag

SEQ ID NO: 2612 - DNA, 50 bp, synthetic construct
  source 1..50: mol_type = other DNA
tcggcgattttcaacgccaccacgccgctgatgggcgtgctgattggcgg

SEQ ID NO: 2613 - DNA, 50 bp, synthetic construct
  source 1..50: mol_type = other DNA
cggaaacatggttctagtttttttggaagaaaagaagggacgaaggagtt

SEQ ID NO: 2614 - DNA, 50 bp, synthetic construct
  source 1..50: mol_type = other DNA
gctcgtgacccgcgccggcggtgcccagaccttcggccgggtgttcgagc

SEQ ID NO: 2615 - DNA, 50 bp, synthetic construct
  source 1..50: mol_type = other DNA
gttctgtacgaacgtaccgccgcagctcaaacgctcatttttttacaaac

SEQ ID NO: 2616 - DNA, 50 bp, synthetic construct
  source 1..50: mol_type = other DNA
caaacgctaagttcatttcttgttcctgatagaaaagaatttgattattt

SEQ ID NO: 2617 - DNA, 50 bp, synthetic construct
  source 1..50: mol_type = other DNA
gttctcctaaaataagagcttttccggagcgaatggtaattctgtaggtt

SEQ ID NO: 2618 - DNA, 50 bp, synthetic construct
  source 1..50: mol_type = other DNA
gccgcggcaatggtgccgatggcgtactcgactgtgctcatccctgattc

SEQ ID NO: 2619 - DNA, 50 bp, synthetic construct
  source 1..50: mol_type = other DNA
cgtcattgtgggcgaacgccgccacgtaggacttagctcccacgatgaag

SEQ ID NO: 2620 - DNA, 50 bp, synthetic construct
  source 1..50: mol_type = other DNA
actggccgtgtcatcaaaggctgggaccaggggctgatgggcatgcgcgt

SEQ ID NO: 2621 - DNA, 50 bp, synthetic construct
  source 1..50: mol_type = other DNA
tttcccggaaaatatccaatactttatgataaactatatttgaactgaaa

SEQ ID NO: 2622 - DNA, 50 bp, synthetic construct
  source 1..50: mol_type = other DNA
ctttgcgacaacgcaggagcagatcgaatcgcgagtgccttcacgaaagc

SEQ ID NO: 2623 - DNA, 50 bp, synthetic construct
  source 1..50: mol_type = other DNA
atcgcgatgaagttggttacttcaggtgttgctcatccacggatcggggg

SEQ ID NO: 2624 - DNA, 50 bp, synthetic construct
  source 1..50: mol_type = other DNA
cagaaagtgaaggtttctgcggtgatgggcgacgaagccgtcaatttcgc

SEQ ID NO: 2625 - DNA, 50 bp, synthetic construct
  source 1..50: mol_type = other DNA
aaaattatatatgtaaattttaccaattcatagctttcttatcggaattt

SEQ ID NO: 2626 - DNA, 50 bp, synthetic construct
  source 1..50: mol_type = other DNA
ctctccgtgctccgtgcccacccttgcgggtcggcggcaagcgccggctg

SEQ ID NO: 2627 - DNA, 50 bp, synthetic construct
  source 1..50: mol_type = other DNA
atttggcacaaaaagcaaaattaaaatgctttttgctttttttgccaaag

SEQ ID NO: 2628 - DNA, 50 bp, synthetic construct
  source 1..50: mol_type = other DNA
ttcacctccagcaaatgcaccactcaagtgaaaatatgtatggaataaaa

SEQ ID NO: 2629 - DNA, 50 bp, synthetic construct
  source 1..50: mol_type = other DNA
gctcgccgtccggcagcacctcgccggccgctgccagctgacgtgcgagc

SEQ ID NO: 2630 - DNA, 50 bp, synthetic construct
  source 1..50: mol_type = other DNA
tccttcgcctcgttcagtgaggcgtccggcagccccaggatcacgaaggc

SEQ ID NO: 2631 - DNA, 50 bp, synthetic construct
  source 1..50: mol_type = other DNA
agcgttattgtcggtttcttaacatcccttaatgaaccaccaactaaact

SEQ ID NO: 2632 - DNA, 50 bp, synthetic construct
  source 1..50: mol_type = other DNA
catataattgtattcataagcaacatgttgcgtttgaaagctattaaaca

SEQ ID NO: 2633 - DNA, 50 bp, synthetic construct
  source 1..50: mol_type = other DNA
aactgcacggttataacaaggtttgcagattagcacaaacccaccgtatt

SEQ ID NO: 2634 - DNA, 50 bp, synthetic construct
  source 1..50: mol_type = other DNA
ttcggtaacttcttcaagggaacaatcgcgccgctcggcgtgttcggcct

SEQ ID NO: 2635 - DNA, 50 bp, synthetic construct
  source 1..50: mol_type = other DNA
tcacgataactcaaatgtcatttccgataatgctgtacaagtattcggct

SEQ ID NO: 2636 - DNA, 50 bp, synthetic construct
  source 1..50: mol_type = other DNA
tataaatgataatgccactgacaaaatattcagtgtcattacaatcacct

SEQ ID NO: 2637 - DNA, 50 bp, synthetic construct
  source 1..50: mol_type = other DNA
atcaacttttagaattaaattgcctaggctgtttttatgctcaagaatca

SEQ ID NO: 2638 - DNA, 50 bp, synthetic construct
  source 1..50: mol_type = other DNA
caaccagatcgtcgtcgccctgaacatcgtcggtgacgacagggtcgtct

SEQ ID NO: 2639 - DNA, 50 bp, synthetic construct
  source 1..50: mol_type = other DNA
acacaagccccccacacgaccgcatctgacatcgtgtgagaggtcatgct

SEQ ID NO: 2640 - DNA, 50 bp, synthetic construct
  source 1..50: mol_type = other DNA
ttattttggaagcatttcaggtggatccactccttacgctcacaaaatat

SEQ ID NO: 2641 - DNA, 50 bp, synthetic construct
  source 1..50: mol_type = other DNA
gtgtggcaacaatcctgttatcgcatgcgctaaaacgatccttgctgcac

SEQ ID NO: 2642 - DNA, 50 bp, synthetic construct
  source 1..50: mol_type = other DNA
atacttcactaaatgttcacctaatattaggtgacattttagctctaaat

SEQ ID NO: 2643 - DNA, 50 bp, synthetic construct
  source 1..50: mol_type = other DNA
gcaaagcggcacaatgtcggtcagttatgacaaatattgtgccgcttgaa

SEQ ID NO: 2644 - DNA, 50 bp, synthetic construct
  source 1..50: mol_type = other DNA
attttggagctctggtgtcgtttcatgaatagacattttacaccccagat

SEQ ID NO: 2645 - DNA, 50 bp, synthetic construct
  source 1..50: mol_type = other DNA
ttgataagaacagccataatcgtagctgtctctatggctgaccgtatcat

SEQ ID NO: 2646 - DNA, 50 bp, synthetic construct
  source 1..50: mol_type = other DNA
gccaggtcggcggccacctgctcgccgtacgcggtggccgcccgggtgcc

SEQ ID NO: 2647 - DNA, 50 bp, synthetic construct
  source 1..50: mol_type = other DNA
accaaccttacataaatggtaactatagtatgtatttatgtaagtttaac

SEQ ID NO: 2648 - DNA, 50 bp, synthetic construct
  source 1..50: mol_type = other DNA
gcgaaggcgtccgggtatgcttgccggaacagattgccggacgcctgctg

SEQ ID NO: 2649 - DNA, 50 bp, synthetic construct
  source 1..50: mol_type = other DNA
acagggccatatgagaggagcggggacccgcagcgcctatatggtcccga

SEQ ID NO: 2650 - DNA, 50 bp, synthetic construct
  source 1..50: mol_type = other DNA
tattcggcgccgagacccgcagcagctcacccgccactcccggcctgcgc

SEQ ID NO: 2651 - DNA, 50 bp, synthetic construct
  source 1..50: mol_type = other DNA
ttaaaccttttaacgatagccttgtccagtgctatcgttaaaaggtatag

SEQ ID NO: 2652 - DNA, 50 bp, synthetic construct
  source 1..50: mol_type = other DNA
ccagtgcaatggccggcggagtcgagcaactccatgagttgctgctgaag

SEQ ID NO: 2653 - DNA, 50 bp, synthetic construct
  source 1..50: mol_type = other DNA
tccgggaagtattccgggcggaaccggtttgcacccgaacacttccccga

SEQ ID NO: 2654 - DNA, 50 bp, synthetic construct
  source 1..50: mol_type = other DNA
aaatgagagcccaaagggcattacgcgtccatgtagagttctttacactt

SEQ ID NO: 2655 - DNA, 50 bp, synthetic construct
  source 1..50: mol_type = other DNA
gtccttgacttgggcgaacatcgagctcggtgatcgtgcggatcaacgac

SEQ ID NO: 2656 - DNA, 50 bp, synthetic construct
  source 1..50: mol_type = other DNA
ctattacttctatattttcacctttaacctcaaaaatataggagttctta

SEQ ID NO: 2657 - DNA, 50 bp, synthetic construct
  source 1..50: mol_type = other DNA
agtaaaaatctcttctgttggaatatattttaaaagaagtgattttaaag

SEQ ID NO: 2658 - DNA, 50 bp, synthetic construct
  source 1..50: mol_type = other DNA
ctttagattgttctaccaatttcatctgaaatcagtaaatctttcccaac

SEQ ID NO: 2659 - DNA, 50 bp, synthetic construct
  source 1..50: mol_type = other DNA
attgcaattcaaattatcttcaggagataaaatcaagtatgaatttcaat

SEQ ID NO: 2660 - DNA, 50 bp, synthetic construct
  source 1..50: mol_type = other DNA
gggtggcgcaggcggtcgctcttggccgagagcgacttgaagcgccgccc

SEQ ID NO: 2661 - DNA, 50 bp, synthetic construct
  source 1..50: mol_type = other DNA
cccgcaccggcgagggcagccgtgtcgacaccacggatcgccggtcccat

SEQ ID NO: 2662 - DNA, 50 bp, synthetic construct
  source 1..50: mol_type = other DNA
tcgccgcgatgttgaccgacagacacgtatgttgaccgagagcgtggcga

SEQ ID NO: 2663 - DNA, 50 bp, synthetic construct
  source 1..50: mol_type = other DNA
ccactcacgccgacatcgaccacacctggcccggtatctggcgttggtgg

SEQ ID NO: 2664 - DNA, 50 bp, synthetic construct
  source 1..50: mol_type = other DNA
acaccagacagggttgtgacagttcccaccttcacaagcctgttcggtag

SEQ ID NO: 2665 - DNA, 50 bp, synthetic construct
  source 1..50: mol_type = other DNA
cgaaccctgtgaatttccggccgacgtgacacagactgccagaggatgca

SEQ ID NO: 2666 - DNA, 50 bp, synthetic construct
  source 1..50: mol_type = other DNA
tgaccatccgctgctttatgccgggttacgatgaacgcagcggatgttcc

SEQ ID NO: 2667 - DNA, 50 bp, synthetic construct
  source 1..50: mol_type = other DNA
acggtgaccgactaccggtcatgcccggggcggccgtcgtcggtcatggt

SEQ ID NO: 2668 - DNA, 50 bp, synthetic construct
  source 1..50: mol_type = other DNA
cgctctgaccaggcgatttgttgccccgaacaaatgctctgcaccaatcg

SEQ ID NO: 2669 - DNA, 50 bp, synthetic construct
  source 1..50: mol_type = other DNA
gcggcgctgaccgccacggccttcaagaaggctgtgatgatccgcgtctc

SEQ ID NO: 2670 - DNA, 50 bp, synthetic construct
  source 1..50: mol_type = other DNA
aggagtagagctaacatatagcactggtgctatatgcagcatatcctttg

SEQ ID NO: 2671 - DNA, 50 bp, synthetic construct
  source 1..50: mol_type = other DNA
gcgagagaaatcgaggtactaaacaattttagtttctcgattcgtctccg

SEQ ID NO: 2672 - DNA, 50 bp, synthetic construct
  source 1..50: mol_type = other DNA
agtagtgttactgagtgtggggtaattaccacacaaagataatcaatgtt

SEQ ID NO: 2673 - DNA, 50 bp, synthetic construct
  source 1..50: mol_type = other DNA
gcggaagctgcgggcgtctcgtacgcgccgtcaacgccctcgccatggcc

SEQ ID NO: 2674 - DNA, 50 bp, synthetic construct
  source 1..50: mol_type = other DNA
tgatgccccggaactcgggcgtgtcggcgtgtcgaaggtgcgggtggtca

SEQ ID NO: 2675 - DNA, 50 bp, synthetic construct
  source 1..50: mol_type = other DNA
ttcccagagcgacgggtcgcccttgccccacgagcccagcgccacctcgt

SEQ ID NO: 2676 - DNA, 50 bp, synthetic construct
  source 1..50: mol_type = other DNA
aagccagaaccagcagcttactgggcccaagctgctgagctacctggtga

SEQ ID NO: 2677 - DNA, 50 bp, synthetic construct
  source 1..50: mol_type = other DNA
gccgttgaatgacggcggattacttcgacgatccgggttcgttctccggc

SEQ ID NO: 2678 - DNA, 50 bp, synthetic construct
  source 1..50: mol_type = other DNA
gagctggtgaaaaaaggatgccgggtatttcatcctttcttcttattgta

SEQ ID NO: 2679 - DNA, 50 bp, synthetic construct
  source 1..50: mol_type = other DNA
gctggctggggcaaaggcaaaacgcgataaggccaggtgcaacatcctgc

SEQ ID NO: 2680 - DNA, 50 bp, synthetic construct
  source 1..50: mol_type = other DNA
ccctcgcgctgtgcgcgtgctcgcgtgcgagaactcgtcgagcgcatgct

SEQ ID NO: 2681 - DNA, 50 bp, synthetic construct
  source 1..50: mol_type = other DNA
tatgctgcacgatgtattgaaaatgagattttaatgcatctgcgcgcatt

SEQ ID NO: 2682 - DNA, 50 bp, synthetic construct
  source 1..50: mol_type = other DNA
tgagcgaagtgcagggccaactggcgccgccttgccaggcaactcgaggc

SEQ ID NO: 2683 - DNA, 50 bp, synthetic construct
  source 1..50: mol_type = other DNA
atatacttctgaatttttgttttacattgtacacctattcagaaaaagca

SEQ ID NO: 2684 - DNA, 50 bp, synthetic construct
  source 1..50: mol_type = other DNA
ttcattttgggtaaatagaaaggagctcctttcgattcacctataaccca

SEQ ID NO: 2685 - DNA, 50 bp, synthetic construct
  source 1..50: mol_type = other DNA
cagaaccagtgcggatgattgacgatattctgtcggtgacatctgttcgc

SEQ ID NO: 2686 - DNA, 50 bp, synthetic construct
  source 1..50: mol_type = other DNA
acaagttagagagggaaggactttcgagcgtccttccctctcctagttga

SEQ ID NO: 2687 - DNA, 50 bp, synthetic construct
  source 1..50: mol_type = other DNA
atcaattaaacttagaaaaattcaattaaattttacatcaatatattaat

SEQ ID NO: 2688 - DNA, 50 bp, synthetic construct
  source 1..50: mol_type = other DNA
ttgactcctaatttttgcatagcatttgaaatgtggttacggacagtttt

SEQ ID NO: 2689 - DNA, 50 bp, synthetic construct
  source 1..50: mol_type = other DNA
tcgcctccaagatggtacttaatgaatattaagtaccaaatggggggcga

SEQ ID NO: 2690 - DNA, 50 bp, synthetic construct
  source 1..50: mol_type = other DNA
tttattttaccgctatttgtacctgacgatctaaaaaaaggtaaagtaac

SEQ ID NO: 2691 - DNA, 50 bp, synthetic construct
  source 1..50: mol_type = other DNA
ccagtaccacctttatatgctcactagcgcccatatgcaccagcagttgc

SEQ ID NO: 2692 - DNA, 50 bp, synthetic construct
  source 1..50: mol_type = other DNA
aactgtcaaaagaaatactgcacaattgttccttatcttttttatctttt

SEQ ID NO: 2693 - DNA, 50 bp, synthetic construct
  source 1..50: mol_type = other DNA
atgtcgaacggtgaacgagagtccgcggacatcacttcgccagcaaacag

SEQ ID NO: 2694 - DNA, 50 bp, synthetic construct
  source 1..50: mol_type = other DNA
aggacgccccggccagataggtctggcagtcctgctggccggggctgtcc

SEQ ID NO: 2695 - DNA, 50 bp, synthetic construct
  source 1..50: mol_type = other DNA
taaatctagtttactatcatgcttatcaattctttaggtacacagaaata

SEQ ID NO: 2696 - DNA, 50 bp, synthetic construct
  source 1..50: mol_type = other DNA
cgagacgttcagaattcgatcttccgctgtatcgaattctgagaggattt

SEQ ID NO: 2697 - DNA, 50 bp, synthetic construct
  source 1..50: mol_type = other DNA
ggatgaacaggccggggtagacggcgaggactacatcgacctgatcctgc

SEQ ID NO: 2698 - DNA, 50 bp, synthetic construct
  source 1..50: mol_type = other DNA
ccgtggctcagctcgtcgtctggcaaggcggaggagttcccgataccggt

SEQ ID NO: 2699 - DNA, 50 bp, synthetic construct
  source 1..50: mol_type = other DNA
acatcgggacggaggaattggaacatgtgcaaaagagtttgctcatttgg

SEQ ID NO: 2700 - DNA, 50 bp, synthetic construct
  source 1..50: mol_type = other DNA
cccccactcggcgctcgccagggaacacccgggcgcccgacaggtcaggt

SEQ ID NO: 2701 - DNA, 50 bp, synthetic construct
  source 1..50: mol_type = other DNA
cgaccgacgcggtggcgtttcctcgcgcggaaccggctgatcgccgcgct

SEQ ID NO: 2702 - DNA, 50 bp, synthetic construct
  source 1..50: mol_type = other DNA
cggcgtcgtcgataccgctccccacccgaccatcgtgctcgacgacggcg

SEQ ID NO: 2703 - DNA, 50 bp, synthetic construct
  source 1..50: mol_type = other DNA
tccgggtctcccgacacacggaactagtcagacgtgtcggggtccgtgag

SEQ ID NO: 2704 - DNA, 50 bp, synthetic construct
  source 1..50: mol_type = other DNA
agcattaaatggctcgttttcttgtattagaaaacgaaacatataaagga

SEQ ID NO: 2705 - DNA, 50 bp, synthetic construct
  source 1..50: mol_type = other DNA
ttcggattccgggaggtggccttcttccatgccgcctcggcgacgctgat

SEQ ID NO: 2706 - DNA, 50 bp, synthetic construct
  source 1..50: mol_type = other DNA
cttatatatttagaaaatatttcttttgaaatattttataaatatatatt

SEQ ID NO: 2707 - DNA, 50 bp, synthetic construct
  source 1..50: mol_type = other DNA
ccttattttgcatatttaccttttaatgaaggtttgtcagcaatatgctc

SEQ ID NO: 2708 - DNA, 50 bp, synthetic construct
  source 1..50: mol_type = other DNA
atcatcaaactcgctcgccgcagagcactggggcgcccgaggaaaatctg

SEQ ID NO: 2709 - DNA, 50 bp, synthetic construct
  source 1..50: mol_type = other DNA
atttttagtatattagagcattgtttacaatctatttatactcaaaaaga

SEQ ID NO: 2710 - DNA, 50 bp, synthetic construct
  source 1..50: mol_type = other DNA
cctcttccaactgccggagcttgtcgacatgctcgctgcgatggaggatc

SEQ ID NO: 2711 - DNA, 50 bp, synthetic construct
  source 1..50: mol_type = other DNA
tcgatgaaacacgcctgaaagaagaaattctttcaggacatttgtttctg

SEQ ID NO: 2712 - DNA, 50 bp, synthetic construct
  source 1..50: mol_type = other DNA
ttactcagttcaagcaaaacaaaagcttttcttttaaagtttgcgagtaa

SEQ ID NO: 2713 - DNA, 50 bp, synthetic construct
  source 1..50: mol_type = other DNA
ttggctattattagttagtccaaatatttggactaacatatagtatccac

SEQ ID NO: 2714 - DNA, 50 bp, synthetic construct
  source 1..50: mol_type = other DNA
gaatatgatggaaaggcctgggcctccgccgtatcctttccgcgatcttc

SEQ ID NO: 2715 - DNA, 50 bp, synthetic construct
  source 1..50: mol_type = other DNA
atcgtaagcagatatcgcccgtaaattgactaacgaaatcaggcggtgac

SEQ ID NO: 2716 - DNA, 50 bp, synthetic construct
  source 1..50: mol_type = other DNA
gctgcatcgccttcgcgatcgcttcgaactcatccgcgagatcgtgcagc

SEQ ID NO: 2717 - DNA, 50 bp, synthetic construct
  source 1..50: mol_type = other DNA
gccgctaatgcgcaagcttcaaaggtctggtgaccttcagcattaagagt

SEQ ID NO: 2718 - DNA, 50 bp, synthetic construct
  source 1..50: mol_type = other DNA
gaatatatttgttagatgagtgttattaaactcactccaaatattaatag

SEQ ID NO: 2719 - DNA, 50 bp, synthetic construct
  source 1..50: mol_type = other DNA
cccgcgccgggcggcccgatcatcaccagattatgcccgcccgccgccgc

SEQ ID NO: 2720 - DNA, 50 bp, synthetic construct
  source 1..50: mol_type = other DNA
ccatatttacacgagttatatccttcgggatataagtcgcttcaaaccaa

SEQ ID NO: 2721 - DNA, 50 bp, synthetic construct
  source 1..50: mol_type = other DNA
gttcatgcgctaactaataagtggttcgttttggaagttaccgcatctga

SEQ ID NO: 2722 - DNA, 50 bp, synthetic construct
  source 1..50: mol_type = other DNA
gcaaaaggtattttaaatgatataggaaccgaagaattggcacatcttga

SEQ ID NO: 2723 - DNA, 50 bp, synthetic construct
  source 1..50: mol_type = other DNA
ccgccgcgctggccgacctgggaccggatccaggtccaccggctcggcga

SEQ ID NO: 2724 - DNA, 50 bp, synthetic construct
  source 1..50: mol_type = other DNA
gcggctgcgggtggccacaatctgctgatggttggcccgcccggttctgg

SEQ ID NO: 2725 - DNA, 50 bp, synthetic construct
  source 1..50: mol_type = other DNA
cggggcacgctacaatggcgtgccccggctgcccgcagtaccaagcctac

SEQ ID NO: 2726 - DNA, 50 bp, synthetic construct
  source 1..50: mol_type = other DNA
cattgctggacgtggttgaacagcgaactccggcagttcgtcgaggaaca

SEQ ID NO: 2727 - DNA, 50 bp, synthetic construct
  source 1..50: mol_type = other DNA
tgacccacctgtcggccgtcagcgggcgctcggcgctgacgagtgcgtca

SEQ ID NO: 2728 - DNA, 50 bp, synthetic construct
  source 1..50: mol_type = other DNA
ggaccctccctttctcgtgtcgcggccgcgcgacgagagccacggcctcc

SEQ ID NO: 2729 - DNA, 50 bp, synthetic construct
  source 1..50: mol_type = other DNA
gtggaaattcctaaaacaacaggattccctgtaatcggagcgattaccat

SEQ ID NO: 2730 - DNA, 50 bp, synthetic construct
  source 1..50: mol_type = other DNA
cagccatcccggcgggatatggggtaccggcaggagcatggggatgggct

SEQ ID NO: 2731 - DNA, 50 bp, synthetic construct
  source 1..50: mol_type = other DNA
ctggaccacggtcgcggagttcgtcgccgcctcgagcgaccgtgacaaag

SEQ ID NO: 2732 - DNA, 50 bp, synthetic construct
  source 1..50: mol_type = other DNA
ctcttggccattatatttgcggtggccaccgccagcgctttggcaaagag

SEQ ID NO: 2733 - DNA, 50 bp, synthetic construct
  source 1..50: mol_type = other DNA
gctgctggcccgggacgcagcccaggcgcgcggcgtcgcgggcgagggcg

SEQ ID NO: 2734 - DNA, 50 bp, synthetic construct
  source 1..50: mol_type = other DNA
gccctgatgcgcgatatgttcaccaaggatgagttctcgcgcatgatgtc

SEQ ID NO: 2735 - DNA, 50 bp, synthetic construct
  source 1..50: mol_type = other DNA
ccggcgccgggcgggccgatcatcagcaggtgatggccgcccgccgccgc

SEQ ID NO: 2736 - DNA, 50 bp, synthetic construct
  source 1..50: mol_type = other DNA
cctccgtggccgcgaccgccgcgcgcgaggaccggtcggtgcctcggtgg

SEQ ID NO: 2737 - DNA, 50 bp, synthetic construct
  source 1..50: mol_type = other DNA
tgacctccttaaaatacagcttttataactcgactatggcggtccggacg

SEQ ID NO: 2738 - DNA, 50 bp, synthetic construct
  source 1..50: mol_type = other DNA
tattttaaatattaaaaatattgcgataggtatttttatcatttcttttt

SEQ ID NO: 2739 - DNA, 50 bp, synthetic construct
  source 1..50: mol_type = other DNA
catccaggctgcgcaggtaggggagcgccagcaaaacggcagcctggaag

SEQ ID NO: 2740 - DNA, 50 bp, synthetic construct
  source 1..50: mol_type = other DNA
gttcttttttagccaattctaaatatattttacatcatttctaaaaacat

SEQ ID NO: 2741 - DNA, 50 bp, synthetic construct
  source 1..50: mol_type = other DNA
aatccccttgtaatacctttgtttatgaaaaaagttatcacgatagaacc

SEQ ID NO: 2742 - DNA, 50 bp, synthetic construct
  source 1..50: mol_type = other DNA
aaatgtgcggattcgtgcgcgccattaacttcccaataatccgcacattt

SEQ ID NO: 2743 - DNA, 50 bp, synthetic construct
  source 1..50: mol_type = other DNA
tgaatcctccgccgacgcgcgtccgagtacgcggagtagcggcggcgaat

SEQ ID NO: 2744 - DNA, 50 bp, synthetic construct
  source 1..50: mol_type = other DNA
tgcgataatatagctataatcggcatgcggccgcctgctgcgttatcgca

SEQ ID NO: 2745 - DNA, 50 bp, synthetic construct
  source 1..50: mol_type = other DNA
cacccatgtttagattgatgatacatgtatcaccaatcgaagcacccgtt

SEQ ID NO: 2746 - DNA, 50 bp, synthetic construct
  source 1..50: mol_type = other DNA
atccaatcttccgggatggtgtaacggttcaccatcccggtagagctctc

SEQ ID NO: 2747 - DNA, 50 bp, synthetic construct
  source 1..50: mol_type = other DNA
tgtcttgtaaaattatcgacttcaattgaagtgaataatgtaggtgcact

SEQ ID NO: 2748 - DNA, 50 bp, synthetic construct
  source 1..50: mol_type = other DNA
gcacagcttatcagaaagtatatgaatggaaactttcttttaactggaat

SEQ ID NO: 2749 - DNA, 50 bp, synthetic construct
  source 1..50: mol_type = other DNA
aaagattccatccatatgttagatgagcggaacatatgactggaggggga

SEQ ID NO: 2750 - DNA, 50 bp, synthetic construct
  source 1..50: mol_type = other DNA
accagatcaggttcatccggcgaggcatcataggtcttccctcctttgct

SEQ ID NO: 2751 - DNA, 50 bp, synthetic construct
  source 1..50: mol_type = other DNA
aaaatattcgcctcatactccatgcgcataagcaatgcgccgtgcgcttt

SEQ ID NO: 2752 - DNA, 50 bp, synthetic construct
  source 1..50: mol_type = other DNA
tatcgccaagtcacccacaccctctagttcgccttgtcggcttggcgata

SEQ ID NO: 2753 - DNA, 50 bp, synthetic construct
  source 1..50: mol_type = other DNA
tgcgggtgtggcttggacattttttcaaaaacgcagaatccctaacccat

SEQ ID NO: 2754 - DNA, 50 bp, synthetic construct
  source 1..50: mol_type = other DNA
tggatgaacaattatgtcataacatatgttatcagatactttaggaacca

SEQ ID NO: 2755 - DNA, 50 bp, synthetic construct
  source 1..50: mol_type = other DNA
cgctcgacggcaggcgcatcaccagctcttgtaccgcctgccatcgtagg

SEQ ID NO: 2756 - DNA, 50 bp, synthetic construct
  source 1..50: mol_type = other DNA
cgtccgtgcgccgcctcgcccagcggactcggcggagctgcgtcccgacc

SEQ ID NO: 2757 - DNA, 50 bp, synthetic construct
  source 1..50: mol_type = other DNA
atcgcgcccggcaaggtcggcatccagatcgtcggactgcccgacaaggc

SEQ ID NO: 2758 - DNA, 50 bp, synthetic construct
  source 1..50: mol_type = other DNA
attcgacaaaaagaactgcttttaattgaatatcgatccttttgtcctca

SEQ ID NO: 2759 - DNA, 50 bp, synthetic construct
  source 1..50: mol_type = other DNA
gccacgatttccagatgtgcaagttcctccgtaccgatatcggtcaaggt

SEQ ID NO: 2760 - DNA, 50 bp, synthetic construct
  source 1..50: mol_type = other DNA
tatgctgcccgatgtattgagaatgaaatccttatgcacctgagagcttt

SEQ ID NO: 2761 - DNA, 50 bp, synthetic construct
  source 1..50: mol_type = other DNA
tgttattaagcaacttcgattggaccaccgaatgaagtcactggtggaac

SEQ ID NO: 2762 - DNA, 50 bp, synthetic construct
  source 1..50: mol_type = other DNA
tagtcgggccagggaggaaatcctcgcggtttcaggcccgttaccgagta

SEQ ID NO: 2763 - DNA, 50 bp, synthetic construct
  source 1..50: mol_type = other DNA
cagaagaataggtacatagacgttataacatctatgtacctaagaattag

SEQ ID NO: 2764 - DNA, 50 bp, synthetic construct
  source 1..50: mol_type = other DNA
gacggtggcagcgctggcgctcgacgtcgattgcttaaacttcctccgta

SEQ ID NO: 2765 - DNA, 50 bp, synthetic construct
  source 1..50: mol_type = other DNA
ggcttttggcaacctgccagctcgtatgacatgggacgctgccaaaagca

SEQ ID NO: 2766 - DNA, 50 bp, synthetic construct
  source 1..50: mol_type = other DNA
gacccggtcttccaggactggcaggccaaccagtcgcggatcaccgcacc

SEQ ID NO: 2767 - DNA, 50 bp, synthetic construct
  source 1..50: mol_type = other DNA
acatgaaggcgcagcttcaggcgttctcgctaggaccagcgccttatgaa

SEQ ID NO: 2768 - DNA, 50 bp, synthetic construct
  source 1..50: mol_type = other DNA
tggccaccgtcaccggttcggtctccgtgccagcgcgctgtgcgtcgcct

SEQ ID NO: 2769 - DNA, 50 bp, synthetic construct
  source 1..50: mol_type = other DNA
ctgcgacttaatgacggcgcgggcgcgccggcggcttggatcagcaggct

SEQ ID NO: 2770 - DNA, 50 bp, synthetic construct
  source 1..50: mol_type = other DNA
aatgggacgaggaaattctcgaattcccgcgagaacgtcagcgtctcgtc

SEQ ID NO: 2771 - DNA, 50 bp, synthetic construct
  source 1..50: mol_type = other DNA
ccaccatgatcatcgagtatgtggcgctggatcctcgatgatcatgggcg

SEQ ID NO: 2772 - DNA, 50 bp, synthetic construct
  source 1..50: mol_type = other DNA
cgctgcatcgagaacgagattctaattagaatcgagattttgatgcacct

SEQ ID NO: 2773 - DNA, 50 bp, synthetic construct
  source 1..50: mol_type = other DNA
ggcggtcgtcctggccgtccggtacgtcgcctacgccgaggacggccacc

SEQ ID NO: 2774 - DNA, 50 bp, synthetic construct
  source 1..50: mol_type = other DNA
acacgttttgttttaagttgttgcataaaacgctataaaacaaaccttta

SEQ ID NO: 2775 - DNA, 50 bp, synthetic construct
  source 1..50: mol_type = other DNA
gaaatttatataacgaccgcaaaatgatttatggtcgttacctaaagagc

SEQ ID NO: 2776 - DNA, 50 bp, synthetic construct
  source 1..50: mol_type = other DNA
tcgaacgcggcatcctcaccccacgcgtggggtgaagtgttcaccagcgc

SEQ ID NO: 2777 - DNA, 50 bp, synthetic construct
  source 1..50: mol_type = other DNA
agtgcttccattatataatctcatgttgcagggtatagaatggaggcaac

SEQ ID NO: 2778 - DNA, 50 bp, synthetic construct
  source 1..50: mol_type = other DNA
tattcgtacctttccatacaagtatgaagatgttcagcaacttattaatc

SEQ ID NO: 2779 - DNA, 50 bp, synthetic construct
  source 1..50: mol_type = other DNA
atgcatagaaaatgaaatacttattaatgggaatcgaaatactcatgcat

SEQ ID NO: 2780 - DNA, 50 bp, synthetic construct
  source 1..50: mol_type = other DNA
atttgctggcttgactaacatataattgaccattaggcttgccgtccggc

SEQ ID NO: 2781 - DNA, 50 bp, synthetic construct
  source 1..50: mol_type = other DNA
gcgcgcggggtgaaccgggtgattctcgacagccgtcccgtgcacagcgc

SEQ ID NO: 2782 - DNA, 50 bp, synthetic construct
  source 1..50: mol_type = other DNA
ccgacaaggtcagccgcccatcgctgccgatgggcggttgcgccgccgcg

SEQ ID NO: 2783 - DNA, 50 bp, synthetic construct
  source 1..50: mol_type = other DNA
atatttatgggaatcgatcaaacaaatggtgttgaaattgagatgaatcc

SEQ ID NO: 2784 - DNA, 50 bp, synthetic construct
  source 1..50: mol_type = other DNA
atcggagtaagtcaaactctttattaatacactcctttcgctactatata

SEQ ID NO: 2785 - DNA, 50 bp, synthetic construct
  source 1..50: mol_type = other DNA
atacacgggcataggccgccacccgcgggccgtgccatattgccgtggcg

SEQ ID NO: 2786 - DNA, 50 bp, synthetic construct
  source 1..50: mol_type = other DNA
gttcgcggccttcctgggcgacaaccctgttccccgggctgctcgccatc

SEQ ID NO: 2787 - DNA, 50 bp, synthetic construct
  source 1..50: mol_type = other DNA
aggcagcccgtgagagttttaggctcgacttcccgcatccaggtgcgccg

SEQ ID NO: 2788 - DNA, 50 bp, synthetic construct
  source 1..50: mol_type = other DNA
cgcatcgaggttctttagccgccagctgtcggcttgggagttccgatggc

SEQ ID NO: 2789 - DNA, 50 bp, synthetic construct
  source 1..50: mol_type = other DNA
tctgctgcagcagcggcagcctgctaatcataattcgctctggtagcagc

SEQ ID NO: 2790 - DNA, 50 bp, synthetic construct
  source 1..50: mol_type = other DNA
tggaccgcattgccaatctgtttggccaaacatcggacagttacgccgca

SEQ ID NO: 2791 - DNA, 50 bp, synthetic construct
  source 1..50: mol_type = other DNA
acctgggtggacggcaacaccaactggtacacagtgcagtcgttccgtta

SEQ ID NO: 2792 - DNA, 50 bp, synthetic construct
  source 1..50: mol_type = other DNA
tttttatggaaatacactttaaatttatttaaagttagatcgccaaaaaa

SEQ ID NO: 2793 - DNA, 50 bp, synthetic construct
  source 1..50: mol_type = other DNA
gttctttttttatacctttttttcaagaagaggaggtactaaatatgtgt

SEQ ID NO: 2794 - DNA, 50 bp, synthetic construct
  source 1..50: mol_type = other DNA
ctgttgtgtgaaactttatttgggtacccaattaaggtctgttgttacga

SEQ ID NO: 2795 - DNA, 50 bp, synthetic construct
  source 1..50: mol_type = other DNA
ctttagaacgcaaaaagacgccgaataagtcgggttttctgattctaaaa

SEQ ID NO: 2796 - DNA, 50 bp, synthetic construct
  source 1..50: mol_type = other DNA
ttccaatctacagaatcacctatagctattatatctgcatcccattgaat

SEQ ID NO: 2797 - DNA, 50 bp, synthetic construct
  source 1..50: mol_type = other DNA
gcagttctcctggctctagatcatcgatgatctgcagcattaaaactggt

SEQ ID NO: 2798 - DNA, 50 bp, synthetic construct
  source 1..50: mol_type = other DNA
ccaagtggtgcaatgatcataacctttgttacgctcatttttacttgtga

SEQ ID NO: 2799 - DNA, 50 bp, synthetic construct
  source 1..50: mol_type = other DNA
ccagtccaggctgtcctgtgaccatatggtccgtatctacggaccactga

SEQ ID NO: 2800 - DNA, 50 bp, synthetic construct
  source 1..50: mol_type = other DNA
tcacgggcgtgctgacgcgattcctagagctagcgccagcgtgctcgcac

SEQ ID NO: 2801 - DNA, 50 bp, synthetic construct
  source 1..50: mol_type = other DNA
cagcagctgggagcaagtaacgactaccatacacttgcgatcaggcggtg

SEQ ID NO: 2802 - DNA, 50 bp, synthetic construct
  source 1..50: mol_type = other DNA
gcctttgtgatcctgggtcttccggacgctgcgttgaatgaggccaagga

SEQ ID NO: 2803 - DNA, 50 bp, synthetic construct
  source 1..50: mol_type = other DNA
ggcgtgccgaagcgtgcacagtgcgctcatgctggagcgcacggcacagg

SEQ ID NO: 2804 - DNA, 50 bp, synthetic construct
  source 1..50: mol_type = other DNA
tataaatccataaaccttgacttctagagtgaaaggtaatatgataaata

SEQ ID NO: 2805 - DNA, 50 bp, synthetic construct
  source 1..50: mol_type = other DNA
tgcgtaggcaatggcgacggttcctaggagccgaatccaggcggttggca

SEQ ID NO: 2806 - DNA, 50 bp, synthetic construct
  source 1..50: mol_type = other DNA
cggcccttatcctgtcccacggcaggtgccgtagaggagggcgtactcgt

SEQ ID NO: 2807 - DNA, 50 bp, synthetic construct
  source 1..50: mol_type = other DNA
attttaattggcagatgaggtatcctgttacctcgtccgccatttatttt

SEQ ID NO: 2808 - DNA, 50 bp, synthetic construct
  source 1..50: mol_type = other DNA
ggttatatcgatgacaccgtcgtgacaaccaaagttaaatctgcactgct

SEQ ID NO: 2809 - DNA, 50 bp, synthetic construct
  source 1..50: mol_type = other DNA
gctgactttataagggcattgccagctggtatccaaaatattgatgcaag

SEQ ID NO: 2810 - DNA, 50 bp, synthetic construct
  source 1..50: mol_type = other DNA
aacctcaagtgctactgctccacacatcatttgctgaagacgttttgggg

SEQ ID NO: 2811 - DNA, 50 bp, synthetic construct
  source 1..50: mol_type = other DNA
ttctaataagtttacttaaaagattgaccttttctgtaaccttattagaa

SEQ ID NO: 2812 - DNA, 50 bp, synthetic construct
  source 1..50: mol_type = other DNA
cgaggcgtatcggcgctatctaatcgaatcccacgcgccgctgaaaaccg

SEQ ID NO: 2813 - DNA, 50 bp, synthetic construct
  source 1..50: mol_type = other DNA
agtatactatcattaatttaagaatttactggaattattgaagaaattgg

SEQ ID NO: 2814 - DNA, 50 bp, synthetic construct
  source 1..50: mol_type = other DNA
tattagagccacattagaaaacgttgacgtttgataatgtggctctaatt

SEQ ID NO: 2815 - DNA, 50 bp, synthetic construct
  source 1..50: mol_type = other DNA
ttataagtcggagcaaacatcgcccagcagagcatagcggcgaatagtac

SEQ ID NO: 2816 - DNA, 50 bp, synthetic construct
  source 1..50: mol_type = other DNA
tttttgttcaatatgagagttaagatcttcttactcatagctgagccaca

SEQ ID NO: 2817 - DNA, 50 bp, synthetic construct
  source 1..50: mol_type = other DNA
actcctcttctaaaatagacgagcaaattggtctatttttgatgaggacg

SEQ ID NO: 2818 - DNA, 50 bp, synthetic construct
  source 1..50: mol_type = other DNA
aagacggaaaaatggtttttgataaattgccaaaacgatttaagctttat

SEQ ID NO: 2819 - DNA, 50 bp, synthetic construct
  source 1..50: mol_type = other DNA
ggatatgagcaaaccgaacaaatcatgattcgttgaattgtcggcagttt

SEQ ID NO: 2820 - DNA, 50 bp, synthetic construct
  source 1..50: mol_type = other DNA
gaaatcctaaacgagtttctacacatgtgcagaaattcatgcagggaatc

SEQ ID NO: 2821 - DNA, 50 bp, synthetic construct
  source 1..50: mol_type = other DNA
cgtcgcttccggcgtaaacgcgggaggtcgccgtgatgccggacgcggcc

SEQ ID NO: 2822 - DNA, 50 bp, synthetic construct
  source 1..50: mol_type = other DNA
tattccctatgcctattttaacaatatcgtctaaaaattcataggtgatt

SEQ ID NO: 2823 - DNA, 50 bp, synthetic construct
  source 1..50: mol_type = other DNA
gtgttcgtcgccaggcgcaccgcgtcctcggttgccctggagagtcgtac

SEQ ID NO: 2824 - DNA, 50 bp, synthetic construct
  source 1..50: mol_type = other DNA
caatgctcgatttcttcgcaacagcgaactatcgcataaattgaacattg

SEQ ID NO: 2825 - DNA, 50 bp, synthetic construct
  source 1..50: mol_type = other DNA
ggccgcgcggcggctggtcctcgccggcggggcctgcttgctgcgcagct

SEQ ID NO: 2826 - DNA, 50 bp, synthetic construct
  source 1..50: mol_type = other DNA
tcgaaaacagtgccatcgataagcgtgccgtggtagtgcactttcacttt

SEQ ID NO: 2827 - DNA, 50 bp, synthetic construct
  source 1..50: mol_type = other DNA
tcatgtaaaaagaaagaggcggtctcacccgcctctttttattcccagtt

SEQ ID NO: 2828 - DNA, 50 bp, synthetic construct
  source 1..50: mol_type = other DNA
ggcatggccgtctcaccccggcaaagcgaccggaagcagacggccagaat

SEQ ID NO: 2829 - DNA, 50 bp, synthetic construct
  source 1..50: mol_type = other DNA
cttcatctctgatttaaaggtagctatagacccttacgcaggaggaaaag

SEQ ID NO: 2830 - DNA, 50 bp, synthetic construct
  source 1..50: mol_type = other DNA
ccatcacggctgccgcagggcgcagctcgccccagcggcagcgccactgg

SEQ ID NO: 2831 - DNA, 50 bp, synthetic construct
  source 1..50: mol_type = other DNA
tcacagttagcaaaacactctccgcacggagggtgtttagcacacattga

SEQ ID NO: 2832 - DNA, 50 bp, synthetic construct
  source 1..50: mol_type = other DNA
atagcttagaaagatataagaaaattttttcttagatacttctatctgtt

SEQ ID NO: 2833 - DNA, 50 bp, synthetic construct
  source 1..50: mol_type = other DNA
agccggggattgatcaccctgatccggatcgaggcggtgaaggccgacaa

SEQ ID NO: 2834 - DNA, 50 bp, synthetic construct
  source 1..50: mol_type = other DNA
aaatttaaaaatacagcctacatcactgtcccgggattaattttattttt

SEQ ID NO: 2835 - DNA, 50 bp, synthetic construct
  source 1..50: mol_type = other DNA
gcgtcgcggccgttttgttcgccgcgcatcgaacacgagcgctgcgatct

SEQ ID NO: 2836 - DNA, 50 bp, synthetic construct
  source 1..50: mol_type = other DNA
aattatacaaacatatgttcttatttataacgcacactattgtcataaat

SEQ ID NO: 2837 - DNA, 50 bp, synthetic construct
  source 1..50: mol_type = other DNA
gcaacagccccttatatatttattatggtaagcggattaggggcatttgc

SEQ ID NO: 2838 - DNA, 50 bp, synthetic construct
  source 1..50: mol_type = other DNA
cccgaggacggcgcgcgccgcgaggcaaggcggcccgcgtcgtcttcgtg

SEQ ID NO: 2839 - DNA, 50 bp, synthetic construct
  source 1..50: mol_type = other DNA
tccaggacgacggtggcccggctggccatctctgccagcgtctcggtgcc

SEQ ID NO: 2840 - DNA, 50 bp, synthetic construct
  source 1..50: mol_type = other DNA
aattgtgcgttttgctcacaacctaaagcgcatatagcaaacgcacaatt

SEQ ID NO: 2841 - DNA, 50 bp, synthetic construct
  source 1..50: mol_type = other DNA
acgtcgaggacggcgtgaagccgggccccgagagatcccctcgagcacga

SEQ ID NO: 2842 - DNA, 50 bp, synthetic construct
  source 1..50: mol_type = other DNA
ttataagccgcccaccgcaagcgaccgtgcttgcgccgggatcggtaacg

SEQ ID NO: 2843 - DNA, 50 bp, synthetic construct
  source 1..50: mol_type = other DNA
agcgcctcgggggtgcacacgtcttcgacccggtgcccttcccacaagcc

SEQ ID NO: 2844 - DNA, 50 bp, synthetic construct
  source 1..50: mol_type = other DNA
gtcggcgcgtcccgcgccgggcgcgctaaagcggcgtgggacgcggttgg

SEQ ID NO: 2845 - DNA, 50 bp, synthetic construct
  source 1..50: mol_type = other DNA
gggtgggcccgccaggcgcggccgagcagcccgtcctgcaggacccggtc

SEQ ID NO: 2846 - DNA, 50 bp, synthetic construct
  source 1..50: mol_type = other DNA
aatgcgatgttcaccaacatcgagggggagtgggacgaggtgatggccgt

SEQ ID NO: 2847 - DNA, 50 bp, synthetic construct
  source 1..50: mol_type = other DNA
atgtttggatatggggaagtgaaccagtacaaccgccatagtacacttat

SEQ ID NO: 2848 - DNA, 50 bp, synthetic construct
  source 1..50: mol_type = other DNA
ggacggaggtggtctcgacgtgggcgagcacctcgcgaccgtccgcggcc

SEQ ID NO: 2849 - DNA, 50 bp, synthetic construct
  source 1..50: mol_type = other DNA
cgttttgcgtccattaagcaacgatatagtctttctgcttactaaaaaca

SEQ ID NO: 2850 - DNA, 50 bp, synthetic construct
  source 1..50: mol_type = other DNA
gtccgaatacggaggcccgagaactccggctcgtcgaaccgctttcggct

SEQ ID NO: 2851 - DNA, 50 bp, synthetic construct
  source 1..50: mol_type = other DNA
ctcgccgatctcgtccggcaactcgcgagttgaaggacgagcacggcaag

SEQ ID NO: 2852 - DNA, 50 bp, synthetic construct
  source 1..50: mol_type = other DNA
cggccggcggtgacctcgaactgatcacagaccgatgtcactagagcagc

SEQ ID NO: 2853 - DNA, 50 bp, synthetic construct
  source 1..50: mol_type = other DNA
tggccgagcggcgtcgcctgctgccagcagtcggccacgatgctcgggct

SEQ ID NO: 2854 - DNA, 50 bp, synthetic construct
  source 1..50: mol_type = other DNA
cgagcgcgggatcgcccagatgcccgggcagatcagccctcttccggtcg

SEQ ID NO: 2855 - DNA, 50 bp, synthetic construct
  source 1..50: mol_type = other DNA
atcgtctcggcacgcgacctgctcggccggaggtcgcccgccgatacggg

SEQ ID NO: 2856 - DNA, 50 bp, synthetic construct
  source 1..50: mol_type = other DNA
ttattcggatttatgttttaagaactttcttaataaataaatcaatatac

SEQ ID NO: 2857 - DNA, 50 bp, synthetic construct
  source 1..50: mol_type = other DNA
cgctcgggcctgacctctgaaggccgttacgaggaggtccccattgaatt

SEQ ID NO: 2858 - DNA, 50 bp, synthetic construct
  source 1..50: mol_type = other DNA
gaggatgtccggcgcgaaggcgccatggcggcgtccagcccggcatccag

SEQ ID NO: 2859 - DNA, 50 bp, synthetic construct
  source 1..50: mol_type = other DNA
gatgccggcggtggcgtgtagcttgcaagtcacacgacgtggcgtgcggg

SEQ ID NO: 2860 - DNA, 50 bp, synthetic construct
  source 1..50: mol_type = other DNA
ttcgatcttgatggaatatatttttaaatggtacttcgatcttgatggaa

SEQ ID NO: 2861 - DNA, 50 bp, synthetic construct
  source 1..50: mol_type = other DNA
actgcccatgaagctcagccgtcgcgcgacggctgagcttcatggtccca

SEQ ID NO: 2862 - DNA, 50 bp, synthetic construct
  source 1..50: mol_type = other DNA
ggaaaaaatgaacaagctaaaatgatttttttagaaagttcttattttgt

SEQ ID NO: 2863 - DNA, 50 bp, synthetic construct
  source 1..50: mol_type = other DNA
tgccgatcaccttccggtaactgtcgtcagcaacatcaaaacgatcggcc

SEQ ID NO: 2864 - DNA, 50 bp, synthetic construct
  source 1..50: mol_type = other DNA
acccggtggtcacaagtcatgctcgcgctcgtgccgggccacccgaggaa

SEQ ID NO: 2865 - DNA, 50 bp, synthetic construct
  source 1..50: mol_type = other DNA
gagactgtgtggtcctgacgggggaggagccgtcgggaccacacagtcat

SEQ ID NO: 2866 - DNA, 50 bp, synthetic construct
  source 1..50: mol_type = other DNA
caacatacaaagcattaaaatgtgaatatgttttaatggcttgtttgacc

SEQ ID NO: 2867 - DNA, 50 bp, synthetic construct
  source 1..50: mol_type = other DNA
cgtgcgccgggcggctgagaggagcgctccggtcttgatctggccgcagc

SEQ ID NO: 2868 - DNA, 50 bp, synthetic construct
  source 1..50: mol_type = other DNA
atcgttgccctgcgcctttgtcactggtgacatcgtcccattgcaacgtc

SEQ ID NO: 2869 - DNA, 50 bp, synthetic construct
  source 1..50: mol_type = other DNA
gtaactatgggtggtacaggtgccacattagttgtaccatttatgtttat

SEQ ID NO: 2870 - DNA, 50 bp, synthetic construct
  source 1..50: mol_type = other DNA
aaaaaagttgaaattaataatcaatagcaattatttagctcatttttttg

SEQ ID NO: 2871 - DNA, 50 bp, synthetic construct
  source 1..50: mol_type = other DNA
gtgaccgtgccgaagtggttctacgtgtacaaccacctgcacaccgtgca

SEQ ID NO: 2872 - DNA, 50 bp, synthetic construct
  source 1..50: mol_type = other DNA
ggcgggatgcacggctcatggaacatgttagactcatggaacatcagtcg

SEQ ID NO: 2873 - DNA, 50 bp, synthetic construct
  source 1..50: mol_type = other DNA
tgcttgactttacaggcttttagatttcaaaatcgctgtaatgacaaaaa

SEQ ID NO: 2874 - DNA, 50 bp, synthetic construct
  source 1..50: mol_type = other DNA
tggatattatccatatagtgaatttgacgaaacttaatgggtaattactt

SEQ ID NO: 2875 - DNA, 50 bp, synthetic construct
  source 1..50: mol_type = other DNA
ttcctttaagatcatagcccagaatgttctggtaaatgatggtaaactag

SEQ ID NO: 2876 - DNA, 50 bp, synthetic construct
  source 1..50: mol_type = other DNA
gccagatggatgatatagtttagtgcactaacaaatattaaccagatgga

SEQ ID NO: 2877 - DNA, 50 bp, synthetic construct
  source 1..50: mol_type = other DNA
gctgtcccatatctcggcttatggggccataagcagctttccgggacagc

SEQ ID NO: 2878 - DNA, 50 bp, synthetic construct
  source 1..50: mol_type = other DNA
tatgatattttgggagaggaaaaagctactttatatcgaaaaatatcaca

SEQ ID NO: 2879 - DNA, 50 bp, synthetic construct
  source 1..50: mol_type = other DNA
aattatctcaacctaacatagaagtaggagatagcggctttgcgaaaatt

SEQ ID NO: 2880 - DNA, 50 bp, synthetic construct
  source 1..50: mol_type = other DNA
atttacgtgatctgcaatttcaatttcttggtattcaagtaaatacaaat

SEQ ID NO: 2881 - DNA, 50 bp, synthetic construct
  source 1..50: mol_type = other DNA
aggcgtcctgcaggttgtcaccggcgccttcgacaacgcagagcttgccg

SEQ ID NO: 2882 - DNA, 50 bp, synthetic construct
  source 1..50: mol_type = other DNA
gcatgcacagtcgcaaaaacaagatgtcctgtcaaagctgctcgaatggc

SEQ ID NO: 2883 - DNA, 50 bp, synthetic construct
  source 1..50: mol_type = other DNA
attcagaatcttactgaacgaaaaattcttcgtttcagaaagagatgaaa

SEQ ID NO: 2884 - DNA, 50 bp, synthetic construct
  source 1..50: mol_type = other DNA
taaaaatcaatggatagcaacagatgtctcgtgcaattaatagacttaaa

SEQ ID NO: 2885 - DNA, 50 bp, synthetic construct
  source 1..50: mol_type = other DNA
gcccactttcttgtccagttgtattaatatatagaatcaaaaaagtatgc

SEQ ID NO: 2886 - DNA, 50 bp, synthetic construct
  source 1..50: mol_type = other DNA
catttgatcaaataatactcaaaaccatttgattattttttaatcaaaat

SEQ ID NO: 2887 - DNA, 50 bp, synthetic construct
  source 1..50: mol_type = other DNA
acatgtgcgttctttctagttacataaaaatgccgaaagaaaaatattac

SEQ ID NO: 2888 - DNA, 50 bp, synthetic construct
  source 1..50: mol_type = other DNA
gtcaagcgaatgacacaaaatatattgatattttgtattttatatttgag

SEQ ID NO: 2889 - DNA, 50 bp, synthetic construct
  source 1..50: mol_type = other DNA
ggcatcctgctgtgctacggcagccggcggcggtcgctgaggaggatgag

SEQ ID NO: 2890 - DNA, 50 bp, synthetic construct
  source 1..50: mol_type = other DNA
cgagccggcgcccacccagctaatcgatgcgctgggcgagcgtcggcccg

SEQ ID NO: 2891 - DNA, 50 bp, synthetic construct
  source 1..50: mol_type = other DNA
gtcgcccgctccactaggacgctcatgagcgtctaagtatccacttagac

SEQ ID NO: 2892 - DNA, 50 bp, synthetic construct
  source 1..50: mol_type = other DNA
gcggcaacccttttcaatctctttatacggatattgaagaggaaatgaat

SEQ ID NO: 2893 - DNA, 50 bp, synthetic construct
  source 1..50: mol_type = other DNA
ggaagaaaatctattaatacttaaaatgtggtattatctggatttgactc

SEQ ID NO: 2894 - DNA, 50 bp, synthetic construct
  source 1..50: mol_type = other DNA
gggatgatcctgctcacaggcccgacaggtagtggtaaaaccacaacttt

SEQ ID NO: 2895 - DNA, 50 bp, synthetic construct
  source 1..50: mol_type = other DNA
ctcctcggtgagcggggtgcccaggataccgtgccctgctcggcgaggaa

SEQ ID NO: 2896 - DNA, 50 bp, synthetic construct
  source 1..50: mol_type = other DNA
cctcaacacgtaaaaataggttgtgcacatccttattctacgtgaacgcg

SEQ ID NO: 2897 - DNA, 50 bp, synthetic construct
  source 1..50: mol_type = other DNA
atagaacgcaactaaccgcgtttcgacgttcccgctcagtccgtttcttc

SEQ ID NO: 2898 - DNA, 50 bp, synthetic construct
  source 1..50: mol_type = other DNA
tgctgtttgtggtgtaatagtcagtactgactattatcccttacaccgca

SEQ ID NO: 2899 - DNA, 50 bp, synthetic construct
  source 1..50: mol_type = other DNA
catctgggcggtttgcactgccaatttgtgttatttgcggcgctggcaaa

SEQ ID NO: 2900 - DNA, 50 bp, synthetic construct
  source 1..50: mol_type = other DNA
tggttatgatttctcttctttgatgtttcgtagaatacgtatattaaaag

SEQ ID NO: 2901 - DNA, 50 bp, synthetic construct
  source 1..50: mol_type = other DNA
ggaaagtgtaacccatgtgtccggtaccggacacatgggttacactttcc

SEQ ID NO: 2902 - DNA, 50 bp, synthetic construct
  source 1..50: mol_type = other DNA
tcgtatccagagctgtaggtgctccccaattcctcggccagcaccagcgt

SEQ ID NO: 2903 - DNA, 50 bp, synthetic construct
  source 1..50: mol_type = other DNA
accacgccagaccaaggcccaactgcagtgccgccgtcgcgtggcctggt

SEQ ID NO: 2904 - DNA, 50 bp, synthetic construct
  source 1..50: mol_type = other DNA
ccgctgacgatgttgtcgccggtgaccacgccgtacagcaccgcaccgaa

SEQ ID NO: 2905 - DNA, 50 bp, synthetic construct
  source 1..50: mol_type = other DNA
atgcgctagaacaaaccattcccacgtggcgatctgctgttgcgcgatat

SEQ ID NO: 2906 - DNA, 50 bp, synthetic construct
  source 1..50: mol_type = other DNA
tttgaagtaacttcacataaccgttaatggttattcttttttattttcta

SEQ ID NO: 2907 - DNA, 50 bp, synthetic construct
  source 1..50: mol_type = other DNA
cagaccttgaaggcgcggtatgattaatcataccgcgtcctcgccagacc

SEQ ID NO: 2908 - DNA, 50 bp, synthetic construct
  source 1..50: mol_type = other DNA
ttaccagctttcatactggagaaatatttaccaagtaatatctttggtcg

SEQ ID NO: 2909 - DNA, 50 bp, synthetic construct
  source 1..50: mol_type = other DNA
ctggggatcgaagtcccgcttgcggccgcaagacggtcatcgctccccag

SEQ ID NO: 2910 - DNA, 50 bp, synthetic construct
  source 1..50: mol_type = other DNA
cagcatcatgctggccgccgccatgaatccctgcccatgcggctattttg

SEQ ID NO: 2911 - DNA, 50 bp, synthetic construct
  source 1..50: mol_type = other DNA
agattcgcaggcaaaagaacagggaatcttgctttttcgcaagatattct

SEQ ID NO: 2912 - DNA, 50 bp, synthetic construct
  source 1..50: mol_type = other DNA
gggctgggactgcgggctcggcggtcccggtgagcccgcggtcaccgcgg

SEQ ID NO: 2913 - DNA, 50 bp, synthetic construct
  source 1..50: mol_type = other DNA
acctgagctaaatgtaattgatttataaccaattcaacgttttatcaggt

SEQ ID NO: 2914 - DNA, 50 bp, synthetic construct
  source 1..50: mol_type = other DNA
agcatttatcgtgattttgacttgatcagcacatcgttggggataatgat

SEQ ID NO: 2915 - DNA, 50 bp, synthetic construct
  source 1..50: mol_type = other DNA
caatacaaaattttttgttgatgacgtcgtctacaaaaaagcgtgtgttg

SEQ ID NO: 2916 - DNA, 50 bp, synthetic construct
  source 1..50: mol_type = other DNA
ggaaattgatgacttaaataaacaattgtttaccttagtctgtagcttaa

SEQ ID NO: 2917 - DNA, 50 bp, synthetic construct
  source 1..50: mol_type = other DNA
aaataaaatttcatataaaatgtttaaattttacataattaatttttttc

SEQ ID NO: 2918 - DNA, 50 bp, synthetic construct
  source 1..50: mol_type = other DNA
aatatagatttggatagcaaatatcaatatatgtatatgtttattatatt

SEQ ID NO: 2919 - DNA, 50 bp, synthetic construct; identical to SEQ ID NO: 2191
  source 1..50: mol_type = other DNA

SEQ ID NO: 2920 - DNA, 50 bp, synthetic construct
  source 1..50: mol_type = other DNA
cctgtaagtcccccaggttatacatactaataaccaatctgaggtacgta

SEQ ID NO: 2921 - DNA, 50 bp, synthetic construct
  source 1..50: mol_type = other DNA
aaaatcttccatcgctttgaattaattaattcgatttcttcgaaaatttt

SEQ ID NO: 2922 - DNA, 50 bp, synthetic construct
  source 1..50: mol_type = other DNA
agtgtttccagtagtttttaaattactgcttataacaatcatcaaaatca

SEQ ID NO: 2923 - DNA, 50 bp, synthetic construct
  source 1..50: mol_type = other DNA
cagatggcatccttaaacaaacagataagtttgtcaaagtagcacatatg

SEQ ID NO: 2924 - DNA, 50 bp, synthetic construct
  source 1..50: mol_type = other DNA
cgggacgccaaaccgagggggtgacgtggccatgtcgggatgccctcttg

SEQ ID NO: 2925 - DNA, 50 bp, synthetic construct
  source 1..50: mol_type = other DNA
gtcgtggccttcgtcgaggtgtcaaatcacgcattgacgttcgtcgaggt

SEQ ID NO: 2926 - DNA, 50 bp, synthetic construct
  source 1..50: mol_type = other DNA
atgtagagtttgatgaaattgaactaaagttccttcatcaagaattactg

SEQ ID NO: 2927 - DNA, 50 bp, synthetic construct
  source 1..50: mol_type = other DNA
gtttgtatcaaaagcttcctgtacatgggtgataacgctttgacacgtac

SEQ ID NO: 2928 - DNA, 50 bp, synthetic construct
  source 1..50: mol_type = other DNA
attttaaaagataaaaagaaaagcttgcctgcatttttatattttaaaat

SEQ ID NO: 2929 - DNA, 50 bp, synthetic construct
  source 1..50: mol_type = other DNA
acgaaaaacctctctatggaagaaataaacttcatacagttctttttcga

SEQ ID NO: 2930 - DNA, 50 bp, synthetic construct
  source 1..50: mol_type = other DNA
taggaagttagtgtcaagtcagattgatttgtcctgacactaggttagca

SEQ ID NO: 2931 - DNA, 50 bp, synthetic construct
  source 1..50: mol_type = other DNA
tattatattattaattttactttattggaagtgaaattgagaatagcctg

SEQ ID NO: 2932 - DNA, 50 bp, synthetic construct
  source 1..50: mol_type = other DNA
ctacaggggcgtatataataggaaaatttttattatataaatttctgtat

SEQ ID NO: 2933 - DNA, 50 bp, synthetic construct
  source 1..50: mol_type = other DNA
tcataattttattagcatcgattaactatcgtatgccaatctaatatttg

SEQ ID NO: 2934 - DNA, 50 bp, synthetic construct
  source 1..50: mol_type = other DNA
ggagagtggttttctaataagacagctgttccatatagaattcaaacttc

SEQ ID NO: 2935 - DNA, 50 bp, synthetic construct
  source 1..50: mol_type = other DNA
ttatactatattatttccaaattgaaaaatgaagaaataactaagtctac

SEQ ID NO: 2936 - DNA, 50 bp, synthetic construct
  source 1..50: mol_type = other DNA
ctataacgcctgttccaaggtcatatatgacttttgtaccttttctctat

SEQ ID NO: 2937 - DNA, 50 bp, synthetic construct
  source 1..50: mol_type = other DNA
ctatccgaggcctatgatgatcttgttggataatcatgtgcttcatataa

SEQ ID NO: 2938 - DNA, 50 bp, synthetic construct
  source 1..50: mol_type = other DNA
tttgatgataattcaagtagtatttaaaagtttggatatccttcataaaa

SEQ ID NO: 2939 - DNA, 50 bp, synthetic construct
  source 1..50: mol_type = other DNA
acaccatttccgcgaaaggtaaggccgctcacactgggcgtgaaacctga

SEQ ID NO: 2940 - DNA, 50 bp, synthetic construct
  source 1..50: mol_type = other DNA
cgaccgctacgccgtcgtcgtcggcgccgacggctggcgatgggcgttcg

SEQ ID NO: 2941 - DNA, 50 bp, synthetic construct
  source 1..50: mol_type = other DNA
atattagaaaaattactagaagataatactaataatagtttgtccaatac

SEQ ID NO: 2942 - DNA, 50 bp, synthetic construct
  source 1..50: mol_type = other DNA
ctgctcgaacagcggtacctcggccggcgctgtcgaacttgttcgagcag

SEQ ID NO: 2943 - DNA, 50 bp, synthetic construct
  source 1..50: mol_type = other DNA
tcgagctccagtgcatcgcgcccggcggggaagcgtgcccggaagccggc

SEQ ID NO: 2944 - DNA, 50 bp, synthetic construct
  source 1..50: mol_type = other DNA
cacccaggccgggaagaccaccatgcctggtgctggtcatcgggctggtg

SEQ ID NO: 2945 - DNA, 50 bp, synthetic construct
  source 1..50: mol_type = other DNA
cggatggtgcgggagtggcggcggcgcctcggcggcttccgcatcgcgga

SEQ ID NO: 2946 - DNA, 50 bp, synthetic construct
  source 1..50: mol_type = other DNA
aattaaagaactagaaagttatattacttctcaaaccaagttctttcata

SEQ ID NO: 2947 - DNA, 50 bp, synthetic construct
  source 1..50: mol_type = other DNA
gacgcctgagcctcgacgtcccagtattcggctgtggcggctcccgtctc

SEQ ID NO: 2948 - DNA, 50 bp, synthetic construct
  source 1..50: mol_type = other DNA
ccgcgggattctcttcctggacgacggaggcccccgagttcagcggacgg

SEQ ID NO: 2949 - DNA, 50 bp, synthetic construct
  source 1..50: mol_type = other DNA
agtctattcccaggtcaagcctcgtttaccgccaatcgtgggagtagaac

SEQ ID NO: 2950 - DNA, 50 bp, synthetic construct
  source 1..50: mol_type = other DNA
aataattacattaaaatagtgtcatatcaaaccgctttagagtaattttt

SEQ ID NO: 2951 - DNA, 50 bp, synthetic construct
  source 1..50: mol_type = other DNA
gaaattttcctccttacgttggtattatccaaatcaagttaaaaggtcga

SEQ ID NO: 2952 - DNA, 50 bp, synthetic construct
  source 1..50: mol_type = other DNA
aaacttcttgcagatcagttaggtggtccaaacggggaacttggcgcttg

SEQ ID NO: 2953 - DNA, 50 bp, synthetic construct
  source 1..50: mol_type = other DNA
cattaatggatgatttttctgagtatacataagaagttcatcttttgtta

SEQ ID NO: 2954 - DNA, 50 bp, synthetic construct
  source 1..50: mol_type = other DNA
attcggaatcgtgatgtatgtactcaatgacacagttcacctttcctgct

SEQ ID NO: 2955 - DNA, 50 bp, synthetic construct
  source 1..50: mol_type = other DNA
atacgacccgaaaggttaacatacatgtatgatatcctttcgggtcacat

SEQ ID NO: 2956 - DNA, 50 bp, synthetic construct
  source 1..50: mol_type = other DNA
tgcccgcggggcttttccaaagaaccttctggctcaaaggctcgcgggcg

SEQ ID NO: 2957 - DNA, 50 bp, synthetic construct
  source 1..50: mol_type = other DNA
tggaaaaacggctgacacggagatgtattgccgtgtcagcacttttcgca

SEQ ID NO: 2958 - DNA, 50 bp, synthetic construct
  source 1..50: mol_type = other DNA
tccatgcgggatgaaaaggctcttgactgttgtatttcttcttcgctcag

SEQ ID NO: 2959 - DNA, 50 bp, synthetic construct
  source 1..50: mol_type = other DNA
aactttttagtaactatttagtacctagacaacactttcacttcattagt

SEQ ID NO: 2960 - DNA, 50 bp, synthetic construct
  source 1..50: mol_type = other DNA
gatgtgctttctggaatatgatttgcaggagttattgaaggttacacagg

SEQ ID NO: 2961 - DNA, 50 bp, synthetic construct
  source 1..50: mol_type = other DNA
tgcaatattttgccggtgctgttaaagcccagcagcggcaagatatgctg

SEQ ID NO: 2962 - DNA, 50 bp, synthetic construct
  source 1..50: mol_type = other DNA
ttctgattactctttaacctttaacgataatggtcatgaagtaatcagca

SEQ ID NO: 2963 - DNA, 50 bp, synthetic construct
  source 1..50: mol_type = other DNA
acatgggacattatcaaaaggatatgtatttttttgaagatcagtcattt

SEQ ID NO: 2964 - DNA, 50 bp, synthetic construct
  source 1..50: mol_type = other DNA
tgtttgtggtggatatgaaaataccggtatttttctgcgctgttgtgtag

SEQ ID NO: 2965 - DNA, 50 bp, synthetic construct
  source 1..50: mol_type = other DNA
ttatgttgatatataggtgctataacagaaggtgatatatatccattcac

SEQ ID NO: 2966 - DNA, 50 bp, synthetic construct
  source 1..50: mol_type = other DNA
tttttgtaaccgctaacgactccgtcattgcacgttagcggatatcgctt

SEQ ID NO: 2967 - DNA, 50 bp, synthetic construct
  source 1..50: mol_type = other DNA
ccgacaaggtgagcttcgacttccatagaacacgaaggtcaccgtgaaca

SEQ ID NO: 2968 - DNA, 50 bp, synthetic construct
  source 1..50: mol_type = other DNA
atttgctggagctcctgcggcacgcggctgccgcaggacctcaagcgtcg

SEQ ID NO: 2969 - DNA, 50 bp, synthetic construct
  source 1..50: mol_type = other DNA
tcccatacactttcgttgatgggagataaaagcaacggcattgtatgtta

SEQ ID NO: 2970 - DNA, 50 bp, synthetic construct
  source 1..50: mol_type = other DNA
aatcaaagaagaatatagataaaatggttcatcagctttcttctgtggga

SEQ ID NO: 2971 - DNA, 50 bp, synthetic construct
  source 1..50: mol_type = other DNA
cagttcatacgctcattgatgatgtataacatcaatgagccagttcttct

SEQ ID NO: 2972 - DNA, 50 bp, synthetic construct
  source 1..50: mol_type = other DNA
gggctgaatggtgggcgggatgaccgcccatccgggcggcgtagtcgtta

SEQ ID NO: 2973 - DNA, 50 bp, synthetic construct
  source 1..50: mol_type = other DNA
aagtacttcgggtacacggtgaactccgtcaccgtgtagccggcgtcggc

SEQ ID NO: 2974 - DNA, 50 bp, synthetic construct
  source 1..50: mol_type = other DNA
agtcattcatcttgccgccatccgccggattggctggcagatgaatgacc

SEQ ID NO: 2975 - DNA, 50 bp, synthetic construct
  source 1..50: mol_type = other DNA
gatgcacccatctcgccgtcgggcccaccatactgactcataataaactg

SEQ ID NO: 2976 - DNA, 50 bp, synthetic construct
  source 1..50: mol_type = other DNA
ttaaaatggataaagaaacggcaatacccgatattcttcgtcccgtaatt

SEQ ID NO: 2977 - DNA, 50 bp, synthetic construct
  source 1..50: mol_type = other DNA
gcgttttctttacgcccgcgccctgcagaccgcaggcgtcaagaacaccc

SEQ ID NO: 2978 - DNA, 50 bp, synthetic construct
  source 1..50: mol_type = other DNA
tgacctttgcaatcatatttgcagtggtgcaaatgatattgacatattca

SEQ ID NO: 2979 - DNA, 50 bp, synthetic construct
  source 1..50: mol_type = other DNA
acctaatggatagtgtcagttagtgcactaactgacactatcctaatgga

SEQ ID NO: 2980 - DNA, 50 bp, synthetic construct
  source 1..50: mol_type = other DNA
ccggaaaccagctgcaactgctgctgctgtacgctgcatgaagtaccccg

SEQ ID NO: 2981 - DNA, 50 bp, synthetic construct
  source 1..50: mol_type = other DNA
atttcgttttcgaatgaaaggcaaggagttgtttcaggcgtgcgcgaaat

SEQ ID NO: 2982 - DNA, 50 bp, synthetic construct
  source 1..50: mol_type = other DNA
aagaagatctatgattcttgcagggacaaagactgcatagaagacctccg

SEQ ID NO: 2983 - DNA, 50 bp, synthetic construct
  source 1..50: mol_type = other DNA
aaagagattattgcggtaatgacctttgtcaataccgccgcaaaataaat

SEQ ID NO: 2984 - DNA, 50 bp, synthetic construct
  source 1..50: mol_type = other DNA
gatagtaatctccaacctttgtgtatacctaaaaatagcactctactatt

SEQ ID NO: 2985 - DNA, 50 bp, synthetic construct
  source 1..50: mol_type = other DNA
aaagaaatgaccacagaattgtaaccttacgatacccacgactttccgct

SEQ ID NO: 2986 - DNA, 50 bp, synthetic construct
  source 1..50: mol_type = other DNA
catcctttccggccgcgacggtttcgctgaaacggcggcgggaattcttg

SEQ ID NO: 2987 - DNA, 50 bp, synthetic construct
  source 1..50: mol_type = other DNA
gccctgcatagagttcgattctccgcggagaatcgaactccggtccacga

SEQ ID NO: 2988 - DNA, 50 bp, synthetic construct
  source 1..50: mol_type = other DNA
agtaaattgacatcaccagtcggttaaccgcaaggtagtgtcaaaatact

SEQ ID NO: 2989 - DNA, 50 bp, synthetic construct
  source 1..50: mol_type = other DNA
ggcaacggagagttctatattctccggagaagatagaagactcccgtgca

SEQ ID NO: 2990 - DNA, 50 bp, synthetic construct
  source 1..50: mol_type = other DNA
cttggactgtatgcatcgtatcattaatgatataattaatctagtaataa

SEQ ID NO: 2991 - DNA, 50 bp, synthetic construct
  source 1..50: mol_type = other DNA
tcaagattttttcacaaaaaagtatttttgtttttctgataaaaaataat

SEQ ID NO: 2992 - DNA, 50 bp, synthetic construct
  source 1..50: mol_type = other DNA
atacgctggttgacaatctggaggcctgtgcagattctccaggacgtatc

SEQ ID NO: 2993 - DNA, 50 bp, synthetic construct
  source 1..50: mol_type = other DNA
agaagaaaatcgtgcatctcagaaattgctcagcaggcgtgttttcttat

SEQ ID NO: 2994 - DNA, 50 bp, synthetic construct
  source 1..50: mol_type = other DNA
ccacttgtcagatatcatttttaaatttataaataaaatagaagtgttac

SEQ ID NO: 2995 - DNA, 50 bp, synthetic construct
  source 1..50: mol_type = other DNA
acaaaatcgtttcccctgttgcttatacaccataagggcaacgattgtca

SEQ ID NO: 2996 - DNA, 50 bp, synthetic construct
  source 1..50: mol_type = other DNA
cccacgggagcgggcaagtctctctgctatcagatcccggctctgatgct

SEQ ID NO: 2997 - DNA, 50 bp, synthetic construct
  source 1..50: mol_type = other DNA
atgtatttattgctataaacaataatttaatattattgcaatcaagacta

SEQ ID NO: 2998 - DNA, 50 bp, synthetic construct
  source 1..50: mol_type = other DNA
tagtgccgtgatgttatcagtaatatattactgataacttctatgcaccc

SEQ ID NO: 2999 - DNA, 50 bp, synthetic construct
  source 1..50: mol_type = other DNA
aaaaaacagtaggacaaggaagtgatcaattccttgtattgcgatttatt

SEQ ID NO: 3000 - DNA, 50 bp, synthetic construct
  source 1..50: mol_type = other DNA
tggcgaagctgcgggcgctgcgggcgcccacttcgccagctgcttttccg

SEQ ID NO: 3001 - DNA, 50 bp, synthetic construct
  source 1..50: mol_type = other DNA
aacgtggcttcaaatgtatcgggtataccccgcaccgttgaaaccacgac

SEQ ID NO: 3002 - DNA, 50 bp, synthetic construct
  source 1..50: mol_type = other DNA
tcataatcgaaaataggtgctttttacagaaaacctcctttcgattattc

SEQ ID NO: 3003 - DNA, 50 bp, synthetic construct
  source 1..50: mol_type = other DNA
ggcctctaatgttgaaagcccgatatagcacgctttcaacttgtaattgt

SEQ ID NO: 3004 - DNA, 50 bp, synthetic construct
  source 1..50: mol_type = other DNA
caaaaataaaaaatataaacaaattaatttgtgttgcagttgtaaatttt

SEQ ID NO: 3005 - DNA, 50 bp, synthetic construct
  source 1..50: mol_type = other DNA
atatcgtattttgatttttcgtgtgtacacgaaaaaattaagctttaccc

SEQ ID NO: 3006 - DNA, 50 bp, synthetic construct
  source 1..50: mol_type = other DNA
cgcggctttgattttttcagaagtctttttttgaaaaaattaaaaccgtg

SEQ ID NO: 3007 - DNA, 50 bp, synthetic construct
  source 1..50: mol_type = other DNA
cagggaagtccgcaggtaagcggcaggccgatatgctggaggcgtggctg

SEQ ID NO: 3008 - DNA, 50 bp, synthetic construct
  source 1..50: mol_type = other DNA
tctttacaaaataaatactggaagatacccaagtgactttttcttacagc

SEQ ID NO: 3009 - DNA, 50 bp, synthetic construct
  source 1..50: mol_type = other DNA
aaattcattatctcacaatacggcggtcccgacggtgaactcggcgcatc

SEQ ID NO: 3010 - DNA, 50 bp, synthetic construct
  source 1..50: mol_type = other DNA
tctttccattttctacttttgataaaaatgaaacttatgtaatctatttg

SEQ ID NO: 3011 - DNA, 50 bp, synthetic construct
  source 1..50: mol_type = other DNA
ccgaaaatattaaagtatatccttataataatgtacccaaatatggccgg

SEQ ID NO: 3012 - DNA, 50 bp, synthetic construct
  source 1..50: mol_type = other DNA
tgtaaaaaaggcctgtcgcattacaccatttgcgacaggctttttttcaa

SEQ ID NO: 3013 - DNA, 50 bp, synthetic construct
  source 1..50: mol_type = other DNA
ataatcaagttaaatctactgattataatcgatagatggaatttcatttt

SEQ ID NO: 3014 - DNA, 50 bp, synthetic construct
  source 1..50: mol_type = other DNA
aagttctctgttctccgccgctttttaaaggggtatagtatatatcactc

SEQ ID NO: 3015 - DNA, 50 bp, synthetic construct
  source 1..50: mol_type = other DNA
atataatatagaagtcgattgtgaaaagcatgtagaaatacctattacca

SEQ ID NO: 3016 - DNA, 50 bp, synthetic construct
  source 1..50: mol_type = other DNA
tttccggaagctgcgtttcgttgacgagaacatttttcagcttcgcaaaa

SEQ ID NO: 3017 - DNA, 50 bp, synthetic construct
  source 1..50: mol_type = other DNA
taaataatcttgcaggcatacggatatccgtatgcctgcacagttaaatg

SEQ ID NO: 3018 - DNA, 50 bp, synthetic construct
  source 1..50: mol_type = other DNA
aaagatgaactgcatattgaatttaacgctccaatatattccccattttt

SEQ ID NO: 3019 - DNA, 50 bp, synthetic construct
  source 1..50: mol_type = other DNA
ataaataaagcagcacgccctgccaaggcagggcgtgtcttttggtttgg

SEQ ID NO: 3020 - DNA, 50 bp, synthetic construct
  source 1..50: mol_type = other DNA
tgcaacaaaatcccgtaaaatattccgatatattaagggcatgatttgga

SEQ ID NO: 3021 - DNA, 50 bp, synthetic construct
  source 1..50: mol_type = other DNA
ataccaatgattgcattcataggtgtacgaatatcatgtgacatattaga

SEQ ID NO: 3022 - DNA, 50 bp, synthetic construct
  source 1..50: mol_type = other DNA
taagcgaaaaggggcgtccggccaaattcccggaggccaattttatattt

SEQ ID NO: 3023 - DNA, 50 bp, synthetic construct
  source 1..50: mol_type = other DNA
ttgtccggctgccggaataggaggcaccgccgcttccggcagcgtctttt

SEQ ID NO: 3024 - DNA, 50 bp, synthetic construct
  source 1..50: mol_type = other DNA
tgccagccgggcacctgaggcgtcctttcgcctcaggcgccttcctggat

SEQ ID NO: 3025 - DNA, 50 bp, synthetic construct
  source 1..50: mol_type = other DNA
tccgcgtgacggcattcacccgaaggttcgggtggattatatcatctccg

SEQ ID NO: 3026 - DNA, 50 bp, synthetic construct
  source 1..50: mol_type = other DNA
gctaggaatcaagtagcttgctccggaaagcaacagtattgtgtcccaga

SEQ ID NO: 3027 - DNA, 50 bp, synthetic construct
  source 1..50: mol_type = other DNA
ccaaaaagtacgggatatcttcgtgcacgatcaactcctgcgtttcctgt

SEQ ID NO: 3028 - DNA, 50 bp, synthetic construct
  source 1..50: mol_type = other DNA
cgcttgtggccgacgtgctcatcccaggaccatctgatcggtcacaagcc

SEQ ID NO: 3029 - DNA, 50 bp, synthetic construct
  source 1..50: mol_type = other DNA
cgatagcctgagatacacggcaagctgcgcccgggcaactcagttcacca

SEQ ID NO: 3030 - DNA, 50 bp, synthetic construct
  source 1..50: mol_type = other DNA
tttcgcttatttctgtggatgaataccatcatcccaacagcggtaggaag

SEQ ID NO: 3031 - DNA, 50 bp, synthetic construct
  source 1..50: mol_type = other DNA
ccgaatcacaagattatatagcagtgatgatattgttctatgggattgtg

SEQ ID NO: 3032 - DNA, 50 bp, synthetic construct
  source 1..50: mol_type = other DNA
gacgcgcccagttccctatccggcccgccgtattgtgaaatgatcagcgc

SEQ ID NO: 3033 - DNA, 50 bp, synthetic construct
  source 1..50: mol_type = other DNA
atactaaatcacggataaaaacaatacactatttccccgactgttagtag

SEQ ID NO: 3034 - DNA, 50 bp, synthetic construct
  source 1..50: mol_type = other DNA
ctggatttggggttacatacttagtactaattatattgccccatttggtg

SEQ ID NO: 3035 - DNA, 50 bp, synthetic construct
  source 1..50: mol_type = other DNA
caaacaagaagttcaatcggctcttaagagacttcccaaccgcttgatta

SEQ ID NO: 3036 - DNA, 50 bp, synthetic construct
  source 1..50: mol_type = other DNA
cgattgctacagtaacgtatctaaatttgggtatcattctataaacatcg

SEQ ID NO: 3037 - DNA, 50 bp, synthetic construct
  source 1..50: mol_type = other DNA
caaattatcatgagtcagtacggtggaccggatggagagatgggcgcatc

SEQ ID NO: 3038 - DNA, 50 bp, synthetic construct
  source 1..50: mol_type = other DNA
ccggactccacagcgatgatgggtgtaccgatctggcccatcatgtcgtg

SEQ ID NO: 3039 - DNA, 50 bp, synthetic construct
  source 1..50: mol_type = other DNA
atgtgtcgtaacatgatatgtgcggccgtacatatcatgtaaattgacat

SEQ ID NO: 3040 - DNA, 50 bp, synthetic construct
  source 1..50: mol_type = other DNA
cccccgaagagaaaaagctcaccgcccggtgggctttttctttttgcatg

SEQ ID NO: 3041 - DNA, 50 bp, synthetic construct
  source 1..50: mol_type = other DNA
atcgctctttagggggctgtataaattattacagcatgttaaatcaaaat

SEQ ID NO: 3042 - DNA, 50 bp, synthetic construct
  source 1..50: mol_type = other DNA
ggagaatccaaccgaggtgttaccaatgtaagaagtcaattgagttcttt

SEQ ID NO: 3043 - DNA, 50 bp, synthetic construct
  source 1..50: mol_type = other DNA
tttataataaaattcagcacagaaattgccttcctgatcttagcaatggt

SEQ ID NO: 3044 - DNA, 50 bp, synthetic construct
  source 1..50: mol_type = other DNA
aaaattaatatcaaatataaaagaggatttgactttttgatattattttg

SEQ ID NO: 3045 - DNA, 50 bp, synthetic construct
  source 1..50: mol_type = other DNA
aatatgcctgtattatgcgttatcactttaactaatacgatagtttagtt

SEQ ID NO: 3046 - DNA, 50 bp, synthetic construct
  source 1..50: mol_type = other DNA
tcgagaaagaagaacccacttttgtacaaaatcgggttggatttggtgtg

SEQ ID NO: 3047 - DNA, 50 bp, synthetic construct
  source 1..50: mol_type = other DNA
aggttattataaatcaaaaacatttattgtgctaaaattgataataactt

SEQ ID NO: 3048 - DNA, 50 bp, synthetic construct
  source 1..50: mol_type = other DNA
ataaatagtaatctttcttgacatgattgtaaagtaaataatttagagta

SEQ ID NO: 3049 - DNA, 50 bp, synthetic construct
  source 1..50: mol_type = other DNA
atagtatcgaaaaagccttgcaaatatttgcattcccttaccgaagcggg

SEQ ID NO: 3050 - DNA, 50 bp, synthetic construct
  source 1..50: mol_type = other DNA
tcttgagatcgttctgaactatgaaggtgatgttctcaaacatctcaagg

SEQ ID NO: 3051 - DNA, 50 bp, synthetic construct
  source 1..50: mol_type = other DNA
gtattataatcggcgtttagaaagctctgcttcggttatttccataatat

SEQ ID NO: 3052 - DNA, 50 bp, synthetic construct
  source 1..50: mol_type = other DNA
gtgaactaagcacgaaaggagaagtcacgctcctttcgggcttactcgcg

SEQ ID NO: 3053 - DNA, 50 bp, synthetic construct
  source 1..50: mol_type = other DNA
atgcttgaggatcgtctttgcttcatgaagccaataaaatacgaaagctc

SEQ ID NO: 3054 - DNA, 50 bp, synthetic construct
  source 1..50: mol_type = other DNA
atatgctgagcctgacctatgaaacgtggagcagggcagcttccggatat

SEQ ID NO: 3055 - DNA, 50 bp, synthetic construct
  source 1..50: mol_type = other DNA
aaggcggtgagcaaatgggagacgggtgccagcatcccggacaccgccct

SEQ ID NO: 3056 - DNA, 50 bp, synthetic construct
  source 1..50: mol_type = other DNA
tggagttatcaaaaaaaattgcaatattgcagatttcttttgtatcccta

SEQ ID NO: 3057 - DNA, 50 bp, synthetic construct
  source 1..50: mol_type = other DNA
tgctcgttttttccagatgcaatgtacattgggtgagtaaaaattttgag

SEQ ID NO: 3058 - DNA, 50 bp, synthetic construct
  source 1..50: mol_type = other DNA
cttctctgctattggctttgctgtataaagataagaaaataccttaccat

SEQ ID NO: 3059 - DNA, 50 bp, synthetic construct
  source 1..50: mol_type = other DNA
tccgattttgaacgacaaaaatcaaacggttcttgtctttcaatatcgga

SEQ ID NO: 3060 - DNA, 50 bp, synthetic construct
  source 1..50: mol_type = other DNA
tgcataaattccccacctctgcaaataagcggaggtgacattaatatggc

SEQ ID NO: 3061 - DNA, 50 bp, synthetic construct
  source 1..50: mol_type = other DNA
ttaaccatacaatatacaaggagtgaactccttcaaaatcatatgcataa

SEQ ID NO: 3062 - DNA, 50 bp, synthetic construct
  source 1..50: mol_type = other DNA
aacaaaatgtcaatcatgttttcatctgaaaacaggattcgctttccgtt

SEQ ID NO: 3063 - DNA, 50 bp, synthetic construct
  source 1..50: mol_type = other DNA
cgccgtagacgtttgcagatgggtgtacccattagcaaacgtctacagac

SEQ ID NO: 3064 - DNA, 50 bp, synthetic construct
  source 1..50: mol_type = other DNA
ctgtgggtgggttaagtatagagcgcactattcacttaacccgtctgtat

SEQ ID NO: 3065 - DNA, 50 bp, synthetic construct
  source 1..50: mol_type = other DNA
cggtgtttggggataatggtattataacttaccataaccccaacgaagtt

SEQ ID NO: 3066 - DNA, 50 bp, synthetic construct
  source 1..50: mol_type = other DNA
aatttcggaacaaaaacttatgcacctgattcagtttttgttccaacttt

SEQ ID NO: 3067 - DNA, 50 bp, synthetic construct
  source 1..50: mol_type = other DNA
cttcttttgcagctttaatgccggttacggcattcatctggcaaccgaaa

SEQ ID NO: 3068 - DNA, 50 bp, synthetic construct
  source 1..50: mol_type = other DNA
cctcatctcgggcttgccatagctgtcgccatagcaatccataatattcc

SEQ ID NO: 3069 - DNA, 50 bp, synthetic construct
  source 1..50: mol_type = other DNA
ggttaatgcttttcctattgttatatgaaacaatgctaaagaagataaat

SEQ ID NO: 3070 - DNA, 50 bp, synthetic construct
  source 1..50: mol_type = other DNA
cgtcatacgaaaatgtactctccagttcctcagtgattttttctctgacc

SEQ ID NO: 3071 - DNA, 50 bp, synthetic construct
  source 1..50: mol_type = other DNA
tgtataagcagtttttattattatattacctacgcgaaactgcttatatt

SEQ ID NO: 3072 - DNA, 50 bp, synthetic construct
  source 1..50: mol_type = other DNA
ataggcaaatttctggcgatacagccctgtaccgcaagaaatcgggcagc

SEQ ID NO: 3073 - DNA, 50 bp, synthetic construct
  source 1..50: mol_type = other DNA
ggaaagcggttaaaaatgataggacgcagcgacatagagaacctgttcaa

SEQ ID NO: 3074 - DNA, 50 bp, synthetic construct
  source 1..50: mol_type = other DNA
aagagtcatttcgtaggtaatcgaaagcatttattaagaatactcagcgc

SEQ ID NO: 3075 - DNA, 50 bp, synthetic construct
  source 1..50: mol_type = other DNA
gggtccaccgtatagctgagagttataactctcagcactacggtccaccc

SEQ ID NO: 3076 - DNA, 50 bp, synthetic construct
  source 1..50: mol_type = other DNA
aaagaaataggtctgatattttgcttattaaatctaatacctatctctgc

SEQ ID NO: 3077 - DNA, 50 bp, synthetic construct
  source 1..50: mol_type = other DNA
actgttcttttctgcttgaccgcaatggcgttttcaacgttcgtgaccgt

SEQ ID NO: 3078 - DNA, 50 bp, synthetic construct
  source 1..50: mol_type = other DNA
atttcaacatgagcaagttcgttagcttattcttctgttccaatgtctgt

SEQ ID NO: 3079 - DNA, 50 bp, synthetic construct
  source 1..50: mol_type = other DNA
ccagcgatggaacagattatctgtattcccccttcctgttcaatcgcgct

SEQ ID NO: 3080 - DNA, 50 bp, synthetic construct
  source 1..50: mol_type = other DNA
ccgagctcaccatcaggtcccccatatgcacccccatattgtgtaactat

SEQ ID NO: 3081 - DNA, 50 bp, synthetic construct
  source 1..50: mol_type = other DNA
caagactactataaaaagcctaatatattgggctttttgtagtagcgtcc

SEQ ID NO: 3082 - DNA, 50 bp, synthetic construct
  source 1..50: mol_type = other DNA
cgctgcatctattgctcacttatgatcataagtgtgctatttctatggga

SEQ ID NO: 3083 - DNA, 50 bp, synthetic construct
  source 1..50: mol_type = other DNA
tatataatgtatctcctgatacaattttacattagaaagtaaaacatata

SEQ ID NO: 3084 - DNA, 50 bp, synthetic construct
  source 1..50: mol_type = other DNA
gaggaaaagaccgcgaaaaagcatggcagctttatcgacatcgtttttcc

SEQ ID NO: 3085 - DNA, 50 bp, synthetic construct
  source 1..50: mol_type = other DNA
ttattcttgatttaaaagcaaataattgggtaactttatattgattataa

SEQ ID NO: 3086 - DNA, 50 bp, synthetic construct
  source 1..50: mol_type = other DNA
ataactaaaggctgtttattttaaaattatgataataagcctaaatatat

SEQ ID NO: 3087 - DNA, 50 bp, synthetic construct
  source 1..50: mol_type = other DNA
tacaataaacaccaaaatggagggatccatgcaagctcttgtatgtggta

SEQ ID NO: 3088 - DNA, 50 bp, synthetic construct
  source 1..50: mol_type = other DNA
ctgagccggaaatagaaaggagcatctgcccctttctatttcgtgccaga

SEQ ID NO: 3089 - DNA, 50 bp, synthetic construct
  source 1..50: mol_type = other DNA
tccatagacttcatttttcttaccatggcaagacaaattcttcatatccc

SEQ ID NO: 3090 - DNA, 50 bp, synthetic construct
  source 1..50: mol_type = other DNA
aataacactatgcaaggtagaggaaaaattctaccttgcacaatattatg

SEQ ID NO: 3091 - DNA, 50 bp, synthetic construct
  source 1..50: mol_type = other DNA
atggttacgaattctacaaaatccatggcctatgtaccatacggatatac

SEQ ID NO: 3092 - DNA, 50 bp, synthetic construct
  source 1..50: mol_type = other DNA
ttccgatgttttacctactactataaattttaatatataaaatatattaa

SEQ ID NO: 3093 - DNA, 50 bp, synthetic construct
  source 1..50: mol_type = other DNA
agaaattcctttctaaaggtttgcttgcaaattcacaacatctaatttct

SEQ ID NO: 3094 - DNA, 50 bp, synthetic construct
  source 1..50: mol_type = other DNA
tggcaccaatggcaagtttaaaacttcttttttctttatttcttccgcct

SEQ ID NO: 3095 - DNA, 50 bp, synthetic construct
  source 1..50: mol_type = other DNA
cttattttatcacaattcaggggcttgatcctgaaatgtggtatcatagt

SEQ ID NO: 3096 - DNA, 50 bp, synthetic construct
  source 1..50: mol_type = other DNA
cgagagcgcggacgagcaggccatccatggcctgcgcgatatcgggatgc

SEQ ID NO: 3097 - DNA, 50 bp, synthetic construct
  source 1..50: mol_type = other DNA
cgaaacgaaaagtttgccgatattgcaatgagggcatagctttcttctaa

SEQ ID NO: 3098 - DNA, 50 bp, synthetic construct
  source 1..50: mol_type = other DNA
tcaccttaaaaagcccgtgttatcgcgtatttacgagctttttttgcgtt

SEQ ID NO: 3099 - DNA, 50 bp, synthetic construct
  source 1..50: mol_type = other DNA
tgttgtagctattggttatgctgatgtacactacacctataattatgaca

SEQ ID NO: 3100 - DNA, 50 bp, synthetic construct
  source 1..50: mol_type = other DNA
tttctcaaaactaataaaatcttcaaaaactttttatttccttttctatc

SEQ ID NO: 3101 - DNA, 50 bp, synthetic construct
  source 1..50: mol_type = other DNA
ttgagcatcggtaagagtggtattcaacatagtctcttacttgcttcaaa

SEQ ID NO: 3102 - DNA, 50 bp, synthetic construct
  source 1..50: mol_type = other DNA
gggaataagtagactcgatataaccccaatccctttgtcgcattaaaaat

SEQ ID NO: 3103 - DNA, 50 bp, synthetic construct
  source 1..50: mol_type = other DNA
gctacctatctcggtttcccgtttgaaaacgtgaaaccaacgtatcgttt

SEQ ID NO: 3104 - DNA, 50 bp, synthetic construct
  source 1..50: mol_type = other DNA
tttattgacgctatcaacaccccggaacacatcatccttgaacaaatgaa

SEQ ID NO: 3105 - DNA, 50 bp, synthetic construct
  source 1..50: mol_type = other DNA
gtttagatggaaaatgtgtttaaattcctacatagattttcttgataagt

SEQ ID NO: 3106 - DNA, 50 bp, synthetic construct
  source 1..50: mol_type = other DNA
atagctatcctgtgctgtagttctaagcaactatcaatgatagttgcttt

SEQ ID NO: 3107 - DNA, 50 bp, synthetic construct
  source 1..50: mol_type = other DNA
aaaattatatggttgatcttagcaacaggattcagcagattatcaatcaa

SEQ ID NO: 3108 - DNA, 50 bp, synthetic construct
  source 1..50: mol_type = other DNA
atgtatctcggaaaaacaatatacatggatgaaattgttccgatgaacat

SEQ ID NO: 3109 - DNA, 50 bp, synthetic construct
  source 1..50: mol_type = other DNA
cttatattctttaaattaaaaaaattgtttgataatattaatcataaaca

SEQ ID NO: 3110 - DNA, 50 bp, synthetic construct; identical to SEQ ID NO: 3063
  source 1..50: mol_type = other DNA

SEQ ID NO: 3111 - DNA, 50 bp, synthetic construct
  source 1..50: mol_type = other DNA
tcttctttaattctaaaagaaatctgacctccttccgtcattacatatat

SEQ ID NO: 3112 - DNA, 50 bp, synthetic construct
  source 1..50: mol_type = other DNA
aattttgaactaaatcttcataagatctgtccatgaatcttttctagatg

SEQ ID NO: 3113 - DNA, 50 bp, synthetic construct
  source 1..50: mol_type = other DNA
tttataataactctgaccataaaatcttttgacaaataaaaaattatatt

SEQ ID NO: 3114 - DNA, 50 bp, synthetic construct
  source 1..50: mol_type = other DNA
ttggctagctcagcataattaggttttgctttatatgcaagattatcaag

SEQ ID NO: 3115 - DNA, 50 bp, synthetic construct
  source 1..50: mol_type = other DNA
ataaacttcctcatgctacactaccggtaattgtgctggaagaagcggaa

SEQ ID NO: 3116 - DNA, 50 bp, synthetic construct
  source 1..50: mol_type = other DNA
ctggaatcggaattacccagcagacgtctgctaattgattcccatttaca

SEQ ID NO: 3117 - DNA, 50 bp, synthetic construct
  source 1..50: mol_type = other DNA
cgatacagtgggatgttgatacattaatgttgatagcttagactggaaaa

SEQ ID NO: 3118 - DNA, 50 bp, synthetic construct
  source 1..50: mol_type = other DNA
tttccaaatcttttatcaaaaggttaacatttcgatttatcaaaatgcac

SEQ ID NO: 3119 - DNA, 50 bp, synthetic construct
  source 1..50: mol_type = other DNA
ccatgataattgaatagactccaaatttcgttcttgtcccgttatcatag

SEQ ID NO: 3120 - DNA, 50 bp, synthetic construct
  source 1..50: mol_type = other DNA
cttttaagtagtttaaaactttatattaaaatattttaaattattaaaat

SEQ ID NO: 3121 - DNA, 50 bp, synthetic construct
  source 1..50: mol_type = other DNA
atgccagctagaactgtttcttctcaagaagaaacaggctacgtttcaga

SEQ ID NO: 3122 - DNA, 50 bp, synthetic construct
  source 1..50: mol_type = other DNA
gaataaagtctgcgtaatatcattataattatatttaacatctgttatgt

SEQ ID NO: 3123 - DNA, 50 bp, synthetic construct
  source 1..50: mol_type = other DNA
aacttaagtataaaggtcaaattacattttttgatcttttagtttaagta

SEQ ID NO: 3124 - DNA, 50 bp, synthetic construct
  source 1..50: mol_type = other DNA
gtttggctttttttaaattttagtagtctaaaattttaaaaaatttaaat

SEQ ID NO: 3125 - DNA, 50 bp, synthetic construct
  source 1..50: mol_type = other DNA
atatggacaagttaaacggaatacaataacacctcttaacttgattttca

SEQ ID NO: 3126 - DNA, 50 bp, synthetic construct
  source 1..50: mol_type = other DNA
ggtcgagtacgggcgcatgatcctcaatcagcatatgaccgtcatccgcc

SEQ ID NO: 3127 - DNA, 50 bp, synthetic construct
  source 1..50: mol_type = other DNA
cgaaaattgccacaaaaccgacaataatgtatgtgaatgagcaatttgaa

SEQ ID NO: 3128 - DNA, 50 bp, synthetic construct
  source 1..50: mol_type = other DNA
atattagggtgtaagcatatacagctactgattatagtagcttctaaaat

SEQ ID NO: 3129 - DNA, 50 bp, synthetic construct
  source 1..50: mol_type = other DNA
gccagagaacttgccccggagcagatctgccgggggttcagacacctgca

SEQ ID NO: 3130 - DNA, 50 bp, synthetic construct
  source 1..50: mol_type = other DNA
aaatcatcctttcgtacacaaaacttattctgtgtacgattatatgattt

SEQ ID NO: 3131 - DNA, 50 bp, synthetic construct
  source 1..50: mol_type = other DNA
tttataattcctaggaatgtgtaagaagtagattttagcgacatagccag

SEQ ID NO: 3132 - DNA, 50 bp, synthetic construct
  source 1..50: mol_type = other DNA
tcttttgtagccattaggcgcattagatttactccattaagccctaaagc

SEQ ID NO: 3133 - DNA, 50 bp, synthetic construct
  source 1..50: mol_type = other DNA
gatcgccgagtggcggtccgggaggcctccgggcccggggctggccgacg

SEQ ID NO: 3134 - DNA, 50 bp, synthetic construct
  source 1..50: mol_type = other DNA
tcgcttctcggccgcgccgccgcccgcggacgcgcgctgaggagccgcga

SEQ ID NO: 3135 - DNA, 50 bp, synthetic construct
  source 1..50: mol_type = other DNA
cactgcgggcccatcaatagcaaggaacagtcggtggtcccaccgccgat

SEQ ID NO: 3136 - DNA, 50 bp, synthetic construct
  source 1..50: mol_type = other DNA
cggcaggatatttgcacccgccggttccggtgattgtaaaaattctgccg

SEQ ID NO: 3137 - DNA, 50 bp, synthetic construct
  source 1..50: mol_type = other DNA
atgcttttgcatttcatacccttgatcagtcgaatgaattaaaaacctgg

SEQ ID NO: 3138 - DNA, 50 bp, synthetic construct
  source 1..50: mol_type = other DNA
ccgtttcagcacataggaggacgtatgcccccatattaggcacgaagcgg

SEQ ID NO: 3139 - DNA, 50 bp, synthetic construct
  source 1..50: mol_type = other DNA
atcgcgagacacgtgacccgtgctgccgcacggatccttggcctcccgag

SEQ ID NO: 3140 - DNA, 50 bp, synthetic construct
  source 1..50: mol_type = other DNA
gaccaccttatagctccgtacatggctatgtacatcactactttaccgtg

SEQ ID NO: 3141 - DNA, 50 bp, synthetic construct
  source 1..50: mol_type = other DNA
tttttacctttcaaaaatgtaatgtacctttcaaaaatgtaaggtttttg

SEQ ID NO: 3142 - DNA, 50 bp, synthetic construct
  source 1..50: mol_type = other DNA
acaacttgcaaaacttttgctcgatttcaaagaaaagaattgccattttt

SEQ ID NO: 3143 - DNA, 50 bp, synthetic construct
  source 1..50: mol_type = other DNA
cccgatcccggtttcaattggaaatataaccagtttcaatagtttgggga

SEQ ID NO: 3144 - DNA, 50 bp, synthetic construct
  source 1..50: mol_type = other DNA
atgaactagctcatgtcgctctcggacggcagcctcaaattcgtcagcat

SEQ ID NO: 3145 - DNA, 50 bp, synthetic construct
  source 1..50: mol_type = other DNA
ggtggggccgttcatcttcttgaacattcttcgatcagatgggcccggcg

SEQ ID NO: 3146 - DNA, 50 bp, synthetic construct
  source 1..50: mol_type = other DNA
ggctcgaatgacaatcagcgtatctagatacacgtattactgctcgagca

SEQ ID NO: 3147 - DNA, 50 bp, synthetic construct
  source 1..50: mol_type = other DNA
gtggtccttaataccgcttttggctggccaaccatagccgtcgataccca

SEQ ID NO: 3148 - DNA, 50 bp, synthetic construct
  source 1..50: mol_type = other DNA
tttgcagccttgttggttgcattgatgagtgcagccaacaccgctacaat

SEQ ID NO: 3149 - DNA, 50 bp, synthetic construct; identical to SEQ ID NO: 2187
  source 1..50: mol_type = other DNA

SEQ ID NO: 3150 - DNA, 50 bp, synthetic construct
  source 1..50: mol_type = other DNA
atgcagtagccatatcatgcgcctctgatatttctatatggctaattaat

SEQ ID NO: 3151 - DNA, 50 bp, synthetic construct
  source 1..50: mol_type = other DNA
cagacggctgcgcatcgccgcccgtgctggcttcgatgccgcgccggtct

SEQ ID NO: 3152 - DNA, 50 bp, synthetic construct
  source 1..50: mol_type = other DNA
atcgcaagacggaaacggcagacacgtgacttgccgttcagcccaaagaa

SEQ ID NO: 3153 - DNA, 50 bp, synthetic construct
  source 1..50: mol_type = other DNA
ctcggctcgcagcgtggcgagcagcgcggctggccatcagccgagcggat

SEQ ID NO: 3154 - DNA, 50 bp, synthetic construct
  source 1..50: mol_type = other DNA
ggacgaacgatggtagagtctacccttgtagcttcgctcattgttcggga

SEQ ID NO: 3155 - DNA, 50 bp, synthetic construct
  source 1..50: mol_type = other DNA
agctgctccacgtgttcatgcagcgcgctgcgcctgctcggtgagcggaa

SEQ ID NO: 3156 - DNA, 50 bp, synthetic construct
  source 1..50: mol_type = other DNA
tgaatcgttaattcacggtcttgattcctgaacggaatatttacgattct

SEQ ID NO: 3157 - DNA, 50 bp, synthetic construct
  source 1..50: mol_type = other DNA
ttgttttttatgatggcaatatagaagaatataggcttcagctaaataaa

SEQ ID NO: 3158 - DNA, 50 bp, synthetic construct
  source 1..50: mol_type = other DNA
aatatcgtgaaacacgcaaattcgcatgaaatgggcagaaaaagaatatg

SEQ ID NO: 3159 - DNA, 50 bp, synthetic construct
  source 1..50: mol_type = other DNA
gtatatctgaatcctgaaaaatggagacagtttcgcggaatcacatatct

SEQ ID NO: 3160 - DNA, 50 bp, synthetic construct
  source 1..50: mol_type = other DNA
tcgtgtccgagtatctgaagaaaggcctttctccagccatgactcgccgg

SEQ ID NO: 3161 - DNA, 50 bp, synthetic construct
  source 1..50: mol_type = other DNA
cgtccacgagcttcccgacgacgtccaccacgtcgccgtcctgcatgacg

SEQ ID NO: 3162 - DNA, 50 bp, synthetic construct
  source 1..50: mol_type = other DNA
ggtaggcctcggcgcggccgggcgggcccccggcatcgccgaggcctcgg

SEQ ID NO: 3163 - DNA, 46 bp, synthetic construct; identical to SEQ ID NO: 37
  source 1..46: mol_type = other DNA

SEQ ID NO: 3164 - DNA, 46 bp, synthetic construct; identical to SEQ ID NO: 37
  source 1..46: mol_type = other DNA

SEQ ID NO: 3165 - DNA, 46 bp, synthetic construct
  source 1..46: mol_type = other DNA
ccggatgatcctgacgacggagaccgccgtcgtcgacaagccggcc

SEQ ID NO: 3166 - protein, 545 aa, synthetic construct
MRAAIYARYSTEMQREASIEDQFRICRRLIEQNGWTTAQTYADAGLSGASHLRPGYQQMLQDARDGRFDVAVAEGLDRISRDQEHIAAFFKQLRFQGISIVTVAEGEISELHIGLKGTMSSLFLKDLALKTHRGLEGRVQNGKSAGGVTYGYDVLRSIGSDGNVSTGDRTINEEQADIVRRIFQEYVDGHSPRAIAGRLNDEGIDGPRGRGWGMSTIYGNWRRGTGILNNELYVGRLVWNRQRFLKDPATGRRQARMNPPEQWVKKDVPDLRIVPNKLWEKVKARQKATRSTVISEGVVRSERAKRPAYLFSGLVKCGCCGGGFTLVGKTYYGCANARNKGTCDNKMTVRRDRLEDTVLGGLKDQLLHPDLIAAFVTEYQAEYNRLAGEITKDKSKAERKLAGVKRRIDQLVDRICDGMFHESMKDKLTALEQEKAALETELATFDADVPVRLHPGLSDVYRAKVAKLTESLNNPDLRTAASEHIRSLISEIRMVPEGDSLQIELVGELAGLMALSQKSKARGDATGCSITMVAGVGFEPTTFRL

SEQ ID NO: 3167 - protein, 697 aa, synthetic construct; identical to SEQ ID NO: 566

SEQ ID NO: 3168 - protein, 530 aa, synthetic construct; identical to SEQ ID NO: 582

SEQ ID NO: 3169 - protein, 486 aa, synthetic construct; identical to SEQ ID NO: 601

SEQ ID NO: 3170 - protein, 460 aa, synthetic construct
MTSPLPAAIYLRVSGKHQAEGRFGLAAQEHECRAYAARVGLRVARVYVDVISGARDERAQFTQLLADAAGYSVVILGVQDRLARDVPLSYAMLGALQRAGLRVHSALEGPLDLEDDGHALNFGIRAVIADQERRRITARMYGGKLAKVRDRGQPVAPIRAYGWKDGAPDPETGARVAWIFEQVERRGLNQVLDELERLGVPSPTGRPRWGKTALLNLIRNPLYRGEYGYGRKGERLTLAVPALVTPEQWARTNAAVARRFKGSGRAGTLAHIYHLQGVARCGECGSTMSAHSPTPRDGAVRHRYYHCRGTLKIAGRRCEHRRSYPIDVLHQVVAEGLAVLLSEPKLLAEAVARGVHERPGSGPGRVATELARLDAEWERWKGALRAGAITPEELAAERRRIDAARAALSTVEAPTPLDVETWVARTTRAVADLPLGEALRVAGIGVRVHAGGAVEFVVTP

SEQ ID NO: 3171 - protein, 482 aa, synthetic construct; identical to SEQ ID NO: 646

SEQ ID NO: 3172 - protein, 551 aa, synthetic construct
MRVLAVKRISRDTEQSSALARQEVQLSKAIREGHHTVAGWVEDATVSGAVNLDKRPSLGQWLTAPLIHEWDGMMVTEQDRITRDDLHWAAFVGWVLENGKTIVVLDDPSFDITTPNGRLIASVKAAQAANYRNSVRTKKLNQLEWYREERLWSGGSWPFGYRAIRVLHREALRWRLGIDPVTGPLIREAYDRLVNKGHSIRMIVLDWNARGILTARDYQRHVKALEGGEQAEAAVKGTQWSNTVLRVVLTNPALMGYAVYKGEIQKKAGLPVQWADPILTLEEFEKLQEVLARRGGANRNITPRTTDWAGIFYCACGSVYYSNSAPRKLKDGSVRRHDYYLCKTRQVGTRCAYVTSWPLEILRTHLEDAFLSNAGDLEIMTRTYIPGSDRSADIRQLQEALENLTGNLIHLKPGSAGATAVLKAMEEHEAALAELEALPVIPSRWQESGTGETFRQFWERNPSWEVRCDFLRKTGVRLYVAGNPKAPDLDLFLPDDLQQRIINAVSDTVEPGALEAAGRQADDAMAERRASDAALREAAMEATRGTRDLTR

SEQ ID NO: 3173 - protein, 536 aa, synthetic construct; identical to SEQ ID NO: 901

SEQ ID NO: 3174 - protein, 577 aa, synthetic construct; identical to SEQ ID NO: 861

SEQ ID NO: 3175 - protein, 546 aa, synthetic construct
MKAVIYARVSTQDQALGFSLATQKELCEKKARALGALEVEVVEDAYTGTELNRPSLDYVRQLVATGKVDLVVVYDPDRLSRNLTDLLILCREFDKAGVRLEFVNFDWQKTPQGMLFLQMRGAFAEFEHALIKERTQRGKDKKAASGKIRCYAKPFGYDWDAEGDTLVINPQEAEIVKQMFEWLTDPLEPLTPWQITQKLGQVYPQGPRGKGWVHSSVVRMLKNPVYTGRLRRKDEQPDWKPVLVPAIIDQVTFMRAQEMLARSKHFNPKTTRRRFLLQRLLVCGECGRRLTVVTHNNPQKAKYSYYTCPGRYPTKFDDRGRVGRCGLPPWRTEEIDKTVWDTIASIIKNPELFYQYITSEKLETASIPRRRLEEARKRLEQVQRVIERIDRAYFILEALPEEDYKRYRAEQEGELIRIEEDIKRLEAVINAQEQVQKGVEFLRQYAENLARSVDELNFFQKQNITRELVQRVKIYADGSLEIEGYFNLPFTGPGKNVPDHCEELTTLTTQKNLKEPLSSSVLTCTHRKKGHPKVTEGIIHLTILAV

SEQ ID NO: 3176 - DNA, 50 bp, synthetic construct
  source 1..50: mol_type = other DNA
gcatctgctgatagcctggccgtagggtcggcggcctcatcaggctcata

SEQ ID NO: 3177 - DNA, 50 bp, synthetic construct; identical to SEQ ID NO: 1566
  source 1..50: mol_type = other DNA

SEQ ID NO: 3178 - DNA, 50 bp, synthetic construct; identical to SEQ ID NO: 1582
  source 1..50: mol_type = other DNA

SEQ ID NO: 3179 - DNA, 50 bp, synthetic construct
  source 1..50: mol_type = other DNA
gcttacactttggtcacactcggcaccgcggatgagactaaagtgtacgt

SEQ ID NO: 3180 - DNA, 50 bp, synthetic construct
  source 1..50: mol_type = other DNA
gtttatacgcgtgcacacctaatcacctataggtgttcagtcgtataaag

SEQ ID NO: 3181 - DNA, 50 bp, synthetic construct
  source 1..50: mol_type = other DNA
ctaggcgtcacctgtacatgctgtggcgagcatgtataggggacgcctaa

SEQ ID NO: 3182 - DNA, 50 bp, synthetic construct
  source 1..50: mol_type = other DNA
cgtttggaatccctaacatccgacacgtcggacttgcgatagcccaaacc

SEQ ID NO: 3183 - DNA, 50 bp, synthetic construct; identical to SEQ ID NO: 1901
  source 1..50: mol_type = other DNA

SEQ ID NO: 3184 - DNA, 50 bp, synthetic construct
  source 1..50: mol_type = other DNA
cgaacgcgagcaggaaccaggaaacgtctcctggttcctgctcgcgttcg

SEQ ID NO: 3185 - DNA, 50 bp, synthetic construct
  source 1..50: mol_type = other DNA
tttccggtggtaccagcctgggaggaatcctgctctggggaagaagaaag

SEQ ID NO: 3186 - DNA, 50 bp, synthetic construct
  source 1..50: mol_type = other DNA
cgcgggtctcagcggggcatcgcaccgaattgcccctgctcagaaccgca

SEQ ID NO: 3187 - DNA, 50 bp, synthetic construct; identical to SEQ ID NO: 2566
  source 1..50: mol_type = other DNA

SEQ ID NO: 3188 - DNA, 50 bp, synthetic construct; identical to SEQ ID NO: 2582
  source 1..50: mol_type = other DNA

SEQ ID NO: 3189 - DNA, 50 bp, synthetic construct; identical to SEQ ID NO: 2601
  source 1..50: mol_type = other DNA

SEQ ID NO: 3190 - DNA, 50 bp, synthetic construct
  source 1..50: mol_type = other DNA
tactcattcatctggcagccgtaggtgattaggtgtgccttcatcatgtt

SEQ ID NO: 3191 - DNA, 50 bp, synthetic construct; identical to SEQ ID NO: 2646
  source 1..50: mol_type = other DNA

SEQ ID NO: 3192 - DNA, 50 bp, synthetic construct
  source 1..50: mol_type = other DNA
ccccgggtcagggtgacgcccgaggtgtcggatgttagggattccaaacg

SEQ ID NO: 3193 - DNA, 50 bp, synthetic construct; identical to SEQ ID NO: 2901
  source 1..50: mol_type = other DNA

SEQ ID NO: 3194 - DNA, 50 bp, synthetic construct; identical to SEQ ID NO: 2861
  source 1..50: mol_type = other DNA

SEQ ID NO: 3195 - DNA, 50 bp, synthetic construct
  source 1..50: mol_type = other DNA
aaaggtgcccccgtcaataaacactcatgtttatctccttcaacatctct

SEQ ID NO: 3196 - protein, 518 aa, synthetic construct; identical to SEQ ID NO: 1038

SEQ ID NO: 3197 - protein, 547 aa, synthetic construct
MKLLVTYIRWSTKEQDSGDSLRRQTNLIDAFYSKHKEEYYLLPAHRYVDKGKSGFHQQHKNQGSDFRRMFENVMSGAIPEGSLIVVENFDRFSRADIDTAIDDVRQILRKGVSILTLGDGELYDKSALTDPVKLIKHIIIAERAHQESLVKQKRIAQVWNHKTQLARELKKPMGKQAPGWLELSEDGSHYIVDEDKASLVNIIYDKRLSGMSMFAICKWLNEQGYPTINQRKVRISKTKKPDGNWSALSVKHILTSRSVLGYLPAKISTEDRKTVLREEIESFYPQIVTDSKFYAVQQLLEETGKGKTSSGEHWLYVNILKGLIRCKCGLVMTPTGIRKPVYQGTYRCNGNKESRCSYGTVSRKLLDTQLCSRLFSKLSQLHDEATDTAKLDELQRRLNTVDSELEKLTETLIQLPNITQIQEALRVKQEEKDELIVQLSREKARVKSVSSLDLSGLDMESVEGRTEAQIIIKRLVKEIVVSGNEKLVDIYLHNGNMIRGFPLDGKDDHTLTLEEATDEMQSLDDMLIFGEPVTRIYPAGDMEEVDA

SEQ ID NO: 3198 - protein, 507 aa, synthetic construct
MKRVISYIRFSSEKQSRGDSLRRQSKMVNDWLKAHPEYYLDQDLSFRDLGVSGFTGKHLKGGLGDFLTAIEKGLVKAGDTLLIESLDRLSRQNVDRASELLRNILRSGVDVVTLSDGEHYTRESLKDPLALIKSILIMQRSHEESLRKSERIQAAWNRKKELISEGIKISKRCPAWLKLNDDRKSFSVIPDKVETVKRCFQLRLEGKSIWEIVRTLNAEGHQSMSQYKPGSFGQTSVQDLLKNRSVIGYFTPKGCEEISGYYPAIIDETTFYKVQQLSHYRYGRKPVSAKPLSVNLFKGVIRCSECGHALIITGFSDTRNGIYRCPLRNENRCSAKGLSRKQTDGTLLALLSRLDRFDSDTTNTIDTLKLHREHISSNIEKLVQLSLEIEDLSAITSKLKQLKGELSQVDADIEKETQRLKSIDVGCLSDCDLTTKAGRIEAQLIIKSAVKEVVLNTAKRRCKVTFHNGRAITLPITETPSEDVTEAIQSLSEVTERGLIDVDEVII

SEQ ID NO: 3199 - protein, 520 aa, synthetic construct
MKKAVYCYARVSSRGQAKDGYGMSRQQTMLRDYVAAYDDSQHNRGYEFGDISWLYAEGVSAYSGKNIEDGSVLKNFIDDVLQKKITNSVLVIENLDRFSRAAPNRAAGLFLSLINAGCDIHEVETEMIHHQYSDLNIISGGLQRAHNESKRKARLSIKNWDERIKNTIEGTSVLTHRAPSWIEVKNNKYVIKEGEAEKFNLIFKMYADGFGPAAIRDELKKKKMQINESEPTINHLVKIIKDQRLIGKFNSTGRKILDGMIIYPVVVEQSLFETVNDLRKQRNPLGKVNVKANNLFAGLCICMNCGRYVQVNSVDKKGDTYFRCGGSLLKIDKCKERGFKYKIIENALLEHIRNFDFSMLRSNDDDIQIKINYLSIELATKENYSSEILADMEKEYIPDPNDRRILKNLQRRISEIRTEITRLKQSNVGYEKFSDLKESCTDDLLDSKNTNLRLNFNVKIKRVIKNIKMKRLGNAIMLVVNYIGVNEKQAMVIDSKTGDVKFMAVQNDDLKSVEYLINKS

SEQ ID NO: 3200 - protein, 506 aa, synthetic construct
MRSVITYLRFSSAIQGAEGADSTRRQNELFKQWLRKNSDAQVVASFSDEGLSGYKGKHLTGQFGDMLARIESGEFPAGTVLLVESIDRIGRLEHLETEALMNRIIAHGIEIHTLQDGLIYTRDALSDDLGISIIQRVKSYIAHQESKQKSFRVSQKWEQRAKLALAGEQRLTRNVPGWIDPETFKRNEHAETVRLIFKLLLDGESLHNIARHLQSNGIKSFSSRKDANGFSVHSVRTILRSETTIGTLPASQRNDRPAIPNYYEAAVDTSTFNKAQEILGKNRTGRTPASDNPLTINIFKGLFRCQCGASVHPTGTKNKYAGVYRCNNHSDGRCHVPPLKRKPFDKWMIDNFLGMIDVVSDGESERKIAALQHEVETVTARIKKATALLLEMDDITELKAQVKELNQKRTELQTTIDTLKRKTSLTDKELPQLKDIDLTTKAGRVECQLILSKHLESLTLDEGVVTVKLQNGTEIIVPTDPLPLNDGTSIFEIADKKLLDIDAYQL

SEQ ID NO: 3201 - protein, 559 aa, synthetic construct
MKTKLYSYIRFSSMRQNDGSSYERQIRMAREIAAKYDLELVNDYQDLGVSAFKGANSKTGALSRFLDAIGRSVPVGSWLFIENLDRLSRADIVSAQELFLSIIRRGITIVTGMDNKIYSLDTVTANPMDLMFSILLFIRGNEESQTKRNRTNSSALIKIKAHQENPQNPAVAIEEVGKNMWWTDTTSGYVLPHPVYFPVVQEIVELRKNGRSTAEILDHLNETYTPPPAVSNKKHSKWSRAMVERLFHTRALIGIKEISVDGVNYELNNYYPRVIDDPTFYHLKKNIGARAWNFGDKEEVKPIPLLSGIGLLKCDHCGCAMVKVKGTNKRSDQYRYTCDATRSRRLDCEHPNWSFRGDQLEKAVLQLLADKIWIAEDKANPVPALKVQVDEISRKIDNLIALSAMTGATKELADQITTLNSERETLYNQIKMAEEEMYSVDSQGWEKLAEFDLEDVYNEERLKVRFKIKQALKRIGCSRIDRNKNLFVLEYIDGKTQRVVIENSRGTRKGQIFVDLKTINDRQILESNGLVLHPCLDMLTDKNWKPEEEIPGPLQEFGI

SEQ ID NO: 3202 - protein, 506 aa, synthetic construct
MRHVITYLRYSSAIQGAEGADSTRRQNELFKQWLRKNSDAQVVASFSDEGLSGYKGKHLTGQFGDMLARIEAGEFPAGTILLVESIDRIGRLEHLETEALMNRILGNGIEIHTLQDGLIYTKDALADDLGISIIQRVKAYIAHQESKQKSFRVSQKWEQRAKLALAGEQRLTKMVPGWIDPDTFKCNEHAETVRLIFKLLLDGESLHNIARHLQANNISSFSRRKDANGFSVHSVRTILRSETTRGTLPASQRNDRPAIPNYYEAAIDAATFNKAQEILDKNRKGRTPASDNPLTINIFKGLFRCQCGASVHPTGTKNKYQGVYRCNNNPDGRCDVPPLKRKPFDKWMIDNFLGMIDVGNDGEAEGKIAALQHEVEIVTARIKKATALLLEMDDITELKTQVKGLNQKRTELQTTIDSMRRKTSLSDKGLPQLKDIDLMTKAGRVECQLILSKHLKGLTLGKDTVTVTLQNDTEITIPTDPLPLNDGTSIFEIAEKNLLNIDTFQL

SEQ ID NO: 3203 - protein, 559 aa, synthetic construct
MKTKLYSYIRFSSMRQNDGSSYERQIRMAREIAAKYDLELVNDYQDLGVSAFKGANSKTGALSRFLDAIGRSVPVGSWLFIENLDRLSRADIVSAQELFLSIIRRGITIVTGMDNKIYSLDTVTANPMDLMFSILLFIRGNEESQTKRNRTNSSALIKIKSHQENPQNPAVAIEEVGKNMWWTDTTSGYVLPHPVYFPVVQEIVELRKNGRSTAEILDHLNETYTPPPAVSNKKHSKWSRAMVERLFHTRALIGIKEVSVDGVNYELKDYYPRVIDDPTFYHLKKNIGARAWNFGDKEEVKPIPLLSGIGLLKCDHCGCAMVKVKGTNKRSDQYRYTCDATRSRRLDCEHPNWSFRGDQLEKAVLQLLADKIWIAEDKANPVPALKVQVDEISRKIDNLIALSAMTGATKELADQITTLNSERETLYNQIKMAEEEMYSVDSQGWEKLAEFDLEDVYNEERLKVRFKIKQALKRIGCSRIDRNKNLFVLEYIDGKTQRVVIENSRGTRKGQIFVDLKTINDRQILESNGLVLHPCLDMLTDKNWKPEEEIPGPLQEFGI

SEQ ID NO: 3204 - protein, 507 aa, synthetic construct
MKRVISYIRFSSEKQAKGDSLRRQSKMVTDWLKAHPEYYLDESLTFRDLGVSGFTGKHLQGGLGDFLTAIEKGLVKAGDTLLIESLDRLSRQAVDRASELLRNILRSGVDVVTLSDGEHYTSESLKDPLALIKSILIMQRAHEESLRKSERIQAAWDAKKEAAKAGIKVSKRCPAWLKLNDDRKSFSVIPEKVETVKRCFQLRLEGKSIWEIVRTLNDECHQSMNQYKPGKFGQTSVQDLLKNRSVIGYFTPKGCEEIAGYYPSVIDETTFYKVQQLSHSRYGRKPASAKPLSVNLFKGVIRCSECGHALIITGFSDTRNGIYRCPLRNENRCSAKGLSRKQTDGTLLTLLSRLDRFDSDMTNTIDTLKLHREHISSNIEKLVQLSLEIEDLNAITNKLKQLKNELSQVDADIEKETQRLKSIDTGSLSDCDLSTKAGRIEAQLIIKSAVKEVVLNTAKRRCKVTFHNGRAITLPITENPSEDVTEAIQSLSEVTERGLIDVDVVEI

SEQ ID NO: 3205 - protein, 530 aa, synthetic construct
MLRVCLYARFSTEKQTESSIDDQLRICRLRVKREGWKEVSCHYDMAVSGSTAVGSRSGGAEMLNSALVGRFDVLILEGLDRLSRDLIEQEQIVRRLEHRGIRIIGVSDGYDSRLAARKVLRGVRGLINELYLDDLRHKTHRGQTGQIDRGYIAGGKSYGYDIVKKQHGSIYQINAEQAKWVQWIFKEYAEGASIQKIAHELNRLGIESPRNGGWAVSGLYGSPIKGSGILNNQLYVGTLIWNRSQWIKNPDTGARQRIERPKEEWKVVQVPELRIIDDAVWQRVRDRIDHGRDATGRKKSGKKGVSLFGGMMTCPHCKGPMIAVNTRSYGCNTSKDKGKSVCQGFLIKRELVDGRLLAVLREDLLSVEAAEKFEKYFREAVYRLVQLNKKEEQHFIDRLAAIDQDLTRVVDAITKVGISDVLAVRLKNLEAEKTAVVEHLQQQRKETNVQLPNMKVLFKEALLRLNEVLDTQPEKARPILNAIFGKVEFSINEKNEAWAQIEAAQALNYAVEPFLKMVAGAGFEPTTFGL

SEQ ID NO: 3206 - protein, 547 aa, synthetic construct
MKLLATYIRWSTKEQDSGDSLRRQTNLIDAFYSKHKNDYYLLPAHRYVDKGKSGFHQQHKAQGSDFRRMFENVMSGVIPEGSLIVVENFDRFSRADIDTAIDDVRQILRKGVSILTLGDGELYDKSALTDPVKLIKHIIIAERAHQESLVKQKRIAQVWNHKTQLARELKKPMGKQAPGWLELSEDGSHYIVDEDKASLVNIIYDKRLSGMSMFAICKWLNEQGYPTINQRKVRISKTKKPDGNWSALSVKHILTSRSVLGYLPAKISTDDRKTVLREEIESFYPQIVTDSKFYAVQQLLEETGKGKTSSGEHWLYVNILKGLIRCKCGLVMTPTGIRKPVYQGTYRCNGNKESRCSYGTVSRKLLDTQLCSRLFSKLSQLHDEATDTAKLDELQRRLNTVDSELEKLTETLIQLPNITQIQEALRVKQEEKDELIVQLSREKARVKSVSSLDLSGLDMESVEGRTEAQIIIKRLVKEIVVSGNEKLVDIYLHNGNMIRGFPLDGKDDHTLTLEEATDEMQPLDDMLIFGEPVTRIYPAGDMEEVDA

SEQ ID NO: 3207 - protein, 507 aa, synthetic construct
MKRVISYIRFSSEKQAKGDSLRRQSKMVTDWLKAHPEYYLDQDLSFRDLGVSGFTGKHLKGGLGDFLTAIEKGLVKAGDTLLIESLDRLSRQDIDIASELLRNILRSGVDVVTLSDGEHYTRESLRDPLALIKSILIMQRAHEESLRKAERIQAAWDAKKEAAKAGIKISKRCPAWLKLNDDRKSFSVIPEKVETVKRCFQLRLEGKSIWEIVRTLNDEGHQSMSQYKPGSFGQSSVQDLLKNRSVIGYFTPKGCEEIAGYYPAIIDETTFYKVQQLSYARYGRKPASDKPLSVNLFKGVIRCSECGHALIITGFSDTRSGIYRCPLRNENRCSAKGLSRKQTDGTLLTLLSRLDRFDSDTTNIIDMLRLHREHISSNIEKLVQLSLEIEDLNAITNKLKQLKNELSQVDADIEKETQRLKSIDVGCLSDCDLTTKAGRIEAQLIIKSAVKEVVLNTAKRRCKVTFHNGRAITLPITENPSEDVTEAIQSLSEVTERGLIDVDEVII

SEQ ID NO: 3208 - protein, 507 aa, synthetic construct
MKRVISYIRFSSERQAKGDSLRRQSKMVNDWLKAHPEYYLDQDLSFRDLGVSGFTGKHLKGGLGDFLTAIEKGLVKAGDTLLIESLDRLSRQDVDQASELLRNILRSGVDVVTLSDGEHYTKESLRDPLSLIKSILIMQRAHEESLRKAERIQAAWDAKKEAAKAGIKVSKRCPAWLKLNDDRKSFSVIPEKVETVKRCFQLRLEGKSIWEIVRTLNDEGHQTLHQHKAGSFGQSSVQDLLKNRSVIGYFTPKGCEEISGYYPAIIDETTFYKVQQLSYARYGRKPASDKPLSVNLFKGVIRCSECGHALIITGFSDTRSGIYRCPLRNENRCSAKGLSRKQTDGTLLTLLSRLDRFDSDTTNTIDTLKLHREHISSNIEKLVQLSLEIEDLSAITIKLKQLKGELSQVDADIEKETQRLKSIDVGCLSDCDLTTKAGRIEAQLIIKSAVKEVVLNTAKRRCKVTFHNGKSITLPITENPSEDVTEAIQSLSEVTERGLIDVDEVII

SEQ ID NO: 3209 - protein, 402 aa, synthetic construct
MKIKIRAPRKQVTTARLRVSAYVRVSSTSEELENSLENQTRHYLQFIQSRPDWQLCEIYVDEGISGFYENRPGFQRMLEDARDRKFDLLLVKSISRFARNTETMLKATRELKQLGIGVFFELQGINTLTSAGELMLTIHSAFAQAESDAASDTQRLTIKRKFKEGRHHHATKRTFGYTEDDFGNLVILEEEAWVVRLMFDMAAKGVWRSKIKEHLNLNHIPSPEGKLWDDTSVERVLRNVTYKGDLLLQKTYRDHRRVVRKNTGQADQWYVARNHPHIVEPSQWDAVQDVLDERNAHLKRELSQPPELPRPSRIQYPLSNMLFCPYCGEKLIHKWSNGIREYWVCKTNLKISAAACKGIWLPAAVANAWGITEPVVVCEYKDTYGMKQFTCYPIDEFEAFSA

SEQ ID NO: 3210 - protein, 469 aa, synthetic construct
MAREIVHIPAKPERERILNGKSNKIRLAAYCRVSSQNEDQLYSFDNQVTYYQNYAKDNPRYTLVDIYADEGISGMNVRNRLEFQRMIQDCKDGKVDLVITKSVTRFARNTQDCLNYARQLKDLGIGVFFEKENINTMDSTGELLFSILASLAQDECRSISENTKWGIRSLYKQGVLHLSTVNFLGYDKDENGKLVINEREAGIVKRVFYEFLEGSSPGDIARKLTAEEIPGVKGSTSWYSSTIYHMLRNEKYMGDALCQKYYVADYLTGKQVLNKGEIEQVYIKKNHEPIVPVHIWKAVQQELDRGVAYRKKHGLYVTNHLSDKNPFAARVFCGKCGQPYTQRTWYRDKKPVKVWQCRSRYAVKGAMGCGNVNLHKEKLLRFFHEAWKEIILTREGRLSDWEKRKQEGTELEAYRAQQMICLTESWPSEQSPDIALVNKVLDHLVYFPDSMVCNFLDGTQITISININS

SEQ ID NO: 3211 - protein, 523 aa, synthetic construct
MRKVTKIDATSGTHFSQGKLRVAAYCRVSTDAEDQLSSLENQTSHYTNYIKSNPEWEFAGLYFDEGISGTKKENRLGLQNLIRDCENRQIDFFITKSISRFARNTTDCLEIVRKMTDLGIAILFEKENINTGTMDSELILSILSSLAAEESVSISQNNKWSVRRRFENGTFKLSNPPFGYDYNGETIVPNPGRVPIVRRIFAEVLAGNGVNNIARMLNADGILSQNGKRWSGSTVKGILTNEKYIGDVLLQKTFTDDHFNRHHNNGELEQYYWKNHHEAIISREDFEAVAYVLKQHSVEKGIQKGSDKYLNRYPFSGIILCGECGDTLKRRTLYRRTSSPYIVWGCGRHTESRGTECSMLDVKEEYIKSAFVTMLNRLYSGRNVILKLLIAELKSREGDGNSHKLLAIEKQIQENSEQVQVLTGLMSKGYLEPALFNERNNALQTESMKLRMQKAAIQGSVTGEQSFIHEAEELLKYLSKTGIMEDYSDEIFLKFADGMTMFSPTEIGFRLKCGLILRERMER

SEQ ID NO: 3212 - protein, 521 aa, synthetic construct
MQNINISVIPARSQTRVAESGKPRTKLRVAAYCRVSTDDEEQLTSYEAQVSHYSSYIQQNPEWEFAGIYADESISGTNTKKRTDFKRLIDDCMAGKVDYIITKSVSRFARNTLDTLNYTRQLKEKNIPVFFEKENIISTDSKGELMLTIMASIAQEESRSTSQNVKMGIAFRFQKGQMQINHNRFMGYTKDENKRLVIVPEEAEIIKRIYREYLEGASLLEIGRGLEADGILTAANKPKWRPETVKKILQNEKYIGDALLQKTYTVDFLSKKRVVNNGIVPQYYVENSHEAIIPKELYMQVQEEIARRANLRTGNGSKRVYSSRYALSSIVFCGECGDIYRRVHWNNRGKKSVVWRCVSRLEEKGSDCISPTILESDLQNAVLKAINQIISERDEFMGILMKNIATALGEKFDKDTDSIEHQLKELQNELIKQANSQEDYDAVVDEIYRLRETKQETLEHNAERHTKRKRIKDMERFLNEQGGELTEYDDKLVRQLVERVTVEDKRLVVQFKSEIEVEAGL

SEQ ID NO: 3213 - protein, 430 aa, synthetic construct
MLIEQIRKQSVRSIRCNKVAAYARVSCGKDQHLKSANAQVDYYKKKIKRNPAWIFKGVFSDEDRTGTKTKREGFDELLTLCRKGEVDLVLTKSISRFARNTLDLLNIIRELKDLGVAVEFEQEGINTLTADGELMISLIAAIAQEESLSASENMKWAIRKGYEQGSLKQVRRTYGYLVKLGEVSIVPSEAVVVQEIFERYVRGELPSVIVKDLNRRGIRTLEGAIWRTNRLNQIVSNVFYTGNTLLQKLYVPNHLDKKQVKNKGELPQYYIENSHEPIVSMDVFQKVQEIKAQRRYKKKPDTKHVFSGKIICGICGANFNRKHDRGKHKWQCCTYRRDGVKGCNSKQIPEETLQKVSATLLGLSSFDESAFELKVESVKALNGNRLLFHMRDGTVLEEHWSDRSRSESWTLEMRKEAGKKTKERHINQNG

SEQ ID NO: 3214 - protein, 532 aa, synthetic construct
MAKPKVHVIPAKEQRIEQFLEDKKNKKRVAAYARVSTDDAEQLNSYEAQVSFYTEHIQSNPEWQFVKVYTDEGISGLMTKNREGFQEMITDALTRKIDLIITKSVSRFARNTVDTLTYVRRLKEKGVEVYFEKENIYTMDSKGELLITIMSSLAQEESRSLSENVKWGQRKRFADGKVSLAYKSFLGYRKGVDGRPEVVPEEAIIIKQIYRDYLLGMTYKGIASKLMENNIPSPRGKSVWHDSTIKSILTNEKYKGDALLQKKFTVDFLTKKMKVNEGEVPQYYVTNSHEGIVTDEIFEMVQIEMERRKKFNMGRSSNYFFSGRIICGCCGEPYTRNVWHSNSKYKRYVWRCGKKYDGSEPCTSIHLYEYEIKNAFVQLVNELFMERDDLILTCKKIVGEVLGTDRLEKKLQEIQEQADDLYEKLNKHIRQRGRVLEESDEQRQQFEEDLKTYELLQEKIRKTTDSINDKNRRRFDAEQFISNISQINSRVLEFDQGLWISLIEVATVPPDGEKKINLRLRNGEERIIDLAK

SEQ ID NO: 3215 - protein, 519 aa, synthetic construct
MKKVTKIAETASSKVKLKKIRVAAYCRVSTDSDAQLESLDAQKTHYGNYITSRDDWEFAGLYYDEGITGTKKDKRPELLRLIDDCKAGKVDFVITKSISRFSRNTTDCLELVRKLLALHIPIYFEKENINTGSMESELFLAILSGMAESESVSISENSKWSIQKRFENGTFKCSYPPYGYDWDGEQMVINPEQAAVVKEIFAALLSGKGTHAIADDLNRRGVSSKRGGRWTATTIRGMLSNEKYVGDCLFQKTYSDSRFVRHNNHGEQTQYMVKDHHEAIISREDFEAAHAFIHQRATEKGVVKGSDKYQNRYTFSGKIICGECGDTFKRRIHSCTDHKYVAWCCNTHIKDKDRCHMLFVKDDALKQAFTTMLNKLIFSHRQILKPYLESLKTSSSDDSLHRIQQIQTLLAQNTEKRETLTMLMTQGIIDPVLYSQETNELLSQADSFRDEIEALKNEVSGDVNKVTETTALIHFAEKSAMLQEFDKDLFDRYVKRIIVHSRNDIRFELKCGLTLRERK

SEQ ID NO: 3216 - protein, 401 aa, synthetic construct
MKFTRIPRKRDLHKKRVAAYCRVSTLLEEQEDSFETQVSYYKAFIEANDEWEFAGIYSDEKSGTKAENRPGFQKLVRDALDGKVDYILCKSISRFSRNIVDCQKYVKLLHGNGVDVKFEKENLDTASPSCSMMLSFLSAIAQDESRSISENVRWAYRERFKRGEYNLGNNRILGYDSIDGKLVPNQDADAVRLIYTMYLEGKNIEAIRRLLADYGVRTRKGTLISHNDILYILKNETYRGDKLLQKQPPKDFLTKKPDKRAHYESYYLEGDHEAIVEPVMWDAVQEKLKQKKEIESAVGHRGGQPHFLYGLIFCDECGAPMTRRTLKAYDGSSYKAWTCRERHKGRKGNGCTCRTIRETDLIAAICVQMGWEQVAEEKLTEIERVLVSEDGVEIVKMAKAS

SEQ ID NO: 3217 - protein, 503 aa, synthetic construct
MEVQKIKLEPIRNTVREQTGKLRVAAYCRVSTDTEDQRTSFEGQVKHYTELISANPEWEMAGIFADEGITGTSAAKRPQFQAMMRVCEEGKIDLILTKSISRFARNTLECLTFVRHLNNLGVHIVFESNNIDTRTAFSEMLLTVLAAFAQEESRSISENTSWGIRKRFEDGVTRWSRLYGYEKTANGEYQIVPEQAAVVQKVYELYEHGESIQNIRKYLTAHGIKSPTGEPKWTNSAIHTLLINERYTGDIILQKFLTESHLTHKSIRNDSTEVPSFYIENHHLPIIPRKQYDRCMKIMGMRRVNGHKKEHDTGTCNQYPLGDKLRCPYCGSVLYQRAVPVQVRHGKGWVCEQGEDACHGFIIRSNLVEPALLKAYKGLDDAKIAEKVKSPRFGEAAKLALEIRKEYPVMKRVDFWWVDDLIDHIEFGAHSRTEREYRRLVALGENVTDDRTMKVFWKCGLITTVMSGVDADREHPPMIAGLYNSYLERQKEAEKETEEVETA

SEQ ID NO: 3218 - protein, 503 aa, synthetic construct
MAEGSMKVTKIYTPEDKAKQAESLLRVAAYCRVSTKSDEQHLSYETQVAVYSEKIRAEPGWTMAGIYADRGISGTQAERRPQFLQMVRDCEDGKIDAIICKSVSRFSRNTLDAVNYMRRLRELGIRLIFEKEGIDTDNEYSEMLLTVLAAFAQEESHSHSENVKWGKRKRLQKGHALLIPVYGYRKNEETETYEIVPEEAEAVRLIFDLYEHGTSVPEITRTLKEKGYPMPNGEKKVWDESRIHYMIMNEKYVGDIRTQKFYKKSYLEYRCYRNDGLLPGKMLKDHHEPIVSRKQFDRCNVILELKKKSTPSTYPFGDYLRCPYCGHVLRHRRLPIQNCDSHFLCEGEGACRGFVIMSVPVRKMVLDAWNNLDLTAVDKLLTSKYRKWAKEAEKLLVTKAKHPTFDSIEYWWLDEYVAKIEFGQHSYTASDLNLLEEGQRRILDDRTITIKWRCGLKTTIPSGVTRDSHDPRHKAILWDGYLLRYPDRYPELAEEVRKKQGEE

SEQ ID NO: 3219 - protein, 437 aa, synthetic construct
MGRKITKIEQTVLLPTRQQVAAYARVSCGKDEMLHSLAAQVSYYSNLIQGKPEWEYVGVYADEAETGTKDSRPEYQRLLADCREGRIDLVLTKSISRFARNTVTLLETVRELKNLGVGVYFEEQNLHSLSGDGELMLTILASYAQEESRSVSENQKWRIRKDFKEGKPSNNIRIYGFDYKDFKLTIIPEEAEVVRMIFADYLSGLGKNAIMKKLIRLGVPTKCGGRWSESTVGSILKNEKFIGDTCLQKGFITDHLTKQWKPNSGELPKYYVEGSHEAIIDRETFEAVQIEMARRAAKANHPRKLTFSEFSERITCERCGAKFRKKVNGSGTKYAKVVWACATYTYRGKQECAAKRIPEDILKEKCTEVLGLAEYNPDVFTAKVAEIRVPDDGVLVFVFKDGTEQTATWENRSRRESWTDEMRQTARERAMGGTDNG

SEQ ID NO: 3220 - protein, 507 aa, synthetic construct
MKRVISYIRFSSEKQAKGDSLRRQSKMVTDWLKAHPEYYLDQDLSFRDLGVSGFTGKHLKGGLGDFLTAIEKGLVKAGDTLLIESLDRLSRQDVDQASELLRNILRSGVDVVTLSDGEHYTSESLKDPLALIKSILIMQRSHEESLRKSERIQAAWDAKKEAAKAGIKVSKRCPAWLKLNDDRKSFSVIPDKVETVKRCFQLRLEGKSIWEIVRTLNAEGHRSMNQYKPGKFGQTSVQDLLKNRSVIGYFTPKGCEEIAGYYPSVIDETTFYKVQQLSHSRHGRKPVSDKPLSVNLFKGVIRCSECGHALIITGFSDTRNGIYRCPLRNENRCSAKGLSRKQTDGTLLTLLSRLDRFDSDTTNTIDMLRLHREHISSNIEKLVQLSLEIEDLNAITNKLKQLKNELSQVDADIEKETQRLKSIDTGSLSDCDLSTKAGRIEAQLIIKSAVKEVVLNTAKRRCKVTFHNGKSITLSITENPSEDVTEAIQSLSEAIERGLIDVDVVEI

SEQ ID NO: 3221 - protein, 499 aa, synthetic construct
MRAGLYARVSREEQAEGYSLDAQLEAMRRFCKERGWTVIREYTEEGYTGTVTDRPAFTEALADCEAGRLDILLTHQLDRFYRNLALQLETLGKLGRWGVGYLSVTEQIDYSTPQGMLFLQMLGAFNEYYVANLSRETKKGKAGRAKAGKSNASIIPWGYKRNAEGLDVPDPETAPGVVLAFESYATGAYTDAGIANLVNRAGYPPSDKARGSKWTREGISYLLRNPFYAGWVRHHRRGGGELYPGQHEAIVSQELFDQVQAVRAQHRRGNTWGRRTDRVYLLAGVAVCNDCGGRLHGQTAVNRGRKPIPRFVCPAPYRGLACASSVRTVQTKPLDDQIGELVSRLCLPEDWRARLAELDGQRPDRGQAERQRRALQGKLKRLREVYVDGDLSRGEYDRRRAELQGELAGLRDPDADRVEQAGATLAGLAEAWQDAPAEIRAQMLRAIFEEIRVDLGARRVVAVKPWPPFVPLFRMDGLEERETGVFYVRDAEREARSEG

SEQ ID NO: 3222 - protein, 563 aa, synthetic construct
MKRDCPLTAGSQVWAYFRDSGGEAQERSVGQQLEAAREYAARHGLCLSETFADEAKPGSTTIGRDALQEMLAKARQLAPGARDRHADAPDGILFWDTRRLGREQLDNAFIKADLRRRGYALIFLTDDIPETGDFAPVIEAFLDWKAEQDLKDIGKDAQRGLQNLAKNGYHPGGLPPKGYKVERLQAGAKRNGEPRLACRWVVDPATAPRVRLAWQMRAAGASYEDIQQATGLFGARNSWVSFFRNKTYLGVIKCGELEIPDGHEPLCTPEQWEAVQRSSAPRRRSKPWAATSSYLLSGLVECGYCGSACSGSADNRSSRPKEWRYYVCGKRKRQRWDSCELKKCDADRLERAVLDQVSDHVLTPDFLRWMLDKVRASFSAEQLEKQIGQKRAQQGQLDKTMSSLVDAIETAPTAALARRLAEREQEQQFVLAELAALEAKRSYYQAIQIDDAALDILVGELRRGLLGDAATVRETLGKVVKKVVLRNDGGTLHLTLPRQSFPGVPPRDVGGSYCRYTCETGGRSKLESVLTTRRPAHMEIPHLTMGQPGVTICRKIFITTDGL

SEQ ID NO: 3223 - protein, 507 aa, synthetic construct
MKRVISYIRFSSEKQSRGDSLRRQSKMVNDWLKAHPEYYLDQDLSFRDLGVSGFTGKHLKGGLGDFLTAIEKGLVKAGDTLLIESLDRLSRQAVDRASELLRNILRSGVDVVTLSDGEHYTRESLKDPLSLIKSILIMQRAHEESLRKAERIQAAWDAKKEAAKAGIKISKRCPAWLRLNDDRKSFSVIPEKVETVKRCFQLRLEGKSIWEIVRTLNAEGHQTLNQYKAGKFGQTSVQDLLKNRSVIGYFTPKGCEEISGYYPAIIDETTFYKVQQLSYARYGRKPASDKPMAVNLFKGVIRCSECGHALIITGFSDTRNGIYRCPLRNENRCSAKGLSRKQTDGTLLALLSRLDRFDSDMTNTIDTLKLHREHISSNIEKLVQLSLEIEDLSAITSKLRQLKNELSQVDADIEKETQRLKSIDVGCLSDCDLTTKAGRIEAQLIIKSAVKEVVLNTAKRRCKVTFHNGKVIDLSITENPSDNVTEAIQSLSEVTERGLIDVDEVII

SEQ ID NO: 3224 - protein, 508 aa, synthetic construct
MKKAIAYMRFSSPSQMSGDSLNRQRRLITEWLKVNSDYYLDTVTYEDLGLSAFNGKHAQSGAFSEFLDAIEHGYILPGTTLLVESLDRLSREKVGEAIERLKLILNHGIDVITLCDNTVYNIDSLNEPYSLIKAILIAQRANEESEIKSSRVKLSWKKKRQDALESGTIMTASCPRWLSLDDKRTAFVPDPDRVKTIELIFKLRMERRSLNAIAKYLNDHAVKNFSGKESAWGPSVIEKLLANKALIGICVPSYRARGKGISEIAGYYPRVISDDLFYAVQEIRLAPFGISNSSKNPMLINLLRTVMKCEACGNTMIVHAVSGSLHGYYVCPMRRLHRCDRPSIKRDLVDYNIINELLFNCSKIQPVENKKDANETLELKIIELQMKINNLIAALSVAPEVTAIAEKIRVLDKELRRASVSLKTLKSKAVSSLGDFHAIDLTSKNGRELCRTLAYKTFEKIIINTDNKTCDIYFMNGIVFKHYPLMKTISAQQAISTLKYMVDGEVYF

SEQ ID NO: 3225 - protein, 507 aa, synthetic construct
MKRAISYIRFSSEKQSRGDSLRRQSKMVNDWLKAHPEYYLDQDLSFRDLGVSGFTGKHLKGGLGDFLTAIEKGLVKAGDTLLIESLDRLSRQNVDRASELLRNILRSGVDVVTLSDGEHYTRESLKDPLALIKSILIMQRSHEESLRKSERIQAAWNRKKELISEGIKISKRCPAWLKLNDDRKSFSVIPEKVETVKRCFQLRLEGKSIWEIVRTMNAEGHQTLHQHKAGSFGQTSVQDLLKNRSVIGYFTPKGCEEISGYYPAIIDETTFYKVQQLSYARYGRKPASDKPLSVNLFKGVIRCSECGHALIITGFSDTRNGIYRCPLRNENRCSAKGLSRKQTDGTLLTLLSRLDRFDSDTTNTIDMLRLHREHISSNIEKLVQLSLEIEDLSAITIKLKQLKGELSQVDADIEKETQRLKSIDVGCLSDCDLTTKAGRIEAQLIIKSAVKEVVLNTAKRRCKVTFHNGKVIDLSITENPSEDVTEAIQSLSEVTERGLIDVDEVII

SEQ ID NO: 3226 - protein, 507 aa, synthetic construct
MKRVISYIRFSSERQAKGDSLRRQSKMVNDWLKAHPEYYLDESLTFRDLGVSGFTGKHLKGGLGDFLTAIEKGLVKAGDTLLIESLDRLSRQNVDRASELLRNILRSGVDVVTLSDGEHYTRESLKDPLALIKSILIMQRAHEESLRKAERIQAAWDAKKEAAKAGIKVSKRCPAWLKLNDDRKSFSIIPEKVETVKRCFQLRLEGKSIWEIVRTLNDEGHQSMSQYKPGKFGQTSVQDLLKNRSVIGYFTPKGCEEISGYYPAIIDETTFYKVQQLSYSRYGRKPASDKPLSVNLFKGFIRCSECGHALIITGFSDTRSGIYRCPLRNENRCSAKGLSRKQTDGTLLTLLSRLDRFDSDTTNTLDTLKLHREHISSNIEKLVQLSLEIEDLSAITSKLKQLKGELSQVDADIEKETQRLKSIDTGSLSDCDLSTKAGRIEAQLIIKSAVKEVVLNTAKRRCKVTFHNGKIIDLPITENPSEDVTEAIQSLSEVTERGLIDVDEVII

SEQ ID NO: 3227 - protein, 506 aa, synthetic construct
MRTVITYLRFSSATQGAEGADSTRRQNELFKQWLRKNSDAQVVASFSDEGLSGYKGKHLTGQFGDMLARIEAGEFPAGAILLVESIDRIGRLEHLETEALMNRIIAHGIEIHTLQDGLIYTRDALSDDLGISIIQRVKSYLAHQESKQKSFRVSEKWKQRAKLALAGEQHLTRNVPGWIDPDTFKCNEHAETVRLIFKLLLDGESLHNIARHLQSNDIKSFSRRKDANGFSVHSVRTVLRSESVIGTLPASQRNDRPAIPNYYEAAIDASTFNKAQEILDKNRKGRTPASDNPLTINIFKGLFRCQCGASVHPTGTKNKYQGVYRCNSHLDGRCDVPPLKRKPFDRWMIDNFLGMIDVGNDGEAEKEIASLQHEVETVTARIKKATALLLEMDDITELKTQVKELNQKRTELQTTINTMKRKTSLSDKGLPQLKDIDLMTKAGRVECQLILSKHLKGLTLGKDTVTVTLQNDTEITIPTDPLPLNDGTSIFEIAEKNLLNIDTFQL

SEQ ID NO: 3228 - protein, 507 aa, synthetic construct
MKRVISYIRFSSERQAKGDSLRRQSKMVNDWLKAHPEYYLDQDLSFRDLGVSGFTGKHLKGGLGDFLTAIEKGLVKAGDTLLIESLDRLSRQDIDIASELLRRILRAGVDVVTLSDGEHYTKESLRDPLALIKSILIMQRAHEESLRKAERIQAAWDAKKEAAKAGIKISRRCPAWLKLNDDRKSFSVIPEKVETVKRCFQLRLEGKSIWEIVRTMNAEGHQTLNQYKAGSFGQSSVQDLLKNRSVIGYFTPKGCEEIAGYYPAIIDETTFYKVQQLSYARHGRKPASAKPLSVNLFKGVIRCSECGHALIITGFSDTRNGIYRCPLRNENRCSAKGLSRKQTDGTLLTLLSRLDRFDSDTTNTIDMLRLHREHISSNIEKLVQLSLEIEDLNAITNKLKQLKNELSQVDADIEKETQRLKSIDVGCLSDCDLSTKAGRIEAQLIIKSAVKEVVLNTAKRRCKVTFHNGRAITLPITETPSEDVTEAIQSLSEVTERGLIDVDVVEI

SEQ ID NO: 3229 - protein, 506 aa, synthetic construct
MRTVITYLRFSSATQGAEGADSTRRQNELFKQWLRKNSDAQVVASFSDEGLSGYKGKHLTGQFGDMLARIESGEFSEGTVLLVEAIDRIGRLEHLETEALMNRIIAHGIEIHTLQDGLIYTRDALSDDLGISIIQRVKSYVAHQESKQKSFRVSQKWKQRAKLALAGEQRLTRNVPGWIDPDTFKCNEHAETVRLIFKLLLDGESLHNIARHLQSNDIKSFSRRKDANGFSVHSVRTVLRSESVIGTLPASQRNDRPAIPNYYEAAIDAATFNKAQEILDKNRKGRTPASDNPLTINIFKGLFRCQCGASVHPTGTKNKYAGVYRCNNHLDGRCDVPPLKRKPFDKWMLENFLGMIDVGNDGEAEGKIASLQHEVEIVTTRIKKATALLLEMDDIDELKIQLKELNQKRTELQTTIDNMRRKASLTDKELPQLKDIDLTTKAGRVECQLILSKHLKGLTLGKDSVTVTLQNDTEITIPTDPLPLNDGTSIFEIAEKNLLNIDAYQL

SEQ ID NO: 3230 - protein, 547 aa, synthetic construct
MKLLVTYIRWSTKEQDSGDSLRRQTNLIDAFYAKHKEEYYLLPAHRYVDKGKSGFHQQHKAQGSDFRRMFENVMSGVIPEGSLIVVENFDRFSRADIDTAIDDVRQILRKGVSILTLGDGELYDKSALTDPVKLIKHIIIAERAHQESLVKQKRIAQVWNHKTQLARELKKPMGKQAPGWLELSDDGSHYIVDEDKASLVNIIYDKRLSGMSMFAICKWLNEQGYPTINQRKVRISKTKKPDGNWSALSVKHILTSRSVLGYLPAKISTEDRKTVLREEIESFYPQIVTDSKFYAVQQLLEETGKGKTSSGEHWLYVNILKGLIRCKCGLVMTPTGIRKPVYQGTYRCNGNKESRCSYGTVSRKLLDTQLCSRLFSKLSQLHDEATDTAKLDELQRRLNTVDGELEKLTETLIQLPNITQIQEALRVKQGEKDELIVQLSREKARVKSVSSLDLSGLDMESVEGRTEAQIIIKRLVKEIVVSGNEKLVDIYLHNGNMIRGFPLDGKDDHTLTLEEATDEMQSLDDMLIFGEPVTRIYPAGDMEEVDA

SEQ ID NO: 3231 - protein, 547 aa, synthetic construct
MKLLVTYIRWSTKEQDSGDSLRRQTNLIDAFYSKHKNDYYLLPAHRYVDKGKSGFHQQHKAQGSDFRRMFENVMSGAIPEGSLIVVENFDRFSRADIDTAIDDVRQILRKGVSILTLGDGELYDKSALTDPVKLIKHIIIAERAHQESLVKQKRIAQVWNHKTQLARELKKPMGKQAPGWLELSEDGSHYIVDEDKASLVNIIYDKRLSGMSMFAICKWLNEQGYPTINQRKVRISKTKKPDGNWSALSVKHILTSRSVLGYLPAKISTEDRKTVLREEIEGFYPQIVTDSKFYAVQQLLEETGKGKTSSGEHWLYVNILKGLIRCKCGLVMTPTGIRKPVYQGTYRCNGNKESRCNYGTVSRKLLDTQLCSRLFSKLSQLHDEATDTAKLDELQRRLNTVDSELEKLTETLIQLPNITQIQEALRVKQEEKDELIVQLSREKARVKSVSSLDLSGLDMESVEGRTEAQIIIKRMVKEIVVSGNEKLVDIYLHNGNMIRGFPLDGKDDHTLTLEEATDEMQSLDDMLIFGEPVTRIYPAGDMEEVDA

SEQ ID NO: 3232 - protein, 506 aa, synthetic construct
MRSVITYLRFSSATQGAEGADSTRRQNELFKQWLRKNSDAQVVASFNDEGLSGYKGKHLSGQFGDMLSRIESGEFPEGTILLVEAIDRIGRLEHLETEALMNRIIAHGIEIHTLQDGLIYTRDALSDDLGISIIQRVKSYIAHQESKQKSFRVSQKWEQRAKLALAGEQRLTRNVPGWIDPDTFKCNEHAETVRLIFKLLLSGESLHHIARHLQANNISSFSRRKDANGFSLHSVRTILRSETTIGTLPASQRNDRPAIPNYYEAAIDASTFNKAQEILGKNRIGRTPASDNPLTINIFKGLFRCQCGASVHPTGTKNKYQGVYRCNNHLDGRCDVPPLKRKPFDRWMIDNFLGMIDVVSDGETERRIAALQHEVETLTARIKKATALLLEMDDITELKAQAKELNQKRTELQTTIDSMRRKTSLSDKGLPQLKDIDLTTKAGRVECQLILSKHLKGLTLGKDSVTVTLQNDTEITIPTNPLPLNDGSPIFEIADKELLDIDAYQL

SEQ ID NO: 3233 - protein, 507 aa, synthetic construct
MKRVISYIRFSSEKQAKGDSLRRQSKLVTDWLKAHPEYHLDESLTFRDLGVSGFTGKHLKGGLGDFLTAIEKGLVKAGDTLLIESLDRLSRQDIDIASELLRNILRSGVDVVTLSDGEHYTRESLRDPLALIKSILIMQRAHEESLRKAERIQAAWDAKKEAAKAGIKVSKRCPAWLKLNDDRKSFSVIPEKVETVKRCFQLRLEGKSIWEIVRTLNDEGHQSMSQYKPGSFGQSSVQDLLKNRSVIGYFTPKGCEEIAGYYPAIIDETTFYKVQQLSYARYGRKPASDKPLSVNLFKGVIRCSECGHALIITGFSDTRSGIYRCPLRNENRCSAKGLSRKQTDGTLLALLSRLDRFDSDTTNTIDTLKLHREHISSNIEKLVQLSLEIEDLSAITSKLKQLKGELSQVDADIEKETQRLKSIDVGCLSDCDLTTKAGRIEAQLIIKSAVKEVVLNTAKRRCKVTFHNSKSITLSITENPSEDVTEAIQSLSEVTERGLIDVDEVII

SEQ ID NO: 3234 - protein, 547 aa, synthetic construct
MKLLVTYIRWSTKEQDSGDSLRRQTNLIDAFYAKHKDDYYLLPAHRYVDKGKSGFHQQHKNQGSDFRRMFENVMSGAIPEGSLIVVENFDRFSRADIDTAIDDVRQILRKGVSILTLGDGELYDKSALTDPVKLIKHIIIAERAHQESLVKQKRIAQVWNHKTQLARELKKPMGKQAPGWLELSEDGSHYIVDEDKASLVNIIYDKRLSGMSMFAICKWLNEQGYPTINQRKVRISKTKKPDGNWSALSVKHILTSRSVLGYLPAKISSEDRKTVLREEIEGFYPQIVTDSKFYAVQQLLEETGKGKTSSGDHWLYVNILKGIIRCKCGLVMTPTGIRKPAYQGTYRCNGNKESRCSYGTVSRKLLDTQLYSRLFSKLSQLHDEATDTAKLDELQRRLNTVDGELEKLTETLIQLPNITQIQEALRVKQEEKDELIVQLSREKARVKSVSSLDLSGLDMESVEGRTEAQIIIKRLVKEIVVSGNEKLVDIYLHNGNMIRGFPLDGKDDHTLTLEEATDEMQPLDDMLIFGEPVTRIYPAGDMEEVDA

SEQ ID NO: 3235 - protein, 506 aa, synthetic construct
MRTVITYLRFSSAIQGAEGADSTRRQNDLFKQWLKKNSDAQVVASFSDEGLSGYKGKHLTGQFGDMLARIESGEFPEGTILLVEAIDRIGRLEHLETEALMNRIIAHGIEIHTLQDGLIYTRDALSDDLGISIIQRVKSYVAHQESKQKSFRVSQKWKQRAKLALAGEQRLTKMVPGWIDPDTFKCNEHAETVRLIFKLLLDGESLHNIARHLQANNISSFSRRKDANGFSVHSVRTILRSETTIGTLPASQRNDRPAIPNYYEAAIDAATFNKAQEILDKNRKGRTPASDNPLTINIFKGLFRCQCGASVHPTGTKNKYAGVYRCNNNPDGRCDVPPLKRKPFDKWMIDNFLGMIDVGNDGEAEGKIASLQHEVEIVTTRIKKATALLLEMDDIDELKIQLKELNQKRTELQTTIDNMRRKASLTDKELPQLKDIDLMTKAGRVECQLILSKHLESLTLGRGQVTVKLSNGTEIIVPTDPLPLTDGAAIFEIAEKNLLNIDTFQL

SEQ ID NO: 3236 - protein, 521 aa, synthetic construct
MEQLKSLLKLNQEVKMKRIIGYARVSSREQAEDHQALEQQSTRLLKAGATEIFVEVKSGRRDDRAKLNQLIILVQLKQVDGVIVTRIDRIARSLPKLRQFLDVFVNSDVNLVILDQSIDLSTSQGKLMVNILGSFAELEVDMLSERVKHGKQHGRNQVKACEQAPWGYVVQDSKYVLDNSPYLCLITEDRPKNYLQLKNSDIPLEQLPGRTVAQLGKEFIQSYIQEKSIRGALRCVFKKYGVGKTSAKINSHDRVFYWTQRGFSLWLINPVLCGHTSYLKEDKRNHLKDPSEWTTIKDTHPEQRLMTDEEAAEIQYLLELNKKIGSGALGQKADANNHYREYAYQAGMIFCGECGSKCTIKYSSSKHKQYSYYACRYSQLGCSNSRSVVRKKIEDNLIKSLVQKSQKFAIGLDFDDDYISSNSDRVSALQAKLKTISKISDSDPDLEKFKQKLRQQIASAVDSSSSDYLSSCTASEILRTGNNLAFWHTLSNDEKVGLFPRLVSQIFINDGEVKSVVFIDE

SEQ ID NO: 3237 - protein, 506 aa, synthetic construct
MRHAITYLRYSSAIQGVEGADSTRRQNDLFKQWLKKNSDAQVVASFSDEGLSGYKGKHLTGQFGDMLARIESGEFPEGTILLVESIDRIGRLEHLETEALMNRILGNGLEIHTLQDGLIYTKDALADDLGISIIQRVKAYIAHQESKQKSFRVSQKWKQRAKLALAGEQRLTKMVPGWIDPDTFKLNEHAETVRLIFKLLLDGESLHNIARHLQANNISSFSRRKDANGFSVHSVRTILRSETTIGTLPASQRNDRPAIPNYYEAAIDAATFNKAQEILDKNRKGRTPASDNPLTINIFKGLFRCQCGASVHPTGTKNKYAGVYRCNNNPDGRCDVPPLKRKPFDKWMIDNFLGMIDVGNDGEAEGKIASLQHEVEIVTTRIKKATALLLEMDDIDELKIQLKELNQKRTELQTTIDTLKRKTSLSDKGLPQLKDIDLMTKAGRVECQLILSKHLKGLTLGKDSVTVTLQNDTEITIPTNPLPLNDGLPIFEIADKELLDIDAYRL

SEQ ID NO: 3238 - protein, 520 aa, synthetic construct
MKKAVYCYARVSSRGQAKDGYGMSRQQTMLRDYVAAYDDSQHNRGYEFGDISWLYAEGVSAYSGKNIEDGSVLKNFIDDVLQKKITNSVLVIENLDRFSRAAPNRAAGLFLSLINAGCDIHEVETEMIHHQYSDLNIISGGLQRAHNESKRKARLSIKNWDERIKNTIEGTSVLTHRVPSWIEVKNNKYVIKEGEAEKFNLIFKMYADGFGPAAIRDELKKKKMQINESEPTINHLVKIIKDQRLIGEFNSTGRKILDGMIIYPVVVEQSLFETVNDLRKQRNPLGKVNVKANNLFAGLCICMNCGRYVQVNSVDKKGDTYFRCGGSLLKIDKCKERGFKYKIIENALLEHIRNFDFSMLRSNDDDIQIKINYLSIELATKENYSSEILADMEKEYIPDPNDRRILKNLQRRISEIRTEITRLKQSNVGYEKFSDLKESCTDDLLDSKNTNLRLNFNVKIKRVIKNIKMKRLGNAIMLVVNYIGVNEKQAMVIDSKTGDVKFMAVQNDDLKSVEYLINKS

SEQ ID NO: 3239 - protein, 506 aa, synthetic construct
MRTVITYLRFSSATQGAEGADSTRRQNELFKQWLRKNSDAQVVASFSDEGLSGYKGKHLTGQFGDMLARIESGEFSEGTVLLVEAIDRIGRLEHLETEALMNRIIAHGIEIHTLQDGLIYTRDALSDDLGISIIQRVKSYVAHQESKQKSFRVSEKWKQRAKLALAGEQHLTRNVPGWIDPDTFKCNEHAETVRLIFKLLLDGESLHNIARHLQSNDIKSFSRRKDANGFSVHSVRTVLRSESVIGTLPASQRNDRPAIPNYYEAAIDAATFNKAQEILDKNRKGRTPASDNPLTINIFKGLFRCQCGASVHPTGTKNKYAGVYRCNNHLDGRCDVPPLKRKPFDRWMIDNFLGMIDVGNDGESERKIAALQHEVEIVTARIKKATALLLEMDDITELKAQVKGLNQKRTEIQTTIDTLKRKTSLTDKELPQLKDIDLTTKAGRVECQLILSKHLKGLTLGKDSVTVTLQNDTEITIPTNPLPLNDGTSIFEIAEKNLLNIDTFQL

SEQ ID NO: 3240 - protein, 507 aa, synthetic construct
MKRVISYIRFSSERQAKGDSLRRQSKMVNDWLKAHPEFYLDQDLSFRDLGVSGFTGKHLKGGLGDFLTAIEKGLVKAGDTLLIESLDRLSRQAVDRASELLRNILRSGVDVVTLSDGEHYTSESLKDPLALIKSILIMQRAHEESLRKSERIQAAWNRKKELISEGIKISKRCPAWLKLNDDRKSFSVIPDKVETVKRCFQLRLEGKSIWEIVRTLNAEGHRSMNQYKPGKFGQTSVQDLLKNRSVIGYFTPKGCEEISGYFPPIIPETDFYKVQQLSYSRYGRKPASDKPLSVNLFKGVIRCSECGHALIITGFSDTRNGIYRCPLRNENRCSAKGLSRKQTDGTLLALLSRLDRFDSDTTNIIDMLRLHREHISSNIEKLVQLSLEIEDLNAITNKLKQLKNELSQVDADIEKETQRLKSIDVGCLSDCDLTTKAGRIEAQLIIKSAVKEVVLNTAKRRCKVTFHNGRAITLPITENPSEDVTEAIQSLSEVTERGLIDVDVVEI

SEQ ID NO: 3241 - protein, 559 aa, synthetic construct
MKTKLYSYIRFSSMRQNDGSSYERQIRMAREVAAKYDLELVNDYQDLGVSAFKGANSKTGALSRFLDAIGRSVPVGSWLFIENLDRLSRADIVSAQELFLSIIRRGITIVTGMDNKIYSLDTVTANPMDLMFSILLFIRGNEESQTKRNRTNSSALIKIKSHQENPQNPAVAIEEVGKNMWWTDTTSGYVLPHPTYFPVVQEIVELRKNGRSTAEILDHLNETYAPPPAVSNKKHSKWSRAMVERLFHTRALIGIKEVSVDGVNYELKDYYPRVIDDPTFYHLKKNIGARAWNFGDKEEVKPIPLLSGIGLLKCDHCGCAMVKVKGTNKRSDQYRYTCDATRSRRLDCEHPNWSFRGDQLEKAVLQLLADKIWIAEDKANPVPALKVQVDEISRKIDNLIALSAMTGATKELADQITTLNSERETLYNQIKMAEEEMYSVDSQGWEKLAEFDLEDVYNEERLKVRFKIKQALKRIGCSRIDRNKNLFVLEYIDGKTQRVVIENSRGTRKGQIFVDLKTINDRQILESNGLVLHPCLDMLTDKNWKPEEEIPGPLQEFGI

SEQ ID NO: 3242 - protein, 559 aa, synthetic construct
MKTKLYSYIRFSSMRQNDGSSYERQIRMAREIAAKYDLELVNDYQDLGVSAFKGANSKTGALSRFLDAIGRSVPVGSWLFIENLDRLSRADIVSAQELFLSIIRRGITIVTGMDNKIYSLDTVTANPMDLMFSILLFIRGNEESQTKRNRTNSSALIKIKAHQENPQNPAVAIEEVGKNMWWTDTTSGYVLPHPTYFPVVQEIVELRKNGRSTAEILDHLNETYAPPPAVSNKKHSKWSRAMVERLFHTRALIGIKEISVDGVNYELNNYYPRVIDDPTFYHLKKNIGARAWNFGDKEEVKPIPLLSGIGLLKCDHCGCAMVKVKGTNKRSDQYRYTCDAIRSRRLDCEHPNWSFRGDQLEKAVLQLLADKIWIAEDKANPVPALKVQIDEISRKIDNLITLSAMTGATKELADQITTLNSERETLYNQIKMAEEEMYSVDSQGWEKLAEFDLEDVYNEERLKVRFKIKQALRRIGCSRIDRNKNLFVLEYIDGKTQRVVIENSRGTRKGRIFVDLKTINDRQILESNGLVLHPCLDMLTDKNWKPEEEQAGPLQEFGI

SEQ ID NO: 3243 - protein, 507 aa, synthetic construct
MKRAISYIRFSSEKQSRGDSLRRQSKMVNDWLKAHPEYYLDQDLSFRDLGVSGFTGKHLKGGLGDFLTAIEKGLVKAGDTLLIESLDRLSRQAVDRASELLRNILRSGVDIVTLSDGEHYTSESLKDPLALIKSILIMQRAHEESLRKSERIQAAWDAKKEAAKAGIKVSKRCPAWLRLNDDRKSFSVIPEKVETVKRCFQLRLEGKSIWEIVRTLNAEGHRSMNQYKPGKFGQTSVQDLLKNRSVIGYFTPKGCEEISGYYPAIIDETTFYKVQQLSHSRYGKRSVSDKPLSVNLFKGVIRCSECGHALIITGFSDTRNGIYRCPLRNENRCNAKGLSRKQTDGTLLALLSRLDRFDSDMTNVIDALKLHREHISNNIEKLVQLSLEIEDLSAITIKLKQLKGELSQVDADIEKETQRLKSIDVGCLSDCDLTTKAGRIEAQLIIKSAVKEVVLNAAKRRCKVTFHNSKSITLPITENPSEDVTEAIQSLSEVTEKGLIDVDVVEI

SEQ ID NO: 3244 - protein, 560 aa, synthetic construct
MKTKLYSYIRFSSMKQADGSSFERQKRTAAEIAAKYDLELVTSYQDFGVSAFKGANSKTGALSRFLDEIGRSVPVGSWLVVENLDRISRQSVIEAQELFLSIIRRGITIVTGMDGKVYSKESVNANPIDLLLSVMLFARANEESQTKRNRTNSSALLKVKAHQENPQNPAVAIEEVGRNIWWADTSSGYVLPHPVYFPVIKKIVELKQNGYSNGRILDYLNERIAPPNYTTNKDTPKKWARSMLGRMFTNRALLGIKEITIEGVTYELNNYYPRVMEDAEFYQLKKTIGLRSFSYPTKSSPVITLLSGAGLLRCGHCGASMVKRSGASKERLAQYRYMCDGADSRRTNCDHPNWGFRGDQLDKAVLQLLADKIWIAEDKANPIPGMQAQIEDISRKIDNLISLSAMTGATKELADQITTLNHEREAIYNQIKVIEENMYSVDSQGWEKLAQFDLEDVCSEERLKVRLKIKEAVKSIKCYKIDTNYNHFVMEYIDGKTQRIVIERSRRNRKGQIFVDLKTINDRQILESNGLVLHPCLDMLTDKNWKPEEEIPGPLQEFGI

SEQ ID NO: 3245 - protein, 507 aa, synthetic construct
MKRVISYIRFSSEKQSRGDSLRRQSKMVTDWLKAHPEYHLDQDLSFRDLGVSGFTGKHLKGGLGDFLTAIEKGLVKAGDTLLIESLDRLSRQDIDIASELLRRILRAGVDVVTLSDGEHYTKESLRDPLSLIKSILIMQRAHEESLRKAERIQAAWDAKKEAAKAGIKVSKRCPAWLKLNDDRKTFSVIPEKVETVKRCFQLRLEGKSIWAIVKALNDEDRQSMNQYKPGKFGQTSVQDLLKNRSVIGYFTPKGCEEISGYYPAIIDETTFYKVQQLSYARYGRKPASDKPLSVNLFKGVIRCSECGHALIITGFSDTRSGIYRCPLRNENRCSAKGLSRKQTDGTLLALLSRLDRFDSDTTNIIDTLKLHREHISSNIEKLVQLSLEIEDLSAITSKLKQLKGELSQVDADIEKETQRLKSIDVGCLSDCDLTTKAGRIEAQLIIKSAVKEVVLNTAKRRCKVTFHNCKVIDLPITENPSEDVTEAIQSLSEVTERGLIDVDEVII

SEQ ID NO: 3246 - protein, 507 aa, synthetic construct
MKRVISYIRFSSEKQAKGDSLRRQSKMVTDWLKAHPEYYLDQDLSFRDLGVSGFTGKHLKGGLGDFLTAIEKGLVKAGDTLLIESLDRLSRQAVDQASELLRNILRSGVDVVTLSDGEHYTRESLKDPLALIKSILIMQRSHEESLRKSERIQAAWNRKKELISEGIKISKRCPAWLKLNDDRKSFSVIPDKVETVKRCFQLRLEGKSIWEIVRTLNAEGHRSMNQYKPGKFGQTSVQDLLKNRSVIGYFTPKGCEEISGYYPAIIDETTFYKVQQLSHYRYGRKPVSDKPMAVNLFKGVIRCSECGHALIITGFSDTRSGIYRCPLRNENRCSAKGLSRKQTDGTLLTLLSRLDRFDSDTTNIIDTLKLHREHISSNIEKLVQLSLEIEDLSAITSKLKQLKNELSQVDADIEKETQRLKSIDVGCLSDCDLTTKAGRIEAQLIIKSAVKEVVLNTAKRRCKVTFHNGKAITLPITENPSDNVTEAIQSLSEVTERGLIDVDEVII

SEQ ID NO: 3247 - protein, 578 aa, synthetic construct
MPSAIPYIRFSSARQTTGSSAERQQQMVTQWLTEHPEYTLSDLTYKDFGKSGYHGEHVKDGGGFAKLLAAVEAGNIKAGDVVLVEAIDRTGRLHPLEMLNKVITPILAAGVSIITLDDKVTYTHESAANGHLFLLVAKIQAAYGYSKQLSERTKASYSIRLEQAKEGMKVKRNTPIWLHSDGRLNDDVAPFIKQAFELYVSGVGKTAIANRLRASGVPELATCSGPTVEAWLRNQAAIGNWEYGKDDPDKPSQVIRGVYPPVISNELFLQAQQRKIAVATKPRERTSKNFLVGIVKCGVCGANLIIHNKEGKPNNMRCLTHHRLKDAGCTNKETIPYQVVHFIYLETAPSWVDRAMKVVQLSVNDKRKLYLAGEREEVTKTIERLVRLSAMGDSVELESQYKLATDRRAVIDNELDVLNRREDDGFASKSTSILENYASTLDHDRLAFHDPIQLSALLKQAGYSITVQPGRKLYLPDNNDPWIYTGVARRGNATLGYRIQDGEMEYTISPVIPKAVDASVYNNSSDGELQHIFDRSYKHIKSAISLDQTRVRNTKAITVEKFESADAAMQHLMSGVEK

SEQ ID NO: 3248 - protein, 605 aa, synthetic construct
MKKCFIYHRVSSEFQLSRTGIQRQEDSLQAYVERTNLLADMEDPEPTIISDRGISAFKTNENNFSIGELGRWMDQVRDGMWDGSALVLESIDRFSRQNPFTVVAYLSELVSHNITIHDVSLSMLINRTNSAMLPIVTMSAQRAYEESKLKSDRIRDGWRRRRENAFNNGTIVTNKRPRWIDVKNDKYVLNDKVAIVREIFRLYKKGIGTSTIAKILNTRGEKWLFESGRLWRSESVHKILKNKRVTGVIFISETIRDYNSTDKSIDRNTYEMDLYPIAISKEEYTLVQQLLKMRRTNNGRITNIKDTGELKKSNIFNRVFRCAKCGEAMYHNVVLANRDSKKRGKFKEEYRYIRCIGERDGLCDNKALRYEVVEQFVIEHIKGMDFTKILKPNEINPEIELVRVLIEEEKAHIQEYELGIERLKKQDKKIPFDVLTELQDSRDKLRTLEERQFSFADIKVDTDYIKSVDSSVIFDQTNIAIRSMVEHELIKIIDTIKLYRMGKHYVITLKYRSVGILKHVLIVEAKKIPTLISNIVIERTGKTVEYSTPSFSLVIADGDSPRLKTSDGVPISMIDYSLLLNYVDDVDRDDIVGVWMREKFNTLTS

SEQ ID NO: 3249 - protein, 506 aa, synthetic construct
MRSVITYLRYSSAIQGAEGADSTRRQNDLFKQWLKKNSDAQVVASFSDEGLSGYKGKHLTGQFGDMLARIESGEFSEGTVLLVEAIDRIGRLEHLETEALMNRILGNGIEIHTLQDGLIYTKDALADDLGISIIQRVKSYIAHQESKQKSFRVSQKWGQRAKLALAGEQRLTKMVPGWIDPETFEVNEHAETVRLIFKLLLDGESLHNIARHLQANNISSFSRRKDANGFSVHSVRTILRSETTIGTLPASQRNDRPAIPNYYEAAIDAATFNKAQEILDKNRKGRTPASDNPLTINIFKGLFRCQCGASVHPTGTKNKYQGVYRCNNHLDGRCDVPPLKRKPFDRWMIDNFLGMIDVVSDGETERRIAALQHEVEIVTARIKKATALLLEMDDITELKAQVKELNQKRTELQTTIDTMKRKTSLSDKGLPQLKDIDLMTKAGRVECQLILSKHLKGLTLGKDSVTVTLQNDTEITIPTNPLPLNDGSPIFEIADKELLDVDAYQL

SEQ ID NO: 3250 - protein, 507 aa, synthetic construct
MKRVISYIRFSSERQAKGDSLRRQSKMVNDWLKAHPEYYLDQDLSFRDLGVSGFTGKHLKGGLGDFLTAIEKGLVKAGDTLLIESLDRLSRQAVDRASELLRNILRSGVDVVTLSDGEHYTSESLKDPLALIKSILIMQRAHEESLRKSERIQAAWNRKKELISEGIKISKRCPAWLRLNDDRKSFSVIPEKVETVKRCFQLRLEGKSIWEIVRTLNDEGHQSMSQYKPGKFGQTSVQDLLKNRSVIGYFTPKGCEEISGYYPAIIDETTFYKVQQLSHYRYGRKPVSDKPLSVNLFKGVIRCSECGHALIITGFSDTRNGIYRCPLRNENRCSAKGLSRKQTDGTLLALLSRLDRFDSDMTNTLDTLKLHREHISSNIEKLVQLSLEIEDLSAITIKLKQLKGELSQVDADIEKETQRLKSIDVGCLSDCDLTTKAGRIEAQLIIKSAVKEVVLNTAKRRCKVTFHNGRAITLPITENPSEDVTEAIQSLSEVTERGLIDVDVVAI

SEQ ID NO: 3251 - protein, 559 aa, synthetic construct
MKTKLYSYIRFSSMRQNDGSSYERQIRMAREIAVKYDLELVNDYQDLGVSAFKGANSKTGALSRFLDAIGRSVPVGSWLFIENLDRLSRADIVSAQELFLSIIRRGITIVTGMDNKIYSLDTVTANPMDLMFSILLFIRGNEESQTKRNRTNSSALIKIKAHQENPQNPAVAIEEIGKNMWWTDTTSGYVLPHPVFFPIVQEVVELRRNGRSTAEILDHLNATYTPPPAASHKRHSNWSRAMIERLFHTRALIGIKEISVDGVKYELKDYYPRVLDDAEFYHLKKSIGVRACNFGDKEEAKPIPLLSGVGLLKCEHCGSAMVKVKGTNRRPNQYRYSCDAMRSSRIECVHTNWSFRGDQLEKAVLQLLADKIWIAEDKANPVPALKVQIDEISRKIDNLITLSAMTGATKELADQITTLNSERETLYNQLKMAEEEMYSVDSQGWEKLAEFDLEDVYNEDRIKVRFKIKQALKRIGCSRIDKYKNLFVLEYIDGKTQRVVIENSRGPRKGRIFVDLKTINDRQILESNGLVLHPCLDMLTDKNWKPEEEIPGPLQEFGI

SEQ ID NO: 3252 - protein, 547 aa, synthetic construct
MKLLATYIRWSTREQDSGDSLRRQTNLIDAFYSKHKNDYYLLPAHRYVDKGKSGFHQQHKAQGSDFRRMFENVMSGAIPEGSLIVVENFDRFSRADIDTAIDDVRQILRKGVSILTLGDGELYDKSALTDPVKLIKHIIIAERAHQESLVKQKRIAQVWNHKTQLARELKKPMGKQAPGWLELSEDGSHYIVDEDKASLVNIIYDKRLSGMSMFAICKWLNEQGYPTINQRKVRISKTKKPDGNWSALSVKHILTSRSVLGYLPAKISTEDRKTVLREEIESFYPQIVTDSKFYAVQQLLEETGKGKTSSGEHWLYVNILKGLIRCKCGLVMTPTGIRKPVYQGTYRCNGNKESRCSYGTVSRKLLDTQLCSRLFSKLSQLHDEATDTAKLDELQRRLNTVDSELEKLTETLIQLPNITQIQEALRVKQEEKDELIVQLSREKARVKSVSSLDLSGLDMESVEGRTEAQIIIKRLVKEIVVSGNEKLVDIYLHNGNMIRGFPLDGKDDHTLTLEEATDEMQPLDDMLIFGEPVTRIYPAGDMEEVDA

SEQ ID NO: 3253 - protein, 547 aa, synthetic construct
MKLLVTYIRWSTKEQDSGDSLRRQTNLIDAFYAKHKEEYYLLPAHRYVDKGKSGFHQQHKNQGSDFRRMFENVMSGVIPEGSLIVVENFDRFSRADIDTAIDDVRQILRKGVSILTLGDGELYDKSALTDPVKLIKHIIIAERAHQESLVKQKRIAQVWNHKTQLARELKKPMGKQAPGWLELSEDGSHYIVDEDKASLVNIIYDKRLSGMSMFAICKWLNEQGYPTINQRKVRISKTKKPDGNWSALSVKHILTSRSVLGYLPAKISTEDRKTVLREEIEGFYPQIVTDSKFYAVQQLLEETGKGKTSSGEHWLYVNILKGLIRCKCGLVMTPTGIRKPVYQGTYRCNGNKESRCNYGTVSRKLLDTQLCSRLFSKLSQLHDEATDTARLDELQRRLNTVDSELEKLTETLIQLPNITQIQEALRVKQEEKDELIVQLSREKARVKSVSSLDLSGLDMESVEGRTEAQIIIKRLVKEIVVSGNEKLVDIYLHNGNMIRGFPLDGKDDHTLTLEEATDEMQSLDDMLIFGEPVTRIYPAGDMEEVDA

SEQ ID NO: 3254 - protein, 547 aa, synthetic construct
MKLLVTYIRWSTKEQDSGDSLRRQTNLIDAFYSKHKEEYYLLPAHRYVDKGKSGFHQQHKAQGSDFRRMFENVMSGAIPEGSLIVVENFDRFSRADIDTAIDDVRQILRKGVSILTLGDGELYDKSALTDPVKLIKHIIIAERAHQESLVKQKRIAQVWNHKTQLARELKKPMGKQAPGWLELSEDGSHYIVDEDKASLVNIIYDKRLSGMSMFAICKWLNEQGYPTINQRKVRISKTKKPDGNWSALSVKHILTSRSVLGYLPAKISTEDRKTVLREEIESFYPQIVTDSKFYAVQQLLEETGKGKTSSGEHWLYVNILKGLIRCKCGLVMTPTGIRKPVYQGTYRCNGNKESRCSYGTVSRKLLDTQLCSRLFSKLSQLHDEATDTAKLDELQRRLNTVDGELEKLTETLIQLPNITQIQEALRVKQGEKDELIVQLSREKARVKSVSSLDLSGLDMESVEGRTEAQIIIKRLVKEIVVSGNEKLVDIYLHNGNMIRGFPLDGKDDHTLTLEEATDEMQSLDDMLIFGEPVTRIYPAGDMEEVDA

SEQ ID NO: 3255 - protein, 506 aa, synthetic construct
MRHVITYLRYSSAIQGAEGADSTRRQNDLFKQWLKKNSDAQVVASFNDEGLSGYKGKHLSGQFGDMLSRIESGEFSEGTILLVEAIDRIGRLEHLETEALMNRILGNGIEIHTLQDGLIYTKDALADDLGISIIQRVKAYIAHQESKQKSFRVSQKWGQRAKLALAGKQRLTKMVPGWIDPETFEVNEHAETVRLIFKLLLDGESLHNIARHLQANNISSFSRRKDANGFSVHSVRTILRSVTTIGTLPASQRNDRPAIPNYYEAAIDAATFNKAQEILDKNRKGRTPASDNPLTINIFKGLFRCQCGASVHPTGTKNKYAGVYRCNNHLDGRCDVPPLKRKPFDRWMIDNFLGMIDVGNDGEAEGKIAALQHEVEIVTARIKKATALLLEMDDITELKTQVKGLNQKRTELQTTIDNMRRKASLTDKELPQLKDIDLTTKAGRVECQLILSKHLKGLTLGKDSVIVTLQNDTEITIPTNPLPLNDGTSIFEIAEKELLEIDAYQL

SEQ ID NO: 3256 - protein, 547 aa, synthetic construct
MKLLVPYIRWSTKEQDSGDSLRRQTNLIDAFYSKHKEEYYLLPAHRYVDKGKSGFHQQHKAQGSDFRRMFENVMSGVIPEGSLIVVENFDRFSRADIDTAIDDVRQILRKGVSILTLGDGELYDKSALTDPVKLIKHIIIAERAHQESLVKQKRIAQVWNHKTQLARELKKPMGKQAPGWLELSEDGSHYIVDEDKASLVNIIYDKRLSGMSMFAICKWLNEQGYPTINQRKVRISKTKKPDGNWSALSVKHILTSRSVLGYLPAKISSEDRKTVLREEIEGFYPQIVTDSKFYAVQQLLEETGKGKTSSGEHWLYVNILKGLIRCKCGLVMTPTGIRKPVYQGTYRCNGNKESRCSYGTVSRKLLDTQLCSRLFSKLSQLHDEATDTAKLDELQRRLNTVDSELEKLTETLIQLPNITQIQEALRVKQEEKDELIVQLSREKARVKSVSSLDLSGLDMESVEGRTEAQIIIKRLVKEIVVSGNEKLVDIYLHNGNMIRGFPLDGKDDHTLTLEEATDEMQSLDDMLIFGEPVTRIYPAGDMEEVDA

SEQ ID NO: 3257 - protein, 507 aa, synthetic construct
MKRAISYIRFSSEKQSRGDSLRRQSKMVNDWLKAHPEYYLDQDLSFRDLGVSGFTGKHLKGGLGDFLTAIEKGLVKAGDTLLIESLDRLSRQAVDRASELLRNILRSGVDVVTLSDGEHYTSESLKDPLALIKSILIMQRAHEESLRKSERIQAAWDAKKEAAKAGIKVSKRCPAWLKLNDDRKSFSVIPEKVETVKRCFQLRLEGKSIWEIVRTLNDEGHQSMSQYKPGKFGQTSVQDLLKNRSVIGYFTPKGCEEISGYYPAIIDETTFYKVQQLSYARYGRKPASDKPLSVNLFKGVIRCSECGHALIITGFSDTRSGIYRCPLRNENRCSAKGLSRKQTDGTLLALLSRLDRFDSDMTNTIDTLKLHREHISSNIEKLVQLSLEIEDLSAITIKLKQLKGELSQVDADIEKETQRLKSIDVGCLSDCDLTTKAGRIEAQLIIKSAVKEVVLNTAKRRCKVTFHNGKVIDLSITENPSEDVTEAIQSLSEVTERGLIDVDGVII

SEQ ID NO: 3258 - protein, 604 aa, synthetic construct
MKKVFVYHRVSSDQQLDGSGIARQAELLEGYLERTGICSEMHDPIPVVLSDQGVSAFKGLNISEGELGAWMEEVRKGMWDSSILVVESIDRFSRQNPFDVMGYINALMAHNVAIHDVMANIVISRSNSKDLPFVMMNAQRAYDESKYKSDRIRKGWAKKREQAFNKGTIVTNKRPQWIDVKDDKYIINHKSTVIKEIFELYKTGLGCPTIAKELQKKEGEQYKFNRAWTGELVHKILTNRRVTGKIFISETIRNHDDLDNPVTQKKYQMNVYPVIVNEDEFELVQDLLKSRRPNAGRVTVKKTDNKEVLIKSNLFSGIARCMDCGGPMYHNVVRAKRTPKKGEPKVEEYRYIRCLSERDGLCNNKAMTYETVERFVVEHLIGMDISTVIKEQEFNPELEVIRIQIDQVKDQIANYENGIERRKSVGKIISFEMREELDDARLQLEELLARKASLATVNVDIPVLKNVDVNELFNVNNVDIRTRYENELNKIVSTVRLKRVDDSYIIDIKYKNNDLKRHVIFVEHKKKEQKLIGDVIIENIDGTILYSTSSFWIRVKDGAILFKQTKDDLSIIDYHILLNYVDGLERDNMVAVWMRHNINFLFGK

SEQ ID NO: 3259 - protein, 507 aa, synthetic construct
MKRAISYIRFSSEKQSRGDSLRRQSKMVNDWLKAHPEYYLDQDLSFRDLGVSGFTGKHLKGGLGDFLTAIEKGLVKAGDTLLIESLDRLSRQNVDRASELLRNILRSGVDVVTLSDGEHYTRESLKDPLALIKSILIMQRSHEESLRKSERIQAAWNRKKELISEGIKVSKRCPAWLKLNDDRKSFSVIPEKVETVKRCFQLRLEGKSIWEIVRTLNAEGHRSMNQYKPGKFGQTSVQDLLKNRSVIGYFTPKGCEEISGYYPAIIDETTFYKVQQLSHSRYGKRSVSDKPLSVNLFKGVIRCSECGHALIITGFSDTRNGIYRCPLRNENRCSAKGLSRKQTDGTLLTLLSRLDRFDSDTTNTIDMLRLHREHISSNIEKLVQLSLEIEDLSAITIKLKQLKGELSQVDADIEKETQRLKSIDVGCLSDCDLTTKAGRIEAQLIIKSAVKEVVLNTAKRRCKVTFHNGRAIDLSISENPSEDVTEAIQSLSEVTERGLIDVDEVII

SEQ ID NO: 3260 - protein, 506 aa, synthetic construct
MRSVITYLRYSSAIQGAEGADSTRRQNDLFKQWLKKNSDAQVVASFSDEGLSGYKGKHLTGQFGDMLARIESGEFPEGTILLVESIDRIGRLEHLETEALMNRILGNGLEIHTLQDGLIYTKDALADDLGISIIQRVKAYIAHQESKQKSFRVSQKWEQRAKLALAGEQRLTKMVPGWIDPDTFKLNEHAETVRLIFKLLLSGESLHNIARHLQSNGIKSFSRRKDANGFSVHSVRTILRSETTIGTLPASQRNDRPAIPNYYEAAIDASTFNKAQEILGKNRIGRTPASDNPLTINIFKGLFRCQCGASVHPTGTKNKYQGVYRCNNHLDGRCDVPPLKRKPFDKWMIDNFLGMIDVGNDGEAEGKIASLQHEVEIVTTRIKKATALLLEMDDITELKTQVKGLNQKRTELQTTIDNMRRKASLTDKELPQLKDIDLTTKAGRVECQLILSKHLKGLTLGKDSVTVTLQNDTEIIVPTDPLPLNDGSPIFEIADKELLDIDAYQL

SEQ ID NO: 3261 - protein, 506 aa, synthetic construct
MRSVITYLRYSSAIQGAEGADSTRRQNDLFKQWLKKNGDAQIVASFSDEGLSGYKGKHLTGQFGDMLARIEAGEFPEGTILLVESIDRIGRLEHLETEALMNRILGNGIEIHTLQDGLIYTKDALADDLGISIIQRVKAYIAHQESKQKSFRVSQKWGQRAKLALAGEQRLTKMVPGWIDPETFKLNEHAETVRLIFKLLLDGESLHNIARHLQSNGIKSFSRRKDANGFSVHSVRTILRSETTIGTLPASQRNDRPAIPNYYEGVVDIPTFNKAQEILDKNRKGRTPASDNPLTINIFKGLFRCQCGASVHPTGTKNKYAGVYRCNNHLDGRCDVQPLKRKPFDKWVLENFLGMIDVGNDGESERKIAALQHEVEIVTARIKKATALLLEMDDITELKTQVKGLNQKRTEIQTTIDTLKRKTSLSDKGLPQLKDIDLMTKAGRVECQLILSKHLKGLTLGKDSVTVTLQNDTEITIPTNPLPLNDGSPIFEIADKELLDIDAYQL

SEQ ID NO: 3262 - protein, 507 aa, synthetic construct
MKRVISYIRFSSEKQAKGDSLRRQSKMVTDWLKAHPEYYLDQDLSFRDLGVSGFTGKHLKGGLGDFLTAIEKGLVKAGDTLLIESLDRLSRQDIDIASELLRNILRSGVDVVTLSDGEHYTRESLRDPLALIKSILIMQRAHEESLRKAERIQAAWDAKKEAAKAGIKVSKRCPAWLKLNDDRKSFSVIPEKVETVKRCFQLRLEGKSIWEIVRTLNDEGHQSMSQYKPGSFGQSSVQDLLKNRSVIGYFTPKGCEEISGYYPAIIDETTFYKVQQLSHYRYGRKPVSDKPLSVNLFKGVIRCSECGHALIITGFSDTRNGIYRCPLRNENRCSAKGLSRKQTDGTLLALLSRLDRFDSDMTNVIDTLKLHREHISSNIEKLVQLSLEIEDLSAITSKLKQLKGELSQVDADIEKETQRLKSIDVGCLSDCDLTTKAGRIEAQLIIKSAVKEVVLNTAKRRCKVTFHNGKLIDLPITENPSEDVTEAIQSLSEVTERGLIDVDEVII

SEQ ID NO: 3263 - protein, 453 aa, synthetic construct
MECVAYMRVSTEKQAEEGNGLDSQRRDIENYCRKNELVITDWYIDDGYTGANMDRPELQRLVSDCDRKRVGYVVAFKLDRISRSMVDGIYLIERVFLKNNVEFKCVHDSISYDNPMEQAYTQMMAVFAQLDKNTMLLRMRGGMLERVKKGYWMGGGNTPYCYNYSKETGTLIPIPERKEQANRAMDLFLQGYSDVKIKDMLGFKSEFVTKQVLTSPVNIGMIPYKGKLYQGLHEPIFDKETFEKAQQFRRTRSKKRVNCNNLQTNLLTGLCYCGVCGCAMRYQKWTHGKHKIYCCSRNSDLHYLPNHNPNCNNTLEWASDIENAVEKEILKISANISEYKPRKKESKLEILRSQLEKEQSKRKRLYGLYAEGNDDVIGMIKEIEQTIEELKQDIVKESAIETDNSRKKVFENIKNLADIWADIDKKQKNTLLKSIIEKIIVSNGNIEIRLKDF

SEQ ID NO: 3264 - protein, 507 aa, synthetic construct
MKRVISYIRFSSERQAKGDSLRRQSKMVNDWLKAHPEYYLDQDLSFRDLGVSGFTGKHLKGGLGDFLTAIEKGLVKAGDTLLIESLDRLSRQNVDRASELLRNILRSGVDVVTLSDGEHYTRESLKDPLALIKSILIMQRSHEESLRKSERIQAAWNRKKELISEGIKISKRCPAWLKLNDDRKSFSVIPDKVETVKRCFQLRLEGKSIWEIVRTLNDEGHQTLNQYKAGKFGQTSVQDLLKNRSVIGYFTPKGCEEISGYYPAIIDETTFYKVQQLSHYRYGRKPVSDKPLSVNLFKGVIRCSECGHALIITGFSDTRNGIYRCPLRNENRCSAKGLSRKQTDGTLLALLSRLDRFDSDMTNTIDTLKLHREHISSNIEKLVQLSLEIEDLSAITSKLKQLKNELSQVDADIEKETQRLKSIDVGCLSDCDLTTKAGRIEAQLIIKSAVKEVILNTAKRRCKVTFHNGKVIDLPITENPSDNVTEAIQSLSEVTERGLIDVDEVII

SEQ ID NO: 3265 - protein, 506 aa, synthetic construct
MRTVITYLRFSSATQGAEGADSTRRQNELFKQWLKKNSDAQVVASFSDEGLSGYKGKHLTGQFGDMLARIEAGEFPGGTILLVESIDRIGRLEHLETEALMNRIIAHGIEIHTLQDGLIYTRDALSDDLGISIIQRVKSYLAHQESKQKSFRVSEKWKQRAKLALAGKQRLTKMVPGWIDPDTLKLNEHAETVRLIFKLLLSGESLHNIARHLQSNGIKSFSRRKDANGFSVHSVRTILRSETTIGTLPASQRNDRPAIPNYYEAAIDAATFNKAQEILDKNRKGRTPASDNPLTINIFKGLFRCQCGASVHPTGTKNKYAGVYRCNNHLDGRCDVPPLKRKPFDKWMIDNFLGMIDVGNDGEAEGKIASLQHEVEIVTARIKKATALLLEMDDIDELKIQIKELNQRRTELQTTIDSMRRKASLTDKELPQLKDIDLTTKAGRVECQLILSKHLKGLTLGKGSVTITLQNDTEITIPTNPLPLNDGSPIFEIADKELLDIDAYQL

SEQ ID NO: 3266 - protein, 508 aa, synthetic construct
MKKAIAYMRFSSPGQMSGDSLNRQRRLIAEWLKVNSDYYLDTITYEDLGLSAFKGKHAQSGAFSEFLDAIEHGYILPGTTLLVESLDRLSREKVGEAIERLKLILNHGIDVITLCDNTVYNIDSLNEPYSLIKAILIAQRANEESEIKSSRVKLSWKKKRQDAMESGTIMTASCPRWLSLDDKRTAFVPDPDRVKTIELIFKLRMERRSLNAIAKYLNDHAVKNFSGKESAWGPSVIEKLLANKALIGICVPSYRARGKGISEIAGYYPRIISDDLFYAVQEIRLAPFGISNSSKNPMLINLLRTVMKCEACGNTMIVHAVSGSLHGYYVCPMRRLHRCDRPSIKRDLVDYNIINELLFNCSKIQPVENKKDANETLELKIIELQMKINNLIVALSVAPEVTAIAEKIRLLDKELRRASVSLKTLKSKGVNSFSDFYAIDLTSKNGRELCRTLAYKTFEKIIINTDNKTCDIYFMNGIVFKHYPLMKVISAQQAISALKYMVDGEIYF

SEQ ID NO: 3267 - protein, 508 aa, synthetic construct
MKKAIAYMRFSSPGQMSGDSLNRQRRLIDEWLKVNSDYYLDTITYEDLGLSAFKGKHAQSGAFSEFLDAIEHGYILPGTTLLVESLDRLSREKVGEAIERLKLILNHGIDVITLCDNTVYNIDSLNDPYSLIKAILIAQRANEESEIKSSRVKLSWKKKRQDALESGTIMTASCPRWLSLDDKRTAFIPDPDRVKTIELIFKLRMERRSLNAIAKYLNDHAVKNFSGKESAWGPSVIEKLLANKALIGICVPSYRARGKGISEIAGYYPRVISDDLFYAVQEIRLAPFGISNSSKNPMLINLLRTVMKCEACGNTMIVHAVSGSLHGYYVCPMRRLHRCGRPSIKRDLVDYNIINELLFNCSKIQPVENKKDANETLELKIIELHMKINNLIAALSVAPEVTAIAEKIRVLDKELRRASVSLKTLKSKAVSSLGDFHAIDLTSKNGRELCRTLAYKTFEKIIINTDNKTCDIYFMNGIVFKHYPLMKVISAQQAISALKYMVDGEVYF

SEQ ID NO: 3268 - protein, 559 aa, synthetic construct
MKTKLYSYIRFSSMRQNDGSSYERQIRMAREVAAKYDLELVNDYQDLGVSAFKGANSKTGALSRFLDAIGRSVPVGSWLFIENLDRLSRADIVSAQELFLSIIRRGITIVTGMDNKIYSLDTVTANPMDLMFSILLFIRGNEESQTKRNRTNSSALIKIKAHQENPQNPAVAIEEVGKNMWWTDTTSGYVLPHPTYFPVVQEIVELRKNGRSTAEILDHLNETYAPPPAVSNKKHSKWSRAMVERLFHTRALIGIKEVSVDGVNYELKDYYPRVIDDATFYHLKKNIGARAWNFGEKEEVKPIPLLSGIGLLKCDHCGCAMVKVKGTNKRSDQYRYTCDATRSRRLDCEHPNWSFRGDQLEKAVLQLLADKIWIAEDKANPVPALKVQVDEISRKIDNLIALSAMTGATKELADQITTLNSERETLYNQIKMAEEEMYSVDSQGWEKLAEFDLEDVYNEERLKVRFKIKQALKRIGCSRIDRNKNLFVLEYIDGKTQRVVIENSRGTRKGRIFIDLKTINDRQILESNGLVLHPCLDMLTDKNWKPEEEIPGPLQEFGI

SEQ ID NO: 3269 - protein, 559 aa, synthetic construct
MKTKLYSYIRFSSMRQNDGSSYERQIRMAREVAAKYDLELVNDYQDLGVSAFKGANSKTGALSRFLDAIGRSVPVGSWLFIENLDRLSRADIVSAQELFLSIIRRGITIVTGMDNKIYSLDTVTANPMDLMFSILLFIRGNEESQTKRNRTNSSALIKIKSHQENPQNPAVAIEEVGKNMWWTDTTSGYVLPHPVYFPVVQEIVELRKNGRSTAEILDHLNETYTPPPAVSNKKHSKWSRAMVERLFHTRALIGIKEVSVDGVNYELKDYYPRVIDDATFYHLKKNIGARAWNFGDKEEVKPIPLLSGIGLLKCDHCGCAMVKVKGTNKRSDQYRYTCDATRSRRLDCEHPNWSFRGDQLEKAVLQLLADKIWIAEDKANPVPALKVQVDEISRKIDNLIALSAMTGATKELAEQITTLNSERETLYNQIKMAEEEMYSVDSQGWEKLAEFDLEDVYNEERLKVRFKIKQALKRIGCSRIDRNKNLFVLEYIDGKTQRVVIENSRGTRKGQIFVDLKTINDRQILESNGLVLHPCLDMLTDKNWKPEEEIPGPLQEFGI

SEQ ID NO: 3270 - protein, 507 aa, synthetic construct
MKRVISYIRFSSERQAKGDSLRRQSKMVNDWLKAHPEYYLDQDLSFRDLGVSGFTGKHLKGGLGDFLTAIEKGLVKAGDTLLIESLDRLSRQAVDRASELLRNILRSGVDVVTLSDGEHYTSESLKDPLALIKSILIMQRAHEESLRKAERIQAAWDAKKEAAKAGIKVSKRCPAWLKLNDDRKSFSVIPEKVETVKRCFQLRLEGKSIWEIVRTMNAEGRQTLNQYKAGSFGQSSVQDLLKNRSVIGYFTPKGCEEISGYYPAIIDETTFYKVQQLSYARYGRKPASDKPLSVNLFKGVIRCSECGHALIITGFSDTRSGIYRCPLRNENRCSAKGLSRKQTDGTLLALLSRLDRFDSDTTNTIDTLKLHREHISSNIEKLVQLSLEIEDLNAITNKLKQLKNELSQVDADIEKETQRLKSIDVGCLSDCDLTTKAGRIEAQLIIKSAVKEVVLNTAKRRCKVTFHNGKVIDLPITENPSEDVTEAIQSLSEVTERGLIDVDEVII

SEQ ID NO: 3271 - protein, 507 aa, synthetic construct
MKRVISYIRFSSEKQAKGDSLRRQSKMVTDWLKAHPEYYLDESLTFRDLGVSGFTGKHLKGGLGDFLTAIEKGLVKAGDTLLIESLDRLSRQAVDRASELLRNILRSGVDVVTLSDGEHYTKESLRDPLSLIKSILIMQRAHEESLRKSERIQAAWDAKKEAAKAGIKVSKRCPAWLKLNDDRKSFSVIPEKVETVRRCFQLRLEGKSIWEIVRTMNAEGHQTLHQHKPGSFGQSSVQDLLKNRSVIGYFTPKGCEEIAGYYPAIIDETTFYKVQQLSHSRYGKRSVSDKPLSVNLFKGVIRCSECGHALIITGFSDTRSGIYRCPLRNENRCSAKGLSRKQTDGTLLTLLSRLDRFDSDTTNTIDMLRLHREHISSNIEKLVQLSLEIEDLSAITIKLKQLKGELSQVDADIEKETQRLKSIDTGSLSDCDLSTKAGRIEAQLIIKSAVKEVVLNTAKRRCKVTFHNSKAITLPITENPSEDVTEAIQSLSEVTERGLIDVDVVEI

SEQ ID NO: 3272 - protein, 547 aa, synthetic construct
MKLLVTYIRWSTREQDSGDSLRRQTNLIDAFYSKHKNDYYLLPAHRYVDKGKSGFHQQHKAQGSDFRRMFENVMSGAIPEGSLIVVENFDRFSRADIDTAIDDVRQILRKGVSILTLGDGELYDKSALTDPVKLIKHIIIAERAHQESLVKQKRIAQVWNHKTQLARELKKPMGKQAPGWLELSEDGSHYIVDEDKASLVNIIYDKRLSGMSMFAICKWLNEQGYPTINQRKVRISKTKKPDGNWSALSVKHILTSRSVLGFLPAKISTEDRKTVLREEIEGFYPQIVTDSKFYAVQQLLEETGKGKTSSGEHWLYVNILKGLIRCKCGLVMTPTGIRKPVYQGTYRCNGNKESRCSYGTVSRKLLDTQLCSRLFSKLSQLHDEATDTAKLDELQRRLNTVDSELEKLTETLIQLPNITQIQEALRVKQEEKDELIAQLSREKARVKSVSSLDLSGLDMESVEGRTEAQIIIKRLVKEIVVSGNEKLVDIYLHNGNMIRGFPLDGKDDHTLTLEEATDEMQSLDDMLIFGEPVTRIYPAGDMEEVDA

SEQ ID NO: 3273 - protein, 508 aa, synthetic construct
MKKAIAYMRFSSPGQMSGDSLNRQRRLITEWLKVNSDYYLDTVTYEDLGLSAFNGKHAQSGAFSEFLDAIEHGYILPGTTLLVESLDRLSREKVGEAIERLKLILNHGIDVITLCDNTVYNIDSLNEPYSLIKAILIAQRANEESEIKSSRVKLSWKKKRQDALESGTIMTASCPRWLSLDDKRTAFIPDPDRVKTIELIFKLRMERRSLNAIAKYLNDHAVKNFSGKESAWGPSVIEKLLANKALIGICVPSYRARGKGISEIAGYYPRVISDDLFYAVQEIRLAPFGISNSSKNPMLINLLRTVMKCEACGNTMIVHAVSGRLHGYYVCPMRRLHRCDRPSIKRDLVDYNIINELLFNCSKIQPVENKKDANETLELKIIELQMKINNLIVALSVAPEVTAIAEKIRLLDKELRRASVSLKTLKSKGVSSLGDFHAIDLTSKNGRELCRTLAYKIFEKIIINTDNKTCDIYFMNGIVFKHYPLMKVISAQQAISTLKYMVDGEIYF

SEQ ID NO: 3274 - protein, 507 aa, synthetic construct
MKRVISYIRFSSEKQAKGDSLRRQSKMVNDWLKAHPEYYLDQDLSFRDLGVSGFTGKHLKGGLGDFLTAIEKGLVKAGDTLLIESLDRLSRQDIDIASELLRRILRAGVDVVTLSDGEHYTSESLKDPLSLIKSILIMQRAHEESLRKAERIQAAWDAKKEAAKAGIKVSKRCPAWLKLNDDRKSFSVIPEKVETVKRCFQLRLEGKSIWEIVRTLNDEGHQSMSQYKPGKFGQTSVQDLLKNRSVIGYFTPKGCEEISGYFPPIIPETDFYKVQQLSYSRYGRKPASDKPLSVNLFKGVIRCSECGHALIITGFSDTRSGIYRCPLRNENRCSAKGLSRKQTDGTLLALLSRLDRFDSDTTNTIDTLKLHREHISSNIEKLVQLSLEIEDLNAITNKLKQLKNELSQVDADIEKETQRLKSIDVGCLSDCDLTTKAGRIEAQLIIKSAVKEVVLNTAKRRCKVTFHNGKVIDLPITENPSEDVTEAIQSLSEVTERGLIDVDEVII

SEQ ID NO: 3275 - protein, 547 aa, synthetic construct
MKLLVPYIRWSTKEQDSGDSLRRQTNLIDAFYAKHKDDYYLLPAHRYVDKGKSGFHQQHKAQGSDFRRMFENVMSGVIPEGSLIVVENFDRFSRADIDTAIDDVRQILRKGVSILTLGDGELYDKSALTDPVKLIKHIIIAERAHQESLVKQKRIAQVWNHKTQLARELKKPMGKQAPGWLELSDDGSHYIVDEDKASLVNIIYDKRLSGMSMFAICKWLNEQGYPTINQRKVRISKTKKPDGNWSALSVKHILTSRSVLGYLPAKISSEDRKTVLREEIEGFYPQIVTDSKFYAVQQLLEETGKGKTSSGEHWLYVNILKGLIRCKCGLVMTPTGIRKPVYQGTYRCNGNKESRCNYGTVSRKLLDTQLCSRLFSKLSQLHDEATDTAKLDELQRRLNTVDSELEKLTETLIQLPNITQIQEALRVKQEEKDELIVQLSREKARVKSVSSLDLSGLDMESVEGRTEAQIIIKRLVKEIVVSGNEKLVDIYLHNGNMIRGFPLDGKDDHTLTLEEATDEMQSLDDMLIFGEPVTRIYPAGDMEEVDA

SEQ ID NO: 3276 - protein, 507 aa, synthetic construct
MKRAISYIRFSSEKQSRGDSLRRQSKMVTDWLKAHPEYHLDQDLSFRDLGVSGFTGKHLQGGLGDFLTAIEKGLVKAGDTLLIESLDRLSRQDVDQASELLRNILRSGVDVVTLSDGEHYTKESLKDPLALIKSILIMQRSHEESLRKSERIQAAWNRKKELISEGIKISKRCPAWLKLNDDRKSFSVIPEKVETVKRCFQLRLEGKSIWEIVRTLNDEGHQTLNQYKAGKFGQTSVQDLLKNRSVIGYFTPKGCEEIAGYFPSIIPETDFYKVQQLSYSRYGRKPASDKPLSVNLFKGVIRCSECGHALIITGFSDTRSGIYRCPSRNENRCNAKGLSRKQTDGTLLALLSRLDRFDSDMTNTLDTLKLHREHISNNIEKLVQLSLEIEDLSAITSKLKQLKGELSQVDADIEKETQRLKSIDVGCLSDCDLTTKAGRIEAQLIIKSAVKEVVLNTAKRRCKVTFHNGKVIDLPITENPSEDVTEAIQSLSEVTERGLIDVDEVIV

SEQ ID NO: 3277 - protein, 547 aa, synthetic construct
MKLLVPYIRWSTKEQDSGDSLRRQTNLIDAFYSKHKEEYYLLPAHRYVDKGKSGFHQQHKAQGSDFRRMFENVMSGAIPEGSLIVVENFDRFSRADIDTAIDDVRQILRKGVSILTLGDGELYDKSALTDPVKLIKHIIIAERAHQESLVKQKRIAQVWNHKTQLARELKKPMGKQAPGWLELSEDGSHYIVDEDKASLVNIIYDKRLSGMSMFAICKWLNEQGYPTINQRKVRISKTKKPDGNWSALSVKHILTSRSVLGYLPAKISSEDRKTVLREEIEGFYPQIVTDSKFYAVQQLLEETGKGKTSSGDHWLYVNILKGLIRCKCGLVMTPTGIRKPVYQGTYRCNGNKESRCNYGTVSRKLLDTQLCSRLFSKLSQLHDEATDTAKLDELQRRLNTVDGELEKLTETLIQLPNITQIQEALRVKQEEKDELIVQLSREKARVKSVSSLDLSGLDMESVEGRTEAQIIIKRLVKEIVVSGNEKLVDIYLHNGNMIRGFPLDGKDDHTLTLEEATDEMQSLDDMLIFGEPVTRIYPAGDMEEVDA

SEQ ID NO: 3278 - protein, 507 aa, synthetic construct
MKRVISYIRFSSEKQAKGDSLRRQSKMVTDWLKAHPEYYLDQDLSFRDLGVSGFTGKHLKGGLGDFLTAIEKGLVKAGDTLLIESLDRLSRQDVDQASELLRNILRSGVDVVTLSDGEHYTRESLKDPLALIKSILIMQRAHEESLRKAERIQAAWDAKKEAAKAGIKISRRCPAWLKLNDDRKSFSVIPEKVETVKRCFQLRLEGKSIWEIVRTLNAEGHQTLNQYKAGKFGQTSVQDLLKNRSVIGYFTPKGCEEISGYFPPIIPETDFYKVQQLSHSRYGRKPASAKPLSVNLFKGVIRCSECGHALIITGFSDTRNGIYRCPLRNENRCSAKGLSRKQTDGTLLTLLSRLDRFDSDTTNTVDMLRLHREHISSNIEKLVQLSLEIEDLSAITSKLKQLKGELSQVDADIEKETQRLKSIDVGCLSDCDLSTKAGRIEAQLIIRSAVKEVVLNTAKRRCKVTFHNSKSITLSITENPSEDVTEAIQSLSEVTERGLIDVDVVEI

SEQ ID NO: 3279 - protein, 508 aa, synthetic construct
MKKAIAYMRFSSPGQMSGDSLNRQRRLIAEWLKVNSDYYLDTITYEDLGLSAFKGKHAQSGAFSEFLDAIEHGYILPGTTLLVESLDRLSREKVGEAIERLKLILNHGIDVITLCDNTVYNIDSLNEPYSLIKAILIAQRANEESEIKSSRVKLSWKKKRQDALESGTIMTASCPRWLSLDDKRTAFVPDPDRVKTIELIFKLRMERRSLNAIAKYLNDHAVKNFSGKESAWGPSVIEKLLANKALIGICVPSYRARGKGISEIAGYYPRVISDDLFYAVQEIRLAPFGISNSSKNPMLINLLRTVMKCEACGNTMIVHAVSGRLHGYYVCPMRRLHRCDRPSIKRDLVDYNIINELLFNCSKIQPVENKKDANETLELKIIELQMKINNLIVALSVAPEVTAIAEKIRLLDKELRRASVSLKTLKSKGVSSLGDFHAIDLTSKNGRELCRTLAYKIFEKIIINTDNKTCDIYFMNGIVFKHYPLMKVISAQQAISTLKYMVDGEIYF

SEQ ID NO: 3280 - protein, 506 aa, synthetic construct
MRTVITYLRFSSATQGAEGADSTRRQNELFKQWLRKNSDAQVVASFSDEGLSGYKGKHLTGQFGDMLARIEAGEFPAGAILLVESIDRIGRLEHLETEALMNRIIAHGIEIHTLQDGLIYTRDALSDDLGISIIQRVKSYLAHQESKQKSFRVSEKWKQRAKLALAGKQRLTKMVPGWIDPDTLKLNEHAETVRLIFKLLLSGESLHNIARHLQANNISSFSRRKDANGFSVHSVRTVLRSESVIGTLPASQRNDRPAIPNYYEAAIDAATFNKAQEILDKNRKGRTPASDNPLTINIFKGLFRCQCGASVHPTGTKNKYAGVYRCNNHLDGRCDVPPLKRKPFDKWMIDNFLGMIDVGNDGEAEGKIASLQHEVEIVTTRIKKATALLLEMDDITELKTQVKELNQKRTELQTTIDSMRRKTSLSDKGLPQLKDIDLMTKEGRVECQLILSKHLKGLTLGKDSVTVTLQNDTEITIPTNPLPLNDGSPIFEIADKELLDIDAYQL

SEQ ID NO: 3281 - protein, 508 aa, synthetic construct
MKKAIAYMRFSSPGQMSGDSLNRQRRLIAEWLKVNSDYYLDTITYEDLGLSAFKGKHAQSGAFSEFLDAIEHGYILPGTTLLVESLDRLSREKVGEAIERLKLILNHGIDVITLCDNTVYNIDSLNEPYSLIKAILIAQRANEESEIKSSRVKLSWKKKRQDALESGTIMTASCPRWLSLDDKRTAFVPDPDRVKTIELIFKLRMERRSLNAIAKYLNDHAVKNFSGKESAWGPSVIEKLLANKALIGICVPSYRARGKGISEIAGYYPRVISDDLFYAVQEIRLAPFGISNSSKNPMLINLLRTVMKCEACGNTMIIHAVSGSLHGYYVCPMRRLHRCDRPSIKRDLVDYNIINELLFNCSKIQPVENKKDANETLELKIIELQMKINNLIAALSVAPEVTAIAEKIRVLDKELRRASVSLKTLKSKAVSSLGDFHAIDLTSKNGRELCRTLAYKTFEKIIINTDNKTCDIYFMNGIVFKHYPLMKTISAQQAISTLKYMVDGEVYF

SEQ ID NO: 3282 - protein, 508 aa, synthetic construct
MKKAIAYMRFSSPGQMSGDSLNRQRRLIAEWLKVNSDYYLDTITYEDLGLSAFKGKHAQSGAFSEFLDAIEHGYILPGTTLLVESLDRLSREKVGEAIERLKLILNHGIDVITLCDNTVYNIDSLNDPYSLIKAILIAQRANEESEIKSSRVKLSWKKKRQDALESGTIMTASCPRWLSLDDKRTAFIPDPDRVKTIELIFKLRMERRSLNAIAKYLNDHAVKNFSGKESAWGPSVIEKLLANKALIGICVPSYRARGKGISEIAGYYPRVISDDLFYAVQEIRLAPFGISNSSKNPMLINLLRTVMKCEACGNTMIVHAVSGSLHGYYVCPMRRLHRCDRPSIKRDLVDYNIINELLFNCSKIQPVENKKDANETLELKIIELQMKINNLIAALSVAPEVTAIAEKIRVLDKELRRASVSLKTLKSKAVSSLGDFHAIDLTSKNGRELCRTLAYKTFEKIIINTDNKTCDIYFMNGIVFKHYPLMKTISAQQAISTLKYMVDGEVYF

SEQ ID NO: 3283 - protein, 507 aa, synthetic construct
MKRVISYIRFSSEKQSRGDSLRRQSKMVNDWLKAHPEYYLDQDLSFRDLGVSGFTGKHLKGGLGDFLTAIEKGLVKAGDTLLIESLDRLSRQAVDRASELLRNILRSGVDVVTLSDGEHYTKESLRDPLSLIKSILIMQRAHEESLRKSERIQAAWNRKKELISEGIKVSRRCPAWLRLNDDRKSFSVIPEKVETVKRCFQLRLEGKSIWEIVRTLNDEGHQSMSQYKPGKFGQTSVQDLLKNRSVIGYFTPKGCEEISGYYPAIIDETTFYKVQQLSYARYGRKPASDKPLSVNLFKGVIRCSECGHALIITGFSDTRNGIYRCPLRNENRCSAKGLSRKQTDGTLLTLLSRLDRFDSDTTNTIDTLKLHREHISSNIEKLVQLSLEIEDLSAITIKLRQLKGELSQVDADIEKETQRLKSIDVGCLSDCDLTTKAGRIEAQLIIKSAVKEVVLNTAKRRCKVTFHNGKLIDLPITETPSEDVTEAIQSLSEVTERGLIDVDEVII

SEQ ID NO: 3284 - protein, 506 aa, synthetic construct
MRTAITYLRYSSAIQGVEGADSTRRQNDLFKQWLKKNSDAQIVASFSDEGLSGYKGKHLTGQFGDMLARIEAGEFPEGTILLVESIDRIGRLEHLETEALMNRILGNGLEIHTLQDGLIYTKDALADDLGISIIQRVKAYIAHQESKQKSFRVSQKWEQRAKLALAGKQRLTKMIPGWIDPETFKLNEHAETVRLIFKLLLDGESLHNIARHLQSNGIKSFSRRKDANGFSVHSVRTILRSETTIGTLPASQRNDRPAIPNYYEAAIDAATFNKAQEILDKNRTGRTPASDNPLTINIFKGLFRCQCGASVHPTGTKNKYAGVYRCNNHLDGRCDVQPLKRKPFDKWVLENFLGMIDVGNDGESERKIAALQHEVEIVTARIKKATALLLEMDDITELKTQVKGLNQKRTEIQTTIDTLKRKTSLSDKGLPQLKDIDLMTKAGRVECQLILSKHLKGLTLGKDSVTVTLQNDTEITIPTNPLPLNDGSPIFEIADKELLDIDAYQL

SEQ ID NO: 3285 - protein, 559 aa, synthetic construct
MKTKLYSYIRFSSMRQNDGSSYERQIRMAREVAAKYDLELVNDYQDLGVSAFKGANSKTGALSRFLDAIGRSVPVGSWLFIENLDRLSRADIVSAQELFLSIIRRGITIVTGMDNKIYSLDTVTANPMDLMFSILLFIRGNEESQTKRNRTNSSALIKIKAHQENPQNPAVAIEEVGKNMWWTDTTSGYVLPHPVYFPVVQEIVELRKNGRSTAEILDHLNETYAPPPAVSNKKHSKWSRAMVERLFHTRALIGIKEVSVDGVNYELKDYYPRVIDDATFYHLKKNIGARAWNFGDKEEVKPIPLLSGIGLLKCDHCGCAMVKVKGTNKRSDQYRYTCDATRSRRLDCEHPNWSFRGDQLEKAVLQLLADKIWIAEDKANPVPALKVQVDEISRKIDNLIALSAMTGATKELADQITTLNSERETLYNQIKMAEEEMYSVDSQGWEKLAEFDLEDVYNEERLKVRFKIKQALRRIGCSRIDRNKNLFVLEYIDGKTQRVVIENSRGTRKGRIFIDLKTINDRQILESNGLVLHPCLDMLTDKNWKPEEEIPGPLQEFGI

SEQ ID NO: 3286 - protein, 517 aa, synthetic construct
MTAVIYARYSSDNQREESIEGQIRECTAYAEKNGITIVKHYIDRAISAKTDNRPEFQQMIKDSDKKLFDIVLVWKLDRFARNRYDSARYKTQLKKNGVKLMSATEIISEGPEGIILESVLEGYAEYYSADLAEKVVRGQTENILKGRCNGGRGTFGYTLDSERKFHIDPLASPFVLESFRKYRDGLTMKEIRDWLNENGIKNPVGGAFTYNSVEHMLKNRRYIGELKFRDVVVPDAIPPIVPLELFDDVQEKIAKNKKAPARRKAEDDYLLTTKLYCGYCGALMFGESGTSRTGEVHRYYKCATAKKKKGCKKKTVRKQWLEDLVVNQTMQLVRDDAAMESIIAKVMDLQNKENTNIPLYEKQLRDAESGIQNMLNAIQAGILTSSTKERLEQLEETKRELEARIAEEKLAKPKVTEEFIRFWLLRFRKLDMSLKDQRQALVDTFINAIYLYDDKVLITFNYKEGTQTVTFGEATEVASKGNGSDLDCLAAPKTSTHCVLVFLFVRGSRPRTTLFII

SEQ ID NO: 3287 - protein, 506 aa, synthetic construct
MRTAITYLRYSSAIQGVEGADSTRRQNDLFKQWLKKNSDAQIVASFSDEGLSGYKGKHLTGQFGDMLARIEAGEFPEGTILLVESIDRIGRLEHLETEALMNRILGNGLEIHTLQDGLIYTKDALADDLGISIIQRVKAYIAHQESKQKSFRVSQKWEQRAKLALAGKQRLTKMVPGWIDPETFKLNEHAETVRLIFKLLLDGESLHNIARHLQSNGIKSFSRRKDANGFSVHSVRTILRSETTIGTLPASQRNDRPAIPNYYEAAIDAATFNKAQEILDKNRTGRTPASDNPLTINIFKGLFRCQCGASVHPTGTKNKYAGVYRCNNHLDGRCDVQPLKRKPFDKWVLENFLGMIDVGNDGESERKIAALQHEVEIVTARIKKATALLLEMDDITELKTQVKGLNQKRTEIQTTIDTLKRKTSLSDKGLPQLKDIDLMTKAGRVECQLILSKHLKGLTLGKDSVTVTLQNDTEITIPTNPLPLNDGSPIFEIADKELLDIDAYQL

SEQ ID NO: 3288 - protein, 547 aa, synthetic construct
MKLLVTYIRWSTKEQDSGDSLRRQTNLIDAFYSKHKEEYYLLPAHRYVDKGKSGFHQQHKNQGSDFRRMFENVMSGVIPEGSLIVVENFDRFSRADIDTAIDDVRQILRKGVSILTLGDGELYDKSALTDPVKLIKHIIIAERAHQESLVKQKRIAQVWNHKTQLARELKKPMGKQAPGWLELSEDGSHYIVDEDKASLVNIIYDKRLSGMSMFAICKWLNEQGYPTINQRKVRISKTKKPDGNWSALSVKHILTSRSVLGFLPAKLSSEDRKTVLREEIEGFYPQIVTDSKFYAVQQLLEETGKGKTSSGEHWLYVNILKGLIRCRCGLVMTPTGIRKPVYQGTYRCNGNKESRCNYGTVSRKLLDTQLCSRLFSKLSQLHDEATDTARLDELQRRLNTVDSELEKLTETLIQLPNITQIQEALRVKQEEKDELTFQLSREKARVKSVSSLDLSGLDMESVEGRTEAQIIIKRLVKEIVVSGNEKLVDIYLHNGNMIRGFPLDGKDDHTLTLEEATDEMQSLDDMLIFGEPVTRIYPAGDMEEVDA

SEQ ID NO: 3289 - protein, 547 aa, synthetic construct
MKLLVPYIRWSTKEQDSGDSLRRQTNLIDAFYSKHKEEYYLLPAHRYVDKGKSGFHQQHKAQGSDFRRMFENVMSGAIPEGSLIVVENFDRFSRADIDTAIDDVRQILRKGVSILTLGDGELYDKSALTDPVKLIKHIIIAERAHQESLVKQKRIAQVWNHKTQLARELKKPMGKQAPGWLELSEDGSHYIVDEDKASLVNIIYDKRLSGMSMFAICKWLNEQGYPTINQRKVRISKTKKPDGNWSALSVKHILTSRSVLGYLPAKISSEDRKTVLREEIESFYPQIVTDSKFYAVQQLLEETGKGKTSSGEHWLYVNILKGLIRCKCGLVMTPTGIRKPVYQGTYRCNGNKESRCNYGTVSRKLLDTQLCSRLFSKLSQLHDEATDTAKLDELQRRLNTVDGELEKLTETLIQLPNITQIQEALRVKQGEKDELIVQLSREKARVKSVSSLDLSGLDMESVEGRTEAQIIIKRLVKEIVVSGNEKLVDIYLHNGNMIRGFPLDGKDDHTLTLEEATDEMQPLDDMLIFGEPVTRIYPAGDMEEVDA

SEQ ID NO: 3290 - protein, 514 aa, synthetic construct
MRKVYSYIRFSSTKQAFGDSHRRQSKAIQDWLASHPDHILDESLSFEDLGRSAFHGDHLKEGGALRAFLEAVKQGLIPPDSVLLVESLDRVSRQSISHAQETIRAILEQGITVVTLSDGETYNRQSLDDSLALIRMIILQERSHNESVIKSDRIKKVWSHKRQQFEQDGTKITGNCPGWLKLNSDGKSFSLIPHHVETIHRIFDEKLSGKSLHAIARDLNLENIPTITNKKVDTGWTPTRVRDLLLKESLIGVAYGVSDYFPPAISKEKFHAVQMIRGQGKGKKPTSRQPSSIDIFKGICKCAECGSTLRQRNTKKTPEGRYPRGYLECRNRQLGRCNSKAFNRSLIEDILIQKVFPTLQYLSLKSNGDNISVTTLKADITSLEKGINNLISLAERGLGDLDTLAQRITNNRVELESKKKDLRQAEAIQSLRSDNDIQDSDRKTVEGRIKLQLAIKSFIKEMIFDYYKQEITIRLLNGKSFSGISVARENKDFDHSSVFEVLQKSLLDIDEVHL

SEQ ID NO: 3291 - protein, 547 aa, synthetic construct
MKLLVTYIRWSTREQDSGDSLRRQTNLIDAFYAKHKDDYYLLPAHRYVDKGKSGFHQQHKNQGSDFRRMFENVMSGVIPEGSLIVVENFDRFSRADIDTAIDDVRQILRKGVSILTLGDGELYDKSALTDPVKLIKHIIIAERAHQESLVKQKRIAQVWNHKTQLARELKKPMGKQAPGWLELSEDGSHYIVDEDKASLVNIIYDKRLSGMSMFAICKWLNEQGYPTINQRKVRISKTKKPDGNWSALSVKHILTSRSVLGYLPAKISSEDRKTVLREEIESFYPQIVTDSKFYAVQQLLEETGKGKTSSGEHWLYVNILKGIIRCKCGLVMTPTGIRKPVYQGTYRCNGNKESRCSYGTVSRKLLDTQLCSRLFSKLSQLHDEATDTAKLDELQRRLNTVDSELEKLTETLIQLPNITQIQEALRVKQEEKDELIVQLSREKARVKSVSSLDLSGLDMESVEGRTEAQIIIKRLVKEIVVSGNEKLVDIYLHNGNMIRGFPLDGKDDHTLTLEEATDEMQSLDDMLIFGEPVTRIYPAGDMEEVDA

SEQ ID NO: 3292 - protein, 559 aa, synthetic construct
MKTKLYSYIRFSSMRQSDGSSYERQIRMAREIAAKYDLELVNDYQDLGVSAFKGANSKTGALSRFLDAIGRSVPVGSWLFIENLDRLSRADIVSAQELFLSIIRRGITIVTGMDNKIYSLDTVTANPMDLMFSILLFIRGNEESQTKRNRTNSSALIKIKAHQENPQNPAVAIEEVGKNMWWTDTTSGYVLPHPTYFPVVQEIVELRKNGRSTAEILDHLNETYAPPPAVSNKKHSKWSRAMVERLFHTRALIGIKEISVDGVNYELKDYYPRVIDDPTFYHLKKNIGARAWNFGDKEEVKPIPLLSGIGLLKCDHCGCAMVKVKGTNKRSDQYRYTCDATRSRRLDCEHPNWSFRGDQLEKAVLQLLADKIWIAEDKANPVPALKVQVDEISRKIDNLIALSAMTGATKELADQITTLNSERETLYNQIKMAEEEMYSVDSQGWEKLAEFDLEDVYNEERLKVRFKIKQALKRIGCSRIDRNKNLFVLEYIDGKTQRVVIENSRGTRKGQIFVDLKTINDRQILESNGLVLHPCLDMLTDKNWKPEEEIPGPLQEFGI

SEQ ID NO: 3293 - protein, 506 aa, synthetic construct
MRTVITYLRFSSATQGAEGADSTRRQNELFKQWLRKNSDAQVVASFNDEGLSGYKGKHLSGQFGDMLSRIESGEFPEGTVLLVEAIDRIGRLEHLETEALMNRIIAHGIEIHTLQDGLIYTRDALSDDLGISIIQRVKSYLAHQESKQKSFRVSEKWKQRAKLALAGKQRLTKMVPGWIDPETFKINEHAETVRLIFKLLLSGESLHNIARHLQSNGIKSFSRRKDANGFSVHSVRTILRSETTIGTLPASQRNDRPAIPNYYEAAIDAATFNKAQEILDKNRTGRTPASDNPLTINIFKGLFRCQCGASVHPTGTKNKYAGVYRCNNNPDGRCDVPPLKRKPFDKWMIDNFLGMIDVGNDGEAEGKIASLQHEVEIVTARIKKATALLLEMDDITELKTQVRELNQKRTDIQTTIDTLKRKTSLSDKGLPQLKDIDLMTKAGRVECQLILSKHLKGLTLGKDSVTVTLQNDTEITIPTNPLPLNDGSPIFEIADKELLDIDAYQL

SEQ ID NO: 3294 - protein, 507 aa, synthetic construct
MKRVISYIRFSSERQAKGDSLRRQSKMVNDWLKAHPEYYLDQDLSFRDLGVSGFTGKHLKGGLGDFLTAIEKGLVKAGDTLLIESLDRLSRQNVDRASELLRNILRSGVDVVTLSDGEHYTRESLKDPLALIKSILIMQRSHEESLRKSERIQAAWNRKKELISEGIKISKRCPAWLKLNDDRKSFSVIPEKVETVKRCFQLRLEGKSIWEIVRTLNAEGHQTLNQYKAGKFGQTSVQDLLKNRSVIGYFTPKGCEEISGYYPAIIDETTFYKVQQLSYARYGRKPASDKPMAVNLFKGVIRCSECGHALIITGFSDTRNGIYRCPLRNENRCSAKGLSRKQTDGTLLALLSRLDRFDSDMTNTIDTLKLHREHISSNIEKLVQLSLEIEDLSAITSKLKQLKGELSQVDADIEKETQRLKSIDVGCLSDCDLTTKAGRIEAQLIIKSAVKEVVLNTAKRRCKVTFHNGKAITLPITENPSDNVTEAIQSLSEVTERSLIDVDEVII

SEQ ID NO: 3295 - protein, 508 aa, synthetic construct
MKKAIAYMRFSSPGQMSGDSLNRQRRLITEWLKVNSDYYLDTVTYEDLGLSAFNGKHAQSGAFSEFLDAIEHGYILPGTTLLVESLDRLSREKVGEAIERLKLILNHGIDVITLCDNTVYNIDSLNEPYSLIKAILIAQRANEESEIKSSRVKLSWKKKRQDALESGTIMTASCPRWLSLDDKRTAFVPDPDRVKTIELIFKLRMERRSLNAIAKYLNDHAVKNFSGKESAWGPSVIEKLLANKALIGICVPSYRARGKGISEIAGYYPRVISDDLFYAVQEIRLAPFGISNSSKNPMLINLLRTVMKCEACGNTMIVHAVSGSLHGYYVCPMRRLHRCDRPSIKRDLVDYNIINELLFNCSKIQPVENKKDANETLELKIIELQMKINNLIAALSVAPEVTAIAEKTRVLDKELRRASVSLKTLKSKAVSSLGDFHAIDLTSKNGRELCRTLAYKTFEKIIINTDNKTCDIYFMNGIVFKHYPLMKTISAQQAISTLKYMVDGEVYF

SEQ ID NO: 3296 - protein, 506 aa, synthetic construct
MRTVITYLRFSSATQGAEGADSTRRQNELFKQWLRKNSDAQVVASFNDEGLSGYKGKHLSGQFGDMLSRIESGEFPEGTILLVEAIDRIGRLEHLETEALMNRIIAHGIEIHTLQDGLIYTRDALSDDLGISIIQRVKSYLAHQESKQKSFRVSEKWKQRAKLALAGKQRLTKMVPGWIDPGTFTLNEHAETVRLIFKLLLSGESLHNIARHLQANSISSFSRRKDANGFSVHSVRTILRSETTIGTLPASQRNDRPAIPNYYEAAIDAATFNKAQEILDKNRKGRTPASDNPLTINIFKGLFRCQCGASVHPTGTKNKYAGVYRCNNHLDGRCDVPPLKRKPFDRWMIDNFLGMIDVGNDGESERKIAALQHEVEIVTARIKKATALLLEMDDITELKAQVKGLNQKRTEIQTTIDTLKRKTSLTDKELPQLKDIDLTTKAGRVECQLILSKHLKGLTLGKDSVTVTLQNDTEITIPTNPLPLNDGSPIFEIADKELLDIDAYQL

SEQ ID NO: 3297 - protein, 507 aa, synthetic construct
MKRVISYIRFSSEKQAKGDSLRRQSKMVTDWLKAHPEYYLDESLTFRDLGVSGFTGKHLKGGLGDFLTAIEKGLVKAGDTLLIESLDRLSRQDVDQASELLRNILRSGVDVVTLSDGEHYTKESLRDPLSLIKSILIMQRSHEESLRKSERIQAAWNRKKELISEGIKISKRCPAWLKLNDDRKSFSVIPEKVETVKRCFQLRLEGKSIWEIVRTLNDEGHQSMSQYKPGSFGQSSVQDLLKNRSVIGYFTPKGCEEIAGYYPAIIDETTFYKVQQLSHSRYGKRSVSDKPLSVNLFKGVIRCSECGHALIITGFSDTRNGIYRCPLRNENRCSAKGLSRKQTDGTLLALLSRLDRFDSDMTNTIDTLKLHREHISSNIEKLVQLSLEIEDLSAITIKLKQLKGELSQVDADIEKETQRLKSIDVGCLSDCDLTTKAGRIEAQLIIKSAVKEVVLNTAKRRCKVTFHNGKVIDLSITENPSEDVTEAIQSLSEVTERGLIDVDEVII

SEQ ID NO: 3298 - protein, 559 aa, synthetic construct
MKTKLYSYIRFSSMRQNDGSSYERQIRMAREIAVKYDLELVNDYQDLGVSAFKGANSKTGALSRFLDAIGRSVPVGSWLFIENLDRLSRADIVSAQELFLSIIRRGITIVTGMDNKIYSLDTVTANPMDLMFSILLFIRGNEESQTKRNRTNSSALIKIKAHQENPQNPAVAIEEIGKNMWWTDTTSGYVLPHPVFFPIVQEVVELRRNGRSTAEILDHLNATYTPPPAASHKRHSNWSRAMIERLFHTRALIGIKEISVDGVKYELKDYYPRVLDDAEFYHLKKSIGVRACNFGDKEEVKPIPLLSGVGLLKCEHCGSAMVKVKGTNRRPNQYRYSCDAMRSSRIECVHTNWSFRGDQLEKAVLQLLADKIWIAEDKANPVPALKVQIDEISRKIDNLITLSAMTGATKELADQITTLNSERETLYNQIKMAEEEMYSVDSQGWEKLAEFDLEDVYNEDRIKVRFKIKQALKRIGCSRIDKYKNLFVLEYIDGKTQRVVIENSRGSRKGRIFVDLKTINDRQILESNGLVLHPCLDMLTDKNWKPEEEIPGPLQEFGI

SEQ ID NO: 3299 - protein, 506 aa, synthetic construct
MRSVITYLRYSSAIQGAEGADSTRRQNDLFKQWLKKNSDAQVVASFSDEGLSGYKGKHLTGQFGDMLARIESGEFPEGTILLVESIDRIGRLEHLETEALMNRILGNGLEIHTLQDGLIYTKDALADDLGISIIQRVKAYIAHQESKQKSFRVSQKWEQRAKLALAGEQRLTKMVPGWIDPDTFKLNEHAETVRLIFKLLLSGESLHNIARHLQSNGIKSFSRRKDANGFSVHSVRTILRSETTIGTLPASQRNDRPAIPNYYEAAIDASTFNKAQEILGKNRIGRTPASDNPLTINIFKGLFRCQCGASVHPTGTKNKYQGVYRCNNHLDGRCDVPPLKRKPFDKWMIDNFLGMIDVGNDGEAEGKIASLQHEVEIVTTRIKKATALLLEMDDIDELKIQLKELNQKRTELQTTIDNMRRKASLTDKELPQLKDIDLTTKAGRVECQLILSKHLKGLTLGKDSVIVTLQNDTEITIPTNPLPLNDGTSIFEIAEKELLEIDAYQL

SEQ ID NO: 3300 - protein, 559 aa, synthetic construct
MKTKLYSYIRFSSMRQNDGSSYERQIRMAREVAAKYDLELVNDYQDLGVSAFKGANSKTGALSRFLDAIGRSVPVGSWLFIENLDRLSRADIVSAQELFLSIIRRGITIVTGMDNKIYSLDTVTANPMDLMFSILLFIRGNEESQTKRNRTNSSALIKIKSHQENPQNPAVAIEEVGKNMWWTDTTSGYVRPDPVYFPIVKEIVELRKNGRSTSEILNYLNETYTPPPAVSNKKHSKWPRAMIGRLFHTRALIGIKEVSVDGVKYELKDYYPRVIDDATFYHLKKNIGARAWNFGDKEEIKPIPLLSGIGLLKCEHCSSAMIKVKGTNKRADQYRYSCEGIRSHRFDCEQPNWSFRGDQLEKAVLQLLADKIWIAEDKANPVPALKVQIDEISRKIDNLIALSAMTGATKELADQITALNSERETLYNQIKMAEEEMYSVDSQGWEKLAEFDLEDVYNEERLKVRFKIKQALRRIGCSRIDRNKNLFVLEYIDGKTQRVVIENSRGTRKGRIFIDLKTINDRQILESNGLVLHPCLDMLTDKNWKPEEEQAGPLQEFGI

SEQ ID NO: 3301 - protein, 482 aa, synthetic construct
MVKIVKPKGIKIRQRLKVAAYARVSMLTDNLQHSLANQVSYYTKLINSRADWKFAGVYADAGISGTRITKRKEFQRLIADCEKGLIDMVLVKSISRFSRDTVDFLNVVRNLKDLNIAIYFEREGINSLSSDGELCLTLLASFAQEESRSISENVKWFIRKNFQQGLSNGHKNAFGYRWDGYMYRVVPEEGEIVKEIFARYLSGESAYSIAKDMAGRGIKGLSGSLMEQTTVKDIISNISYTGTQLLQKTYIDERHMCRKNNGEYPKYLVEDVFEALVSDEDFSKAQDIRKKRAAQMPEKEMTKFSGKMKCGFCGCGISRRNNGALGTKRWVCNTRERKGRCECNLLPLNELDLEKAVEGVSTFREIRVYNDRLDIFLDKKNVKSVPRVFNGKRGRNAYTNKIWCVCGAKRRRSNFKKFKAWICLQSCGAKRLREDELFRASKELLGTDYQGRVAADIDKIVVSDECMEFVYYEGKVVLWQGK

SEQ ID NO: 3302 - protein, 516 aa, synthetic construct
MARKVTTIPAVRTIRRDVPSFTKKRVAGYARVSTDTLEQATSYQAQMSYYRSYILSHDDWEFAGMYSDEGISATNTAHRDGFNQMIEDALNGRIDLIITKSVSRFARNTVDSLTNVRKLKAHGVEVYFEKENIWTMDSKGELLITIMSSLAQEESRSISENVAWGKRKGFAEGKCSLAYGAFLGYDKDFKINEEQAELVRLIYKLFISGFSEYRIAKFLEKRGERAPGGGLKWYSSTVCSILQNEKYKGDALLQKAFTQDFLSKKRKKNEGELPQYYVENHHEGIIDSAQFDFVQTEIVRRKQNGRYSGNDIFSSKIQCGCCGAWFGRKVWHSNEKYRKVIYRCNRKYRKGEKPCPVPYVTEEEIKKVFVKAVNSLTDIKEECLRNVAEIIDVECDTTELHAELERLEQEMENISCGLDELIRRNAAGMNQEEYLREEERFIILQEDACKAYKKVEDDIRYKEDRHKVLFNFLERMREIDDKQIEFRPELWGSLVELVRVDENKNFKVIFRGGIEV

SEQ ID NO: 3303 - protein, 547 aa, synthetic construct
MQRQHGAFINARYSTDNQNPDSIDVQVSKCTQYCNQHGIPILGVFADEAVSGMKDTRPQFDAMMSQLRMGLADTVVIYDQSRMFRKMTAWFSFRDELAAMGVSVISVTQPMIGGDLRDPTNFLAEGSMALFNQIWALQTRQKVMEKMQYMARNGQHTGGKPPLGYNVQDGKLVVCPEEAATVQRIFEEYAAGSSYKQIIDGLNRDGIKTKRGGTFGSNSLHDLLHNEKYIGTLVYGKSLHSPDGTRNTHGDNDKAIRLENAIPAIIDQELFDAVQTRMGANKRRQSGRPATVRDYPLRGKVFCGECKSPMSISTSRGRYHYYQCTQKKRQHNCDSARISAEKLENIVAATVRELLRDPEKAEHLICILREQRDAIQSTSVAQLQALIAEQQSIKAKLDNASDAILNGLSSPTLIAKIKELEHRSAQLDAQMRALKAKNDASSIPETRLREYVQMMASADYDDIAVYLSIVYRVEVTRDKITIWTIWDTNPDGTYDFDEDGVLLTPGVPSAPPDSPKPKPIWAWVSLCPFRLDLFFFSYFLCNFTRIS

SEQ ID NO: 3304 - protein, 506 aa, synthetic construct
MRSVITYLRYSSAIQGAEGADSTRRQNDLFKQWLKKNSDAQVVASFSDEGLSGYKGKHLTGQFGDMLARIESGEFPEGTILLVESIDRIGRLEHLETEALMNRILGNGLEIHTLQDGLIYTKDALADDLGISIIQRVKAYIAHQESKQKSFRVSQKWEQRAKLALAGEQRLTKMVPGWIDPDTFKLNEHAETVRLIFKLLLSGESLHNIARHLQSNGIKSFSRRKDANGFSVHSVRTILRSETTIGTLPASQRNDRPAIPNYYEAAIDAATFNKAQEILDKNRKGRTPASDNPLTINIFKGLFRCQCGASVHPTGTKNKYAGVYRCNNHLDGRCDAPPLKRKPFDKWVLENFLGMIDVGNDGESERKIAALQHEVEIVTARIKKATALLLEMDDIDELKIQLKELNQKRTKLQTTIDSMRRKASLTDKELPQLKDIDLTTKAGRVECQLILSKHLESLTLGRGQVTVKLSNGTEIIVPTDPLPLTDGAAIFEIAEKNLLNIDTFQL

SEQ ID NO: 3305 - protein, 660 aa, synthetic construct
MTEKKKKKQQKCYIYIRVSTSMQVEGYSLEAQRERLNKFADYQGMEVVREYCDAGRSGKNITGRPEFTQMLRDIADDRDGVSYILVFKLSRFGRNAADVLNSLQYIQDYGVNLICVEDGIDSSKDSGKLTITVLSAVAEIERENILVQTMEGRKQKAREGKWNGGLAPFGYRLDKEKGELVVDPKEAEIVKVIFDKFINSDMGADSISNYLNDHGYTKNTSRDFEVSYFTRSHIMKILDNPVYVGKIVYGKSATEKVKGTRDQYRRVKQDDYLVADGRHDAIIDEDTWNKAREKRKETGVKWNKIHDLDHEHLLAGILKCPICGASLAGTVRRKKYPSGKVNSTFYYRCLHRKRIESTGKKCDFKPSLNQIDTDAEIIGVIHDMVNDEQFEAFIRGKLDEKVDVSSFEAEREGLRTQLIQATGAKDKLNQQLDRLDVTDRHYNRKYQDMQDRLDTLYDRIADLEEKIDDVTDKISGAYDENLTSKQLCKVLLQFDEMFEEMTDLERKEFLYTLIERIDLFPERQENGSILKRIRFKFRVDYDAEAGGKVLLNENDVETVVLLSQLRQKPDDYIDVDIDVAELEGTSAETKATYEKIKKYVAEHNDGMKVSNLYIAQVKRKCGIELAENFNLPKSEDARQPRCPKEKEEAIVEALKAFQMI

SEQ ID NO: 3306 - protein, 658 aa, synthetic construct
MKKCYIYTRVSTAAQIEGYSLDAQEESLKAYAEYRELEIVGNYCDAGKSGKNIKGRPAFRQMMTDIKSQKDDIAFVLVFKLSRFGRNAADILKSLQLLEDFGIDLVSVEEAIDSSTQGGRLTFAILSAVAEMERENITVQFMAGKMQKVLEGGWTGGAVPYGYKNVNHELVLVPSEAEVIRKTYELYQQENMSASAVAYELNKSNMVRITGKREQKPFTYEFVSRVLDNPFYCGRVYYNRRTNKKDRDGKTIKLDEDNIIMAEGKHEIIVSPEVWDSVHAKRTEIAGRYKKVDDGGHVHLLSGIVKCPICGKGLTGMISRTKNLKGDGYYKPIYYYKCRYNTRQNGKTCTFDQSLNQEIIDGLVMNILQKLQTYREFQDALQAALGDQGNIEKTEKRLQDLRKELREAELTKDRLGEKLDGLNPLGKDYDRKYEETSDKLDSIYDRIGDLEMDVISTKKKLEALKQKADSTVQIMTFMENLPLMYEEMSEEERKEMFQAFVDDIELFSEDRTDGKIIKSISFKFPMVFDGKPLAKNTKPEDMISFRLDCTDIDIELPCKGNIIMKKQADGSQKVIVRKGTYAAIKAYILEKHDVKVPTLYIAQIKRKYGLEIGKAYNKPEKNKNHVPKCTKEKELLIMEALKFYDLMEQDVEYREDAV

SEQ ID NO: 3307 - protein, 507 aa, synthetic construct
MKRVISYIRFSSERQAKGDSLRRQSKMVNDWLKAHPEYYLDQDLSFRDLGVSGFTGKHLKGGLGDFLTAIEKGLVKAGDTLLIESLDRLSRQNVDRASELLRNILRSGVDVVTLSDGEHYTKESLRDPLSLIKSILIMQRSHEESLRKSERIQAAWNRKKELISEGIKISKRCPAWLRLNDDRKSFSVIPDKVETVKRCFQLRLEGKSIWEIVRTMNAEGRQTLHQYKAGSFGQSSVQDLLKNRSVIGYFTPKGCEEISGYYPAIIDETTFYKVQQLSHYRYGRKPVSDKPLSVNLFKGVIRCSECGHALIITGFSDTRNGIYRCPLRNENRCSAKGLSRKQTDGTLLTLLSRLDRFDSDMTNTLDTLKLHREHISSNIEKLVQLSLEIEDLSAITIKLKQLKGELSQVDADIEKETQRLKSIDVGCLSDCDLTTKAGRIEAQLIIKSAVKEVVLNTAKRRCKVTFHNGRAITLPITENPSEDVTEAIQSLSEVTERGLIDVDEVII

SEQ ID NO: 3308 - protein, 560 aa, synthetic construct
MTKLYSYIRFSSMRQGEGSSYERQIKMAKEIADRYGLELVNDYQDLGVSAFKGANSKTGALSRFLDEIGRSIPVGSWLFIENLDRLSRQDIISAQELFLSIIRRGITIVTGMDNKIYSIETVTANPMDLMFSILLFIRGNEESQTKRNRTNSSALLKIKAHQQNPQSPAVAIEEIGKNMWWTDTTSGYVLPHPVYFPILQKIVKMKQEGHSTGSVLDYLNEHHTPPAPTSNKQHRKWSIAMVSRLFKTKALIGVKEVTVDGVQYELKDYYPRVLSDSEYYFLKNNLIKKAWSFGHAQEKTIPLLSGIGLLKCVHCGSPMVKRKAANGKVEQYRYTCDGEGSGRTDCLYPNWGFRASSLEGAVLQLLADKVWIAEDKANPIPEIQVQIDEISRKIDNLINLSAMTGATKELANQITDLNTQREALHEEIRLFEREMYSVDSQGWEKLAQFDLSDVQNEERLQIRLKIKGALRSIECARIDRNKNLFTLVYLDGLRQRLVIENNRGIRKGQIFVDLKTINDRQILESAGMVLHDHIDILIDEKAFYDGLPKEEDGPLSKFGI

SEQ ID NO: 3309 - protein, 547 aa, synthetic construct
MKLLVTYIRWSTKEQDSGDSLRRQTNLIDAFYSKHKNDYYLLPAHRYVDKGKSGFHQQHKNQGSDFRRMFENVMSGAIPEGSLIVVENFDRFSRADIDTAIDDVRQILRKGVSILTLGDGELYDKSALTDPVKLIKHIIIAERAHQESLVKQKRIAQVWNHKTQLARELKKPMGKQAPGWLELSEDGSHYIVDEDKASLVNIIYDKRLSGMSMFAICKWLNEQGYPTINQRKVRISKTKKPDGNWSALSVKHILTSRSVLGYLPAKVSSEDRKTVLREEIEGFYPQIVTDSKFYAVQQLLEETGKGKTSSGEHWLYVNILKGLIRCKCGLVMTPTGIRKPVYQGTYRCNGNKESRCSYGTVSRKLLDTQLCSRLFSKLSQLHDEATDTAKLDELQRRLNTVDSELEKLTETLIQLPNITQIQEALRAKQEEKDELIVQLSREKARVKSVSSLDLSGLDMESVEGRTEAQIIIKRLVKEIVVSGNEKLVDIYLHNGNMIRGFQIDGKDDHTLTLEEATDEMQSLDDMLIFGEPVTRIYPAGDMEEVDA

SEQ ID NO: 3310 - protein, 480 aa, synthetic construct
MTMHKVAIYVRVSTTSQVDEGYSIDEQKAKLTSYCEIKDWNVYDIYTDGGFSGSNTERPALEQLVRDAKRKLFDTVLVYKLDRLSRSQKDTLYLIEDVFLENDIEFVSLLENFDTSTPFGKAMIGLLSVFAQLEREQIKERMQLGKLGRAKSGKSMQWAKTSYGYDYVKETGTLSINPYQALIVRKMFQWYLSGMSITKLRDTLNDQYGQDKEWSYRTVRAILSNPVYCGYNQFKGQIFPGTHEAIISEEEYNKTQEEIKTRQRTAAQRFNPRPFQAKYMLSGIAQCGYCSAPLAIKLGMKRKDGTRLVKYECKQRHPRKTKGVTVYNNNEKCDSGFYFKDDIEHFVLTEISKLQTDSDYIDKLFSNTDKETIDRDSYQKQIDNLTAKISRLNDLYIDDRISLEELQKRSSDFMAERTALEKELDADSSIKTVERKKDIRRVLDTKDIFSLDYEQQKAIARALISKVRVTSETIVILWKL

SEQ ID NO: 3311 - protein, 559 aa, synthetic construct
MKTKLYSYIRFSSMRQNDGSSYERQIRMAREVAAKYDLELVNDYQDLGVSAFKGANSKTGALSRFLDAIGRSVPVGSWLFIENLDRLSRADIVSAQELFLSIIRRGITIVTGMDNKIYSLDTVTANPMDLMFSILLFIRGNEESQTKRNRTNSSALIKIKAHQENPQNPAVAIEEVGKNMWWTDTTSGYVLPHPTYFPVVQEIVELRKNGRSTAEILDHLNETYAPPPAVSNKKHSKWSRAMVERLFHTRALIGIKEVSVDGVNYELKDYYPRVIDDATFYHLKKNIGARAWNFGDKEEAKPIPLLSGIGLLKCDHCGCAMVKVKGTNKRSDQYRYTCDATRSRRLDCEHPNWSFRGDQLEKAVLQLLADKIWIAEDKANPVPALKVQVDEISRKIDNLIALSAMTGATKELADQITTLNSERETLYNQIKMAEEEMYSVDSQGWEKLAEFDLEDVYNEERLKVRFKIKQALKRIGCSRIDRNKNLFVLEYIDGKTQRVVIENSRGTRKGQIFVDLKTINDRQILESNGLVLHPCLDLLTDKNWKPEEEIPGPLQEFGI

SEQ ID NO: 3312 - protein, 559 aa, synthetic construct
MKTKLYSYIRFSSMRQSDGSSYERQIRMAREIAAKYDLELVNDYQDLGVSAFKGANSKTGALSRFLDAIGRSVPVGSWLFIENLDRLSRADIVSAQELFLSIIRRGITIVTGMDNKIYSLDTVTANPMDLMFSILLFIRGNEESQTKRNRTNSSALIKIKAHQENPQNPAVAIEEVGKNMWWTDTTSGYVLPHPVYFPVVQEIVELRKNGRSTAEILDHLNETYAPPPAVSNKKHSKWSRAMVERLFHTRALIGIKEISVDGVNYELNNYYPRVIDDPTFYHLKKNIGARAWNFGDKEEVKPIPLLSGIGLLKCDHCGCAMVKVKGTNKRSDQYRYTCDATRSRRLDCEHPNWSFRGDQLEKAVLQLLADKIWIAEDKANPVPALKVQVDEISRKIDNLIALSAMTGATKELADQITTLNSERETLYNQIKMAEEEMYSVDSQGWEKLAEFDLEDVYNEERLMVRFKIKQALKRIGCSRIDRNKNLFVLEYIDGKTQRVVIENSRGTRKGQIFVDLKTINDRQILESNGLVLHPCLDMLTDKNWKPEEEIPGPLQEFGI

SEQ ID NO: 3313 - protein, 559 aa, synthetic construct
MKTKLYSYIRFSSMRQSDGSSYERQIRMAREIAAKYDLELVNDYQDLGVSAFKGANSKTGALSRFLDAIGRSVPVGSWLFIENLDRLSRADIVSAQELFLSIIRRGITIVTGMDNKIYSLDTVTANPMDLMFSILLFIRGNEESQTKRNRTNSSALIKIKSHQENPQNPAVAIEEVGKNMWWTDTTSGYVLPHPVYFPVVQEIVELRKNGRSTAEILDHLNETYTPPPAVSNKKHSKWSRAMVERLFHTRALIGIKEVSVDGVNYELKDYYPRVIDDATFYHLKKNIGARAWNFGDKEEAKPIPLLSGIGLLKCDHCGCAMVKVKGTNKRSDQYRYTCDATRSRRLDCEHPNWSFRGDQLEKAVLQLLADKIWIAEDKANPVPALKVQVDEISRKIDNLIALSAMTGATKELADQITTLNSERETLYNQIKMAEEEMYSVDSQGWEKLAEFDLEDVYNEERLKVRFKIKQALKRIGCSRIDRNKNLFVLEYIDGKTQRVVIENSRGTRKGRIFIDLKTINDRQILESNGLVLHPCLDMLTDKNWKPEEEIPGPLQEFGI

SEQ ID NO: 3314 - protein, 506 aa, synthetic construct
MRSVITYLRFSSAIQGAEGADSTRRQNELFKQWLRKNSDAQVVASFSDEGLSGYKGKHLTGQFGDMLARIESGEFPEGTILLVESIDRIGRLEHLETEALMNRILGNGLEIHTLQDGLIYTKDALADDLGISIIQRVKAYIAHQESKQKSFRVSEKWKQRAKLALAGKQRLTKMVPGWIDPDTFKLNEHAETVRLIFKLLLSGESLHNIARHLQSNGIKSFSRRKDANGFSVHSVRTILRSETTIGTLPASQRNDRPAIPNYYEAAIDASTFNKAQEILGKNRIGRTPASDNPLTINIFKGLFRCQCGASVHPTGTKNKYQGVYRCNNHLDGRCDVPPLKRKPFDKWMIDNFLGMIDVGNDGEAEGKIASLQHEVEIVTTRIKKATALLLEMDDIDELKIQLKELNQKRTELQTTIDNMRRKASLTDKELPQLKDIDLTTKAGRVECQLILSKHLKGLTLGKDSVTVTLQNDTEITIPTNPLPLNDGSPIFEIADKELLDIDAYQL

SEQ ID NO: 3315 - protein, 507 aa, synthetic construct
MKRVISYIRFSSEKQAKGDSLRRQSKMVTDWLKAHPEYYLDESLTFRDLGVSGFTGKHLKGGLGDFLTAIEKGLVKAGDTLLIESLDRLSRQNVDRASELLRNILRSGVDVVTLSDGEHYTKESLRDPLSLIKSILIMQRSHEESLRKSERIQAAWNRKKELISEGIKISKRCPAWLKLNDDRKSFSVIPEKVETVKRCFQLRLEGKSIWEIVRTLNAEGHQTLNQYKAGSFGQTSVQDLLKNRSVIGYFTPKGCEEISGYYPSIIHETDFYKVQQLSYSRYGRKPASDKPMAVNLFKGVIRCSECGHALIITGFSDTRSGIYRCPLRNENRCSAKGLSRKQTDGTLLALLSRLDRFDSDMTNTIDTLKLHREHISSNIEKLVQLSLEIEDLSAITSKLKQLKNELSQVDADIEKETQRLKSIDVGCLSDCDLTTKAGRIEAQLIIKSAVKEVILNTAKRRCKVTFHNGKVIDLPITETPSEDVTEAIQSLSEVTERGLIDVDEVII

SEQ ID NO: 3316 - protein, 560 aa, synthetic construct
MKTKLYSYIRFSSMKQADGSSFERQKRTAKEIAAKYDLELVTSYQDFGVSAFKGANSKTGALSRFLDEIGRSVPVGSWLVVENLDRISRQSVIEAQELFLSIIRRGITIVTGMDGKVYSKESVNANPIDLLLSVMLFARANEESQTKRNRTNSSALLKVKAHQENPQNPAVAIEEVGRNIWWADTSSGYVLPHPVYFPVIKKIVELKQNGYSNGRILDYLNERISPPNYTTNKDTPKKWARSMLGRMFTNRALLGIKEITIEGVTYELNNYYPRVMEDAEFYQLKKTIGLRSFSYPTKSSPVITLLSGAGLLRCGHCGASMVKRSGASKERLAQYRYMCDGADSRRTNCDHPNWGFRGDQLDKAVLQLLADKIWIAEDKANPIPGMQAQIEDISRKIDNLISLSAMTGATKELADQITTLNHEREAIYNQIKVIEENMYSVDSQGWEKLAQFDLEDVCSEERLKVRLKIKEAVKSIKCYKIDTNYNHFVMEYIDGKTQRIVIERSRRNRKGRIFVDMKTINDRQILESNGLVLHPCLDMLTDKNWKPEEEIPGPLQEFGI

SEQ ID NO: 3317 - protein, 553 aa, synthetic construct
MAEKIKAFTYMRFSSTKQIGNSSIDRQDSALTRWLEAHKDVVVMDSYIDEAMSAWKGKHIENGSLGRLLKAIKDGLVPSGALILVEHFSRLSRMSQDETTDLIREIWDAGITIITVEDNAVYSPKDRDDLAKRLRLVVEIDKAYSDSKWRSTKVKESYVRREKKAKEGITPAMRRPFWLDKSGKLNENAEIIRDVFSLYLSGLGQMLILYNLRKKYPNNKTVKKLSPPTIIRWITNETIRGMWRGQKVYDHVVEDDVFFEAQKVHRKRLNENVKADRKWPLSGLIQCGYCDAGMSIQQTGNSLPVLRCSTRQRTNISKCKDAGMHTTFPYLVAHQYFFTRIRRHALKRYTSNSHLKDSNFELNEIAANLVKLKSQLIEEKSFYKALKDEGKSGRAALMLLSETDEEIERLENRQETLTQEMLNHESMNTSDEALELIDDPMNFNFAMHRLGIKLVVKDRIISFEDNLGFEFKGYCRKTKKYICHDLMKGEDFEIINPQDNEILLLNKQLRTAKSANIKRNKMRELKKNDPKGYRKHVKGVVKNFHDVLGTKKG

SEQ ID NO: 3318 - protein, 579 aa, synthetic construct
MSIAVIYTRVSSKAQVKKGDGLGSQERRCREFAAYKDHEVAEVFRDEGVSGGLVNRPGMKEMMTWLRKNRAAEPVVLIDDISRLARDTEVHRKLRSALGSVGATLESPSIEFGDDADSILFENIVASMAQHHRQKNGEQVIHRMKARLMNGYFAFWGPTGYTYARVKGHNGKLMVRDEPHASLIQEALEGFATGRFQTQSEVKRFLEPHPIFTRDSKGEIHPQRIKNLLTNKIYAGYYEYKPWDVSLTKGKHEALITWEVFQRIQERLSTKAYAAARVDAAEEFPLRGFVTCDCCGHQLTAYWAKGRNKRYPYYECFNKQCDERRKSIRKDVLEDAFEKLIQQMRPSAGMMTTVSAMFRDIWDHRIQGYEEKRGEQKRALTGINTTISKLTDRLIETTSSSAIQAYETKLEKLEAEKVLISENLVQKQDHCQDFDKSFRTALNFLVNPWNLWSSPNPDNRKTLLKLVFAAPLPYARNRGFRTAKTTSPFNVLGALADGEKVMAGRQGFEPWEGVNPQKFSRLPHSTTLPPPRSKRGLGCVIGTGKQKTTLFENASKGISCRALSDGLFMTLTTRYGTVN

SEQ ID NO: 3319 - protein, 568 aa, synthetic construct
MPSKAISYIRFSSSIQKQGDSLRRQTELIENWLLHNPKINLSDIQYKDLGLSGYHGDHLEHGFGKLLAAIKNSYINAGDYLLVEDIDRLGRMEATKLLPLLLEILAAGVIIETLGDGQTYTKESMNSAQLYILVGKIQGAHSHSDKLSKRIKASWVTKRKNAEEGKGVNRKSYWYITEDDEGKFTRITPQNKALVTKIFVMFQSGVSQNKIVQFLKENDPVRFKTYSPTALKKLLLNKTAIGYWDDIPNVYEPVIEEQLFYSVQNIFKERAEKSGGYKKGEGAKKGVAQGRKSNHIMAGLVVCKRCGKNYSVKNQKNHSAPIMYCSNPNKENCDNRKTIPIAILNEFRMRTQEAYIKKILDSKIDNDNQKLVVALDGQIDTKSKSIENLIDLVVSGSSFAAEKVTKLEAELKQLKLERVGLVQTETSTANIENLKMAGLDMSKDPLILNAMLKQVGYKIAAEVKTMYLDNDQMEYITYVKPKKCPLREENNKQIIAAMANDPDWDPKSISPKGKYRVSFNGVTEDIVIPNDDKLTLEEKAHEYTGVFDEQASELDAVFDELKREFSGK

SEQ ID NO: 3320 - protein, 506 aa, synthetic construct
MRSVITYLRYSSAIQGAEGADSTRRQNDLFRQWLKKNIDAQVVASFSDEGLSGYKGKHLSGQFGDMLSRIESGEFPEGTILLVESIDRIGRLEHLETEALMNRILGNGIEIHTLQDGLVYTKDALADDLGISIIQRVKAYIAHQESKQKSFRVSQKWKQRAKLALAGEQRLTKMVPGWIDPDTFKLNEHAETVRLIFKLLLSGESLHNIARHLQSNGIKSFSRRKDANGFSVHSVRTILRSETTIGTLPASQRNDRPAIPNYYECVVDMPTFNKAQEILDKNRKGRTPASDNPLTINIFKGLFRCQCGASVHPTGTKNKYAGVYRCNNHLDGRCDVQPLKRKPFDRWMIDNFLGMIDVGNDGESERKVAALQHEVEIVTSRIKKATALLLEMDDITELKAQVKELNQKRTELQTTINTMKRKTSLSDKGLPQLKDIDLMTKAGRVECQLILSKHLKGLTLGKGSVTVTLQNDTEIIVPTDPLPLNDGTSIFEIAEKELLDIDAYRL

SEQ ID NO: 3321 - protein, 330 aa, synthetic construct
MRRAISYIRFSSERQLKGDSVRRQSKLVTDWLDKNPEFYLDSSLSFKDLGKSAFSGKHLKGGLGDFLTAIEKGLVKAGDTLLIESLDRLSRQDIDIASELLRRILRAGVDVVTLSDGEHYTRESLKDPLSLIKSILIMQRAHEESLRKSERVQAAWNRKKELISEGIKVSRRCPAWLRLNDDRRTFTIIPDKVEVVKRAFDLRLQGLSFWAITRTLNDEGHLSLNQYTPKQKGWSDTAVKKLLRNRAVIGCFTPAGREEVQGYYPAIISESLFYRVQQLNTGQYGRASVSSNPLSVNLFRGIIKCSECGATIVLGGYALKRFGMYRCPNR

SEQ ID NO: 3322 - protein, 507 aa, synthetic construct
MKRVISYIRFSSERQAKGDSLRRQSKMVNDWLKAHPEYYLDQDLSFRDLGVSGFTGKHLKGGLGDFLTAIEKGLVKAGDTLLIESLDRLSRQAVDRASELLRNILRSGVDVVTLSDGEHYTRESLRDPLSLIKSILIMQRSHEESLRKSERIQAAWDAKKEAAKAGIKVSKRCPAWLRLNDDRKSFSVIPDKVETVKRCFQLRLEGKSIWEIVRTLNAEGHRSMNQYKPGKFGQTSVQDLLKNRSVIGYFTPKGCEEIAGYYPSVIDETTFYKVQQLSHSRYGRKPASAKPLSVNLFKGVIRCSECGHALIITGFSDTRNGIYRCPLRNENRCSAKGLSRKQTDGTLLTLLSRLDRFDSDMTNTIDTLKLHREHISSNIEKLVQLSLEIEDLNAITNKLKQLKNELSQVDADIEKETQRLKSIDTGSLSDCDLSTKAGRIEAQLIIKSAVKEVVLNTAKRRCKVTFHNGKSITLPITENPSEDVTEAIQSLSEVTERGLIDVDVVEI

SEQ ID NO: 3323 - protein, 506 aa, synthetic construct
MRSVITYLRYSSAIQGAEGADSTRRQNDLFKQWLKKNSDAQVVASFSDEGLSGYKGKHLSGQFGDMLSRIESGEFPEGTVLLVESIDRIGRLEHLETEALMNRILGNGLEIHTLQDGLIYTKDALADDLGISIIQRVKSYIAHQESKQKSFRVSQKWEQRAKLALAGEQRLTKMVPGWIDPDTFKLNEHAETVRLIFKLLLDGESLHNIARHLQSNGIKSFSRRKDANGFSVHSVRTVLRSVSAIGTLPASQRNDRPAIPNYYEAAIDAATFNKAQEILDKNRKGRTPASDNPLTINIFKGLFRCQCGASVHPTGTKNKYAGVYRCNNHLDGRCDVPPLKRKPFDKWVLENFLGMIDVGNDGESERKIAALQHEVEIVTARIKKATALLLEMDDIDELKIQLKELNQKRTELQTTIDSMRRKASLTDKELPQLKDIDLTTKAGRVECQLILSKHLKGLTLGKDSVTVTLQNDTEITIPTNPLPLNDGSPIFEIADKELLDIDAYQL

SEQ ID NO: 3324 - protein, 507 aa, synthetic construct
MKRAISYIRFSSEKQSRGDSLRRQAKMVNDWLKAHPEYYLDESLTFRDLGVSGFTGKHLKGGLGDFLTAIEKGLVKAGDTLLIESLDRLSRQNVDRASELLRNILRSGVDVVTLSDGEHYTRESLKDPLALIKSILIMQRSHEESLRKSERIQAAWNRKKELISEGIKISKRCPAWLKLNDDRKSFSVIPEKVETVKRCFQLRLEGKSIWEIVRTLNDEGHQTLNQYKAGKFGQTSVQDLLKNRSVIGYFTPKGCCEIAGYYPSIIPESDFYKVQQLSYARGGRKPASGKPLSVNLFKGVIRCSECGHALIITGFSDTRNGIYRCPLRNENRCNAKGLSRKQTDGTLLALLSRIDRFDSDMTNTIDTLKLHREHISSNIEKLVQLSLEIEDLSAITSKLKQLKGELSQVDADIEKETQRLKSIDVGCLSDCDLTTKAGRIEAQLIIKSAVKEVVLNTAKRRCKVTFHNGKVIDLPITEDPSEDVTEAIQSLSEVTERGLIDVDEVII

SEQ ID NO: 3325 - protein, 559 aa, synthetic construct
MKTKLYSYIRFSSMRQSDGSSYERQIRMAREIAAKYDLELVNDYQDLGVSAFKGANSKTGALSRFLDAIGRSVPVGSWLFIENLDRLSRADIVSAQELFLSIIRRGITIVTGMDNKIYSLDTVTANPMDLMFSILLFIRGNEESQTKRNRTNSSALIKIKSHQENPQNPAVAIEEVGKNMWWTDTTSGYVLPHPVYFPVVQEIVELRKNGRSTAEILDHLNETYAPPPAVSNKKHSKWSRAMVERLFHTRALIGIKEVSVDGVNYELKDYYPRVIDDATFYHLKKNIGARAWNFGDKEEAKPIPLLSGIGLLKCDHCGCAMVKVKGTNKRSDQYRYTCDATRSRRLDCEHPNWSFRGDQLEKAVLQLLADKIWIAEDKANPVPALKVQVDEISRKIDNLIALSAMTGATKELADQITTLNSERETLYNQIKMAEEEMYSVDSQGWEKLAEFDLEDVYNEERLKVRFKIKQALKRIGCSRIDRNKNLFVLEYIDGKTQRVVIENSRGTRKGRIFIDLKTINDRQILESNGLVLHPCLDMLTDKNWKPEEEIPGPLQEFGI

SEQ ID NO: 3326 - protein, 559 aa, synthetic construct
MKTKLYSYIRFSSMRQNDGSSYERQIRMAREVAAKYDLELVNDYQDLGVSAFKGVNSKTGALSRFLDSIGRSVPVGSWLFIENLDRLSRADIVSAQELFLSIIRRGITIVTGMDNKIYSLDTVTANPMDLMFSILLFIRGNEESQTKRNRTNSSALIKIKAHQENPQNPAVAIEEVGKNMWWTDTTSGYVCPDPVYFPIVKEIVELRKNGRSTSEILNYLNETYTPPPAVSNKKHSKWPRAMIGRLFHTRALIGIKEVSVDGVNYELKDYYPRVIDDATFYHLKKNIGARAWNFGDKEEVKPIPLLSGIGLLKCEHCSSAMIKVKGTNKRADQYRYSCEGIRSHRFDCEHPNWSFRGDQLEKAVLQLLADKIWIAEDKANPVPALKVRIDEISRKIDNLINLSAMTGATKELADQITALNNERESLYNQIKIAEEEMYSVDSQGWEKLAEFDLSDVYNEDRIKVRFKIKQALKRIGCSRIDRNKNLFVLEYVDGKTQRVVIENSRGTRKGRIFIDLKTINDRQILESNGLVLHPCLDMLTDKNWKPEEEIPGPLQEFGI

SEQ ID NO: 3327 - protein, 507 aa, synthetic construct
MKRAISYIRFSSEKQSRGDSLRRQSKMVTDWLKAHPEYHLDQDLSFRDLGVSGFTGKHLQGGLGDFLTAIEKGLVKAGDTLLIESLDRLSRQNVDRASELLRNILRSGVDVVTLSDGEHYTRESLRDSLALIKSILIMQRAHEESLRKAERIQAAWDAKKEAAKAGIKISKRCPAWLKLNDDRKSFSIIPEKVETVKRCFQLRLEGKSIWAIVKALNDEGHQTLNQYKAGKFGQTSVQDLLKNRSVIGYFTPKGCEEIAGYYPAIIDETTFYKVQQLSHSRYGKRSVSDKPLSVNLFKGVIRCSECGHALIITGFSDTRNGIYRCPLRNENRCSAKGLSRKQTDGTLLTLLSRLDRFDSDTTNTIDTLKLHREHISSNIEKLVQLSLEIEDLSAITSKLKQLKGELSQVDADIEKETQRLKSIDVGCLSDCDLTTKAGRIEAQLIIKSAVKEVVLNTAKRRCKVTFHNGKVIDLPITENPSEDVTEAIQSLSEVTERGLIDVDEVII

SEQ ID NO: 3328 - protein, 559 aa, synthetic construct
MKTKLYSYIRFSSMRQNDGSSYERQIRMAREVAAKYDLELVNDYQDLGVSAFKGANSKTGALSRFLDAIGRSVPVGSWLFIENLDRLSRADIVSAQELFLSIIRRGITIVTGMDNKIYSLDTVTANPMDLMFSILLFIRGNEESQTKRNRTNSSALIKIKAHQENPQNPAVAIEEVGKNMWWTDTTSGYVLPHPVYFPVVQEIVELRKNGRSTAEILDHLNETYAPPPAVSNKKHSKWSRAMVERLFHTRALIGIKEISVDGVNYELKDYYPRVIDDPTFYHLKKNIGARAWNFGDKEEVKPIPLLSGIGLLKCDHCGCAMVKVKGTNKRSDQYRYTCDATRSRRLDCEHPNWSFRGDQLEKAVLQLLADKIWIAEDKANPVPALKVQIDEISRKIDNLITLSAMTGATKELADQITTLNSERETLYNQIKMAEEEMYSVDSQGWEKLAEFDLEDVYNEERLKVRFKIKQALRRIGCSRIDRNKNLFVLEYIDGKTQRVVIENSRGTRKGRIFIDLKTINDRQILESNGLVLHPCLDMLTDKNWKPEEEIPGPLQEFGI

SEQ ID NO: 3329 - protein, 506 aa, synthetic construct
MRSVITYLRFSSAIQGAEGADSTRRQNDLFKQWLKKNSDAQVVASFSDEGLSGYKGKHLTGQFGDMLARIESGEFSEGTVLLVEAIDRIGRLEHLETEALMNRIIAHGIEIHTLQDGLIYTRDALSDDLGISIIQRVKSYVAHQESKQKSFRVSQKWKQRAKLALAGEQRLTKMVPGWIDPDTFKCNKHAETVRLIFKLLLDGESLHNIARHLQANNISSFSRRKDANGFSVHSVRTILRSETTIGTLPASQRNDRPAIPNYYEAAIDASTFNKAQEILDKNRKGRTPASDNPLTINIFKGLFRCQCGASVHPTGTKNKYQGVYRCNNHLDGRCDVPPLKRKPFDKWMIDNFLGMIDVGNDGEAEGKIASLQHEVEIVTTRIKKATALLLEMDDITELKAQVKELNQKRTELQTTIDSMRRKTSLSDKGLPQLKDIDLMTKAGRVECQLILSKHLKGLTLGKDSVTVTLQNDTEITIPTNPLPLNDGTSIFEIAEKELLEIDAYQL

SEQ ID NO: 3330 - protein, 547 aa, synthetic construct
MKLLVTYIRWSTKEQDSGDSLRRQTNLIDAFYSKHKEEYYLLPAHRYVDKGKSGFHQQHKNQGSDFRRMFENVMSGVIPEGSLIVVENFDRFSRADIDTAIDDVRQILRKGVSILTLGDGELYDKSALTDPVKLIKHIIIAERAHQESLVKQKRIAQVWNHKTQLARELKKPMGKQAPGWLELSEDGSHYIVDEDKASLVNIIYDKRLSGMSMFAICKWLNEQGYPTINQRKVRISKTKKPDGNWSALSVKHILTSRSVLGYLPAKISTEDRKTVLREEIESFYPQIVTDSKFYAVQQLLEETGKGKTSSGEHWLYVNILKGLIRCKCGLVMTPTGIRKPVYQGTYRCNGNKESRCSYGTVSRKLLDTQLCSRLFSKLSQLHDEATDTAKLDELQRRLNTVDGELEKLTETLIQLPNITQIQEALRVKQEEKDELIVQLSREKARVKSVSSLDLSGLDMESVEGRTEAQIIIKRLVKEIVVSGNEKLVDIYLHNGNMIRGFPLDGKDDHTLTLEEATDEMQSLDDMLIFGEPVTRIYPAGDMEEVDA

SEQ ID NO: 3331 - protein, 506 aa, synthetic construct
MRTAITYLRYSSAIQGAEGADSTRRQNDLFKQWLKKNSDAQIVASFSDEGLSGYKGKHLTGQFGDMLARIEAGEFPAGTILLVESIDRIGRLEHLETEALMNRILCNGIEIHTLQDGLVYTKDALADDLGISIIQRVKAYIAHQESKQKSFRVSQKWGQRAKLALAGKQRLTKMVPGWIDPETFKLNEHAETVRLIFKLLLDGESLHNIARHLQANNISSFSRRKDANGFSVHSVRTVLRSESVIGTLPASQRNDRPAIPNYYEAAIDAATFNKAQEILDKNRKGRTPASDNPLTINIFKGLFRCQCGASVHPTGTKNKYAGVYRCNNHLDGRCDVPPLKRKPFDKWVLENFLGMIDVGNDGESERKIAALQHEVEIVTARIKKATALLLEMDDIDELKIQLKELNQRRTELQTTIDSMRRKTSLTDKELPQLKDIDLTTKAGRVECQLILSKHLKGLTLGKGSVTITLQNDTEITIPTNPLPLNDGSPIFEIADKELLDIDAYQL

SEQ ID NO: 3332 - protein, 506 aa, synthetic construct
MRHVITYLRYSSAIQGAEGADSTRRQNDLFKQWLKKNSDAQVVASFNDEGLSGYKGKHLSGQFGDMLSRIESGEFSEGTVLLVEAIDRIGRLEHLETEALMNRILGNGIEIHTLQDGLIYTKDALSDDLGISIIQRVKSYIAHQESKQKSFRVSQKWEQRAKLALAGEQRLTRNVPGWIDPDTFKCNEHAETVRLIFKLLLDGESLHNIARHLQSNDIKSFSRRKDANGFSVHSVRTVLRSESVIGTLPASQRNDRPAIPNYYEAAIDASTFNKAQEILGKNRIGRTPASDNPLTINIFKGLFRCQCGASVHPTGTKNKYAGVYRCNNHLDGRCDVPPLKRKPFDKWMIDNFLGMIDVGNDGEAEGKIASLQHEVEIVTTRIKKATALLLEMDDITELKTQLKELNQKRTELQTTIDSMRRKTSLSDKGLPQLKDIDLMTKEGRVECQLILSKHLKGLTLGKDSVTVTLQNDTEITIPTNPLPLNDGSPIFEIADKELLDIDAYQL

SEQ ID NO: 3333 - protein, 507 aa, synthetic construct
MKRVISYIRFSSEKQAKGDSLRRQSKMVTDWLKAHPEYYLDQDLSFRDLGVSGFTGKHLKGGLGDFLTAIEKGLVKAGDTLLIESLDRLSRQDVDQASELLRNILRSGVDVVTLSDGEHYTRESLRDPLALIKSILIMQRAHEESLRKAERIQAAWDAKKEAAKAGIKVSKRCPAWLKLNDDRKSFSVIPEKVETVKRCFQLRLEGKSIWEIVRTLNDEGHQSMSQYKPGSFGQSSVQDLLKNRSVIGYFTPKGREEIAGYFPPIIPETDFYKVQQLSYSRYGRKPASDKPLSVNLFKGVIRCSECGHALIITGFSDTRNGIYRCPLRNENRCSAKGLSRKQTDGTLLALLSRLDRFDSDTTNIIDMLRLHREHVSSNIEKLVQLSLEIEDLNAITSKLKQLKGELSQVDADIEKETQRLKSIDVGCLSDCDLTTKAGRIEAQLIIKSAVKEVVLNTARRRCKVTFHNGKVIDLPITENPSEDVTEAIQSLSEVTAKGLIDVDVVEI

SEQ ID NO: 3334 - protein, 507 aa, synthetic construct
MKRVISYIRFSSEKQAKGDSLRRQSKMVTDWLKAHPEYYLDQDLSFRDLGVSGFTGKHLKGGLGDFLTAIEKGLVKAGDTLLIESLDRLSRQDIDIASELLRRILRAGVDIVTLSDGEHYTKESLKDPLSLIKSILIMQRAHEESLRKSERIQAAWNRKKELISEGIKVSRRCPAWLRLNDDRKSFSVIPDKVETVKRCFQLRLEGKSIWEIVRTLNAEGHRSMNQYKPGKFGQTSVQDLLKNRSVIGYFTPKGCEEIAGYYPSVIDETTFYKVQQLSHSRYGRRSVSGKPLSVNLFRGVIRCSECGHALIITGFSDTRSGIYRCPLRNENRCSAKGLSRKQTDGTLLALLSRLDRFDSDTTNTIDTLKLHREHISSNIEKLVQLSLEIEDLNAITSKLKQLKNELSQVDADIEKETQRLKSIDVGCLSDCDLTTKAGRIEAQLIIKSAVKEVVLNTAKRRCKVTFHNGRLIDLPITENPSEDVTEAIQSLSEVTERGLIDVDVVEI

SEQ ID NO: 3335 - protein, 507 aa, synthetic construct
MKRAISYIRFSSEKQSRGDSLRRQSKMVNDWLKAHPEYYLDQDLSFRDLGVSGFTGKHLKGGLGDFLTAIEKGLVKAGDTLLIESLDRLSRQNVDRASELLRNILRSGVDVVTLSDGEHYTRESLKDPLALIKSILIMQRSHEESLRKSERIQAAWNRKKELISEGIKISKRCPAWLRLNDDRKSFSVIPEKVETVKRCFQLRLEGKSIWEIVRTLNDEGHQTLHQHRAGKFGQTSVQDLLKNRSVIGYFTPKGCEEISGYYPAIIDETTFYKVQQLSYARYGRKPASDKPMAVNLFKGVIRCSECGHALIITGFSDTRNGIYRCPLRNENRCSAKGLSRKQTDGTLLALLSRLDRFDSDMTNTIDTLKLHREHISSNIEKLVQLSLEIEDLSAITSKLRQLKNELSQVDADIEKETQRLKSIDVGCLSDCDLTTKAGRIEAQLIIKSAVKEVVLNTAKRRCKVTFHNGKAITLPITENPSEDVTEAIQSLSEVTEKGLIDVDEVII

SEQ ID NO: 3336 - protein, 509 aa, synthetic construct
MRRAISYIRFSSERQLKGDSVRRQSKLVTDWLDKNPEFYLDSSLSFKDLGKSAFSGKHLKGGLGDFLTAIEKGLVKAGDTLLIESLDRLSRQDIDIASELLRRILRAGVDVVTLSDGEHYTRESLKDPLSLIKSILIMQRAHEESLRKSERVQAAWNRKKELISEGIKVSRRCPAWLRLNDDRRTFTIIPDKVEVVKRAFDLRLQGLSFWAITRTLNDEGHLSLNQYTPKQKGWSDTAVKKLLRNRAVIGCFTPAGREEVQGYYPAIISESLFYRVQQLNTGQYGRASVSSNPLSVNLFRGIIKCSECGATIVLGGYALKRFGMYRCPNRSANRCSAKAISRKQTDATILYMLALCDRFETENTGTIDSLKLQREDLQRKISKMAELAIELDDMTIITEKLRDMKNALSKLNHDIEEETKRIKAITTGSLKDIDRTTKEGMIETQLLIKGVLKEIVIDAAKRRCKVTFHNGKSIDLPITENPSEDVTEAIQSLSEVTERGLIDVDEVII

SEQ ID NO: 3337 - protein, 547 aa, synthetic construct
MKLLVTYIRWSTKEQDSGDSLRRQTNLIDAFYAKHKDDYYLLPAHRYVDKGKSGFHQQHKNQGSDFRRMFENVMSGAIPEGSLIVVENFDRFSRADIDTAIDDVRQILRKGVSILTLGDGELYDKSALTDPVKLIKHIIIAERAHQESLVKQKRIAQVWNHKTQLARELKKPMGKQAPGWLELSEDGSHYIVDEDKASLVNIIYDKRLSGMSMFAICKWLNEQGYPTINQRKVRISKTKKPDGNWSALSVKHILTSRSVLGYLPAKISTEDRKTVLREEIESFYPQIVTDSKFYAVQQLLEETGKGKTSSGDHWLYVNILKGLIRCKCGLVMTPTGIRKPVYQGTYRCNGNKESRCSYGTVSRKLLDTQLCSRLFSKLSQLHDEATDTAKLDELQRRLNTVDSELEKLTETLIQLPNITQIQEALRVKQEEKDELIVQLSREKARVKSVSSLDLSGLDMESVEGRTEAQIIIKRLVKEIVVSGNKKLVDIYLHNGNMIRGFPLDGKDDHTLTLEEATDEMQSLDDMLIFGEPVTRIYPAGDMEEVDA

SEQ ID NO: 3338 - protein, 547 aa, synthetic construct
MKLLVTYIRWSTKEQDSGDSLRRQTNLIDAFYAKHKDDYYLLPAHRYVDKGKSGFHQQHKNQGSDFRRMFENVMSGVIPEGSLIVVENFDRFSRADIDTAIDDVRQILRKGVSILTLGDGELYDKSALTDPVKLIKHIIIAERAHQESLVKQKRIAQVWNHKTQLARELKKPMGKQAPGWLELSEDGSHYIVDEDKASLVNIIYDKRLSGMSMFAICKWLNEQGYPTINQRKVRISKTKKPDGNWSALSVKHILTSRSVLGYLPAKISTEDRKTVLREEIESFYPQIVTDSKFYAVQQLLEETGKGKTSSGEHWLYVNILKGLIRCKCGLVMTPTGIRKPVYQGTYRCNGNKESRCNYGTVSRKLLDTQLCSRLFSKLSQLHDEATDTAKLDELQRRLNTVDSELEKLTETLIQLPNITQIQEALRVKQEEKDELIVQLSREKARVKSVSSLDLSGLDMESVEGRTEAQIIIKRLVKEIVVSGNEKLVDIYLHNGNMIRGFPLDGKDDHTLTLEEATDEMQSLDDMLIFGEPVTRIYPAGDMEEVDA

SEQ ID NO: 3339 - protein, 507 aa, synthetic construct
MKRVISYIRFSSERQAKGDSLRRQSKMVNDWLKAHPEYYLDQDLSFRDLGVSGFTGKHLKGGLGDFLTAIEKGLVKAGDTLLIESLDRLSRQDIDIASELLRRILRAGVDVVTLSDGEHYTKESLKDPLALIKSILIMQRAHEESLRKAERIQAAWDAKKEAAKAGIKISRRCPAWLKLNDDRKSFSVIPEKVETVKRCFQLRLEGKSIWEIVRTLNAEGHRSMNQYKPGKFGQTSVQDLLKNRSVIGYFTPKGCEEISGYYPAIIDETTFYKVQQLSHSRYGKRSVSDKPLSVNLFKGVIRCSECGHALIITGFSDTRNGIYRCPLRNENRCNAKGLSRKQTDGTLLALLSRLDRFDSDMTNVIDALKLHREHISNNIEKLVQLSLEIEDLSAITIKLKQLKGELSQVDADIEKETQRLKSIDVGCLSDCDLTTKAGRIEAQLIIKSAVKEVVLNAAKRRCKVTFHNSKSITLPITENPSDNVTEAIQSLSEVTERGLIDVDEVII

SEQ ID NO: 3340 - protein, 506 aa, synthetic construct
MRSVITYLRFSSAIQGAEGADSTRRQNDLFKQWLRKNSDAQVVASFSDEGLSGYKGKHLTGQFGDMLARIESGEFAEGTVLLVEAIDRIGRLEHLETEALMNRIIAHGIEIHTLQDGLIYTRDALSDDLGISIIQRVKSYVAHQESKQKSFRVSQKWKQRAKLALAGEQRLTKMVPGWIDPDTFKCNEHAETVRLIFKLLLDGESLHNIARHLQANNISSFSRRKDANGFSVHSVRTILRSETTIGTLPASQRNDRPAIPNYYEAAIDVSTFNKAQEILDKNRKGRTPASDNPLTINIFKGLFRCQCGASVHPTGTKNKYQGVYRCNSHLDGRCDVPPLKRKPFDRWMIDNFLGMIDVGNDGEAEKEIASLQHEVETVTARIKKATALLLEMDDITELKTQVKELNQKRTELQTTINTMKRKTSLSDKGLPQLKDIDLMTKAGRVECQLILSKHLKGLTLGKDSVIVTLQNDTEITIPTNPLPLNDGTSIFEIAEKELLEIDAYQL

SEQ ID NO: 3341 - protein, 508 aa, synthetic construct
MKKAIAYMRFSSPGQMSGDSLNRQRRLIAEWLKVNSDYYLDTITYEDLGLSAFKGKHAQSGAFSEFLDAIEHGYILPGTTLLVESLDRLSREKVGEAIERLKLILNHGIDVITLCDNTVYNIDSLNEPYSLIKAILIAQRANEESEIKSSRVKLSWKKKRQDALESGTIMTASCPRWLSLDDKRTAFVPDPDRVKTIELIFKLRMERRSLNAIAKYLNDHAVKNFSGKESAWGPSVIEKLLANKALIGICVPSYRARGKGISEIAGYYPRVISDDLFYAVQEIRLAPFGISNSSKNPMLINLLRTVMKCEACGNTMIVHAVSGSLHGYYVCPMRRLHRCDRPSIKRDLVDYNIINELLFNCSKIQPVENKKDANETLELKIIELQMKINNLIVALSVAPEVTAIAEKIRLLDKELRRASVSLKTLKSKGVNSFSDFYAIDLTSKNGRELCRTLAYKTFEKIIINTDNETCDIYFMNGIVFKHYPLMKVISAQQAISALKYMVDGEIYF

SEQ ID NO: 3342 - protein, 523 aa, synthetic construct
MAVRRNVTVIPAIKRVGNNKNSESKPKIRVAAYCRVSTDSEEQASSYDIQIEHYTNYIKKNKEWELAGIFADDGITGTNTKKRDEFNRMIEECMAGKIDMIITKSISRFARNTLDCLKYIRQLKDKNIAVFFEKENINTMDSKGEIMLTIMASLAQQESQSLSQNVKLGIQYRYQQGEVQVNHKRFLGYTKDENKQLVIDPEGAEVVKRIYREYLEGASLLQISRGLEADGILTAAGKAKWRPETLKKILQNEKYIGDALLQKTYTVDFLSKKRVKNNGIVPQYYVENSHEPIIPRELFMQVQEEMVRRANLRGRKGGKKRVYSSKYALSSIVYCGHCGDIYRRVHWNNRGYKSIVWRCVSRLEEKGSECTAPTINEETLQTAVVKAINELLANKEPFLSTLQKNIATVFNEENDNATDDIEGKLEELQQQLLIQAKSKNDYEDVADEIYRLRELKQNALAENAEREGKRQRIAEMTDFLNEQSCELEEYDEQLVRRLIEKVTVFDDKLTVEFKSGVEIDIEI

SEQ ID NO: 3343 - protein, 571 aa, synthetic construct
MKKVVAIYSRKSKFTGKGDSIENQVEMCKEYIHKNFGTDIEFKIYEDEGFSGGTLDRPRFKKLMNDVQNKKIDILVCYRLDRISRNVADFSSTLELLQSNNCDFISIREQFDTSSPMGRAMIYIASVFAQLERETIAERVKDNMLEMAKNGRWTGGKIPLGFTSKKIVTTDESGLTREMPQLIIDENEMNIVKLLYEKYVELGSLHKLECYATENQIKSRTGIMFEKSTLKIILQNPIYVKANYEVIEYLSNNSWTVYGEPDNVHSLLTYNKTEQSKKNGKITKVNKPVDERIAALSSIKGFIEPELWLSVQKQFEENKDKFPRLGKTNNALLVGKLKCGKCGEYMLVQHGRVSKNGEKLFYYNCSLKRKSHKTLCDNGNAKASHVENLVLLTLKQIGLKKDEFLREFEKQHNASPKNKDIKLEKLSLEKALQTKKGQIDNLVTTLSLAEDISSILIEKIQKLKLECVEIQNKIDNIELTVATSKVEMFNYQIIEQLLDQCANIENLSRDEQKIIIDGLIDEIYWFGNGRGDGDIKIKIVGSNDDGNIIEFNDDELGHAMLQNSSHSMSSI

SEQ ID NO: 3344 - protein, 517 aa, synthetic construct
MLEEGQKLKCALYVRTSTTEQKDSLELQARYKNNNFDIDKIYSEEVSGRDILKRPEQIKLLNDCGIEVTSVQKQAVFITNDKKPLYDCIIVSNTSRWGRNVVQVKQIVEALHKKGVKLWFDDLGKFSDSKDLSLTLDMLFVLDENYSQTISQKVKSAMDKRKKEGYILANSRLIGYDRTEEGTLVKNKDSNMVKSIFEDYAYKNLAIRKIAEKYQLSTSTITTLLKNIKYAGFMAYGIKEHGWNFSKLEIVKSDKIEPIISKELFWKVQEVRRSRSRIAEGSRVTRNKIGVNNNTYSLSSKIVCTNCGKNFHRKDRGYWICGTHSKYPKKCPMPTVRENKILRYLKSPYGLKAIRNGLETTLEGELKKLQLESIEPIKNELAELKGKSSKLLDLYMDSLIDKTTFEKRNKLLKDNIEKLENELKIYSNKENYRIKLLELQKEAKSLLDEYEKILESSEPEKIFDRVSKIEVGKIMDIKKGKEVSYIKSVRFKDFKILEDHKLFDELIREEDTIRVGK

SEQ ID NO: 3345 - protein, 565 aa, synthetic construct
MGFKKLVNDIKVEKRRKLIAIYCRVSTEEQSENGYSIDEQERLLEEWCKKMGYVIYKCYSDRGISGKNIKDRPALKELLSDAKAGKFDMVISWKINRVSRKLEDVLKIVNLLEKNNITFKSYSEPFETDTPAGRMQFQMMALIGEFERGTIAQNVKMGMIAKAKSGNWCGGRVLGYDLVPNNSPEEEKKGKNKLKINEKEAEIVRFIFNEYSKGKGYKAITNQINKLGYKTKKGNDFSVGSIRDILTNPVYIGEIRYNVRQNWSEKRRRNINPNPIRVKGKHEAIIDRELWDKVQLILESKKGKPSRIYDGEYPLTGILRCPKCGAGMVISRTTNTLADGSKKRIAYYCCGNWKNKGTSVCNSNTIRVDKANEYVFKKIEELVSNEAMIKAVVKNINKERKDKVKPAKRLLGDIDKELEKLDKRKRKIFEAYEDDILTKAEFQIRKDELNEKIRILEEEKKPLLNTISEDVSEEIPYEFIKDILMNFSKILNSSVSREQQKKLLHMIISEITMNESREIESIKLNINDKLVEYLVKEGGVPIKGIPSSFMLINVGLKVLNLDVVI

SEQ ID NO: 3346 - protein, 413 aa, synthetic construct
MPRKVIKIQPLIAKVPNKKRVAAYARVSNGKETMIHSLSAQVSYYSGFIQKNRSWKYVGVYADEALTGTKEQRPEFQRLLRDCRRGKVDMVITKSISRLARNTVMMLEVVRELKELNVDVYFEKENIHSLSGDGELMLTILASFAQEESRSVSENCKWRIRNNFKDGIPNTFQVYGYNIYKGKMQINPKEAKVVIMIFNAYLEGMGRLAIAKKLNSMGIKTRNNKQWDSSKIKEILNNEKYAGDLLLQKKYIADHLEKKTCLNDGILPKYYVSNNHDAIIDRDTFNKVQKEIEKRKKKYKVGKTTTNKYPFTSIIRCGKCGKYYHRKINNAGTKYQKEVWICSTYNSFGKEKCSSKQIPENILMSLATEVLELKQFDEGIFKNKIKEIQVLKENLVMFIFNDGTKVKKEWSYK

SEQ ID NO: 3347 - protein, 529 aa, synthetic construct
MSTARAVTVIPPIVGRFAPGTTRTVTLKRVAAYARVSTDNDEQLSSYEAQVDYYTRQIKSNPVWSFVNVYSDEGISATSTKKREGFNRMIKDALGGKIDLIITKSVSRFARNTVDTLTTVRKLKEKGVEVYFEKENIYTLDSKGELLITIMSSLAQEESRSISENVTWGRRKRFADGKVSLPYKQFLGYEKGEDGLPKIVEKEAKVVRKIYKLFLEGKTPSGIAKHLTTNKIPTPAGKEVWQHSTVKSILQNEKYKGDALLQKSYTVDFLTKKKKINEGEVPQYYVENSHPAIIEPETFDLVQLEMKKRKEAKGYKTGGSCFSGKIICEECGSFYGRKVWHSNSKYRRVIWQCNSKFKNHKKCNTPHLYEDKIKQAFVEAFNSLIENKEEILKGYEEIIQALTDTTKLDKESSKLQSELEVVIEMLKRCVEENAHTALNQEEYEERYKALAERYESIKKEIEKIDKKRLERSAKKESIVEFIKEFEVKESLITEFDEGLWLGTVEKVIVNSDEKITFIFKDDMELECNT

SEQ ID NO: 3348 - protein, 486 aa, synthetic construct
MARRRTLAPVPDTPPRAVAYLRQSTYREESISLELQETACRDYAARHGYQIVAVESDPGVSGRTWARPAVQRVMEMIESGDADVIVLWRWSRLSRNRKDWAIAADRVDVAGGRIESATEPNDTATAAGRFARGVMTELAAFESERISEQWKEVHGSRVARGLPPGGKLPWGWRWVDGAVTPDPDTGPYIVEAYRRYLAGAGNRDLADWFNGSGVRPMRAKQWYFSTITQCLDSPIHAGLIAYHGQTLPGAHDGIIDVATWEAYRRERERRAGERQVKRRYLLSGILTCTCGSPMRGFTQDQAGRPRTGRTRSPWSCYRCTTAKSTAVHGPWSISLRMVEQPVMDWLHQVAADVENKVPRAAARRDDAHREAQRLAREITALDAQLTALTGHLASGLVPESAYVTTRDEILARRGELERGLAEAERLVLHVPEDPSAIAREALADWDTLPIDAKRAALRQLVRAVVVDYEQRTARAIPVWEPIRGEG

SEQ ID NO: 3349 - protein, 507 aa, synthetic construct
MKRVISYIRFSSEKQAKGDSLRRQSKMVTDWLKAHPEYYLDQDLSFRDLGVSGFTGKHLKGGLGDFLTAIEKGLVKAGDTLLIESLDRLSRQDIDIASELLRNILRSGVDVVTLSDGEHYTRESLRDPLALIKSILIMQRAHEESLRKAERIQAAWDAKKEAAKAGIKVSKRCPAWLKLNDDRKSFSVIPEKVETVKRCFQLRLEGKSIWEIVRTLNDEGHQSMSQYKPGSFGQSSVQDLLKNRSVIGYFTPKGCEEISGYYPAIIDETTFYKVQQLSHYRYGRKPVSDKPLSVNLFKGVIRCSECGHALIITGFSDTRNGIYRCPLRNENRCSAKGLSRKQTDGTLLTLLSRLDRFDSDTTNTIDTLKLHREHISSNIEKLVQLSLEIEDLSAITIKLRQLKGELSQVDADIEKETQRLKSIDVGCLSDCDLTTKAGRIEAQLIIKSAVKEVVLNTAKRRCKVTFHNGRIIDLPITENPSEDVTEAIQSLSEVTERGLIDVDEVII

SEQ ID NO: 3350 - protein, 506 aa, synthetic construct
MRTVITYLRFSSATQGAEGADSTRRQNELFKQWLRKNSDAQVVASFSDEGLSGYKGKHLTGQFGDMLARIEAGEFPASTILLVESIDRIGRLEHLETEALMNRILGNGIEIHTLQDGLIYTKDALADDLGISIIQRVKAYIAHQESKQKSFRVSQKWKQRAKLALAGEQHLTRNVPGWIDPDTFKCNEHAETVRLIFKLLLDGESLHNIARHLQSNDIKSFSRRKDANGFSVHSVRTVLRSESVIGTLPASQRNDRPAIPNYYEAAIDAATFNKAQEILDKNRKGRTPASDNPLTINIFKGLFRCQCGASVHPTGTKNKYAGVYRCNNHLDGRCDVPPLKRKPFDRWMIDNFLGMIDVGNDGESEGKIAALQHEVEIVTSRIKKATALLLEMDDITELKAQVKELNQKRTELQTTINTMKRKTSLSDKGLPQLKDIDLMTKAGRVECQLILSKHLKGLTLGKDSVTVTLQNDTEIIVPTDPLPLNDGTSIFEIAEKELLEIDAYQL

SEQ ID NO: 3351 - protein, 507 aa, synthetic construct
MKRVISYIRFSSEKQAKGDSLRRQSKMVTDWLKAHPEYYLDESLTFRDLGVSGFTGKHLKGGLGDFLTAIEKGLVKAGDTLLIESLDRLSRQAVDRASELLRNILRSGVDVVTLSDGEHYTSESLKDPLALIKSILIMQRAHEESLRKSERIQAAWDAKKEAAKAGIKVSKRCPAWLKLNDDRKSFSVIPEKVETVKRCFQLRLEGKSIWEIVRTMNAEGHQTLNQYKAGKFGQTSVQDLLKNRSVIGYFTPKGCEEISGYYPAIIDETTFYKVQQLSHYRYGRKPVSAKPLSVNLFKGVIRCSECGHALIITGFSDTRNGIYRCPLRNENRCSAKGLSRKQTDGTLLALLSRLDRFDSDTTNNINMLRLHREHISSNIEKLVQLSLEIEDLSAITSKLKQLKGELSQVDADIEKETQRLKSIDVGCLSDCDLTTKAGRIEAQLIIKSAVKEVVLNTAKRRCKVTFHNGKSITLPITENPSEDVTEAIQSLSEVTERGLIDVDVVEI

SEQ ID NO: 3352 - protein, 470 aa, synthetic construct
MKGESELDKKAAIYIRVSTQEQATEGYSIQAQTDRLTKYVEAKDFILYKKYIDAGYSASKLERPAMQELIQDVKSKKVDVVIVYKLDRLSRSQKDTMYLIEDIFRPNDVELISMQESFDTSTAFGSATVGMLSVFAQLERKSISERMITGRVERAKKGFYHTGGQDRPPAGYQFNSDNQLIINEYEAAAIKDLFRLYNDGLGKSSISEYLKKNYPGKNKWLPSSIDRMLKNSLYIGKVKFSGVEYDGIHEPIIDEVTFYKTQKEIARRKQSNTKRYNYVALLGGLCECGICGAKMANRRAVGRKGKVYRYYRCYSKKGSPKHMMKTDGCSSKAQQQFIIDEAVINNLKNIDVEAELKRRSAPQTNTSLISSQIESIDKQINKLIDLFQVDSMPLDVISEKIDKLNKEKQSMEKLLERKNRLDKTELQHRFDILKSFDWDNSSIESKRAVIEMLVQKVIIHDNSIEIILVE

SEQ ID NO: 3353 - protein, 547 aa, synthetic construct
MKLLATYIRWSTREQDSGDSLRRQTNLIDAFYSKHKNDYYLLPAHRYVDKGKSGFHQQHKNQGSDFRRMFENVMSGAIPEGSLIVVENFDRFSRADIDTAIDDVRQILRKGVSILTLGDGELYDKSALTVPVKLIKHIIIAERAHQESLVKQKRIAQVWNHKTQLARELKKPMGKQAPGWLELSEDGSHYIVDEDKASLVNIIYDKRLSGMSMFAICKWLNEQGYPTINQRKVRISKTKKPDGNWSALSVKHILTSRSVLGYLPAKISSEDRKTVLREEIESFYPQIVTDSKFYAVQQLLEETGKGKTSSGEHWLYVNILKGLIRCKCGLVMTPTGIRKPVYQGTYRCNGNKESRCSYGTVSRKLLDTQLCSRLFSKLSQLHDEATDTAKLDELQRRLNTVDGELEKLTETLIQLPNITQIQEALRVKQEEKDELIVQLSREKARVKSVSSLDLSGLDMESVEGRTEAQIIIKRLVKEIVVSGNEKLVDIYLHNGNMIRGFPLDGKDDHTLTLEEATDEMQSLDDMLIFGEPVTRIYPAGDMEEVDA

SEQ ID NO: 3354 - protein, 559 aa, synthetic construct
MKTKLYSYIRFSSMRQSDGSSYERQIRMAREIAAKYDLELVNDYQDLGVSAFKGANSKTGALSRFLDAIGRSVPVGSWLFIENLDRLSRADIVSAQELFLSIIRRGITIVTGMDNKIYSLDTVTANPMDLMFSILLFIRGNEESQTKRNRTNSSALIKIKAHQENPQNPAVAIEEVGKNMWWTDTTSGYVLPHPVFFPVVQEIVELRKNGRSTAEILDHLNETYTPPPAVSNKKHSKWSRAMVERLFHTRALIGIKEVSVDGVNYELKDYYPRVIDDATFYHLKKNIGARAWNFGDKEEAKPIPLLSGIGLLKCDHCGCAMVKVKGTNKRSDQYRYTCDATRSRRLDCEHPNWSFRGDQLEKAVLQLLADKIWIAEDKANPVPALKVQVDEISRKIDNLIALSAMTGATKELADQITTLNSERETLYNQIKMAEEEMYSVDSQGWEKLAEFDLEDVYNEERLKVRFKIKQALKRIGCSRIDRNKNLFVLEYIDGKTQRVVIENSRGTRKGQIFVDLKTINDRQILESNGLVLHPCLDMLTDKNWKPEEEIPGPLQEFGI

SEQ ID NO: 3355 - protein, 559 aa, synthetic construct
MKTKLYSYIRFSSMKQADGSSYERQKRTAAEIAAKYDLELVTSYQDFGVSAFKGANSKTGALSRFLDEIGRSVPVGSWLVVENLDRISRQSIIEAQELFLSIIRRGITIVTGMDGRVYSRESVNANPIDLLLSVMLFARANEESQTKRNRTNSSALIKIKAHQENPQNPAVAIEEVGKNMWWTDTTSGYVCPDPVYFPIVKEIVELRKNGRSTSEILNYLNETYTPPPAVSNKKHSKWPRAMIGRLFHTRALIGIKEVSVDGVKYELKDYYPRVIDDATFYHLKKNIGARAWNFGDTEEIKPIPLLSGIGLLKCEHCSSAMIKVKGTNKRADQYRYSCEGIRSHRFDCEQPNWSFRGDQLEKAVLQLLADKIWIAEDKANPVPALKVQIDEISRKIDNLIALSAMTGATKELADQITTLNSERETLYNQIKMAEEEMYSVDSQGWEKLAEFDLEDVYNEERIKVRFKIKQALRRIGCRRIDRNKNLFVLEYVDGKIQRVVIENSRGTRKGRIFIDLKTINDRQILESNGLVLHPCLDMLTDKNWKPEEEIPGPLQEFGI

SEQ ID NO: 3356 - protein, 507 aa, synthetic construct
MKRVISYIRFSSEKQSRGDSLRRQSKMVTDWLKAHPEYYLDQDLSFRDLGVSGFTGKHLKGGLGDFLTAIEKGLVKAGDTLLIESLDRLSRQAVDRASELLRNILRSGVDVVTLSDGEHYTSESLKDPLALIKSILIMQRAHEESLRKSERIQAAWNRKKELISEGIKISKRCPAWLRLNDDRKSFSVIPDKVETVKRCFQLRLEGKSIWEIVRTMNAEGRQTLHQYKAGSFGQSSVQDLLKNRSVIGYFTPKGCEEISGYYPAIIDETTFYKVQQLSYARYGRKPASDKPLSVNLFKGVIRCSECGHALIITGFSDTRSGIYRCPLRNENRCSAKGLSRKQTDGTLLTLLSRLDRFDSDTTNIIDMLRLHREHISSNIEKLVQLSLEIEDLNAITNKLKQLKNELSQVDADIEKETQRLKSIDVGCLSDCDLTTKAGRIEAQLIIKSAVKEVVLNTAKRRCKVTFHNGKAITLPITEDPSENVTEAIQSLSEVTERGLIDVDVVEI

SEQ ID NO: 3357 - protein, 507 aa, synthetic construct
MKRVISYIRFSSEKQAKGDSLRRQSKMVTDWLKAHPEYYLDESLTFRDLGVSGFTGKHLKGGLGDFLTAIEKGLVKAGDTLLIESLDRLSRQDIDIASELLRRILRAGVDVVTLSDGEHYTSESLKDPLALIKSILIMQRAHEESLRKSERIQAAWDAKKEAAKAGIKVSKRCPAWLKLNDDRKSFSVIPEKVETVKRCFQLRLEGKSIWEIVRTLNDEGHQTLNQYKAGKFGQTSVQDLLKNRSVIGYFTPKGREEIAGYFPSIIHETDFYKVQQLSYARHGRKPASAKPLSVNLFKGVIRCSECGHALIITGFSDTRNGIYRCPLRNENRCSAKGLSRKQTDGTLLTLLSRLDRFDSDTTNTIDTLKLHREHISSNIEKLVQLSLEIEDLNAITNKLKQLKNELSQVDADIEKETQRLKSIDVGCLSDCDLTTKAGRIEAQLIIKSAVKEVVLNTAKRRCKVTFHNGKIIDLPITENPSEDVTEAIQSLSEVTERGLIDVDVVEI

SEQ ID NO: 3358 - protein, 506 aa, synthetic construct
MRTVITYLRFSSATQGAEGADSTRRQNDLFKQWLKKNSDAQVVASFSDEGLSGYKGKHLTGQFGDMLARIEAGEFPGGTILLVESIDRIGRLEHLETEALMNRIIAHGIEIHTLQDGLIYTRDALSDDLGISIIQRVKSYLAHQESKQKSFRVSEKWKQRAKLALAGKQRLTKMVPGWIDPDTLKLNEHAETVRLIFKLLLSGESLHNIARHLQSNGIKSFSRRKDANGFSVHSVRTILRSETTIGTLPASQRNDRPAIPNYYEAAIDAATFNKAQEILDKNRKGRTPASDNPLTINIFKGLFRCQCGASVHPTGTKNKYAGVYRCNNHLDGRCDVPPLKRKPFDKWMIDNFLGMIDVGNDGEAEGEIASLQHEVEIVTARIKKATALLLEMDDIDELKIQIKELNQRRTELQTTIDSMRRKASLTDKELPQLKDIDLTTKAGRVECQLILSKHLKGLTLGKGSVTITLQNDTEITIPTNPLPLNDGSPIFEIADKELLDIDAYQL

SEQ ID NO: 3359 - protein, 547 aa, synthetic construct
MKLLVTYIRWSTKEQDSGDSLRRQTNLIDAFYSKHKNDYYLLPAHRYVDKGKSGFHQQHKNQGSDFRRMFENVMSGAIPEGSLIVVENFDRFSRADIDTAIDDVRQILRKGVSILTLGDGELYDKSALTDPVKLIKHIIIAERAHQESLVKQKRIAQVWNHKTQLARELKKPMGKQAPGWLELSEDGSHYIVDEDKASLVNIIYDKRLSGMSMFAICKWLNEQGYPTINQRKVRISKTKKPDGNWSALSVKHILTSRSVLGYLPAKISSEDRKTVLREEIEGFYPQIVTDSKFYAVQQLLEETGKGKTSSGDHWLYVNILKGLIRCKCGLVMTPTGIRKPVYQGTYRCNGNKESRCSYGTVSRKLLDTQLCSRLFSKLSQLHDEATDTAKLDELQRRLNTVDSELEKLTETLIQLPNITQIQEALRVKQGEKDELIVQLSREKARVKSVSSLDLSGLDMESVEGRTEAQIIIKRLVKEIVVSGNEKLVDIYLHNGNMIRGFPLDGKDDHTLTLEEATDEMQSLDDMLIFGEPVTRIYPAGDMEEVDA

SEQ ID NO: 3360 - protein, 547 aa, synthetic construct
MKLLVTYIRWSTKEQDSGDSLRRQTNLIDAFYSKHKNDYYLLPAHRYVDKGKSGFHQQHKAQGSDFRRMFENVMSGAIPEGSLIVVENFDRFSRADIDTAIDDVRQILRKGVSILTLGDGELYDKSALTDPVKLIKHIIIAERAHQESLVKQKRIAQVWNHKTQLARELKKPMGKQAPGWLELSEDGSHYIVDEDKASLVNIIYDKRLSGMSMFAICKWLNEQGYPTINQRKVRISKTKKPDGNWSALSVKHILTSRSVLGYLPAKISTEDRKTVLREEIESFYPQIVTDSKFYAVQQLLEETGKGKTSSGEHWLYVNILKGLIRCKCGLVMTPTGIRKPVYQGTYRCNGNKESRCNYGTVSRKLLDTQLCSRLFSKLSQLHDEATDTAKLDELQRRLNTVDSELEKLTETLIQLPNITQIQEALRVKQEEKDELIVQLSREKARVKSVSSLDLSGLDMESVEGRTEAQIIIKRLVKEIVVSGNEKLVDIYLHNGNMIRGFPLDGKDDHTLTLEEATDEMQPLDDMLIFGEPVTRIYPAGDMEEVDA

SEQ ID NO: 3361 - protein, 603 aa, synthetic construct
MVASVLVKGETSGNALVPTADMTTTRNPLAGTVHQTETLRGVRCVRLSVLTDETTSPERQRDADDAIAAELNINFGEGDGLREAVDLDVSASKVAPFDRPALGGWLSRPDDYDALVWWRFDRAIRSMSDMHDLAKWAKAHRKMLVFAEGIGGGKLVFDFRNPMDPVSELMMTFFAFAAQVESQSISDRVTGAMAAIRRMVLRWRGGGRPPYGYMPAPMPKEHGGIGWTLVPDPDAVTIIERIVRELLEGRTVSAIAVGLNADNTPSPRDHWAVKNGRATGGKTGGVKGNTKDAFNWNPAVITRMLRNETLLGWKMHRGKPVRDAEGNPVMQTEQPIMTREEFDRIGAVLDSRSIDNRERSDTDALLLRVIHCDSCGGRMYLNKQENKQRPTYKCNPYARGFKCERSANIRGDWADEHVTAEFLRLVGSVQTTHVVEIPGYDPEPELLATLAEFNEHQEQKGRQKSRHAAAAWQERADALDARIAMLENSEKREAQRIVTPTGRTFADEWAAADTAGRRAMLIEAGVRLDVRRGTRGGWRTLDTSRVDFHMRGELDPAAEAATANAGDQEAETRNDAPPAPGSTVRLAETVPAEPLPELVPLAA

SEQ ID NO: 3362 - protein, 575 aa, synthetic construct
MIGTFYARVSTDSEEQKTSIVSQVSYFTTYLDQNNLLRSGSGVFFKANGTHTKTDGYYVDEGFSGAKSNKYRKAFQQMMKDARVRKFDIIYTKSISRFGRNTKEILAAIAELRSYDIAVYFEDLKINTMNREDDFKLTIFAAQAEEESRAKSESVQFGKKQAYKREIWGGRAPYGYDIEEGKLKINDLEARTVKEVFRLYLYEGLGLRNIAQTLNSDGVPTKRGASLWDQSLISKMLKNAIYTGEWRQHRTRNVDINQNLIKEIPLEEQIVKHIESLIIIDQETFRLVQIEKGKRKGDFGNLIYKEIKVESENGEVKKEKVRSLSRGKTRHSSTHILSNLLKCGNCGGSLRRKVQKNKKRTFVYWICRNNDQFGNLKCEHRNLQYEENIFNYLKNEIFLYISNKEIHNENLDYYINSQFDLSDVDSEIKNLTQEINELENERDVNFRLLTKNIIDDSEYEKRNKNIKLSLSEKESKRLRLENAGNEIEEIQFKHKQFLKFLNSVDLDSLTNPILRQIIERIEVTTPNNHLPLKRFVQHVFNSEHLKIYWNVFGASRESRIEEAVDKQLEKYLTKV

SEQ ID NO: 3363 - protein, 547 aa, synthetic construct
MKLLATYIRWSTKEQDSGDSLRRQTNLIDAFYSKHKNDYYLLPAHRYVDKGKSGFHQQHKAQGSDFRRMFENVMSGVIPEGSLIVVENFDRFSRADIDTAIDDVRQILRKGVSILTLGDGELYDKSALTDPVKLIKHIIIAERAHQESLVKQKRIAQVWNHKTQLARELKKPMGKQAPGWLELSDDGSHYIVDEDKASLVNIIYDKRLSGMSMFAICKWLNEQGYPTINQRKVRISKTKKPDGNWSALSVKHILTSRSVLGYLPAKISTEDRKTVLREEIESFYPQIVTDSKFYAVQQLLEETGKGKTSSGDHWLYVNILKGLIRCKCGLVMTPTGIRKPVYQGTYRCNGNKESRCSYGTVSRKLLDTQLCSRLFSKLSQLHDEATDTAKLDELQRRLNTVDGELEKLTETLIQLPNITQIQEALRVKQEEKDELIVQLSREKARVKSVSSLDLSGLDMESVEGRTEAQIIIKRLVKEIVVSGNEKLVDIYLHNGNMIRGFPLDGKDDHTLTLEEATDEMQSLDDMLIFGEPVTRIYPAGDMEEVDA

SEQ ID NO: 3364 - protein, 479 aa, synthetic construct
MPKVAIYARVSTLNQAEEGYSIEGQLASLRKYCSALDWQIYQEYVDPGFSGGSLNRPAIQKLIVDAKSHRFDIVLIYKLDRLSRSVQDTLYLVKDIFDKNKISFVSLNEKIDTSSPMGNLFLTLLASIAEFEREQIKERMMMGKVGRAKSGKAMGWSKVPFGYTYDKQTGIYQINTLQAQIVKRIYRDYLDGVSITKLVDLLNAEGHIAKDRPWTYRTVRQALDNVVYTGRQFYQGNVYPGQHEAIISIEDYDKTQAELKRRQLTNAQKFNPRPFRAKYMLSGLLRCSVCGSSMMVQTRYLKYADDYHYYRCVSSIRKRIRFSYRQDTQLCQNRSDYLKDDLESAIIKTIRHLQLHPDQMPVNTVKFDDKPLKNELNRINDKLNKLVDLYLNSNGISIGIINQKREELLQQKEALENKLQERKPKQPELDPKKALLLLSKKNILELPYEEQVKLVKSLISKIEVSPSKMKIHWRFNVEK

SEQ ID NO: 3365 - protein, 507 aa, synthetic construct
MKRAISYIRFSSEKQSRGDSLRRQSKMVTDWLKAHPEYYLDQDLSFRDLGVSGFTGKHLKGGLGDFLTAIEKGLVKAGDTLLIESLDRLSRQDIDIASELLRRILRAGVDVVTLSDGEHYTKESLRDPLSLIKSILIMQRAHEESLRKSERIQAAWDAKKEAAKAGIKVSKRCPAWLKLNDDRKSFSVIPEKVETVRRCFQLRLEGKSIWEIVRTMNAEGHQTLHQHKPGSFGQSSVQDLLKNRSVIGYFTPKGCEEISGYYPAIIDETTFYKVQQLSYARHGRKPASDKPLSVNLFKGVIRCSECGHALIITGFSDTRSGIYRCPLRNENRCSAKGLSRKQTDGTLLTLLSRLDRFDSDTTNTIDMLRLHREHISSNIEKLVQLSLEIEDLSAITIKLKQLKGELSQVDADIEKETQRLKSIDTGSLSDCDLSTKAGRIEAQLIIKSAVKEVVLNTAKRRCKVTFHNNKSITLPITENPSEDVTEAIQSLSEVTERGLIDVDVVEI

SEQ ID NO: 3366 - protein, 506 aa, synthetic construct
MRTVITYLRFSSATQGAEGADSTRRQNELFKQWLRKNSDAQVVASFSDEGLSGYKGKHLTGQFGDMLARIEAGEFPAGTVLLVEAIDRIGRLEHLETEALMNRIIAHGIEIHTLQDGLIYTRDALSDDLGISIIQRVKSYLAHQESKQKSFRVSQKWKQRAKLALAGEQRLTRNVPGWIDPDTFKCNEHAETVRLIFKLLLDGESLHNIARHLQANNISSFSRRKDANGFSVHSVRTVLRSESVIGTLPASQRNDRPAIPNYYEAAIDASTFNKAQEILGKNRIGRTPASDNPLTINIFKGLFRCQCGASVHPTGTKNKYQGVYRCNNHLDGRCDVPPLKRKPFDKWMIDNFLGMIDVGNDGEAEGKIAALQHEVEIVTTRIKKATALLLEMDDITELKTQVKELNQKRTELQTTIDNMRRKASLTDKELPQLKDIDLTTKAGRVECQLILSKHLKGLTLGKDSVTVTLQNDTEITIPTDPLPLNDGTSIFEIAEKNLLNIDTFQL

SEQ ID NO: 3367 - protein, 539 aa, synthetic construct
MKRAAIYARYSTDLQNDQSVEDQFRLCRAHAERLGFNVVEEFSDRAKSGASMFGRPGLANLIQAADRAEFDVLVSEAPDRISRDIADLAHIHKTLKFRGIEMNCVNGGAMDTVQIGMYGVIGQMQREEGAKKVRRGMVGVVRSGRNPGGKAYGYRPIFGRKGELEIVEDEAATVRRIYELYAGGMAPRSIAAVLNDENVPAPRGERWNASTINGSGQRGNGILRNPIYAGRIVWNRIHMVKDPSTGRRISRVNPESEQEEVAAPHLQIVDSGLFDIVQQRKEATGGADRAKGPRSKRILSGLLRCGACGGGMALVGPDRSGNRIQCSTFRESGICKNSRRYYVERIETEVVDGLRRQFADTSVIEAYVEAYQVEQKRLRGDAQRARANAQRALQEAKDGITKIVEKISKGLIEDDEAAALLAPLRAERDRQKAILETTEEPPNVIEIQPKAVKRFRENIESLAQIVREKDGEASPEIAAPFRQLVAAVVINPTEKGQPYEINIKGYLSSLIDSELSVIKMVAEDRLTPSPRFSIRRFVA

SEQ ID NO: 3368 - protein, 428 aa, synthetic construct
MTHVDLPASLLKRKAVVYVRQSTPAQVQLNRESQRRQYELVEEARRRGFRDVEVIDDDLGRSASGTVARPGFDKLVAWLCAGDVGAILCLDASRLARNGRDWHHLLELCGLVEARVIDLDGVYNPCRPNDRLLLGMKGSISEFELNILRTRMYEAVRSKARRGELRIGVPIGYIWHREIGLDVRVQEAVRQIFSRFRQLGSARQTHLALHREGMHFPRPSDGRKLTALDWTPIRYRNVISVLKNPFYAGAYAYGKSKSRTAVVDGRAHKTYGHIRPLDEYDVLLKDHHEGYIDWGIYERNQKQLAINAYGQRDGAKSGRGGRSLLIGLMTCGQCGHRLRVAYRGRYPYPVYQCIGRRAHGLPRCMCFGGQRVDTAIARELMRVVQPRERQSAQVPTVDIEKVESKEEDFAGIMQARSLADGALKHAEI

SEQ ID NO: 3369 - protein, 533 aa, synthetic construct
MRRAVVYARYSTDLQNDQSVEDQIRLCKAHAEKLGLNVVHEYFDRAKSGASMFGRPGLSSLMQAAEMGAFEVLVSEAPDRISRDIADLAHIHKNLTFRGVEMNCVNGGRMDTVQIGMYGVIGQMQREEGAKKVKRGMVGVVRSGRNAGGKAYGYRPVLGKKGELEIVEEEAATVRRIFELYATGFAPRTIAATLNAEGIPAPRGQRWNGSTINGNGQRGNGILRNPIYAGKLIWNRVRMVKDPSTGRRISRINPESEYEEIDAPHLRIVDQSLFDTVQSRKEATGGARPRDVSKSRRLLSGLLRCGCCGGGMALMGVDRSGPRVQCSTYRESRSCTNGARYYIEKIERQVLDSLRIQFADTAIIDEYVRVYREERRRIEAEARRNRSTSEKALADAKSGITRIVDRIAKGLIDDDEAAALLQPLRQERDRLEQELAASEAPSNVIELHPQAVKHFRENVEQLADIVATKTGMVDVGPASAFRQLVAAVIVHPREKGEPYTIQIKGYLSSLIDSALSAKSLVAEEGFEPPTQGL

SEQ ID NO: 3370 - protein, 533 aa, synthetic construct
MKRAAIYARYSTDLQNDQSVEDQFRLCRAHAERLGFNVVGEFSDRAKSGASMFGRPGLANLIQAADRAEFDVLVSEAPDRISRDIADLAHIHKTLKFRGIEMNCVNGGAMDTVQIGMYGVIGQMQREEGAKKVKRGMVGVVRSGRNPGGKAYGYRPIFGRKGELEIVEDEAATVRRIYELYAGGMAPRSIAAILNEENVPAPRGERWNASTINGSGQRGNGILRNPIYAGRIVWNRIQMIKDPSTGRRISRVNPEIDYEEVAAPHLQIVDSGLFDTVQRRKEATGGADRAKGPRSKRILSGLLRCGACGGGMALVGPDRSGNRIQCSTFRESGTCKNSRRYYVERIETEVVDGLRRQFADTSIIEAYVEAYQVEQKRLRGDVQRARANAQRAVQEAKDGITKIVEKISKGLIEDDEAAALLAPLRAERDRQKAILETTEEPPNVIEIQPKAVKRFRENIESLAQIVREKDGEASPEIAAPFRQLVAAVVINPTEKGQPYEINIKGYLSSLIDSELSVIKMVAEEGFEPPTQGL

SEQ ID NO: 3371 - protein, 535 aa, synthetic construct
MQRAAIYARFSTDLQSERSVDDQIELCREFAIRQGFVVARSYFDKARSGASIFGRDGLLSLMDDAREGKFDIVVVEALDRLSRDQEDLAGLHKRLTFAGVQIIAVHDGAADAIQVGIRGLVSTLFLADLKNKIRRGMTGVIREGRHAGGRAYGYRPTLGQPGVLQIFEPEAEVVRRIYSEVIEGSLPREIATGLNRDKVAPPRGVAWNASTILGSAQRGNGIIRNPLYCGRIVWNRIRMVRDPETGKRISRPNDASDHREAEAPHLAIVDQQTYETALAILEGRAKKVRGGQDVRRPKRLLSGLLRCAQCGGGMSMHDRNGDAIRIRCSRSKESGTCSNQRRYSLNRIEAAVVGGLRRQLMHPELLAEYVRVYREERRNEAAKAARERAANERRLADLNGQLERLMQALARGVLPIEAVEAQYKPLEIERDRVAAELAQMPASTAIELHPQAANQYRNAVESLAERLDGLDARADSEAIAAFRSLVDSVIVHDRADGGVEVEVIGHLSALIGAKTEILGGRLVAEEGFEPPTQGL

SEQ ID NO: 3372 - protein, 507 aa, synthetic construct
MKRVISYIRFSSERQAKGDSLRRQSKMVTDWLKAHPEYYLDQDLSFRDLGVSGFTGKHLKGGLGDFLTAIEKGLVKAGDTLLIESLDRLSRQDIDIASELLRRILRAGVDVVTLSDGEHYTSESLKDPLSLIKSILIMQRAHEESLRKSERIQAAWDAKKEAAKAGIKVSKRCPAWLKLNDDRKTFSVIPEKVETVKRCFQLRLEGKSIWEIVRTLNDEGHQSMSQYKPGKFGQTSVQDLLKNRSVIGYFTPKGCEEISGYYPAIIDETTFYKVQQLSYARYGRKPASDKPLSVNLFKGVIRCSECGHALIITGFSDTRSGIYRCPLRNENRCSAKGLSRKQTDGTLLALLSRLDRFDSDMTNTVDTLKLHREHISNNIEKLVQLSLEIEDLSAITSKLKQLKGELSQVDADIEKETQRLKSIDVGCLSDCDLTTKAGRIEAQLIIKSAVKEVVLNTAKRRCKVTFHNGKVIDLPITENPSEDVTEAIQSLSEVTERGLIDVDEVII

SEQ ID NO: 3373 - protein, 507 aa, synthetic construct
MKRVISYIRFSSERQAKGDSLRRQSKMVNDWLKAHPEYYLDQDLSFRDLGVSGFTGKHLKGGLGDFLTAIEKGLVKAGDTLLIESLDRLSRQAVDKASELLRNILRSGVDVVTLSDGEHYTKESLKDPLSLIKSILIMQRAHEESLRKAERIQAAWDAKKEAAKAGIKVSRRCPAWLRLNDDRKSFSVIPEKVETVKRCFQLRLEGKSIWEIVRTLNAEGHQTLNQYKAGKFGQTSVQDLLKNRSVIGYFTPKGCEEISGYFPPIIPETDFYKVQQLSYSRYGRKPASDKPLSVNLFKGVIRCSECGHALIITGFSDTRNGIYRCPLRNENRCSAKGLSRKQTDGTLLALLSRIDRFDSDMTNTIDTLKLHREHISSNIEKLVQLSLEIEDLSAITSKLKQLKGELSQVNADIEKETQRLKSIDVGCLSDCDLTTKAGRIEAQLIIKSAVKEVILNTAKRRCKVTFHNGKVIDLPITEDPSENVTEAIQSLSEVTERGLIDVDEVII

SEQ ID NO: 3374 - protein, 533 aa, synthetic construct
MRRAVIYARYSTDLQNDQSVEDQIRLCRDHASRIGAEVVEEFSDRAKSGASMFGRPGLSSLMQAAERGDFDVLIAEAPDRISRDIADLAHIHKTLRFRQVEMNCVNGGALDTVQIGMYGVVGQMQREEGAKKVKRGMVGVVRSGRNAGGKAYGYRPVLGKKGELEIVEKEAATVRRIFELYATGFAPRTIAATLNAEGIPAPRGLRWNGSTINGNGQRGNGILRNPIYAGKLIWNRVHMVKDPSTGRRISRINPESEYEEIDAPHLRIVDQSLFDAVQARKEATGGARARDVPKSKRLLSGLLRCGCCGGGMALMGVDRSGPRIQCSTYRESRSCTNGARYYIEKIERQVLDSLRIQFADTAIIDEYVRAYREERRRIETEARRNRSSSEKSLAEAKAGITRIVDRIAKGLIDDDEASALLQPLRQERDRLERELAASEAPSNVIELHPQAVKRFKENIEQLADIVATKTGTVDVGAASAFRHLVAAIIVHPREKGEPYTIQIKGYLSSLIDSTLSAKSLVAEEGFEPPTQGL

SEQ ID NO: 3375 - protein, 547 aa, synthetic construct
MKLLVPYIRWSTKEQDSGDSLRRQTNLIDAFYSKHKNDYYLLPAHRYVDKGKSGFHQQHKAQGSDFRRMFENVMSGAIPEGSLIVVENFDRFSRADIDTAIDDVRQILRKGVSILTLGDGELYDKSALTDPVKLIKHIIIAERAHQESLVKQKRIAQVWNHKTQLARELKKPMGKQAPGWLELSEDGSHYIVDEDKASLVNIIYDKRLSGMSMFAICKWLNEQGYPTINQRKVRISKTKKPDGNWSALSVKHILTSRSVLGYLPAKISTEDRKTVLREEIEGFYPQIVTDSKFYAVQQLLEETGKGKTSSGDHWLYVNILKGLIRCKCGLVMTPTGIRKPVYQGTYRCNGNKESRCSYGTVSRKLLDTQLCSRLFSKLSQLHDEATDTAKLDELQRRLNTVDGELEKLTETLIQLPNITQIQEALRVKQEEKDELIVQLSREKARVKSVSSLDLSGLDMESVEGRTEAQIIIKRLVKEIVVSGNEKLVDIYLHNGNMIRGFPLDGKDDHTLTLEEATDEMQSLDDMLIFGEPVTRIYPAGDMEEVDA

SEQ ID NO: 3376 - protein, 507 aa, synthetic construct
MKRVISYIRFSSEKQAKGDSLRRQSKMVTDWLKAHPEYYLDESLTFRDLGVSGFTGKHLKGGLGDFLTAIEKGLVKAGDTLLIESLDRLSRQDVDRASELLRNILRSGVDVVTLSDGEHYTRESLKDPLSLIKSILIMQRAHEESLRKSERIQAAWDAKKEAAKAGIKISRRCPAWLKLNDDRKSFSVIPEKVETVKRCFQLRLEGKSIWEIVRTLNDEGHQSMSQYKPGKFGQTSVQDLLKNRSVIGYFTPKGCEEISGYYPAIIDETTFYKVQQLSYSRYGRKPASDKPLSVNLFKGVIRCSECGHALIITGFSDTRNGIYRCPLRNENRCSAKGLSRKQTDGTLLALLSRLDRFDSDMTNTIDMLRLHREHISSNIEKLVQLSLEIEDLNAITNKLKQLKNELSQVDADIEKETQRLKSIDVGCLSDCDLTTKAGRIEAQLIIKSAVKEVVLNTAKRRCKVTFHNGKSITLPITENPSEDVTEAIQSLSEVTERGLIDVDVVEI

SEQ ID NO: 3377 - protein, 535 aa, synthetic construct
MQRAAIYARFSTDLQSERSVDDQIELCREFAARQGFVVARSYFDKARSGASIFGRDGLLSLMDDAREGKFNIVIVEALDRLSRDQEDLAGLHKRLTFAGVQIIAVHDGAADAIQVGIRGLVSTLFLADLKNKIRRGMTGVVREGRHAGGRAYGYRPTLGQPGVLQIFEPEAEIVRRIYSEVIEGALPREIAAGLNRDMVAPPRGVAWNASTILGSAQRGNGIIRNPLYCGRIVWNRIRMVRDPETGKRISRPNDRSEHREAEAPHLAIVDQQTYEAALAILEGRAKKVRGGQDVRRPKRLLSGLLRCAQCGGGMSMHDRNGDAIRIRCSRSKESGTCSNQRRYSLNKIEAAVVSGLRGQLMHPELLAEYVRVYREERRDEASKAARERASNERRLADLNGQLERLMQALARGVLPIEAVEAQYKPLEIERDRLAAELEQMPGSTTIELHPHAANQYRSAVENLAERLDDLDAHADSQAIAAFRSLVDSVVVHDRADGGVEVEVIGHLSALIGAKAEMLGGRLVAEEGFEPPTQGL

SEQ ID NO: 3378 - protein, 507 aa, synthetic construct
MKRVISYIRFSSEKQAKGDSLRRQSKMVTDWLKAHPEYYLDQDLSFRDLGVSGFTGKHLKGGLGDFLTAIEKGLVKAGDTLLIESLDRLSRQAVDRASELLRNILRSGVDIVTLSDGEHYTRESLKDPLALIKSILIMQRAHEESLRKSERIQAAWNRKKELISEGIKISKRCPAWLKLNDDRKSFSVIPEKVETVKRCFQLRLEGKSIWEIVRTLNDEGHQSMSQYKPGKFGQTSVQDLLKNRSVIGYFTPKGCEEISGYFPPIIPETDFYKVQQLSYSRYGRKPASDKPLSVNLFKGVIRCSECGHALIITGFSDTRSGIYRCPLRNENRCSAKGLSRKQTDGTLLALLSRLDRFDSDTTNTIDTLKLHREHISSNIEKLVQLSLEIEDLNAITNKLKQLKNELSQVDADIEKETQRLKSIDVGCLSDCDLTTKAGRIEAQLIIKSAVKEVVLNTAKRRCKVTFHNGKVIDLPITENPSEDVTEAIQSLSEVTERGLIDVDEVII

SEQ ID NO: 3379 - protein, 547 aa, synthetic construct
MKLLVTYIRWSTKEQDSGDSLRRQTNLIDAFYAKHKEEYYLLPAHRYVDKGKSGFHQQHKAQGSDFRRMFENVMSGVIPEGSLIVVENFDRFSRADIDTAIDDVRQILRKGVSILTLGDGELYDKSALTDPVKLIKHIIIAERAHQESLVKQKRIAQVWNHKTQLARELKKPMGKQAPGWLELSEDGSHYIVDEDKASLVNIIYDKRLSGMSMFAICKWLNEQGYPTINQRKVRISKTKKPDGNWSALSVKHILTSRSVLGYLPAKISTEDRKTVLREEIEGFYPQIVTDSKFYAVQQLLEETGKGKTSSGEHWLYVNILKGLIRCKCGLVMTPTGIRKPVYQGTYRCNGNKESRCSYGTVSRKLLDTQLCSRLFSKLSQLHDEATDTAKLDELQRRLNTVDSELEKLTETLIQLPNITQIQEALRVKQGEKDELIVQLSREKARVKSVSSLNLSGLDMESVEGRTEAQIIIKRLVKEIVVSGNEKLVDIYLHNGNMIRGFPLDGKDDHTLTLEEATDEMQSLDDMLIFGEPVTRIYPAGDMEEVDA

SEQ ID NO: 3380 - protein, 507 aa, synthetic construct
MKRVISYIRFSSEKQAKGDSLRRQSKMVTDWLKAHPEYYLDQDLSFRDLGVSGFTGKHLKGGLGDFLTAIEKGLVKAGDTLLIESLDRLSRQAVDRASELLRNILRSGVDVVTLSDGEHYTSESLKDPLALIKSILIMQRAHEESLRKSERIQAAWNRKKELISEGIKISKRCPAWLRLNDDRKSFSVIPEKVETVKRCFQLRLEGKSIWEIVRTLNDEGHQTLNQYKPGKFGQTSVQDLLKNRSVIGYFTPKGCEEISGYYPAIIDETTFYKVQQLSHSRYGKRSVSDKPLSVNLFKGVIRCSECGHALIITGFSDTRNGIYRCPLRNENRCNAKGLSRKQTDGTLLALLSRLDRFDSDTTNTIDTLKLHREHLSSNIEKLVQLSLEIEDLNAITNKLKQLKNELSQVDADIEKETQRLKSIDVGCLSDCDLTTKAGRIEAQLIIKSAVKEVVLNTARRRCKVTFHNGKVIDLPITENPSEDVTEAIQSLSEVTAKGLIDVDVVEI

SEQ ID NO: 3381 - protein, 533 aa, synthetic construct
MKRAAIYARYSTDLQNDQSVEDQFRLCRAHAERLGFNVVEEFSDRAKSGASMFGRPGLANLIQAADRAEFDVLVSEAPDRISRDIADLAHIHKTLKFRGIEMNCVNGGAMDTVQIGMYGVIGQMQREEGAKKVRRGMVGVVRSGRNPGGKAYGYRPIFGRKGELEIVEDEAATVRRIYELYAGGMAPRSIAAVLNDENVPAPRGERWNASTINGSGQRGNGILRNPIYAGRIVWNRIHMVKDPSTGRRISRVNPESEQEEVAAPHLQIVDSGLFDIVQQRKEATGGADRAKGPRSKRILSGLLRCGACGGGMALVGPDRSGNRIQCSTFRESGTCKNSRRYYVERIETEVVDGLRRQFADTSVIEAYVEAYQVEQKRLRGDAQRARANAQRALQEAKDGITKIVEKISKGLIEDDEAAALLAPLRAERDRQKAILETTEEPPNVIEIQPKAVKRFRENIESLAQIVREKDGEASPEIAAPFRQLVAAVVINPTEKGQPYEINIKGYLSSLIDSELSVIKMVAEEGFEPPTQGL

SEQ ID NO: 3382 - protein, 507 aa, synthetic construct
MKRVISYIRFSSEKQSRGDSLRRQSKMVTDWLKAHPEYYLDQDLSFRDLGVSGFTGKHLKGGLGDFLTAIEKGLVKAGDTLLIESLDRLSRQDIDIASELLRNILRSGVDVVTLSDGEHYTRESLKDPLALIKSILIMQRAHEESLRKSERIQAAWNRKKELISEGIKVSKRCPAWLKLNDDRKSFSVIPEKVETVKRCFQLRLEGKSIWEIVRTMNAEGHQTLNQYKAGSFGQSSVQDLLKNRSVIGYFTPKGCEEIAGYYPAIIDETTFYKVQQLSYARHGRKPASAKPLSVNLFKGVIRCFECGHALIITGFSDTRSGIYRCPLRNENRCSAKGLSRKQTDGTLLALLSRLDRFDSDTTNTIDTLKLHREHISSNIEKLVQLSLEIEDLNAITNKLKQLKNELSQVDADIEKETQRLKSIDVGCLSDCDLSTKAGRIEAQLIIRSAVKEVVLNTAKRRCKVTFHNGKLIDLPITETPSDNVTEAIQSLSEVTERGLIDVDEVII

SEQ ID NO: 3383 - protein, 533 aa, synthetic construct
MKRAAIYARYSTDLQNDQSVEDQFRLCKAHAERLGLNVVGEFSDRAKSGASMFGRPGLANLIQAADRAEFDVLVSEAPDRISRDIADLAHIHKTLKFRGIEMNCVNGGAMDTVQIGMYGVIGQMQREEGAKKVRRGMVGVVRSGRNPGGKAYGYRPIFGRKGELEIVEDEAATVRRIYELYAGGMAPRSIAAILNEENVPAPRGERWNASTINGSGQRGNGILRNPIYAGRIVWNRIQMVKDPSTGRRISRVNPESEREEVAAPHLQIVDSGLFDIVQHRKEATGGADRAKGPRSKRILSGLLRCGACGGGMALVGPDRSGNRIQCSTFRESGTCKNSRRYYVERIETEVVDGLRRQFADTSIIEAYVEAYQAEQKRLRGDAQRARANAQRALQDAKDGITKIVEKICKGLIEDDEAAALLAPLRAERDRQKAILETTEDPPNVIEIQPKAVKRFRENIESLAQIVREKGGEASPEIAAPFRQLVAAVVINPTEKGQPYEINIKGYLSSLIDSDLSVIKMVAEEGFEPPTQGL

SEQ ID NO: 3384 - protein, 507 aa, synthetic construct
MKRVISYIRFSSEKQSRGDSLRRQSKMVTDWLKAHPEYHLDQDLSFRDLGVSGFTGKHLQGGLGDFLTAIEKGLVKAGDTLLIESLDRLSRQDVDQASELLRNILRSGVDVVTLSDGEHYTKESLKDPLALIKSILIMQRSHEESLRKSERIQAAWNRKKELISEGIKISKRCPAWLKLNDDRKSFSVIPEKVETVKRCFQLRLEGKSIWEIVRTLNDEGHQTLNQYKAGKFGQTSVQDLLKNRSVIGYFTPKGCEEIAGYFPSIIPETDFYKVQQLSYSRYGRKPASDKPLSVNLFKGVIRCSECGHALIITGFSDTRSGIYRCPSRNENRCNAKGLSRKQTDGTLLALLSRLDRFDSDMTNTLDTLKLHREHISNNIEKLVQLSLEIEDLSAITSKLKQLKGELSQVDADIEKETQRLKSIDVGCLSDCDLTTKAGRIEAQLIIKSAVKEVVLNTAKRRCKVTFHNGKVIDLPITENPSEDVTEAIQSLSEVTERGLIDVDEVIV

SEQ ID NO: 3385 - protein, 539 aa, synthetic construct
MKRAAIYARYSTDLQNDQSVEDQFRLCRAHAERLGFNVVEEFSDRAKSGASMFGRPGLANLIQAADRAEFDVLVSEAPDRISRDIADLAHIHKTLKFRGIEMNCVNGGAMDTVQIGMYGVIGQMQREEGAKKVRRGMVGVVRSGRNPGGKAYGYRPIFGRKGELEIVEDEAATVRRIYELYAGGMAPRSIAAVLNDETVPAPRGERWNASTINGSGQRGNGILRNPIYAGRIVWNRIHMVKDPSTGRRISRVNPESEQEEVAAPHLQIVDSGLFDIVQQRKEATGGADRAKGPRSKRILSGLLRCGACGGGMALVGPDRSGNRIQCSTFRESGICKNSRRYYVERIETEVVDGLRRQFADTSVIEAYVEAYQVEQKRLRGDAQRARANAQRALQEAKDGITKIVEKISKGLIEDDEAAALLAPLRAERDRQKAILETTEEPPNVIEIQPKAVKRFRENIESLAQIVREKDGEASPEIAAPFRQLVAAVVINPTEKGQPYEINIKGYLSSLIDSELSVIKMVAEDRLIRSPQISFGRFAA

SEQ ID NO: 3386 - protein, 547 aa, synthetic construct
MKLLVTYIRWSTKEQDSGDSLRRQTNLIDAFYSKHKEEYYLLPAHRYVDKGKSGFHQQHKNQGSDFRRMFENVMSGVIPEGSLIVVENFDRFSRADIDTAIDDVRQILRKGVSILTLGDGELYDKSALTDPVKLIKHIIIAERAHQESLVKQKRIAQVWNHKTQLARELKKPMGKQAPGWLELSEDGSHYIVDEDKASLVNIIYDKRLSGMSMFAICKWLNEQGYPTINQRKVRISKTKKPDGNWSALSVKHILTSRSVLGYLPAKISTEDRKTVLREEIEGFYPQIVTDSKFYAVQQLLEETGKGKTSSGEHWLYVNILKGLIRCRCGLVMTPTGIRKPVYQGTYRCNGNKESRCSYGTVSRKLLDTQLCSRLFSKLSQLHDEATDTAKLDELQRRLNTVDGELEKLTETLIQLPNITQIQEALRVKQEEKDELIVQLSREKARVKSVSSLDLSGLDMESVEGRTEAQIIIKRLVKEIVVSGNEKLVDIYLHNGNMIRGFPLDGKDDHTLTLEEATDEMQPLDDMLIFGEPVTRIYPAGDMEEVDA

SEQ ID NO: 3387 - protein, 507 aa, synthetic construct
MKRVISYIRFSSEKQAKGDSLRRQSKMVTDWLKAHPEYYLDQDLSFRDLGVSGFTGKHLKGGLGDFLTAIEKGLVKAGDTLLIESLDRLSRQAVDRASELLRNILRSGVDVVTLSDGEHYTKESLRDPLSLIKSILIMQRSHEESLRKSERIQAAWDAKKEAAKAGIKVSKRCPAWLKLNDDRKSFSVIPDKVETVKRCFQLRLEGKSIWEIVRTLNAEGHRSMNQYKPGKFGQTSVQDLLKNRSVIGYFTPKGCEEIAGYYPSVIDETTFYKVQQLSHSRHGRKPVSDKPLSVNLFKGVIRCSECGHALIITGFSDTRNGIYRCPLRNENRCSAKGLSRKQTDGTLLTLLSRLDRFDSDTTNTIDMLRLHREHISSNIEKLVQLSLEIEDLSAITSKLRQLKNELSQVDADIEKETQRLKSIDVGCLSDCDLTTKAGRIEAQLIIKSAVKEVVLNTAKRRCKVTFHNGRLIDLPITENPSEDVTEAIQSLSEVTERGLIDVDEVII

SEQ ID NO: 3388 - protein, 496 aa, synthetic construct
MDEIDLYLRRSKITREGVEALTFTTQEERGRAWADQHNYRVRKVWKDNLSAWTDVKRPDFTKALGALRRKEVPALWCYAVDRFDRQGAGSVIQLLDAGARIIFDYERLDSAVPRDRERIISDAERAKTVSDLLSHRVRDTKQGQRRRGEWLGAAPFGLRKDKRGKLHHDAHWDTVLRVITDVADGYAPRVVARRLTSDRKASPKGGPWNASTVRRIVYNPVYEGWQVVALSRKHTWPVAYRNEAGERVRVFADGVDPVPADLVAKARRVHAGHQRGALGPRVGKATHLLTDLLRCAGCGAKMPTSGRSYVCNGHAMGKPCPAPASAMRARIEEYVYRAWVGAVSAADVGAGDPLMIAVAERWAALVAPEETEEAQEALGAVKAAEAAVERLANDRAKGLYDGAMGKYFPRLVAEAEETLKAAQEHANALTGGNIDLTMFDDAELLEEAWEAADLPMRRDLLRVAIEKITVTQAARRGAPFDGDTRCDIEWATPEAA

SEQ ID NO: 3389 - protein, 559 aa, synthetic construct
MKTKLYSYIRFSSMRQNDGSSYERQIRMAREIAAKYDLELVNDYQDLGVSAFKGANSKTGALSRFLDAIGRSVPVGSWLFIENLDRLSRADIVSAQELFLSIIRRGITIVTGMDNKIYSLDTVTANPMDLMFSILLFIRGNEESQTKRNRTNSSALIKIKAHQENPQNPAVAIEEVGKNMWWTDTTSGYVLPHPVYFPVVQEIVELRKNGRSTAEILDHLNETYTPPPAVSNKKHSKWSRAMVERLFHTRALIGIKEVSVDGVNYELKDYYPRVIDDATFYHLKKNIGARAWNFGDKEEVKPIPLLSGIGLLKCDHCGCAMVKVKGTNKRSDQYRYTCDATRSRRLDCEHPNWSFRGDQLEKAVLQLLADKIWIAEDKANPVPALKVQVDEISRKIDNLIALSAMTGATKELADQITTLNSERETLYNQIKMAEEEMYSVDSQGWEKLAEFDLEDVYNEERLKVRFKIKQALKRIGCSRIDRNKNLFVLEYIDGKTQRVVIENSRGTRKGRIFIDLKTINDRQILESNGLVLHPCLDMLTDKNWKPEEEIPGPLQEFGI

SEQ ID NO: 3390 - protein, 507 aa, synthetic construct
MKRVISYIRFSSEKQAKGDSLRRQSKMVTDWLKAHPEYYLDESLTFRDLGVSGFTGKHLKGGLGDFLTAIEKGLVKAGDTLLIESLDRLSRQDIDIASELLRRILRAGVDVVTLSDGEHYTRESLKDPLALIKSILIMQRAHEESLRKSERIQAAWDAKKEAAKAGIKVSKRCPAWLKLNDDRKSFSVIPEKVETVKRCFQLRLEGKSIWEIVRTLNDEGHQTLNQYKAGKFGQTSVQDLLKNRSVIGYFTPKGREEIAGYYPAIIDETTFYKVQQLSHSRYGRKPVSAKPLSVNLFKGVIRCSECGHALIITGFSDTRNGIYRCPLRNENRCSAKGLSRKQTDGTLLALLSRLDRFDSDTTNIIDTLKLHREHISSNIEKLVQLSLEIEDLSAITSKLKQLKGELSQVDADIEKETQRLKSIDVGCLSDCDLTTKAGRIEAQLIIKSAVKEVVLNTAKRRCKVTFHNGKSITLPITENPSEDVTEAIQSLSEVTERGLIDVDEVII

SEQ ID NO: 3391 - protein, 532 aa, synthetic construct
MTPRNTSGQGSPTEGEPWLAYIRVSTWKEEKISPELQRAAIEAWERRTGRRVIDWIDDLDVSGRHFKRKIMKCIERVEGGEARGVVVWKYSRFGRSRDGIALNLKRLHDAGGELDSATEDADSRTATGRLQRGILFEFAAYESDVRGEGWKESHEHRRTHLRLPATGRPRFGYVWHPRRIPDGKGGWTLQDEKYVADPETGPVMADRYRQYLDGEPFYALLSDLNNAGWRTTRGGLWTAQTLIRYMDSGFCAGLLRIHNPECRCAPHVRSNCQDTLLIPGAQEELIDLDLWQQYRDRRQEMKRTPPRARTALYPLTNLVRCAGCRGTTPVQSAIRMVEGKPVSIKGHNYMCGRRAVTGTHGCEGVYAARAAVEEEVGKWLRKQAPAIDAAPSVPPQRDPVADPRAAAARERARLDAEAAKLKKGLANLRADRAMNPDDYEPGEYEAAVERIRQQQAVNTAALERVSVVELTPRQADYEPVIVGLAEEWATDLLSAVERNGILKQLIRRVALVRQGKGFAIEVHPMWEPDPWA

SEQ ID NO: 3392 - protein, 507 aa, synthetic construct
MKRAISYIRFSSEKQSRGDSLRRQSKMVNDWLKAHPEYYLDQDLSFRDLGVSGFTGKHLKGGLGDFLTAIEKGLVKAGDTLLIESLDRLSRQAVDRASELLRNILRSGVDIVTLSDGEHYTRESLKDPLALIKSILIMQRAHEESLRKSERIQAAWDAKKEAAKAGIKVSRRCPAWLRLNDDRKSFSVIPEKVETVKRCFQLRLEGKSIWEIVRTLNAEGHRSMNQYKPGKFGQTSVQDLLKNRSVIGYFTPKGCEEISGYFPPIIPETDFYKVQQLSYSRYGKRSVSDKPLSVNLFKGVIRCSECGHALIITGFSDTRNGIYRCPLRNENRCSAKGLSRKQTDGTLLTLLSRLDRFDSNTTNTIDMLRLHREHISNNIEKLVQLSLEIEDLSAITIKLKQLKGELSQVDADIEKETQRLKSIDAGCLSDCDLTTKAGRIEAQLIIKSAVKEVVLNTAKRRCKVTFHNGKVIDLPITEDPSEDVTEAIQSLSEVTERGLIDVDEVII

SEQ ID NO: 3393 - protein, 487 aa, synthetic construct
MKYAVYVRVSTDKDEQVSSIQNQIEICRYWIEKNGFEWDENSIYKDEAVSGTAWLERRAMQLILGKARKKELDTVVFKSIHRLGRDLRDALEIKEILLGHGVRLVTIEEGYDSYYEGENDLKFEMYAMFASQLPKTLSVSISAALAAKVRRGEYTGGTVPYGYKIVDKKYVINQEEAEIVREMYELYDNGLGYLRISNALNDVGKYKRSGKLWTYSAVKLIITNPMYKGDYVMGRSTEVKVDGRKKRIQEPREKWVVFENHHPAIIERSLWDKINNPKINKKIKRRVAVTNELRGIARCIHCGSPFVLHTYKYKNKEGEELNYGYLTCGTYKLTGGRGCVKHSGLRYERLRSLVLRKLKEKERDLEKVFKLNDKDKHQEKQKKLRKEKKELEIKRERLLDLYLDGGSIDKATFTKRDANFAKNIKEKELEILKLDDVKALIVEQQKVKDAFKLLEDSENLYPVFKKLIARIDISQNGAVDIRYRFEE

SEQ ID NO: 3394 - protein, 515 aa, synthetic construct
MKTAIYLRKSRADLEAEARGEGETLAKHRTTLLKIAKEMNLNVLSVREEIVSGESLVKRPEMLALLEEIEDNKYDVVLCMDMDRLGRGGMKEQGIILETFKRSNTKIMTPRKTYDLNDEWDEEYSEFEAFMARKELKIITRRMQRGRVASVEAGNYLGTHAPFGYDIHRLNKRERTLTINSEEASVVRMIFDWYANEDMGANAIRSKLNDLGYKSKLGNEWNPYSILDILKNNVYIGKVTWQKRKEVKQPDAVKRSCARQDKSDWIIADGKHEPIIPESLFEQVQEKLNSRYHVPYNTNGIKNPLAGIIKCSKCGYSMVQRYPKNRKETMDCKHRGCENKSSYTELIEKRLLEALKEWYINYKADFEKHKQDDKLKETQVIQMNEAALRKLEKELVDVQKQKNNLHDLLERGVYTVDMFLERSNVVSDRITEITSTMENLKKEIKTEIKKEKVKKDTIPQVEHVLDLYFKTDDPKKKNSLLKSVLEKAVYKKEKWQRLDDFELVLYPKLPQDGDI

SEQ ID NO: 3395 - protein, 547 aa, synthetic construct
MKLLVTYIRWSTKEQDSGDSLRRQTNLIDAFYAKHKDDYYLLPAHRYVDKGKSGFHQQHKNQGSDFRRMFENVMSGVIPEGSLIVVENFDRFSRADIDTAIDDVRQILRKGVSILTLGDGELYDKSALTDPVKLIKHIIIAERAHQESLVKQKRIAQVWNHKTQLARELKKPMGKQAPGWLELSEDGSHYIVDEDKASLVNIIYDKRLSGMSMFAICKWLNEQGYPTINQRKVRISKTKKPDGNWSALSVKHILTSRSVLGYLPAKISTEDRKTVLREEIESFYPQIVTDSKFYAVQQLLEETGKGKTSSGEHWLYVNILKGLIRCKCGLVMTPTGIRKPVYQGTYRCNGNKESRCSYGTVSRKLLDTQLCSRLFSKLSQLHDEATDTAKLDELQRRLNTVDSELEKLTETLIQLPNITQIQEALRVKQGEKDELTFQLSREKARVKSVSSLDLSGLDMESVEGRTEAQIIIKRLVKEIVVSGNEKLVDIYLHNGNMIRGFPLDGKDDHTLTLEEATDEMQSLDDMLIFGEPVTRIYPAGDMEEVDA

SEQ ID NO: 3396 - protein, 506 aa, synthetic construct
MRSVITYLRYSSAIQGAEGADSTRRQNDLFKQWLKKNSDAQVVASFSDEGLSGYKGKHLTGQFGDMLARIESGEFPEGTILLVESIDRIGRLEHLETEALMNRILGNGLEIHTLQDGLIYTKDALADDLGISIIQRVKAYIAHQESKQKSFRVSQKWEQRAKLALAGEQRLTKMVPGWIDPDTFKLNEHAETVRLIFKLLLSGESLHNIARHLQANNISSFSRRKDANGFSVHSVRTILRSETTRGTLPASQRNDRPAIPNYYEAAIDAATFNKAQEILDKNRKGRTPASDNPLTINIFKGLFRCQCGASVHPTGTKNKYAGVYRCNNHLDGRCDVPPLKRKPFDKWMIDNFLGMIDVGNDGEAEGKIASLQHEVEIVTTRIKKATALLLEMDDITELKTQVKELNQKRTELQTTIDSMRRKTSLSDKGLPQLKDIDLMTKEGRVECQLILSKHLKGLTLGKDSVTVTLQNDTEITIPTNPLPLNDGTSIFEIAEKELLEIDAYQL

SEQ ID NO: 3397 - protein, 507 aa, synthetic construct
MKRVISYIRFSSERQAKGDSLRRQSKMVNDWLKAHPEYYLDQDLSFRDLGVSGFTGKHLKGGLGDFLTAIEKGLVKAGDTLLIESLDRLSRQDIDIASELLRRILRAGVDVVTLSDGEHYTKESLRDPLALIKSILIMQRAHEESLRKAERIQAAWDAKKEAAKAGIKVSKRCPAWLKLNDDRKSFSVIPDKVETVKRCFQLRLEGKSIWEIVRTLNAEGHQSMSQYKPGSFGQTSVQDLLKNRSVIGYFTPKGCEEISGYYPAIIDETTFYKVQQLSHYRYGRKPVSDKPLSVNLFKGVIRCSECGHALIITGFSDTRNGIYRCPLRNENRCSAKGLSRKQTDGTLLTLLSRLDRFDSDTTNTIDTLKLHREHISSNIEKLVQLSLEIEDLSAITSKLKQLKNELSQVDADIEKETQRLKSIDVGCLSDCDLTTKAGRIEAQLIIKSAVKEVVLNTAKRRCKVTFHNGKIIDLPITENPSEDVTEAIQSLSEVTERGLIDVDEVII

SEQ ID NO: 3398 - protein, 555 aa, synthetic construct
MCVAIGYMRYSSKLQGAGSTIHRQKSLINKWVEDQKTHHGKVYEVKLYTDKGLSGWTGENLLAGALGRLIEEVEAGGYPEGTPIILESIDRLSRQGHEEATAILRRLTSTGCVVHSILDRQVIKRSDLKTFIGAMQIIAVAERGREESDIKSERVSSSKERNYELAKLGKKLVTRNLPGWIYLDQKGKMQIDPAKQKLVKEIFEMRLAGHTYQGIAETMTNRGEPVLNERKGAQRWLPNSIRTLLHSRSVIGVLPASKVNDKYKEIEDYFPSAITKDLFYAVNDLNVPAVRSREKKQYPETVFLFKGLVKCRYCKGNVFLNGAKPGYWARIRCIGHHDKVCDAPSLPRYDFEQSLITRMFPLLKSMDVSTEENPVAVLQAKIDHLTNILEGYYDDLEEIPREDKPRRKSINERISKRANEKEEYERQLVVVRRKMEVRTDNTLSDLNYDDYSDRLKMQLVISRNIERIVLDSFFDKVHIKLVNGNALMNFPIYGDVDGSKLVITAKENTGITDVEIILGLDEAMPTVYNLAPSSGENLDDREFPEVEPDYPNTDE

SEQ ID NO: 3399 - protein, 506 aa, synthetic construct
MRSVITYLRYSSAIQGAEGADSTRRQNDLFKQWLKKNSDAQVVASFSDEGLSGYKGKHLTGQFGDMLARIESGEFPEGTILLVESIDRIGRLEHLETEALMNRILGNGLEIHTLQDGLIYTKDALADDLGISIIQRVKAYIAHQESKQKSFRVSQKWEQRAKLALAGEQRLTKMVPGWIDPDTFKLNEHAETVRLIFKLLLSGESLHNIARHLQSNGIKSFSRRKDANGFSVHSVRTILRSETTIGTLPASQRNDRPAIPNYYEAAIDASTFNKAQEILGKNRIGRTPASDNPLTINIFKGLFRCQCGASVHPTGTKNKYQGVYRCNNHLDGRCDVPPLKRKPFDKWMIDNFLGMIDVGNDGEAEGKIASLQHEVEIVTTRIKKATALLLEMDDIDELKIQLKELNQRRTELQTTIDNMRRKASLTDKELPQLKDIDLTTKAGRVECQLILSKHLKGLTLGKDSVTVTLQNDTEITIPTNPLPLNDGSPIFEIADKELLDIDAYQL

SEQ ID NO: 3400 - protein, 507 aa, synthetic construct
MKRAISYIRFSSEKQSRGDSLRRQAKMVTDWLKAHPEYYLDESLTFRDLGVSGFTGKHLKGGLGDFLTAIEKGLVKAGDTLLIESLDRLSRQDVDQASELLRNILRSGVDVVTLSDGEHYTRESLKDPLALIKSILIMQRSHEESLRKSERIQAAWDAKKEAAKAGIKISRRCPAWLKLNDDRKSFSIIPEKVETVKRCFQLRLEGKSIWEIVRTLNDEGHQTLNQYKAGKFGQTSVQDLLKNRSVIGYFTPKGREEIAGYFPPIIPETDFYKVQQLSYSRYGRKPASDKPLSVNLFKGVIRCSECGHALIITGFSDTRSGIYRCPLRNENRCSAKGLSRKQTDGTLLALLSRLDRFDSDTTNIIDTLKLHREHISSNIEKLVQLSLEIEDLSAITSKLKQLKGELSQVNADIEKETQRLKSIDVGCLSDCDLTTKAGRIEAQLIIKSAVKEVILNTAKRRCKVTFHNGKVIDLPITEDPSENVTEAIQSLSEVTERGLIDVDEVII

SEQ ID NO: 3401 - protein, 576 aa, synthetic construct
MKSYLYSRISTLQQVQGFGIERQIQTVTDFLENAVLDSRLGYQLDPNDYEILESDIGKSAFRGNNWKPNSNLGRFYDDVINKRITRGALIVENIDRLTRLSNYQASHKLSTLITHGIDIIEVESGTCFSDRIPESNSILNMSISRAHNESKRKSNMGQKTWTNRISKLRDEGKASVKICPRWLTVQDGKYVLDPEQAAILLSIHQQYVEGHGSSAIVRRLNDEGKLNSGKLWNTLTLHKVLRDERLTGKMVIGKQRVVDTSKSKEEQKKQREEIKNNLITVDDAFPVVVDQELFNRVQAKINSSKHGTQKPKTTKLMRNLFNGISICGVCGNPFIVCSNGRGNLFYTCLGRRSEKTCTNIGVKYTQFEMSILRHIKELNWNSIYNGENEKTDSLNECRQKIVDVERRIGDFNRELADLDDDDLEFHIIRRIKKNKEVLNELVIELNTLMANSDTFTDFNPDLNLVHDQSNTYLRQDTNVAVRKVIRQLSIAREGNLVQCWIKYYTDSISHLFIYDVKKENVVSKTYISDDGVFHFDAGSINIRTGTINITSTELKEEDKIAFELWAAMIEKATSQL

SEQ ID NO: 3402 - protein, 533 aa, synthetic construct
MVKKNVAVIPAKTIQEVRGLPIQARTRVCAYCRVSTDNEEQLSSYEAQVSHYTNYIQSKLEWDFAGIYADEGISGTNTKKRVEFNRMIEDCMAGKIDMVITKSVSRFARNTLDCLQYIRMLREKGIAVYFEKENINTLDAKGELLLVIMGSLAQEESRSLSTNTRWGIVHQFQEGKVRITHTKFLGYTKDENGDLKIVPKEAKIIERIYKEYLQGKSATRIAKDLEKDGIKTPTGRKRWWESTVTSILRNEKYMGDALLQKSLTVDFLTKKRVKNKGHAQQYYVEDSHPAIISKEMFQQVQEELKRRSSLRKKPTELKTRFTSEYPFSGITYCGKCGMKFRRKRWGTKKYAQDMWMCMTRVDKGVEACDMPAAHEEKLKQAFVRAINKAINDKEAFVKKIVENVEKVVPPIEEDLSIEEIEARLKELQQELMSLVRLNVNTGFDAEVYDGEYGRIAKEIESLREKKQRIQEAKLDDTIRKNRAEQIAEIIKEQDLVKGFDEELFREVIDRVTVLSIVEVEFQFKSGLNVKEIL

SEQ ID NO: 3403 - protein, 562 aa, synthetic construct
MIKKEDEKVAKRVLTIEANKATINDITDIKNKAKMRVAAYCRVSSSKEEQLNSFEAQVSHYTNFIKNNEAWDFAGIYADEGISGKSKEKRTEFMRMIKECEGRKIDMVITKSISRFARNTADCIEVVRKLKTLGVAVFFEKENINTMNAESELVLSVLSSIAQEELSSLSQNIRWGNQKRYQKGIVKVNTKRFLGYDVSEEGKLIINEAEAVIVRRIFKDYIGGKGTGIIARELEHDGIKTVTGKARWSGSAVRNMLANEKYCGDAILQKTYTADTVTFKRKKNRGELPQYYIKDNHEPIISRKEFELVQKIREDRAGKHGNILGDREKYKNRYPFTYKIVCNNCGRPFKRHIQNSGKSCEVASWGCSTYLDRGSKECNMKPIYEETIKAVFVRMFNKLYTNKDVVLKPFIQNVKRIIDARLEDEGIKNFDKEIEHLLEQERMLLKLKEKGYADEEIYYEEKNKLSKNIAALREQRSKLAWELTGQDEWVDRANKVYEFISGIDNILEEFDEEIFNAIVEKITVKSDKHIIFELKNGLSLDEYFEKQRGRKGKIIFKEGENG

SEQ ID NO: 3404 - protein, 526 aa, synthetic construct
MGQPNYLEIKRACAYIRYSSDNQRDESLEAQIRAIKEFGYTKGYEIVKVYQDKAKSATTDRRPGFQQMIKDSANDIFDVVIVHKLDRFSRDKYDSAQYKRKLKQNGVKLVSVTENLDDSPESVILESVIEGMAEYYSKNLAREVMKGMKETAYQAKHTGGLPPLGYDVNAEKKYVINEREAESVRLIFEMYTARYTLSQMVDELNSRGFKTKAGAIFKHNSINSVLTNEKYTGVYIFNKSAKKDAYGRRNSHLQKDPSEIIRIEGGMPQIIDKELYEKAQEILRSRKKSKAVNKAKESYLLSGIIKCGECGYAMYGNRRQAKSKPLYVSYRCGCRKRTSSNVCSNKEIRKEYIEEYVLTELEARIFNDKSIPLLVEGINEELKKQSEGDEDKRGIIEKELKDIKKQIGNIVMAITNGFIQEEFKVKMEELKERKAYLEGKLVDIETSQSVTKVTEEDIRGLLAGFREYVVTKNIPECKNFIQDFVKEVVVYKTHVEVIFNVGFNFIKDTYVDIKSIIPRTKLFLVL

SEQ ID NO: 3405 - protein, 502 aa, synthetic construct
MKRIAIYSRKSVYIEGSISIETQINMCKEYMLKKFKDCEFKIFEDEGFSGGNTNRPAFKKLLRLAELKQIDIVVCYKIDRIARNTLDFLNILEMFKENNVELISITEGFDPNTQMGKVMLTLLASFAEMERSNIQQRVKDNLLSIAKKGKWTGGSPPTGFKNNPNGGIEWDNKDMILDVFNMKYEKSKNTDLIQFIQHKYNHKFLGGTLATTLRKPIYVKSSSSVSLYLKSKGYIVQGTEDNIHSYLTYTDKDTKYAIVSNIVGLIEPSIWISVNKDMDKNISREGNRFSEKFWLTKTIRCKCCGQTYCGQTKTTKTKYYNKKGEEKIYVSTYSYYSCRDAVRGKLKTCNNTKRIKQDVLEAKVSALIYSLKDEKIFNSSYSINKVDNSFKIASLNKKVIEIDKTISNLTDKIALLSNDASLIFIDKIENLIKEKSSIKSNIVELELQELNSKIKTDKALIYNNIKAFNNNLSVDDKRKITMSIFKKIVYDPETNDLDVTFM

SEQ ID NO: 3406 - protein, 507 aa, synthetic construct
MKKDCFLYCRTSTTDQITSIKAQENFKSNEYSILEIFSDFGKSATKVKNRPQFIDMLNKCGVKIVSLENKIVFLPNGKKPKTNLIIVSHTSRFMRNAKYMEDVLDTLKEVGVEVRFLDMNKSSYDIDFKFTLSILFLLDEQESRNTSIKVKNGLKKAREQRQYLHYGFGNMLGLDYIKEENRLVKNKDSHIVENIFIDYGINKLSMRELANKYNKTADKIRRILMNEKYCGYNAYNKYNEDNRSTLKENYEIFESDRIEAIITKELFDKCRGIRLSRKNSDGGGKATDTYSLSSKIICSQCGKSYFHKAKNKKGDTWCCITKHNSKQCDNPNLNEDLIIKYINQNLDRYKEITQTLINLSKERLIKIDITNMQNELLKLQTSKDKLLDLYLTDESFDKETYLFKNAMIESNINSINSEIKKAQSIDESIEYLEKLQNSYNLQFNLFHDILNNNKYDIFNYISKIQVSKHFDVASNSIKPNIDYVIFKGFEKLHELEISIFPSATKFY

SEQ ID NO: 3407 - protein, 559 aa, synthetic construct
MKTKLYSYIRFSSMRQNDGSSYERQIRMAREIAAKYDLELVNDYQDLGVSAFKGANSKTGALSRFLDAIGRSVPVGSWLFIENLDRLSRADIVSAQELFLSIIRRGITIVTGMDNKIYSLDTVTANPMDLMFSILLFIRGNEESQTKRNRTNSSALIKIKAHQENPQNPAVAIEEVGKNMWWTDTTSGYVLPHPVYFPVVQEIVELRKNGRSTAEILDHLNETYTPPPAVSNKKHSKWSRAMVERLFHTRALIGIKEVSVDGVNYELKDYYPRVIDDATFYHLKKNIGARAWNFGDKEEVKPIPLLSGIGLLKCDHCGCAMVKVKGTNKRSDQYRYTCDATRSRRLDCEHPNWSFRGDQLEKAVLQLLADKIWIAEDKANPVPALKVQVDEISRKIDNLITLSAMTGATKELADQITTLNSERETLYNQIKMAEEEMYSVDSQGWEKLAEFDLEDVYNEERLKVRFKIKQALKRIGCSRIDRNKNLFVLEYIDGKTQRVVIENSRGTRKGRIFIDLKTINDRQILESNGLVLHPCLDMLTDKNWKPEEEIPGPLQEFGI

SEQ ID NO: 3408 - protein, 634 aa, synthetic construct
MKLEHFSHTEPQIYSYSRFSNIRQEKGRSLARQKKFIDEVSAKFNLKINKDLVMTDRGLSAFHGHHKTKGALGVFLAAVEKQLIKPGSVLIVESLDRLSREQPYIAQATLASLVNADIVVVTAADEKIYSKETMAKDPLGTMILSVLEMVRAHKESLRKTEASIDFLHGQIATHEEGGVSDLAGPLPFWISRKQRPHPKIKTGFELNEHEEIIRLIVDMHFKQGMGLRPISVELLNRGIKPPSQLKHSPANSRKPKNDVWGVSTLSHIVSNQALCGRYVVNLNYQKDGKKHVEDYVLRSYYPAIMSEEEFDTFQAIKKRRYGSNKGDKSKRNGLVYLLTDYGNKSVCVKCGRSIGSQPQKQKHGIRRRLHCSKHKETANCCKSIIQDYIEDAFLISVARHIDYNLINTQVKPADIIRNSDRLEEIDLEMANVIDMRRTVKDEKIKLKLKFDYETLENEKEELIKQKLEFKQFKIAPDDIKKFIRTVNDARNYNNNEARTFVKSILMQCIRKIEVHMEKKKLECYGYPNLFENAIVNVVDVEFYTDKKLSIFVSAETNALLFSKISDEFADESLGSFTEEQLKAWNDVGFDNFQNLGERGTLVNENENSTENLWFASDLAEAFMNEMINQPEDES

SEQ ID NO: 3409 - protein, 547 aa, synthetic construct
MKLLVPYIRWSTKEQDSGDSLRRQTNLIDAFYAKHKEEYYLLPAHRYVDKGKSGFHQQHKAQGSDFRRMFENVMSGVIPEGSLIVVENFDRFSRADIDTAIDDVRQILRKGVSILTLGDGELYDKSALTDPVKLIKHIIIAERAHQESLVKQKRIAQVWNHKTQLARELKKPMGKQAPGWLELSEDGSHYIVDEDKASLVNIIYDKRLSGMSMFAICKWLNEQGYPTINQRKVRISKTKKPDGNWSALSVKHILTSRSVLGYLPAKISSEDRKTVLREEIEGFYPQIVTDSKFYAVQQLLEETGKGKTSSGDHWLYVNILKGLIRCKCGLVMTPTGIRKPVYQGTYRCNGNKESRCNYGTVSRKLLDTQLCSRLFSKLSQLHDEATDTAKLDELQRRLNTVDGELEKLTETLIQLPNITQIQEALRVKQEEKDELIVQLSREKARVKSVSSLDLSGLDMESVEGRTEAQIIIKRLVKEIVVSGNEKLVDIYLHNGNMIRGFPLDGKDDHTLTLEEATDEMQPLDDMLIFGEPVTRIYPAGDMEEVDA

SEQ ID NO: 3410 - protein, 569 aa, synthetic construct
MTDIKDVFKHHKSRVDKIDTIEEKTKKDTYGVLIRVSDVKQVTKDSIPMQRERAYKFIKERDGILYKEYIEEAVSASKNSIKQRPVLQELLKDIEDGKINKVIAYKRDRLSRIQKDWLTILDTIFKNNCDIEFTSAEEQPISSNPMVRGIMEPVLGFLANMESNNTSMRVKETRASIAAKGRWTGGTLPYGYDLNKNKEIVVIKEVIPSLIEIEDLYLNGIGVGSITRYMNGHEVKHLGKRKKGADIKRVVYKGRKTYWTESAVEGVLFNPFYAGIIEYSKEGNKHLQYDQDKFVREKGFHEAIRTLDKQEKIYEMKSKKSISAPRKFSTTFLLTGLVYCSECGSPIQSRTVLKKERNNEKYCYYVCASKQNKDKTSRNEICPSKNFKQNILEDFVVSKLLEMFDGFNKDNLKEEILKGIDQGKSTIETDIVSAQAELKELQSELVSIMNLMKRVSPESPLYEEIITDYEKSYTETLLKKKEIEEKLESLQQSIKENNDKEIEQNIVLDALKNFSIVFKEASQVQRKILLDSIIKRIDISQDGKLNILCNFEIPKDEKSYVHSINRRPV

SEQ ID NO: 3411 - protein, 494 aa, synthetic construct
MKAAIYIRVSTDEQANEGFSIDAQKRRLLAYADSQDWEVTEVYIDDGWSAKDLKRPEMQRMIGDVKQKLFDVVLVYKLDRMTRSSNDCDHLLKMFEAHSVKFQSCTESFETRTATGRLFIRLVADIAQWERENTAERVRFGMEQMVMEGRRPGGPVPFGYDKSGKLVEEEAAQIRLLRRFYMEGDGIKAIAIKLNGMGKYRRGFKWSAFPVWYILDNPYYAGKLRYGTKKSNGKYASRKKEGVVDLIVQESDNEKLFTWEEYEEHKAEMHRRSFDGYSKSREYWFSGVLICGKCGSKMSGRYHQNKRKDGSYNKITSYICANRQTGKGCTMPMFRQELVEKLLMEWIEGKLTIDHNVIREISVTAEEDPNESLRDDLNKELQKVRERRKKWQRMYADDLISQDELREHNADEKANEDIIMAELEKMPEMSSESLTAPSDIIYDLPELWPLMEDKDKHDLILDIFKEIKLYTPVDKAHGKKGKFIPASIESVVFN

SEQ ID NO: 3412 - protein, 556 aa, synthetic construct
MSAAHPLIDPLKKAAIYVRVSTSEQAEEGYSIEEQLYVLREWCEKQQYQIYHEYADRGVSGKNMNRPALKQLLQDAKQGVFDVLVVWKMNRLARNVLDMLQMVNVLNANQVDFRSFKENLETETPAGKLQFHMLASVSEFERDNIAENVKMGMIARAKEGWWNGGRVLGYDSVEDTTISSRRRARKLVINDKEAITVKRIFQLYLLGNGYKSIANTLNKEGHQTKNQRSFSINTVKTILENPVYVGKIRYNVRRDWATKRRKGINPEPIIQKGKHKPIITDVTWEKAQSILKQRSCKPNRVHSGEYLLTGLLRCPECGAGTVLGRTTNKKKDGTRYALEYYVCGAWKNKGSTVCHSNGVRTQYADEYVLKKLSTLSKNEMLVRSIVEKINSQHSTITQPLRDEHIILQRQIENLSVKKTRLLDLYKESVITKADFQEDYNQMNEDMMKLEERLRPLERQLSTEEAPTLSYGTVKQVMENFTDFFKHAGTMEQRKYLLHLLIKQVTIGSDRKINSIHIQLNNEVVKGLSKEGESPDEGDSPSFYFVIDLCSYIREGI

SEQ ID NO: 3413 - protein, 547 aa, synthetic construct
MKLLVPYIRWSTKEQDSGDSLRRQTNLIDAFYAKHKDDYYLLPAHRYVDKGKSGFHQQHKAQGSDFRRMFENVMSGVIPEGSLIVVENFDRFSRADIDTAIDDVRQILRKGVSILTLGDGELYDKSALTDPVKLIKHIIIAERAHQESLVKQKRIAQVWNHKTQLARELKKPMGKQAPGWLELSDDGSHYIVDEDKASLVNIIYDKRLSGMSMFAICKWLNEQGYPTINQRKVRISKTKKPDGNWSALSVKHILTSRSVLGYLPAKISTEDRKTVLREEIEGFYPQIVTDSKFYAVQQLLEETGKGKTSSGEHWLYVNILKGLIRCKCGLVMTPTGIRKPVYQGTYRCNGNKESRCSYGTVSRKLLDTQLCSRLFSKLSQLHDEATDTAKLDELQRRLNTVDSELEKLTETLIQLPNITQIQEALRVKQEEKDELIVQLSREKARVKSVSSLDLSGLDMESVEGRTEAQIIIKRLVKEIVVSGNEKLVDIYLHNGNMIRGFPLDGKDDHTLTLEEATDEMQSLDDMLIFGEPVTRIYPAGDMEEVDA

SEQ ID NO: 3414 - protein, 502 aa, synthetic construct
MKKVAIYSRKSVLVEGSVSIETQINMCKDYINNKFPNAKFKVFEDEGFSGGNINRPAFQKMLRMAQLNEIDIVVCYKVDRIARNTLDFLKILELFKENNVELISISEGFDPNTQMGKVMLTLLASFAEMERTNIQQRVKDNLLSIAKKGKWTGGSPPTGFKNGLNGGLEWNKQDMILDVFNMKYEKEKNSNIIKYIKEKYNHNFLGGTLATTLRKPIYVKSSPSVSLYLKTKGYIVQGDEDNIHSYLTYTDKETKYAIVSDIVGLIEPSIWISINKDMDKNISREGNRFSEKFWLTKTVRCKYCGQTFCGQTKTTKTKYYNKYGEEKIYISTYSYYSCRDAVRGKLKTCKNTKRVKQEILESKVSELIHLLKDKKTFNSSYFSNKIDNSSKIDTIKKQIKSVDKTINNLTDKIALLSNEASLIFISKLEELVKEKSILKDNLLQLELQELNSNTKKDSSLVYNNILAFNDDLSVDDKRKIAMSLFKEIIYDPETDSLDVTFM

SEQ ID NO: 3415 - protein, 547 aa, synthetic construct
MKLLVTYIRWSTKEQDSGDSLRRQTNLIDAFYAKHKDDYYLLPAHRYVDKGKSGFHQQHKNQGSDFRRMFENVMSGVIPEGSLIVVENFDRFSRADIDTAIDDVRQILRKGVSILTLGDGELYDKSALTDPVKLIKHIIIAERAHQESLVKQKRIAQVWNHKTQLARELKKPMGKQAPGWLELSEDGSHYIVDEDKASLVNIIYDKRLSGMSMFAICKWLNEQGYPTINQRKVRISKTNKPDGNWSALSVKHILTSRSVLGYLPAKISSEDRKTVLREEIEGFYPQIVTDSKFYAVQQLLEETGKGKTSSGEHWLYVNILKGLIRCKCGLVMTPTGIRKPVYQGTYRCNGNKESRCSYGTVSRKLLDTQLCSRLFSKLSQLHDEATDTAKLDGLQRRLNTVDSELEKLTETLIQLPNITQIQEALRVKQEEKDELIVQLSREKARVKSVSSLDLSGLDMESVEGRTEAQIIIKRLVKEIVVSGNEKLVDIYLHNGNMIRGFPLDGKDDHTLTLEEATDEMQSLDDMLIFGEPVTRIYPAGDMEEVDA

SEQ ID NO: 3416 - protein, 507 aa, synthetic construct
MKRVISYIRFSSEKQAKGDSLRRQSKMVNDWLKAHPEYYLDQDLSFRDLGVSGFTGKHLKGGLGDFLTAIEKGLVKAGDTLLIESLDRLSRQDIDIASELLRNILRSGVDVVTLSDGEHYTRESLRDPLALIKSILIMQRAHEESLRKAERIQAAWDAKKEAAKAGIKVSKRCPAWLRLNDDRKSFSVIPDKVETVKRCFQLRLEGKSIWEIVRTLNDEGHQSMSQYKPGKFGQTSVQDLLKNRSVIGYFTPKGCEEIAGYYPAIIDETTFYKVQQLSHSRYGRKPVSAKPLSVNLFKGVIRCSECGHALIITGFSDTRNGIYRCPLRNENRCSAKGLSRKQTDGTLLALLSRLDRFDSDMTNTIDMLRLHREHISSNIEKLVQLSLEIEDLSAITIKLKQLKGELSQVDADIEKETQRLKSIDVGCLSDCDLTTKAGRIEAQLIIKSAVKEVVLNTAKRRCKVTFHNGKSITLPITENPSEDVTEAIQSLSEVTERGLIDVDVVEI

SEQ ID NO: 3417 - protein, 507 aa, synthetic construct
MKRVISYIRFSSERQAKGDSLRRQSKMVTDWLKAHPEYYLDQDLSFRDLGVSGFTGKHLKGGLGDFLTAIEKGLVKAGDTLLIESLDRLSRQDIDIASELLRRILRAGVDVVTLSDGEHYTKESLKDPLALIKSILIMQRAHEESLRKAERIQAAWDAKKEAAKAGIKVSKRCPAWLKLNDDRKSFSVIPEKVETVKRCFQLRLEGKSIWEIVRTLNDEGRQTLNQHKAGSFGQSSVQDLLKNRSVIGYFTPKGCEEIAGYYPAIIDETTFYKVQQLSHSRYGRKPVSAKPLSVNLFKGVIRCSECGHALIITGFSDTRSGIYRCPLRNENRCSAKGLSRKQTDGTLLALLSRLDRFDSDTTNIIDTLKLHREHISSNIEKLVQLSLEIEDLNAITNKLKQLKNELSQVDADIEKETQRLKSIDVGCLSDCDLTTKAGRIEAQLIIKSAVKEVVLNTAKRRCKVTFHNGKVIDLPITENPSEDVTEAIQSLSEVTERGLIDVDEVII

SEQ ID NO: 3418 - protein, 479 aa, synthetic construct
MNKVAIYVRVSTKGQAEEGYSIDEQIALLTSYCSIHKWKIHDTYVDAGISGATIERPELSRLSRDAQKKKFNTMIVYDLKRLGRSQRNNISFIEDVLEKNGIGFISLTENFDTSTPLGKAMVGILSAFGQLDRDTIRERMMMGKIGRAKSGKPMMTSTIAFGYNYDKVTSSLNINQAEAIIVKTIFNEYLSGRSLTKLRDYLNENDLLRNGKPWNYQGVSRVLRNPVYMGMVRFRGEVYQGNHDPIIDSETFEAVQKELKKRQLETYEFNKNTRPFRAKYMLSGIIKCGYCGSPMGVTLGTKRKDGTRNIRYQCVNRFPRTTKGITVYNNGQKCNSGFYEKDDIEIYVLGQVRLLQLNKAKLNKMFETPEIINVEEIENQINSLNNKMKRLNDLYLNDMISLDELKTQTYTFLKQKDLLENELNNNPAIHQEENRKQFQKLLGTKDITQLSYEEQSFAIKNLIDKVFVKPGIIDINWRI

SEQ ID NO: 3419 - protein, 507 aa, synthetic construct
MKRVISYIRFSSEKQAKGDSLRRQSKMVTDWLKAHPEYHLDQDLSFRDLGVSGFTGKHLKGGLGDFLTAIEKGLVKAGDTLLIESLDRLSRQAVDRASELLRNILRSGVDVVTLSDGEHYTSESLKDPLALIKSILIMQRAHEESLRKSERIQAAWDAKKEAAKAGIKVSKRCPAWLKLNDDRKSFSVIPEKVETVKRCFQLRLEGKSIWEIVRTLNDEGHQTLNQYKAGKFGQTSVQDLLKNRSVIGYFTPKGCEEITGYFPSIIPETDFYKVQQLSYSRYGRKPASDKPLSVNLFKGVIRCSECGHALIITGFSDTRNGIYRCPLRNENRCSAKGLSRKQTDGTLLTLLSRLDRFDSDTTNTIDMLRLHREHISSNIEKLVQLSLEIEDLSAITIKLKQLKGELSQVDADIEKETQRLKSIDVGCLSDCDLTTKAGRIEAQLIIKSAVKEVVLNTAKRRCKVTFHNGRAITLPITENPSKDVTEAIQSLSEVTERGLIDVDEVII

SEQ ID NO: 3420 - protein, 506 aa, synthetic construct
MRSVITYLRYSSAIQGAEGADSTRRQNDLFKQWLKKNSDAQVVASFSDEGLSGYKGKHLTGQFGDMLARIESGEFPEGTILLVESIDRIGRLEHLETEALMNRILGNGLEIHTLQDGLIYTKDALADDLGISIIQRVKAYIAHQESKQKSFRVSQKWEQRAKLALAGEQRLTKMVPGWIDPDTFKLNEHAETVRLIFKMLLSGESLHNIARHLQANNISSFSRRKDANGFSVHSVRTILRSETTIGTLPASQRNDRPAIPNYYEPAIDASTFNKAQEILDKNRKGRTPASDNPLTINIFKGLFRCQCGASVHPTGTKNKYAGVYRCNSHLDGRCGVPPLKRKPFDKWMIDNFLGMIDVGNDGESERKIASLQHEVEIVTARIKKATALLLEMDDIDELKIQLKELNQRRTELQTTIDSMRRKTSLSDKGLPQLKDIDLMTKAGRVECQLILSKHLKGLTLGKDSVTVTLQNDTEITIPTNPLPLNDGSPIFEIADKELLDIDAYQL

SEQ ID NO: 3421 - protein, 547 aa, synthetic construct
MKLLVTYIRWSTKEQDSGDSLRRQTNLIDAFYSKHKNDYYLLPAHRYVDKGKSGFHQQHKVQGSDFRRMFENVMSGAIPEGSLIVVENFDRFSRADIDTAIDDVRQILRKGVSILTLGDGELYDKSALTDPVKLIKHIIIAERAHQESLVKQKRIAQVWNHKTQLARELKKPMGKQAPGWLELSEDGSHYIVDEDKASLVNIIYDKRLSGMSMFAICKWLNEQGYPTINQRKVRISKTKKPDGNWSALSVKHILTSRSVLGYLPAKISSEDRKTVLREEIEGFYPQIVTDSKFYAVQQLLEETGKGKTSSGEHWLYVNILKGLIRCKCGLVMTPTGIRKPVYQGTYRCNGNKESRCSYGTVSRKLLDTQLCSRLFSKLSQLHDEATDTAKLDELQRRLNTVDSELEKLTETLIQLPNITQIQEALRVKQEEKDELIVQLSREKARVKSVSSLDLSGLDMESVEGRTEAQIIIKRLVKEIVVSGNEKLVDIYLHNGNMIRGFPLDGKDDHTLTLEEATDEMQSLDDMLIFGEPVTRIYPAGDMEEVDA

SEQ ID NO: 3422 - protein, 509 aa, synthetic construct
MRRAISYIRFSSERQLKGDSVRRQSKLVTDWLDKNPEFYLDSSLSFKDLGKSAFSGKHLKGGLGDFLTAIEKGLVKAGDTLLIESLDRLSRQDIDIASELLRRILRAGVDVVTLSDGEHYTRESLKDPLSLIKSILIMQRAHEESLRKSERVQAAWNRKKELISEGIKVSRRCPAWLRLNDDRRTFTIIPDKVEVVKRAFDLRLQGLSFWAITRTLNDEGHLSLNQYTPKQKGWSDTAVKKLLRNRAVIGCFTPAGREEVQGYYPAIISESLFYRVQQLNTGQYGRASVSSNPLSVNLFRGIIKCSECGATIVLGGYALKRFGMYRCPNRSANRCSAKAISRKQTDTTILYMLALCDRFETENTDTIDSLKLQREDLQRKISKMAELAIELDDMTIITEKLRDMKNALSKLNHDIEEETKRIKAITTGSLKDIDRTTKEGMIETQLLIKGVLKEIVIDAAKRRCKVTFHNGRIIGLPITENPSEDVTEAIQSLSEVTERGLLDVDTFQL

SEQ ID NO: 3423 - protein, 488 aa, synthetic construct
MQVFGYPRVSTDEQAERGNSLSEQMERMTAYCKAMGWDEPIFFIDDGYSAKDLNRPELTRMLDRVKKDKQGGIILTTKLDRLSRKLFDILSLNEFFNKHGFNYVSATEGFDTSTPAGRLVLQMLGMVAEFERERNSERVRDNMTSIARNTTKVISRPCFGYDIINGEYVINIDESTEIIKAANELLSGTPLRQIIKRWNFVDNIKTKEGNEWHEKTFRELFQRETLIGDFVYNKTYKDGSRIITRPENEWIYIENHHSAILDEETFKKLGQLFQARRRLGRHTTDDRYLLSGLVVCGHCKSKMNGKMSRSYSKKLNQENIHYKYLCDGYLKRAKCFHHYISRDGIEAAILNRIKKMAEASPGTLNLVLSKPKSQSINEDEIKAKLARLDKNMQKQIDAFNDDLITAHDLKAATQKVERQRAELHKLLEASSSEKLEDEAETKLIRRAKASIKDLLSGDRLKTKEVIREMVYEIEVLNGSDIAVIWRAD

SEQ ID NO: 3424 - protein, 547 aa, synthetic construct
MEKKMWKIEQKVTEISKRKRVAAYARVSVESERMQHSLSAQISYYSSLIQKNPTWEYAGVYADYGITGTKIIKRKEFQRMLADAEARKIDIILTKSIQRFARNTVDLLKTVRHLKEIGVEVWFEKENICSLSGDGELMLTILASFAQEESRSISDNIKWRFQKKYEKGTPHAKFFIYGYRWKDGELVIQNEEAAIVRRVFKGYLAGKTRRDIQRELANIGAHTMYGNLFQDSTIKQMLQNPVYKGNLVIQKTFVIDPITKHQVINHGEKDKYVVENHHEAIIDAATFNQVQEEMAWRKEAGKQRGGYARNFLNTSCFTGIIKCGICGKSYIHNIRKYKGKPSEYWSCLSNKGKAEERCGAYGAIPQPALERACMSALEMAIFDKTEFLQRVEKIVVPAYHSLLFYLKDGKVIKQPWKSTALKDMWTEKRKEQVQQRMVQYRKSGLSSRYSAFSERIFCPTCDVKFVRCLETRKNRRVAYWRSRNKHKCVHTSGIQEDWLKKTAAALLGESTFDEQKFREQVEWIEVQKNRTLLFRFYSGENKEVQLP

SEQ ID NO: 3425 - protein, 508 aa, synthetic construct
MKKAIAYMRFSSPGQMSGDSLNRQRRLIAEWLKVNSDYYLDTITYEDLGLSAFKGKHAQSGAFSEFLDAIEHGYILPGTTLLVESLDRLSREKVGEAIERLKLILNHGIDVITLCDNTVYNIDSLNDPYSLIKAILIAQRANEESEIKSSRVKLSWKKKRQDALESGTIMTASCPRWLSLDDKRTAFVPDPDRVKTIELIFKLRMERRSLNAIAKYLNDHAVKNFSGKESAWGPSVIEKLLANKALIGICVPSYRARGKGISEIAGYYPRVISDDLFYAVQEIRLAPFGISNSSKNPMLINLLRTVMKCEACGNTMIVHAVSGSLHGYYVCPMRRLHRCDRPSIKRDLVDYNIINELLFNCSKIQPVENKKDANETLELKIIELQMKINNLIAALSVAPEVTAIAEKIRVLDKELRRASVSLKTLKSKAVSSLGDFHAIDLTSKNGRELCRTLAYKTFEKIIINTDNKTCDIYFMNGIVFKHYPLMKVISAQQAISALKYMVDGEIYF

SEQ ID NO: 3426 - protein, 567 aa, synthetic construct
MSRSPKAYSYIRFSTPKQAQGDSYRRQLELATEYCQKHQLQLSDKALEDFGVSAYRGSNRTNGALGRFIDAVKDGKIKEGSYLLVESVDRLSRQAIEDALRQFLEMIGLGIVIVTLIDGRVYKSGAVDITSLLVSIVSMARANDESKTKSKRSSEAWENGRKHARENNQVMKNSRLPSWLKLEEGKIIAIPERVKVVNEMFELAKSGCGYEQIAKIFLEKGYKTFGKKADWRPAGIQAVIKSESVIGVFHPHQIKDGKRIPEGDPIWGYYPVIVEPMLFNEVKHLINQRNNHSGSYRKGTYNNLFSGILRCQCGESLRYQNKGRAGSPRNYLVCPKQNITGCNLPNMLYDKVEPQLLQAVSILSEVMQRRVGENEKFLSLQEQLATLRAQLDVESRKKDKAAQSILDFDDDATFRNAFVKSKASCKVLEEKIRELENELMSLELSEKTILNLLKPEELISTEQRQLFNSQLKAVLKEIKFSYDGYDLASVFKGLDDQFMLEQAFKPKLTGSSVRDLSGEELLRTTSEAPYIDAAWVKGEMEEYALHRKDVSSGLDDEFEDLSLQESK

SEQ ID NO: 3427 - protein, 591 aa, synthetic construct
MAMARSKRPPSFGRSAGARLTVINLSFNGKDLYSLFQGLRLISMQKIIYPYVRFSSEKQSAGHSHERQIEKIKEYASVNGYEVNDTLNLRDLGVSAFKGKNAEKGALAAFLKMVEDGTIPTDGTSYLCIEQFDRLSRQTVDEAYSLFRKILISNVNIITLMDEKVYTKKSLNEMVSIISSLLLMEQANVESDKKSKRVSAVFKKKLEKLRNGEKIQFAYMLPGWIDNIGTKQDPNFIINDQVKTVRMIIDMYLGGETMGHIARILNEKQIPQFARKKTKNAISSWNSGKISHLLVNRCLIGDLKISKTGEVIKDYYPSVISKDEWDIIQSTKRTNATIKVAGRKTINIFQGRLFCADCGNKYYFETDDKTGKNGKKYIYHMLKCSGRRFHSCDSKSIKYDDLTSNNLFFFEKVLDQKTEDYYNKIKLEISQFENQIEELKKEQNELDLLLNNKSINFTAHAIANSKILDQIDILEKDIALNKQHIAFTMNTNMIDKFDKNDPVSVAKAKKFIKDNYAGVLISSKYGTIISLMKSGQFIINPIPNRFDDSIPKASLQLFEIKEQIQNQDKKGLLDGKLKELLDAFNFLDRFE

SEQ ID NO: 3428 - protein, 450 aa, synthetic construct
MKRVALYMRVSTEQQAKHGDSLREQKETLYEYIEQHKDLKVVNEYVDGGISGQKINRDEFQKLLQDVKENKIDLILFTKLDRWFRNLRHYLNTQEILEKHNVSWNAVSQQYYDTTTAYGRTFIAQVMSFAELEAQIDSERIKAVMANKIAQGEVVSGKTPLGYSIENKKLVINDDAPIVIDIFNYFLSSGSLRKTVYYLGSQYGIVRDYQSVKNMLTNKKYIGELRNNKNYCPPIIDKKLFYAVQKALPKNLKTNAKRDYIFKGLLKCSDCQGSVAGQTIKARYKKKEGTESIYERTCYRCVKRRNNKLRCTNKRAFYEKNLERYIFEATKQKFEQIQINYSKKQPKIIKKKNSKKNIENKLDRLKKAYLNEVIDLEEYKKDREALMKELNEIEVEPAKIDIKNVEFILSKEFDEIYKESSEEEKNALWRSIIDNIIVFPDGNITVNFLI

SEQ ID NO: 3429 - protein, 507 aa, synthetic construct
MKRAISYIRFSSEKQSRGDSLRRQSKMVNDWLKAHPEYYLDQDLSFRDLGVSGFTGKHLKGGLGDFLTAIEKGLVKAGDTLLIESLDRLSRQDVDQASELLRNILRSGVDVVTLSDGEHYTKESLKDPLALIKSILIMQRSHEESLRKSERIQAAWDAKKEAAKAGIKIYKRCPAWLKLNDDRKTFSVIPEKVETVKRCFQLRLEGKSIWEIVRTLNDEGHQTLNQYKAGKFGQTSVQDLLKNRSVIGYFTPKGCEEIAGYFPPIIPETDFYKVQQLSYSRYGRKPASDKPLSVNLFKGVIRCSECGHALIITGFSDTRNGIYRCPLRNENRCSAKGLSRKQTDGTLLALLSRIDRFDSDMTNTIDTLKLHREHISSNIEKLVQLSLEIEDLSAITSKLKQLKGELSQVDADIEKETQRLKSIDVGCLSDCDLTTKAGRIEAQLIIKSAVKEVILNTAKRRCKVTFHNSKSITLPITETPSEDVTEAIQSLSEVTERGLIDVDEVII

SEQ ID NO: 3430 - protein, 547 aa, synthetic construct
MKLLVTYIRWSTKEQDSGDSLRRQTNLIDAFYSKHKEEYYLLPAHRYVDKGKSGFHQQHKAQGSDFRRMFENVMSGAIPEGSLIVVENFDRFSRADIDTAIDDVRQILRKGVSILTLGDGELYDKSALTDPVKLIKHIIIAERAHQESLVKQKRIAQVWNHKTQLARELKKPMGKQAPGWLELSEDGSHYIVDEDKASLVNIIYDKRLSGMSMFAICKWLNEQGYPTINQRKVRISKTKKPDGNWSALSVKHILTSRSVLGYLPAKISSEDRKTVLREEIESFYPQIVTDSKFYAVQRLLEETGKGKTSSGEHWLYVNILKGLIRCRCGLVMTPTGIRKPVYQGTYRCNGNKESRCSYGTVSRKLLDTQLCSRLFSKLSQLHDEATDTAKLDEMQRRLNTVDGELEKLTETLIQLPNITQIQEALRVKQEEKDELIVQLSREKARVKSVSSLDLSGLDMESVEGRTEAQIIIKRLVKEIVVSGNEKLVDIYLHNGNMIRGFPLDGKDDHTLTLEEATDEMQSLDDMLIFGEPVTRIYPAGDMEEVDA

SEQ ID NO: 3431 - protein, 455 aa, synthetic construct
MANEIKQVALYIRVSTDQQAKHGDSLDEQQHTLNEYVRQQGNMRVFKTYIDDGISGQKLYRDEFQKLLDDVKKGRIDTILFTKLDRWFRNLRHYLNIQEILDKNNVTWLAVTQPFFNTETAMGRSFVNQSMGFAELEAQMTSERIRAVFDNKIRKGEVVSGKVPLGYEIKDKHLVPNEKAEIVKEIFQYYLETGSMRATVRHLENHFNMTRDYQSVRQMLTNRKYIGELRDNKNFCEPIIDRDVFERVQLQLSKNIRMNKKRDYMFTGLLVCSECGCNYSATAVISRYVRKDGTINPNERHLYRCTKNRNNVKKCSNKKGIYETTLENFLLENIEKQAEELSVKMQQEPEVKKTKNTNDKIKKKIDRLKKAYLNEVITLEEYKKDREELEALLIPEMDNKIAKIDLNSLHNYSTAEFRDGYKQLTISEKSSLWRQVIKNIVVYPDGNLKINFIGY

SEQ ID NO: 3432 - protein, 559 aa, synthetic construct
MKTKLYSYIRFSSMRQNDGSSYERQIRMAREIAAKYDLELVNDYQDLGVSAFKGANSKTGALSRFLDAIGRSVPVGSWLFIENLDRLSRADIVSAQELFLSIIRRGITIVTGMDNKIYSLDTVTANPMDLMFSILLFIRGNEESQTKRNRTNSSALIKIKAHQENPQNPAVAIEEVGKNMWWTDTTSGYVLPHPVFFPIVQEVVELRKNGRSTAEILDHLNETYTPPPAVSNKKHSKWSRAMVERLFHTRALIGIKEVSVDGVNYELNNYYPRVIDDATFYHLKKNIGARAWNFGDKEEVKPIPLLSGIGLLKCDHCGCAMVKVKGTNKRSDQYRYTCDATRSRRLDCEHPNWSFRGDQLEKAVLQLLADKIWIAEDKANPVPALKVQIDEISRKIDNLIALSAMTGATKELADQITALNSERETLYNQIKMAEEEMYSVDSQGWEKLAEFDLEDVYNEERIKVRFKIKQALRRIGCSRIDRNKNLFVLEYVDGKTQRVVIENSRGTRKGRIFIDLKTINDRQILESNGLVLHPCLDMLTDKNWKPEEEIPGPLQEFGI

SEQ ID NO: 3433 - protein, 558 aa, synthetic construct
MTRVALYARYSDDKQSANSIEDQFRICRMHADKQGWKIVETYSDAAISGSTVIFRPGVQALIRDALAGKFEMVLAEALDRLSRDQEDIAAAFKRLRFAGVPIVTLSEGEITELHVGLKGTMNALFLKDLAAKTHRGIRGRVESGKVGCGNAYGYRVVRTVDAAGRVSTGEREIIPEEAEVIRRIFRDYAAGKSPRRIAIELNEEGVVSPWGGRWSDTSIRGNRALGSGIINNEFYVGEMIWNRRRRLKNPDTGRITLRFNPESEWVHVKAPHLQIVSDELWAAARAKQASLVHVYEENMSKRGKALAAMHRPKTLLSGLIVCGVCGGSVAKRSNNRFGCSNNALGNGCSNGRTIIRDRLEERVLKGLKESLVTGEAIAQAMRSYIEETNRLNHQRRATRGGDVLRLEKAHKAIDGIVSAIEDGGYTRPLMERLKGLETEVEALEAKLAEPTIDMPDLHPNMAELYRRKVQRLSEALSQPEERDEAAQALRALIKEIILTPGPNRGEIFAELRSEFETVLQWSQDEGGQRFSAVGRFLGGPLAVTADSRACVEDPDIVL

SEQ ID NO: 3434 - protein, 510 aa, synthetic construct
MALHENSKIAVYSRKSREDRDSEDTLAKHRNELEYLIKRENFKNVQWFEEVVSGETIDERPMFSMLLPRIENGEFDAVCAVAMDRLSRGSQIDSGRILEAFKQSGTLFITPKKTYDLSIEGDEMLSEFESIIARSEYRAIKRRTINGKKNATREGRLHSGSVPYGYKWDKNLKAAVVVEEKKKIYRMMIKWFLEEEHSCTVIAEMLNELKVPSPSGRSIWYGEVVSEILSNDFHRGYVWFGKYKKSKSNNSIVQNKNLDEVLIAKGHHETMKTDEEHALILNRIEKLRTYKLAGRRLNMNTHRLSGIVRCPYCHKAQAIEQPKGRKKHVRKCLRKSAERTKECEQTKGIHEEVLFQSIMKEIKKYNEALFSPTEQDVNDDSYTTQLIGLREKAVKKAKGRIERIKEMYLDGDISKTEYKEKLKISQETLQKAENDLAELIASTEFQNALSAETKKEKWSHHKVQEMIESTYGMSNSEINLILKMLISHVTYTVEDLGDGTKNLNIKVYYN

SEQ ID NO: 3435 - protein, 411 aa, synthetic construct
MRTVRRIQPIKSPCKPKLKVAAYARVSDSRLHHSLSTQISYYNRLIQAHPDWELVGIYYDEGISGKEQSNRQGFQNLIKDCYDGKIDRIITKSIARFGRNTVELLTTVRQLRLKNIGVTFEKENIDSLSSEGELMLTLLASVAQEESQNLSENIRWRIQKKFEKGIPHTPQDMYGYRWDGEQYQIEPNEAKVIRKVFKWYLDGDSVQQIVDKLNQEQVLTRLGNPFTVASIREFFKQEAYFGRLVLQKTYREAFSRNPKRNKGQRNKYIIENAHEPIVTKEYFELVLHEKERRYQLMHQESHLNKGIFRDKIFCSDCGCLMIVKVDSKHVKKTVRYYCRTRNRFGASSCPCRTLGEKRLLASFKSKLGIVPDKEWVENNIKHIEYDYGHHIIRVTPVKGRKYPIEIREGRF

SEQ ID NO: 3436 - protein, 520 aa, synthetic construct
MKKVITIEATPSIIRSSSDDFSLKKRRVAGYARVSTDHEDQATSYESQMRYYSEYINGRDDWEFVKMYSDEGISGTNTKLRTGFKAMVEDALNGKIDLIITKSVSRFARNTVDSLTTVRQLKEVGVEIYFEKENIWTLDSKGELLITIMSSLAQEESRSISENVTWGLRKQFAEGKVHFPYTNVMGFTVDENGEIVVDQEEAKTVRYIFQQALLGKSAYHIAKDLTEQGIPSPSGKSQWNATTIKRMLRNEKYKGDALLQKTYTIDFLTKKKNINKGELPQYYVENNHEAIVDRETFDAVQQVLDTKGKKSSTTIFSSKLVCGDCGHFFGSKVWHSTSKYRRKIYQCNEKYKGEKKCETPHVTEEELKQGFVSAINQVLDNKSEVIDNIKVLFSMNSLDFIDDEIRELESEAEILSQMISSLVVENAKVIQDQDEYQSKYQKLSSKYETIVKNIEVLEVEKLAISKRNKDLQDFISVLEKQDDLVTDFDEFLWDTFVVNVTISKDKEFIYLFKNGAVATM

SEQ ID NO: 3437 - protein, 430 aa, synthetic construct
MSTDQEEQLSSYENQVNYYREFISKHEDYELVDIYADEGISATNTKKRDAFNRLIQDCKAGKVDRILVKSISRFARNTLDCIKYVRELKELGVGVTFEKENIDSLDSKGEVLLTILSSLAQDESRSISENATWGIRKKFERGEVRVNTTKFMGYDKDENGRLIINPQQAETVKFIYEKFLEGYSPESIAKYLNDNEIPGWTGKANWYPSAIQKMLQNEKYKGDALLQKTFTVDFLTKKRVQNDGQVNQYYVENSHEAIIDKDTWELVQLELDRRKDYREEHQLKAYIIQNDDNPFTTKVFCKACGSAFGRKNWTTSRGKRKVWQCNNRYRVKGQIGCQNNHIDEETLEKAVVMAVELLSENVDLLHGKWNKILEENRPLEKYYSMKLAGIINKPSWEFDSYEMCQVLDSITISEDEQISVNFLEGTEVDL

SEQ ID NO: 3438 - protein, 413 aa, synthetic construct
MSVKKIRVNRQKHRKRVCAYIRVSTTNGSQLDSLENQKQYFENLYSNRDDIDFMGVYHDRGISGSKDNRPNFQAMIEDCRRSKIDVIHTKSIARFARNTVTVLEISRELKAIGVDIFFEEQNIHTLSSEGEVMLSVLASIAEDELRSMSGNQRWAFQKKFQRGELVINTKRFLGYDVDENGELIINPEEALIVREIFALYLAGNGTHRIAKQLNEKGVATVTGAKWHDTTIRQMLSNEKYKGSVLLQKYFHDGVNGPKKLNKGELEQYLIEDNHEAIISKEDWQRVQDKLTSRRWQQGRNKTYKFTGLLKCQHCGSTLKRQVSYKKKIVWCCSKYIKEGKVTCQGMRVPEVDISNWEITSPVTVIERDRNGEKYYSYTGQESADQCSSSGLEENQSSRILPSVHRPRRAAIKL

SEQ ID NO: 3439 - protein, 520 aa, synthetic construct
MRKITTLDVATSSAVKPKQKVAAYIRVSTSNEDQLISLEAQRRHYKTLIETNEEWQLVDIYSDEGITGTKKDRRPELLRLMSDCEKGKIDFILTKSISRFARNTIDCLELVRKLMDLDVHIYFEKENINTNSMESELMLSILSSLAENESVSLSENSKWSIRQRFKHGTYKLSYPPYGYDYIDEQIVVNEEQAPVIRRIFNSVLKGIGTERIARQLNEEKIPTKRGGNWTGTTIRGIIKNEKYTGDVLLQKTFTDEHFNRKVNQGELDQYLIENHHEAIITHADFKAANQMIEYQASQKNVAVGSRKYLNRYPFSGKIECAECGDTFKRRIHTSTHKKYIAWCCSTHIKNRYECSMLFMREDRIHQAFITMMNKLKFGYSYVLIPLSKQLETSNQDEDYQMITEIEKQLEVTKEELNTLIQLMTKGFLEPVIFNEQKIELSQRHMKLKEEREQLLYLINDSSNQLSEVKRLIKYFKQGIFIDAFDEESFQDIVKKIIVYSPNEIGFHLNCGITLRERIDR

SEQ ID NO: 3440 - protein, 522 aa, synthetic construct
MALARSVTVIPARRRTRNVDAEDKKKLKVAAYCRVSTDSEEQATSYEVQVEHYTTYIQNNPEWELAGIYADDGISGTNTKKREQFNKMIEDSMNGKIDMIITKSISRFARNTLDCLKYIRQLKDKEIPVFFEKENINTMDAKGEIMLTIMASLAQQESQSLSQNVKLGIQYRYQQGEVQVNHNRFLGYTKDENNKLVINPEQAKIVKRIYREYLEGASLVQIARGLEADEILTAAKRSKWRPESIKKILQNEKYIGDALLQKTYTVDFLTKKRVVNNGHVPQYYVENNHEPIIPREIYLQVQEEMMRRANIRNGKTGKKRVYSSKYALSSIVFCKECEDVFRRVHWNNRGYRSIVWRCVSRLERKTHLCNAETIREDELHQAIVQAINEVLGNKDNYLNILIENIETVLNENADKPTADIDEKLEELQMELLRLANSKEDYDDVAEEIYRLRELKQEVMMKNAAREGLRQRIVEMTKFLKEQPQKLEVYDDLLVRRLVEKITIHERQLTIEFKSGIEIAKEI

SEQ ID NO: 3441 - protein, 543 aa, synthetic construct
MIEEKQRFAVTYQRFSSGRQIGNSSLDRQTDTQKAWLRQNPNVTVIDNFVDEAMSGWSGKHLKEGSLGQLMKAIEEGIIQPGTLILVEHFSRLTRQNIDNAEELVKRIWKAGITLVTVRDNTEYPPEAVNNMSLRIRLIVEMEQAFRESEWRSAKVKASYTRREKLAKEEGKAPRIRKPFWLNPDGTLNHLHQAVKDMFNWYLEGLGQQRIVVRLREKYPDTAIQKINPSTVMRWIQSEIVRGYWRGNRVYEPAVDDQLFFDVQTIHKSRLYKNVKPDRQWPLSGLMQCGVCGRGMSIQKSGKSSPVVRCSSKQRDRSCHRKTTFPYFIVHMYMMTHVLHRAIRLHSDKSSNKGLQIDLGKVERKLATNRKKLNDEKEFYNKASNEGQNTTMILQLMNETYQKVAELEEQEKSLKASLKQNNHSVSSESRDLVLTPETFNLEMHKLGFKIVVGEQVLSTIGFDKPVPKLAYAGYCRKKRAYKYATGSSDFLHVWPSSLVTDELLNMQNLKDYINSSNGLRYIWDNLYEDDLEEKLAKKLNKKG

SEQ ID NO: 3442 - protein, 518 aa, synthetic construct
MIEQIKAALYVRLSQEDRNKLHPEDNSESINNQIMLLKSRCEKEGWIIYDIYNDDDFSGSDRQRPEFNRMIEDARLHKFDVLLCKTQSRFCRDLELVEHYLNYMFPVWNIRFLSIIDNADTSNRQNRKARQINGLIDQWYLEDISENVKAVLSAKRKKGEWVGSQAPYGYAKSPEDKHKLIIDEPAAKIVRYIYRLYINGLGYASIVRRLNDEQIPPPAKYKNLKEVSSHKKTATRGLWCYYTIQKILSSQVYIGNTVQGKSEKLSYKGEERRYKPQSEWDIVENTHDAIVSYDTWHKAQIIRSTRSTPYKQDMKNTVFSRMCKCVYCGATLNKHTYHNSPMLECPTKHIKTGICPGCVITVKRLEEIVIDEIKDHCQRLMDVSAVKSKIDSNVEINNRRQEILKSIESAIKKQKLLKNRLTSLYMDKADGIISINDYYQFKNAIDADSVEIDTTIKLLESKLLSIDDEIKALESNHTIVNQYSNIEKLTHNELMFLVDYIEVGGTRDNRIVRIHWKF

SEQ ID NO: 3443 - protein, 558 aa, synthetic construct
MNREGKKCVLYPRVSTEMQVDGYSLEGQKNGLKRFADREEMEIVGIYEDAGKSGKSIEGRPAFKKMLSDIKNGLEIDYILVYKLSRFGRNAADILNSLEFVQSYGINLICIEEGIDSSQTSGKLLISVLSAVAEIERENIIEQTMNGRREKARQGGWNGGFAPYGYYLKDNQLLIEETEAEAIRIIFDKFANSDIGLGGVAKYLNLQGIKKIPRQNGTLETWSSHFIRLILDNPVYCGKIAYGRRTREKVKGTKNEYKQVHAEDYILEDGQHEGIISEELWQKVHAKRMATGIKQPSKIGKDRSHLLTGILKCPLCGSSMYTNKHAWTNKDGTYKEVYYYICGRNKQERGHHCDYKASLRKTDIEPLVIEAVKELVSDKYFAKEIEKRIGVQTDTTAIDKELANYESKLKEVDLNKARLEREIDNLPVDTRFRERKIHDMTLRLDALYDTIVELEERIEDAKLRKSSIEMETITLDNIYKLMLNFGKLYDIISDEEKKSLITYLIKEIQIYPNGESEQPLKSIEFNFPIYRDGQEVRRLLWEKGNTVETVCLLSRKDK

SEQ ID NO: 3444 - protein, 522 aa, synthetic construct
MGNVMLIPARRQVGSNARKQEEEKPKLRVAAYCRVSTDSDEQATSYEAQVEHYTEYIQKNPDWEFAGIYADDGISGTNTKKREEFNRMIDDCKAGNIDMIITKSISRFARNTLDCLKYIRQLKDMNIPVLFEKESINTMDAKGEVLITIMASLAQQESQSLSQNVKMGLQYRYQQGKVQINHNRFLGYTKDADGNLVIDPEQAETVKRIYREYLEGLSMDKIAAGLERDCILTGAGGKRWHTSTINKILRNEKYIGDALLQKTYTTDFLNKTRVKNNGLVPQYYVEGDHEAIIPKEIYLQVQEELVRRRVGKTSANGKKRNYSCNHCFSQIVICGECGEMFRRLHWNNRGVKSIVWRCISRLESTGLECHARTINELVLQDVVVKAINQMLGDKSNYQAQLQLNIAAVIRASQATAIDSIDEKLMALQQELIQKANSKEDYDEIADEIFRLRELRQKTTVDTAARDEQIKRINDLQDYISQQITLLTEFDEALVRRWIKQITIWDDRITVELKSGVSIDVDA

SEQ ID NO: 3445 - protein, 521 aa, synthetic construct
MKKVTKIDGVQKNTAINSKLRVAAYCRVSTGSDAQLESLEAQKSHYEQYINSREDWQFAGLYFDEGITGTKAEKRPELLRLITDCEARRIDFVITKSISRFSRNTMDCLALVRKLQSLEIPIYFEKENINTGSMESELFLAILSSMAEGESASISENAKWSVKRRFQNGTYKLGYTPYGYDWDGNNMIINPDQAAVVKRIFADILSGKSTNAIADELNAEKVPSKKNTNWTSSTIRGILANEKYTGDVIFQKTYTDENFNRHTNYGEVDQYMAPDHHEAIISHSDFDAANALVNQRAAEKGIEKGSDKYQQHYAFSGKIICGECGDTFKRRMHSCTTYKYVAWTCNTHLKNKESCHMKYVRDDEIKAAFITMLNKLIYGYRLILAPYLKVLENSSGDEAIHRIQHLEQLIAQNSEQREALTKLMAQGYIDQILYNQETNALLLQAETYRSDIEAITIGMTGDAAKVTETNLLLHFVSHTDMLTAYSEELFENYADHIEVMNRNEIRFVMKCGLTFTERIGD

SEQ ID NO: 3446 - protein, 507 aa, synthetic construct
MKRVISYIRFSSERQAKGDSLRRQSKMVNDWLKAHPEYYLDQDLSFRDLGVSGFTGKHLKGGLGDFLTAIEKGLVKAGDTLLIESLDRLSRQDVDQASELLRNILRSGVDVVTLSDGEHYTRESLKDPLALIKSILIMQRSHEESLRKSERIQAAWDAKKEAAKAGIKISRRCPAWLKLNDDRKSFSVIPEKVETVRRCFQLRLEGKSIWEIVRILNDEGHQTLNQYKAGKFGQTSVQDLLKNRSVIGYFTPKGCEEISGYYPAIIDETTFYKVQQLSYARYGRKPASDKPMAVNLFKGVIRCSECGHALIITGFSDTRNGIYRCPLRNENRCSAKGLSRKQTDGTLLALLSRLDRFDSDMTNTIDTLKLHREHISSNIEKLVQLSLEIEDLSAITSKLRQLKNELSQVDADIEKETQRLKSIDVGCLSDCDLTTKAGRIEAQLIIKSAVKEVVLNTAKRRCKVTFHNGKTITLPITENPSDNVTEAIQSLSEVTERGLIDVDEVII

SEQ ID NO: 3447 - protein, 518 aa, synthetic construct
MVAIYVRQSLDKKDSLSIESQINDCITLCKRNGWDDYQVYKDKGWSAKNLDRPEFQKMNNDVEAGKIKAVVCYKIDRISRSIRDLVNLIEDYHELGVHFVSFADNINTAAPGGLMMATLFGSLAQMEREAIIARVTDNYYYRCELGYWGGGPAPYGFNLKKIVENGQKHTVLEINEREAAVVKQFFKWYLEPDGTIYEILKKADKAGITTRKGGAWTSRVVSELLSKPMYAPNSMDIYNFYAAQGVRVRVSPEQCDGKLSLNVFGKRDRGSKHPKRSRPVNEMTLAICKTPPIIDSDTFLKAQFKKKAKLQVSPRTGTAKTTMLSGLVKCAVCGRAMSPSGSSRGVRYFTCSGKRNYAAGTCTSKSIKVSALEKIVIDDILRYATNPKVIDMFHAMQGSKLTAEQSHEVNLLQQEAAKLDIEIDNLLDACSAGNTTAIEYLNKRIEKIDTRKHEILTRINEIKRDTENVISLFSGIEIENVPYILAHGSIDEKKNVCQFLLSSVLFTNADDVKVYYKM

SEQ ID NO: 3448 - protein, 559 aa, synthetic construct
MKTKLYSYIRFSSMRQNDGSSYERQIRMAREVAAKYDLELVNDYQDLGVSAFKGANSKTGALSRFLDAIGRSVPVGSWLFIENLDRLSRADIVSAQELFLSIIRRGITIVTGMDNKIYSLDTVTANPMDLMFSILLFIRGNEESQTKRNRTNSSALIKIKAHQENPQNPAVAIEEVGKNMWWTDTTSGYVLPHPVYFPVVQEIVELRKNGRSTAEILDHLNETYAPPPAVSNKKHSKWSRAMVERLFHTRALIGIKEVSVDGVNYELKDYYPRVIDDATFYHLKKNIGARAWNFGDKEEVKPIPLLSGIGLLKCDHCGCAMVKVKGTNKRSDQYRYTCDATRSRRLDCEHPNWSFRGDQLEKAVLQLLADKIWIAEDKANPVPALKVQVDEISRKIDNLIALSAMTGATKELADQITTLNSERETLYNQIKMAEEEMYSVDSQGWEKLAEFDLEDVYNEERLKVRFKIKQALKRIGCSRIDRNKNLFVLEYIDGKTQRVVIENSRGTRKGQIFVDLKTINDRQILESNGLVLHPCLDMLTDKNWKPEEEIPGPLQEFGI

SEQ ID NO: 3449 - protein, 629 aa, synthetic construct
MPQLYSYIRWSTDRQDKGTTRTRQVAAAKAYAEEAGLEMVEIIEPGVSAFRGKNRAGKLGDFIDAVKNAAIPSDSWLYCENLDRLSRDQVDEALRLFLELIGLGLTIVTGMDRKVYNRDTIRQNPTDLMISILMFIRGNEESETKSNRTVGNVVALVERHKEGLPVNIKSVGRHPFWIDDTGSQYQAVKKHPFYWNIAREIIDMFLSGNGVYSVKKYLDEKYPNGLKGREWDYQVLKKMRDNRALIGERTINLRGVPYKLENYYPWLCKDEAEFFLLEKRKQQNNYKSKKDGADTIKLLSGLSILRCSKCGGTMHSFMNHGKARYICTNGVHLQKNCSGWSITAQLVEHCTMIALLIGYMDKSRKNGSDTTLIEEELNEKEKLIKALDSKISNLVTAIAIAPDVNSLAHSLNEINSKRKELVLSVEKLKERLVSLQGKGSFEVDIMEFLILIQWAVFTNMEDNDRDKIRKIIDAIIEYIVVDKTNDCITIKIKYYGNDEVLVFGGVDRKPHWRFSIDFDTGKEGALTVLENDLMDVPEIQKAVSYLHKLEKGYLAMYDSAVTMLAEVGYPEIKGTQFWPNTGKHEKVTVAFDGVEHTISFNGRLPKAIASAIEKTGLTRQQFIEKFKIQ

SEQ ID NO: 3450 - protein, 523 aa, synthetic construct
MRQVITYLRFSSKPQERGDSIRRQKGLFERWLKDNPDAKVVDEFSDEGASAYHGHHLKGDFGRMLQKIQDGGYLSGQTVLLVESETRLNRQKARNTENLVDLITGKGVDVICLESGKIYTSTNIDDLDTSIQLKIAAHIAHQQSKEKSIKVSAAWEHRAQLALEGKQQLTKNVPGWIDPDTRKLNEHSSTVVTIFELLLSGESLHNIARYLQANNIKSFSRREKANGFSVHSVRTILRSESTVGTLAASKRNDRPAIPNYYEPAIDVATFNKAQEILSKNRVGRAPASDNPITINLFKGIIRCQCGASVHPTGVKATYQGVYRCNNVPDGRCNVPTIKRKPFDKWMLDNIIGFLERSDGNHTDKRKAEIEYQISLVTSKLKKATILLLELDDVTELKEQVKELNIQRSNMQSELDELNQRETLSDKPLHHLSEIDLTTKAGRVEAQLILSKFVQSIELQREMIIITLRNGTVIGKSRDLSPVLSRDLMKQVVSSPSPTDIDMFSVITSDEEFRKSGKQVTKRS

SEQ ID NO: 3451 - protein, 506 aa, synthetic construct
MRHVITYLRYSSAIQGAEGADSTRRQNDLFKQWLKKNSDAQVVASFNDEGLSGYKGKHLSGQFGDMLSRIESGEFSEGTVLLVEAIDRIGRLEHLETEALMNRIIAHGIEIHTLQDGLIYTRDALSDDLGISIIQRVKSYIAHQESKQKSFRVSQKWEQRAKLALAGEQRLTRNVPGWIDPDTFKCNEHAETVRLIFKLLLSGESLHNIARHLQSNGIKSFSRRKDANGFSVHSVRTILRSETTIGTLPASQRNDRPAIPNYYEAAIDASTFNKAQEILGKNRIGRTPASDNPLTINIFKGLFRCQCGASVHPTGTKNKYQGVYRCNNHLDGRCDVPPLKRKPFDKWMLENFLGMIDVGNDGEAEGKIASLQHEVEIVTTRIKKATALLLEMDDIDELKIQIKELNQRRTELQTTIDNMRRKASLTDKELPQLKDIDLTTKAGRVECQLILSKHLKGLTLGKDSVTVTLQNDTEITIPTNPLPLNDGSPIFEIADKELLDIDAYQL

SEQ ID NO: 3452 - protein, 604 aa, synthetic construct
MTKIIGYARVSTTKQDLSRQKLKIKEFCENNNYELIEIIEDFGISGVVADRKGYIELQSKTYKDADMIVISELSRLSRQEDVTETVYNIQQIINKGLSVILLDSPSKIYEANKLLDITEILILTIKAWAAAQERLDIKKKNQDGKQALFQAYPYAVVDQKIPYGYKAVPNPNGKRPKYILEEVPEEVENIKRLFALVNSGKTLGAVARYFNERNITFRGYYSTVAILSNYIHSDIYRGIRRRTQRLGREEPYTIEVRIKPIISEEDFMKAQELIKNNYKNTPTGKVNHNPLKGIIRCRCGRAMTVKDKKPAAGISKLTYRCSCVDRKSHPDFCKYNIDEVSYDLTNEILYSLFKSMHTAEYINFFRNQTDNRVTELQEEIAGIEKRLSALYLDKENLSNESQDNANKFLLTTNPTLLNIIQEKQNQLDEKIKSIDKEIIRYKKSQSKKMADIERIKDNNGKEKLQNLSIEEQGELYHKYLERVNYIPVTTMQGYYIVQFLNGIKFYIAITKVRSIAMASLLLDNWTIDEKGIITANYDTLKSSDMKNFSIEMIRKTKTMTLQEYLKSDLAKERALHLDLSYRERYLEELHKAGLDGRLRPLKKE

SEQ ID NO: 3453 - protein, 521 aa, synthetic construct
MATITAIPATKTRIHDSALSGFSPKRRVAAYARVSTDMEEQATSYQAQIDYYTVHIQSRADWVFAGMYADEGISGTSTKHREGFQSMIADALAGKIDLILTKSVSRFARNTVDSLTTVRQLKEAGVEVYFEKENIWTLDSKGELLITIMSSLAQEESRSISENVTWGHRKRFSDGKVMVPYSSLLGYKKGADGNLAIDETQAPTVRLIYRLFLSGLSITEIRKELQHRGILTPRGKTNWSTSTVRSILSNEKYKGDALLQKTFTADFLTKRIEVNEGEVPQYYVTGNHEPIIDPAVWDQVQYELATRHAANTAKIGLFASRLKCADCGAWYGRKTWASNTKYKHTIWRCNQKYDHAQPCQTTTLRDEQIQTAFLAALNQLAEQYRGQSHLLEVIEAMFNTDQLEAESARLDKKIRALASEIEALVAENQRVAQDQDQYLAKYTQLEAKYQKTLGHKQAIDADIAAEQAKATAIKTAYSQLADKPIEHFQSGQWNALIDHAVIGANQIRFIFRTGKEITVSL

SEQ ID NO: 3454 - protein, 507 aa, synthetic construct
MKRVISYIRFSSEKQAKGDSLRRQSKMVTDWLKAHPEYYLDQDLSFRDLGVSGFTGKHLKGGLGDFLTAIEKGLVKAGDTLLIESLDRLSRQAVDRASELLRNILRSGVDVVTLSDGEHYTSESLKDPLALIKSILIMQRAHEESLRKSERIQAAWNRKKELISEGIKISKRCPAWLRLNDDRKSFSVIPDKVETVKRCFQLRLEGKSIWEIVRTLNAEGHRSMNQYKPGKFGQTSVQDLLKNRSVIGYFTPKGCEEIAGYYPSVIDETTFYKVQQLSYARHGRKPVSDKPLSVNLFKGVIRCSECGHALIITGFSDTRNGIYRCPLRNENRCSAKGLSRKQTDSTLLALLSRLDRFDSDMTNTVDTLKLHREHISNNIEKLVQLSLEIEDLSAITSKLKQLKGELSQVDADIEKETQRLKSIDVGCLSDCDLTTKAGRIEAQLIIKSAVKEVVLNTAKRRCKVTFHNGKVIDLSITENPSEDVTEAIQSLSEVTERGLIDVDEVII

SEQ ID NO: 3455 - protein, 506 aa, synthetic construct
MKRVISYIRFSSEKQAKGDSLRRQSKMVTDWLKAHPEYYLDQDLSFRDLGVSGFTGKHLKGGLGDFLTAIEKGLVKAGDTLLIESLDRLSRQAVDRASELLRNILRSGVDVVTLSDGEHYTKESLRDPLSLIKSILIMQRAHEESLRKAERIQAAWDAKKEAAKAGIKVSKRCPAWLKLNDDRKSFSVIPEKVETVKRCFQLRLEGKSIWEIVRTLNAEGHRSMNQYKPGKFGQTSVQDLLKNRSVIGYFTPKGCEEIAGYYPSVIDETTFYKVQQLSHSRYGRKPASDKPLSVNLFKGVIRCSECGHALIITGFSNTRNGIYRCPLRNENRCSAKGLSRKQTDGTLLTLLSRDRFDSDTTNTIDTLKLHREHISNNIEKLVQLSLEIEDLSAITSKLKQLKGELSQVDADIEKETQRLKSIDTGSLSDCDLTTKAGRIEAQLIIKSAVKEVVLNTAKRRCKVTFHNGRAITLPITENPSEDVTEAIQSLSEVTERGLIDVDEVII

SEQ ID NO: 3456 - protein, 516 aa, synthetic construct
MTKQRHRASAPAPETKRCAIYTRKSTTMGLEQEFNSLDAQREACLAYIERQQGWTLVDERYDDGGFTGANIDRPAFQRLLADVDAGKVDVIVVYKVDRLSRSLLDFVKVMERLSTAGASFVSITQNFSTADAMGRLTMNMLMSFAEFEREMISERTRDKIAGARRKGKWTGGPVPFGYSAKDKKLVVNEAEAHVVREAFTLFLAHRQMAIVARELNKRGLLPRASKHGRKGGPLWSKDSIARVLRSPLYAGRMMYGDELYEGEHPRLIDDVTYRQAQKLLGMAGRELRVTGTNPEYVLRGLLRCGSCGEAMCPASTTKKSGKTYRFYRCSTRDKYGTDRCSGRPLPAGALEDFVVERIMEATADGTLVERIQTKLTARVAKERATVAEIRKALSAQIAAASAATSKLTDEVIRLEGRARELVEVKLRDEAARLDDAERRLRALEDDALDLELVESQREWFVGALRNFGKVWGDMTPENQGRLLRALVAKVRVDEDSGVCRVELVNFDAIASAKEGA

SEQ ID NO: 3457 - protein, 532 aa, synthetic construct
MTIKNSLPRAFSDVFRDDETINVYSYIRFSSKAQALGFGEVRQLEQLNRFFEQYPTARQVERYEDLGVSAFKGKNLKTGQLAKFVERIKSKEILPNALLLVESFDRISRMGGYDALELIISIIQSDCSIYTLFDNRLYSKRKKDSSVDISLIQNILERANDESKSKSERISDAKARNLEKGENGGIITKRCPFWISFVDGKFVLNEHSKAVKRMTELCFDFGFQSIAKELNKENHPRKYTDSTIGKVLHKHAIYGSFLAMKNDENGNRTIVNKEIKNYYPAVISESEFHRISEKLKERQDPSLAGRKAQEFRNILRGLVFCKCGSTFRFHAQKSLYVDLVCHASTLGQCKYALPGKGIRHRYARIEEIFLAYQSLIPFHKIIVKNEDIKALEKEHQEILGQIIIKEKALANNFSILEKSSDSAQKYITNRIDEVSQELDKLKVDEHKLNLQINSLHLTTKSDLKSIEIFRLLITEKGRIKINNFLHSQKIKLIITPVKKKFFSLDIYHDEKHIDTIDVTPDGYAAHHKPHLK

SEQ ID NO: 3458 - protein, 500 aa, synthetic construct
MALDATLTLKDEGLSAYHQRHVKQGALGVFLRAIEDGRIASGSVLVVEGLDRLSRAEPIQAQAQLAQIINAGITVVTASDGREYNRAGLKAQPMDLVYSLLVMIRAHEESDTKSKRVKAAIRRQCEGWVSGSFRGLIRNGKDPQWVRLTTDGWELIPERVAAVKRALELYGQGLGAGRAANVMHEEGFQLTEGGISGLQIYRTIKLPALRGVKRLNVEGEDYELEDYYPRILSDAEWSDLQHLAGQRLRRRGAGEIPGIITGVGLAYCGYCGTALVAQNIMKRRRSDGSIADGNRRLQCTSYSKNGGCTAGGSCSVVPIEQALITFCSDQLNLQRLMQPSDDGQSVHRQLVAARAAVAKITGQLSKITDALLADESGAAPLAFVRKARELELQLKDAEQSVSTLEHEVVVMSAGAAQPVQAERWVELSEQVGVGDYSAREKVRQLVMDTFSRIVIFMRGVGASDRTGKFIDVQLFSRTGQHRLLRINRKNGEWVASEDWA

SEQ ID NO: 3459 - protein, 532 aa, synthetic construct
MTITNPLPRAFSDVFQSDETINVYSYIRFSSKAQKLGFGEIRQLEQLNRFFDQYPQARQVERYEDLGVSAFKGKNLKSGQLAKFVERIKSKEILPNALLLVESFDRISRMGGYDALELIISIIQADCAIYTLFDNRLYSKRKKDSSVDISLIQNILERANDESRAKSERITDAKARNLEKGQNGGIITKRCPFWISFVDGKFVLNENATAVKKATELCFDVGFQLIAQELNKENHPKRYSASSVSKFLHSHALYGSFLSLKLDENENRTVFNKEIKNYYPPLISEAEFHRISAKLKERLDPRLAGRKAEEFKNILRGLVFCKCGSTFRYHAQKSQYVDLVCSASMIGKCEFAKLGKGVRHRYALVEQLFLIFHAQIPFHKIIIKSDDVKALEKEHKEVLGQIILKEKALANNFSILEKSSESAQKYIMSRIDEVSLELDKLKSEEHKLSVKINSLHIASKSDLKVIEIYRLLVTEKGRIRINNFLHSQKVRLIITPVKKKYFSLEIFHGENYIDTIDVEKENYTARINAHLK

SEQ ID NO: 3460 - protein, 577 aa, synthetic construct
METLKIDRSKPLAVAYVRWSSTVQGGDDKDSYDRQTSPLEFFTSSTGVPVVETIIDPGQSAFTGENSKKGKLKGILDRIESGEIRKGDFLVVESIDRITRMRVLDGVALIQDGILKKGVKLYTTTDNKIYSYEDPDKDFENLLMISLIAKRANEESEIKSKRRRSAWSKAKTKATDGVPFNAHNLPYGLRHNLETNSFEIVEEEAQEIKQIFEGLKYEGVSNTLKKVNLTSKRKWSRKTVHLMLTSRYPIGTLMSQKRDGKKKVFERYIENYYPAILSHKEFQDALQAMKLRGKVKDYGRNTEGYLNIFKHCVKCAACGQSLMFEKSINQKGIKYGYFHCYTRKETLSHCDVPRFRFDFAFGTLLQLVRQLTCEDDDFDVHPWAREMPADYKSTMADDEINMENFENQFLSLFSKSTATEAIKTEFYEAENELAKSKSLYENMTASFSQYKDGRIPSFFIQQMADAELAYENAKSNIDALSTQIDNAESSLEIYSYRDIIELYSTDEGRLKLNHFFKSNGLKFVFNYEAKTRTVFMVVRDKKDAEIYRIGKKFTLHNPLKEFGIDNLNEHMNAVVKI

SEQ ID NO: 3461 - protein, 554 aa, synthetic construct
MPKAYAYIRYSRAIQATGDSENRQLTALELFETSTATKIVEVVYDKGKSAFRGDNARSGNFKEMLDRMGSGAIRAGDYLVVESIDRITRQRVLDGVELLQGILKKGINIYTTVDQKTYSYNDPSRDFENLLMISLIAKRANEESETKSGRLLSAWKARKAKAENGEVIIKKGKSIPYGLRVEHGKFVIHKEEQEEIQKLFELLLKFGLNTAITKINETSLKKWNNGTVNKILKNKTVIGCMATHRIEYTADGKARKILTGFIENYYPNLIEPGLFYKVVDTMSNRKQKNWSGRRTEQDFNIFKHCIYCEQCGGKMYYDHRGSRYKGKIYPFFKCDNARVQKHICTADNIRFEYVFGSLLECVYLVNRVATGITKDFKGISTQARYLNPRINNLLKIDDSQQNIELEEKRKKLVASRTKLDGMNLRMIEADYNVPTEYMRQMSSLETEIDSLKKSIAVLDGAGSDGINIEDTQTIIDLFQTDDGRAKLNSFFKSNDIVFYASHIKTTRSTVFRMHRKNSNVDERISGTTKVFPLKNILQEFGLGDLQTMFDLKIN

SEQ ID NO: 3462 - protein, 539 aa, synthetic construct
MSPTLGKVFSYLRFSDPRQATGSSADRQLAYAATWAAKQGMELDATLTLKDEGLSAYHQRHVTQGALGVFLRAIEDGRIASGSVLVVEGLDRLSRAEPIQAQAQLAQIINAGITVVTASDGREYNRAGLKAQPMDLVYSLLVMIRAHEESDTKSKRVKAAIRRQCEGWVAGSFRGLIRNGKDPQWLHWGEQGWELVPERVSAVRRALELYQQGLGAGRAAKLMHDEGFELSCWGVSGQQVYRLIKLPALRGAKRLAVDGEAYMLEEYYPRILSDTEWAELQHLAGQRHRRRGAGVIPGIITGVGLAYCGYCGTALVAQNIMHRQRPDGSLADGHRRLQCTSYSRNGGCSASGSCSVVPIERALLNFCSDQLNLQRLLQVGDVGQGIRQQLVVARAAVEKITKQLGKITDALLDDDSGSAPIAFVRKARELEAQQVVAEQKLVQLEYALAAVSATSQPAQAERWEELAELVRADDYGAREKVRQLVMDTFERIVVYMRGLEPDGRKGQLIDVQLLSRTGQHRLIQIDRRSGEWVSSEDWD

SEQ ID NO: 3463 - protein, 584 aa, synthetic construct
MPTAYAYIRYSSKAQGEAGRDSVDRQMASIQAITKQQGIELPPENIYSDTGISAHDGSNKRKGKLKELIDMISDMHIKEGDYIFVESIDRLSRQRLLQAKELVNGILEKGVILITTIDGQRYEKPNETNRIDDLQQDILLSVIAKRAYEESKTKSVRRKSAWNRAKKLAEDEKVIFNAHNPPYGIRYNTELNCFEVNEEEAKEIRDFFESLKYVGVSLSIKKLNAYSKRKWSSRNIKHLIDTKYVLGAYMAQRRDENKKKVFERYIENYYPQIVSYELFNEAIAAMKNRAHRKNYGNQSVGSLNIFRHSIKCDCCDASMLFEKQTNPKGVVYPYFQCYTRKELKNGCDQPRFRFDLAFGLFLELIYQSTTHEDFDVHPWQNEIEDTGIQYEWVTRESGMKYRLPTQEDIDEEERTENFKELLIKLLSNRETQTKDNKKIVELNNLLLEQKSYRDNLMKSFAGFTSGVIPKEFLEVVSKTEANINDIEQNLAELQTQINIKKTTINIYSENDIIDLYKTEDGRLKINQFFVANDITFKFNFDKTTRTLFAKIFQNGFEIDRIAKQFSLHNPLKEFGINNLNEYFN

SEQ ID NO: 3464 - protein, 506 aa, synthetic construct
MRSVITYLRFSSATQGAEGADSTRRQNELFKQWLRKNSDAQVVASFNDEGLSGYKGKHLSGQFGDMLSRIESGEFSEGTILLVEAIDRIGRLEHLETEALMNRILGNGIEIHTLQDGLIYTKDALADDLGISIIQRVKAYIAHQESKQKSFRVSQKWGQRAKLALAGEQRLTKMVPGWIDPETFKANEHAETVRLIFKLLLDGESLHNIARHLQANNISSFSRRKDANGFSVHSVRTILRSETTIGTLPASQRNDRPAIPNYYEAAIDVSTFNKAQEILDKNRKGRTPASDNPLTINIFKGLFRCQCGASVHPTGTKNKYQGVYRCNNHLDGRCDVQPLKRKPFDRWMIDNFLGMIDVGNDGESERKIAALQHEVEIVTARIKKATALLLEMDDIDELKIQLKELNQKRTELQTTIDNMRRKASLTDKELPQLKDIDLTTKAGRVECQLILSKHLKGLTLGKDTVTVTLQNDTEITIPTDPLPLNDGTSIFEIAEKNLLNIDTFQL

SEQ ID NO: 3465 - protein, 507 aa, synthetic construct
MKRVISYIRFSSEKQAKGDSLRRQSKMVTDWLKAHPEYYLDQDLSFRDLGVSGFTGKHLKGGLGDFLTAIEKGLVKAGDTLLIESLDRLSRQDIDIASELLRNILRSGVDVVTLSDGEHYTRESLRDPLALIKSILIMQRAHEESLRKAERIQAAWDAKKEAAKAGIKISRRCPAWLKLNDDRKSFSVIPEKVETVKRCFQLRLEGKSIWEIVRTLNDEGHQSMSQYKAGKFGQTSVQDLLKNRSVIGYFTPKGCEEISGYYPAIIDETTFYKVQQLSHYRYGRKPVSDKPLSVNLFKGVIRCSECGHALIITGFSDTRNGIYRCPLRNENRCSAKGLSRKQTDGTLLALLSRLDRFDSDTTNTIDTLKLHREHISSNIEKLVQLSLEIEDLNAITSKLKQLKNELSQVDADIEKETQRLKSIDVGCLSDCDLTTKAGRIEAQLIIKSAVKEVVLNTAKRRCKVTFHNGRSITLPITENPSDNVTEAIQSLSEVTERGLIDVDEVII

SEQ ID NO: 3466 - protein, 507 aa, synthetic construct
MKRVISYIRFSSEKQAKGDSLRRQSKMVTDWLKAHPEYYLDQDLSFRDLGVSGFTGKHLKGGLGDFLTAIEKGLVKAGDTLLIESLDRLSRQAVDQASELLRNILRSGVDVVTLSDGEHYTRESLRDPLALIKSILIMQRAHEESLRKAERIQAAWDAKKEAAKAGIKVSKRCPAWLKLNDDRKSFSVIPEKVETVKRCFQLRLEGKSIWEIVRTLNDEGHQSMSQYKPGSFGQSSVQDLLKNRSVIGYFTPKGCEEIAGYFPPIIPETDFYKVQQLSYARYGRKPASDKPLSVNLFKGVIRCSECGHALIITGFSDTRNGIYRCPLRNENRCSAKGLSRKQTDGTLLTLLSRLDRFDSDTTNTIDMLRLHREHISSNIEKLVQLSLEIEDLSAITSKLKQLKNELSQVDADIEKETQRLKSIDVGCLSDCDLTTKAGRIEAQLIIKSAVKEVVLNTAKRRCKVTFHNGKVIDLSITENPSEDVTEAIQSLSEVTERGLIDVDEVII

SEQ ID NO: 3467 - protein, 506 aa, synthetic construct
MRSVITYLRYSSAIQGAEGADSTRRQNDLFKQWLKKNSDAQVVASFSDEGLSGYKGKHLSGQFGDMLSRIESGEFSEGTILLVEAIDRIGRLEHLETEALMNRIIAHGIEIHTLQDGLIYTRDALSDDLGVSIIQRVKSYLAHQESKQKSFRVSEKWKQRAKLALAGKQRLTKMVPGWIDHDTFKINEHAETVRLIFKLLLDGESLHNIARHLQSNGIKSFSRRKDANGFSVHSVRTILRSETTIGTLPASQRNDRPAIPNYYEAAIDAATFNKAQEILDKNRKGRTPASDNPLTINIFKGLFRCQCGASVHPTGTKNKYAGVYRCNNHLDGRCDVPPLKRKPFDKWMIDNFLGMIDVGNDGESERKIAALQHEVEIVTARIKKATALLLEMDDIDELKIQIKELNQRRTELQTTIDSMRRKTSLSDKGLPQLKDIDLMTKAGRVECQLILSKHLKGLTLGKDSVTVTLQNDTEITIPTNPLPLNDGLPIFEIADKELLDIDAYQL

SEQ ID NO: 3468 - protein, 507 aa, synthetic construct
MKRVISYIRFSSERQAKGDSLRRQSKMVTDWLKAHPEYYLDQDLSFRDLGVSGFTGKHLKGGLGDFLTAIEKGLVKAGDTLLIESLDRLSRQAVDRASELLRNILRSGVDVVTLSDGEHYTSESLKDPLALIKSILIMQRAHEESLRKSERIQAAWDAKKEAAKAGIKVSKRCPAWLRLNDDRKSFSVIPEKVETVKRCFQLRLEGKSIWEIVRTLNAEGHRSMNQYKPGKFGQTSVQDLLKNRSVIGYFTPKGCEEISGYFPPIIPETDFYKVQQLSHSRYGKRSVSDKPLSVNLFKGVIRCSECGHALIITGFSDTRNGIYRCPLRNENRCSAKGLSRKQTDGTLLTLLSRLDRFDSNTTNTIDTLKLHREHISSNIEKLVQLSLEIEDLSAITSKLRQLKNELSQVDADIEKETQRLKSIDVGCLSDCDLTTKAGRIEAQLIIKSAVKEVVLNTAKRRCKVTFHNGKAITLPITENPSDNVTEAIQSLSEVTERGLIDVDEVII

SEQ ID NO: 3469 - protein, 506 aa, synthetic construct
MRHVITYLRYSSAIQGAEGADSTRRQNDLFKQWLKKNSDAQVVASFNDEGLSGYKGKHLSGQFGDMLSRIESGEFSEGTILLVEAIDRIGRLEHLETEALMNRILGNGIEIHTLQDGLIYTKDALADDLGISIIQRVKAYIAHQESKQKSFRVSQKWGQRAKLALAGKQRLTKMVPGWIDPETFEVNEHAETVRLIFKLLLDGESLHNIARHLQANNISSFSRRKDANGFSVHSVRTILRSETTIGTLPASQRNDRPAIPNYYEAAIDAATFNKAQEILDKNRKGRTPASDNPLTINIFKGLFRCQCGASVHPTGTKNKYQGVYRCNNHLDGRCDVPPLKRKPFDRWMIDNFLGMIDVGNDGESERKIAALQHEVEIVTSRIKKATALLLEMDDITELKAQVKELNQKRTELQTTINTMKRKTSLTDKELPQLKDIDLTTKAGRVECQLILSKHLKGLTLGKDSVTVTLQNDTEITIPTNPLPLNDGSPIFEIADKELLDIDAYQL

SEQ ID NO: 3470 - protein, 507 aa, synthetic construct
MKRVISYIRFSSEKQAKGDSLRRQSKMVTDWLKAHPEYYLDQDLSFRDLGVSGFTGKHLKGGLGDFLTAIEKGLVKAGDTLLIESLDRLSRQDIDIASELLRNILRSGVDVVTLSDGEHYTRESLRDPLALIKSILIMQRAHEESLRKSERIQAAWDAKKEAAKAGIKVSKRCPAWLKLNDDRKSFSVIPEKVATVKRCFQLRLEGKSIWEIVRTLNDEGHQTLNQYKPGKFGQTSVQDLLKNRSVIGYFTPKGREEIAGYFPPIIPETDFYKVQQLSYSRYGRKPASDKPLSVNLFKGVIRCSECGHALIITGFSDTRSGIYRCPSRNENRCNAKGLSRKQTDGTLLALLSRLDRFDSDMTNTVDTLKLHREHISSNIEKLVQLSLEIEDLSAITSKLKQLKGELSQVDADIEKETQRLKSIDVGCLSDCDLTTKAGRIEAQLIIKSAVKEVVLNTAKRRCKVTFHNGRIIDLPITENPSEDVTEAIQSLSEVTERGLIDVDEVII

SEQ ID NO: 3471 - protein, 507 aa, synthetic construct
MKRVISYIRFSSEKQAKGDSLRRQSKMVTDWLKAHPEYYLDQDLSFRDLGVSGFTGKHLKGGLGDFLTAIEKGLVKAGDTLLIESLDRLSRQAVDRASELLRNILRSGVDVVTLSDGEHYTSESLKDPLALIKSILIMQRSHEESLRKSERIQAAWDAKKEAAKAGIKVSKRCPAWLKLNDDRKRFSVIPDKVETVKRCFQLRLEGKSIWEIVRTLNAEGHRSMNQYKPGKFGQTSVQDLLKNRSVIGYFTPKGCEEIAGYYPSVIDETTFYKVQQLSHSRHGRKPVSDKPLSVNLFKGVIRCSECGHALIITGFSDTRNGIYRCPLRNENRCSAKGLSRKQTDGTLLTLLSRLDRFDSDTTNTIDMLRLHREHISSNIEKLVQLSLEIEDLNAITNKLKQLKNELSQVDADIEKETQRLKSIDTGSLSDCDLSTKAGRIEAQLIIKSAVKEVVLNTAKRRCKVTFHNGKSITLPITETPSEDVTEAIQSLSEVTEMGLIDVDEVII

SEQ ID NO: 3472 - protein, 507 aa, synthetic construct
MKRAISYIRFSSEKQSRGDSLRRQSKMVNDWLKAHPEYYLDQDLSFRDLGVSGFTGKHLKGGLGDFLTAIEKGLVKAGDTLLIESLDRLSRQNVDRASELLRNILRSGVDVVTLSDGEHYTKESLRDPLSLIKSILIMQRSHEESLRKSERIQAAWNRKKELISEGIKISKRCPAWLKLNDDRKSFSVIPEKVETVKRCFQLRLEGKSIWEIVRTLNDEGHQTLNQYKAGKFGQTSVQDLLKNRSVIGYFTPKGCEEISGYYPAIIDETTFYKVQQLSHYRYGRKPVSDKPLSVNLFKGVIRCSECGHALIITGFSDTRNGIYRCPLRNENRCSAKGLSRKQTDGTLLTLLSRLDRFDSDMTNTIDTLKLHREHISSNIEKLVQLSLEIEDLSAITSKLKQLKGELSQVDADIEKETQRLKSIDVGCLSDCDLTTKAGRIEAQLIIRSAVKEVVLNTAKRRCKVTFHNGKSITLPITENPSEDVTEAIQSLSEVTERGLIDVDVVEI

SEQ ID NO: 3473 - protein, 507 aa, synthetic construct
MKRVISYIRFSSEKQAKGDSLRRQSKMVTDWLKAHPEYYLDQDLSFRDLGVSGFTGKHLKGGLGDFLTAIEKGLVKAGDTLLIESLDRLSRQDVDQASELLRNILRSGVDVVTLSDGEHYTKESLRDPLSLIKSILIMQRAHEESLRKSERIQAAWNRKKELISEGIKISKRCPAWLKLNDDRKSFSVIPEKVETVKRCFQLRLEGKSIWEIVRTLNAEGHQTLNQYKAGSFGQTSVQDLLKNRSVIGYFTPKGREEIAGYFPPIIPETDFYKVQQLSYSRYGRKPASDKPLSVNLFKGVIRCSECGHALIITGFSDTRNGIYRCPLRNENRCSAKGLSRKQTDGTLLALLSRLDRFDSDTTNIIDMLRLHREHVSSNIEKLVQLSLEIEDLNAITSKLKQLKGELSQVDADIEKETQRLKSIDVGCLSDCDLTTKAGRIEAQLIIKSAVKEVVLNTAKRRCKVTFHNGRAITLPITENPSEDVTEAIQSLSEVTERGLLDVDEVII

SEQ ID NO: 3474 - protein, 559 aa, synthetic construct
MKTKLYSYIRFSSMRQSDGSSYERQIRMAREVAAKYDLELVNDYQDLGVSAFKGANSKTGALSRFLDAIGRSVPVGSWLFIENLDRLSRADIVSAQELFLSIIRRGITIVTGMDNKIYSLDTVTANPMDLMFSILLFIRGNEESQTKRNRTNSSALIKIKAHQENPQNPAVAIEEVGKNMWWTDTTSGYVLPHPTYFPVVQEIVELRKNGRSTAEILDHLNETYAPPPAVSNKKHSKWSRAMVERLFHTRALIGIKEISVDGVNYELKDYYPRVIDDPTFYHLKKNIGARAWNFGDKEEVKPIPLLSGIGLLKCDHCGCAMVKVKGTNKRSDQYRYTCDATRSRRLDCEHPNWSFRGDQLEKAVLQLLADKIWIAEDKANPVPALKVQVDEISRKIDNLIALSAMTGATKELADQITTLNSERETLYNQIKMAEEEMYSVDSQGWEKLAEFDLEDVYNEERLKVRFKIKQALKRIGCSRIDRNKNLFVLEYIDGKTQRVVIENSRGTRKGQIFVDLKTINDRQILESNGLVLHPCLDMLTDKNWKPEEEIPGPLQEFGI

SEQ ID NO: 3475 - protein, 506 aa, synthetic construct
MRTVITYLRFSSAIQGAEGADSTRRQNDLFKQWLKKNSDAQVVASFSDEGLSGYKGKHLTGQFGDMLARIESGEFPEGTILLVESIDRIGRLEHLETEALMNRILGNGLEIHTLQDGLIYTKDALADDLGISIIQRVKAYIAHQESKQKSFRVSQKWGQRAKLALAGKQRLTKMVPGWIDPDTLKLNEHAETVRLIFKLLLDGESLHNIARHLQSNDIKSFSRRKDANGFSVHSVRTVLRSESVIGTLPASQRNDRPAIPNYYEAAIDASTFNKAQEILDKNRKGRTPASDNPLTINIFKGLFRCQCGASVHPTGTKRTYQGVYRCNNHLDGRCHVPPLKRKPFDKWMIDNFLGMIDVGNDGEAEGKIASLQHEVEIVTTRIKKATALLLEMDDIDELKIQLKELNQKRTELQTTIDNMRRKASLTDKELPQLKDIDLTTKAGRVECQLILSKHLKGLTLGKDSVTVTLQNDTEITIPTNPLPLNDGSPIFEIADKELLDIDAYQL

SEQ ID NO: 3476 - protein, 507 aa, synthetic construct
MKRVISYIRFSSERQAKGDSLRRQSKMVNDWLKAHPEYYLDQDLSFRDLGVSGFTGKHLKGGLGDFLTAIEKGLVKAGDTLLIESLDRLSRQAVDRASELLRNILRSGVDVVTLSDGEHYTSESLKDPLALIKSILIMQRAHEESLRKSERIQAAWDAKKEAAKAGIKVSKRCPAWLKLNDDRKSFSVIPEKVETVKRCFQLRLEGKSIWEIVRTLNDEGHQTLNQYKPGKFGQTSVQDLLKNRSVIGYFTPKGREEIAGYFPSIIHETDFYKVQQLSYARHGRKPASAKPLSVNLFKGVIRCSECGHALIITGFSDTRSGIYRCPLRNENRCSAKGLSRKQTDGTLLTLLSRLDRFDSDTTNTIDTLKLHREHISSNIEKLVQLSLEIEDLSAITSKLKQLKNELSQVDADIEKETQRLKSIDVGCLSDCDLTTKAGRIEAQLIIKSAVKEVVLNTAKRRCKVTFHNGKSITLPITENPSEDVTEAIQSLSEVTERGLIDVDEVII

SEQ ID NO: 3477 - protein, 506 aa, synthetic construct
MRHVITYLRYSSAIQGAEGADSTRRQNDLFKQWLKKNSDAQVVASFNDEGLSGYKGKHLSGQFGDMLSRIESGEFSEGTILLVEAIDRIGRLEHLETEALMNRILGNGIEIHTLQDGLIYTKDALADDLGISIIQRVKAYIAHQESKQKSFRVSQKWGQRAKLALAGKQRLTKMVPGWIDPETFEVNEHAETVRLIFKLLLDGESLHNIARHLQANNISSFSRRKDANGFSVHSVRTILRSETTIGTLPASQRNDRPAIPNYYEAAIDAATFNKAQEILDKNRKGRTPASDNPLTINIFKGLFRCQCGASVHPTGTKNKYQGVYRCNNHLEGRCDVPPLKRKPFDRWMIDNFLGMIDVGNDGESERKIAALQHEVEIVTSRIKKATALLLEMDDITELKAQVKELNQKRTELQTTINTMKRKTSLSDKGLPQLKDIDLMTKAGRVECQLILSKHLKGLTLGKDSVTVTLQNDTEITIPTNPLPLNDGSPIFEIADKELLDVDAYQL

SEQ ID NO: 3478 - protein, 507 aa, synthetic construct
MKRVISYIRFSSEKQAKGDSLRRQSKMVTDWLKAHPEYYLDQDLSFRDLGVSGFTGKHLKGGLGDFLTAIEKGLVKAGDTLLIESLDRLSRQDIDIASELLRNILRSGVDVVTLSDGEHYTRESLKDPLALIKSILIMQRAHEESLRKAERIQAAWDAKKEAAKAGIKVSKRCPAWLKLNDDRKSFSVIPEKVETVKRCFQLRLEGKSIWEIVRTLNDEGHQTLNQYKAGKFGQTSVQDLLKNRSVIGYFTPKGCEEISGYYPAIIDETTFYKVQQLSHYRYGRKPVSDKPLSVNLFKGVIRCSECGHALIITGFSDTRNGIYRCPLRNENRCSAKGLSRKQTDGTLLTLLSRLDRFDSDMTNTIDTLKLHREHISSNIEKLVQLSLEIEDLSAITIKLKQLKNELSQVDADIEKETQRLKSIDVGCLSDCDLTTKAGRIEAQLIIKSAVKEVVLNTAKRRCKVTFHNGKIIDLPITENPSEDVTEAIQSLSEVTERGLIDVDEVII

SEQ ID NO: 3479 - protein, 506 aa, synthetic construct
MRTVITYLRFSSATQGAEGADSTRRQNELFKQWLRKNSDAQVVASFSDEGLSGYKGKHLTGQFGDMLARIESGEFSEGTVLLVEAIDRIGRLEHLETEALMNRIIAHGIEIHTLQDGLIYTRDALSDDLGISIIQRVKSYVAHQESKQKSFRVSQKWKQRAKLALAGEQRLTKMVPGWIDPDTFKCNEHAETVRLIFKLLLDGESLHNIARHLQSNDIKSFSRRKDANGFSVHSVRTVLRSESVIGTLPASQRNDRPAIPNYYEAAIDAATFNKAQEILDKNRKGRTPASDNPLTINIFKGLFRCQCGASVHPTGTKNKYAGVYRCNNNPDGRCDVPPLKRKPFDKWMLENFLGMIDVGNDGEAEGKIASLQHEVEIVTTRIKKATALLLEMDDITELKAQVKELNQKRTELQTTIDSMRRKTSLTDKELPQLKDIDLTTKAGRVECQLILSKHLKGLTLGKDSVIVTLQNDTEITIPTNPLPLNDGTSIFEIAEKELLEIDAYQL

SEQ ID NO: 3480 - protein, 506 aa, synthetic construct
MRSVITYLRFSSAIQGAEGADSTRRQNELFKQWLRKNSDAQVVASFSDEGLSGYKGKHLTGQFGDMLARIEAGEFPAGAILLVESIDRIGRLEHLETEALMNRIIAHGIEIHTLQDGLIYTRDALSDDLGISIIQRVKSYLAHQESKQKSFRVSEKWKQRAKLALAGEQHLTRNVPGWIDPDTFKCNEHAETVRLIFKLLLDGESLHNIARHLQSNDIKSFSRRKDANGFSVHSVRTVLRSESVIGTLPASQRNDRPAIPNYYEAAIDASTFNKAQEILDKNRKGRTPASDNPLTINIFKGLFRCQCGASVHPTGTKNKYQGVYRCNSHLDGRCDVPPLKRKPFDRWMIDNFLGMIDVGNDGEAEKEIASLQHEVETVTARIKKATALLLEMDDITELKTQVKELNQKRTELQTTINTMKRKTSLSDKGLPQLKDIDLMTKAGRVECQLILSKHLKGLTLGKDSVTVTLQNDTEITIPTNPLPLNDGTSIFEIAEKNLLNIDTFQL

SEQ ID NO: 3481 - protein, 507 aa, synthetic construct
MKRVISYIRFSSEKQAKGDSLRRQSKMVTDWLKAHPEYYLDESLTFRDLGVSGFTGKHLKGGLGDFLTAIEKGLVKAGDTLLIESLDRLSRQNVDRASELLRNILRSGVDVVTLSDGEHYTRESLKDPLALIKSILIMQRSHEESLRKSERIQAAWNRKKELISEGIKISKRCPAWLKLNDDRKSFSIIPEKVETVKRCFQLRLEGKSIWAIVKALNDEGHQTLNQYKAGSFGQTSVQDLLKNRSVIGYFTPKGCEEIAGYYPAIIDETTFYKVQQLSHSRYGKRSVSDKPLSVNLFKGVIRCSECGHALIITGFSDTRNGIYRCPLRNENRCSAKGLSRKQTDGTLLALLSRLDRFDSDTTNTIDTLKLHREHISSNIEKLVQLSLEIEDLSAITSKLRQLKGELSQVDADIEKETQRLKSIDVGCLSDCDLTTKAGRIEAQLIIKSAVKEVVLNTAKRRCKVTFHNGKLIDLPITETPSDNVTEAIQSLSEVTERGLIDVDEVII

SEQ ID NO: 3482 - protein, 506 aa, synthetic construct
MRSVITYLRFSSATQGAEGADSTRRQNELFKQWLRKNSDAQVVASFSDEGLSGYKGKHLTGQFGDMLARIEAGEFPAGAILLVESIDRIGRLEHLETEALMNRIIAHGIEIHTLQDGLIYTRDALSDDLGISIIQRVKSYLAHQESKQKSFRVSEKWKQRAKLALAGEQHLTRNVPGWIDPDTFKCNEHAETVRLIFKLLLDGESLHNIARHLQSNDIKSFSRRKDANGFSVHSVRTVLRSESVIGTLPASQRNDRPAIPNYYEAAIDAATFNKAQEILDKNRKGRTPASDNPLTINIFKGLFRCQCGASVHPTGTKNKYAGVYRCNNHLDGRCDVPPLKRKPFDKWMIDNFLGMIDVGNDGEAEGKIAALQHEVEIVTARIKKATALLLEMDDIDELKIQLKELNQKRTELQTTIDNMRRKASLTDKELPQLKDIDLTTKAGRVECQLILSKHLKGLTLGKDTVTVTLQNDTEITIPTNPLPLNDGTSIFEIAEKNLLNIDTFQL

SEQ ID NO: 3483 - protein, 567 aa, synthetic construct
MQKAIIYIRFSTLEQREGVSLDRQKERCLEMCEANGWDVETILVDEGKSAFAGKHRDAGAAFGDFEVAARHGLHAGAILVIERLSRLSRLDYNETYDLMRALTKNGVTVACWDGGRIYKANESIEFVSVIELLVKAKTANEESQTKSDFGKDKWARRRADAASGKVATSNGPAWLQLDANRKWVVIEDRAQVVRQIFEWADQGDGSLRISRRLNEAKVQPWARYANRTPRCWERKQVSRIMANLAVIGDYQMMMEDSDGKPVPAGEPIRGYFPRIIAPDVFERVNLSADDRKIMKGGGRSVAVANLASALTRCGVCGGAMEYVRSRLKGATVIRDGKETAPLKQDQGYLYCRVANRRGDCANRTSIAYVGFERALLDSALHLALDDASFSRVDEVGRLTVLIADKRRDHAAAVSRAETLFNAFAENASEMGMKMALEAEKNAKSVQAEIDELQVQKDRASGQASAAEHLSRLNEIREQLYDDDLDVRRVARLKVAAGLNSVIEKIECQEDRRVFVRYKRGARVSIIYPGRGRRPAYSFDVNLAKPGDDHSDDPKVQALIGRMKLEAE

SEQ ID NO: 3484 - protein, 544 aa, synthetic construct
MAETAKKISMIPAKVQYDRNVKLSEKKMKVAAYCRVSTELEEQDSSYEAQVEYYTSKISENENWKNAGIYADDGKSGTNTKKRADFNAMIQDALAGKIDMILTKSVSRFARNTVDSLVTIRKLKEKNVAVVFEKEGINTLEGTGEILITILSSLAQEESRNISENIRWGVVRKFEKGKVIVNCTKFMGYTKNEDGDLVIVPEEAEVVKLIFRLYLEGYSTGKIAKHLEEQGIKTATGQDKWHSTVIDKMLRNEKYMGDALLQKTYTVDFMTKKKVKNTGLVPQYYVEDDHEAIIPKELFYRVQEEMMRRASLCKAAVTRKKNQKSRYSSTYALTGMLICGKCGQEYRRVTWARNGKKKVVWRCSNRLTNGVKKCGESETLEENALNRAVMEAIHRITSDDMEFMENFRQNIIHVIGNYSTAKESEEYEEKIKEKQEEMVALIAENAKTGSYTPEFDERYRTIAEEINALKEAQKTARNEKWMADSYEQRIQDIDHYLSTSTCQIPEFDNDLVRRLISTIKVESSEKLLIQFQSGIVMEQEIRYE

SEQ ID NO: 3485 - protein, 563 aa, synthetic construct
MSNKLRVVAYARVSTNTKDQENSFENQKNYFEREIAKNPEWELVEIYADKGLTGTTINKRKEFLRMIYDAGIDIKEHKGEQVYIVSDRKPKFDLILVKNTSRFARNINVVELLRKLRQKGVYVNFLDIGKSTQNEADFVFIEMLMVFDENESRDKSRKVRFGHMEGALKGVLMTNSRLYGYRRIDKFTLEVIPEEAEMIKFIFEKYAEGYGMRQLVKLLDEKGYKTREGKSFNVNTIKKILSNPIYMGHVVRNRYTTGTIFVDKSSPKLLPKEKWIIHKHRVPPIISEELFYKCEQIRKGRVSIYNSGKNTGTSLFAGKIFCGKCGSPYHHNVDKGRPFYNCSLKKKKGTQACDNPNISEERLIELVEEQVKDMLLLLNRKKTKIKELVSEIINVLQDKINSNDLEDKFDNEELDLLDLEELKNKENKEKLLLELENITLKEKKLLDLYLDGGISKEIFERKKKELENERSIIENKINQEEYVKRMYENRINLLKKYIEWLDENLPNNTENINIKDYLDFIQRIIVYNKDNIDVKFSWELNFDTKTLLEFANNIGYNSIELGL

SEQ ID NO: 3486 - protein, 547 aa, synthetic construct
MKLLVTYIRWSTKEQDSGDSLRRQTNLIDAFYSKHKNDYYLLPAHRYVDKGKSGFHQQHKNQGSDFRRMFENVMSGAIPEGSLIVVENFDRFSRADIDTAIDDVRQILRKGVSILTLGDGELYDKSALTDPVKLIKHIIIAERAHQESLVKQKRIAQVWNHKTQLARELKKPMGKQAPGWLELSDDGSHYIVDEDKASLVNIIYDKRLSGMSMFAICKWLNEQGYPTINQRKVRISKTKKPDGNWSALSVKHILTSRSVLGYLPAKISTEDRKTVLREEIESFYPQIVTDSKFYAVQQLLEETGKGKTSSGEHWLYVNILKGLIRCKCGLVMTPTGIRKPVYQGTYRCNGNKESRCSYGTVSRKLLDTQLCSRLFSKLSQLHDEATDTAKLDELQRRLNTVDSELEKLTETLIQLPNITQIQEALRVKQGEKDELIVQLSREKARVKSVSSLDLSGLDMESVEGRTEAQIIIKRLVKEIVVSGNEKLVDIYLHNGNMIRGFPLDGKDDHTLTLEEATDEMQSLDDMLIFGEPVTRIYPAGDMEEVDA

SEQ ID NO: 3487 - protein, 584 aa, synthetic construct
MKKNNVEIIKADSLVRRRGDNFERESKRVAAYCRVSSDSEDQKNSYESQVRHYKDYISQRSDWELAGIYADEGISGTQVGKRQDFQRLINDCVNGEIDYIVTKAIARFARNTLDTLKYVRMLKDMQIGVYFEEENIDTLTMDGELLLTILSSVAQQEVENTSAHVKKGLKMKMQRGELIGFQGCLGYDYDVETKQLSINKKEAKIVRYIFERYLEGIGGKVIARELDELGYKSPRGLDHWNDTTVLGIIKNEKYKGDILMGKTFTVDPISKRRLSNFGEEDKYYIKDNHEPIISKEDFEKAQEIRLRRAGNKKTAANVNGKRERYSKMYAFSSMLECGFCGSILSRRSWHCRSDYRKVVWHCVTSIKKGKKFCKHSKGLEELAIEGAFMEAYRKLYHSNENLMTDLLETIESELNDNSLNKELKRITNKLRTLLKKEENLVNLRLEGKISDTIYNEKYNEISSEKEFLAEEKVNIETTLKSEIDVKKRLTEFKHLLSSQKMLTEFDRAVFESIVEKIIVGGVNSDGEIDPAMLTIIFKTGETQNKDGKQFKSKRKNAKLETDKLCPQNSDEDKKLYSQGTDYTR

SEQ ID NO: 3488 - protein, 506 aa, synthetic construct
MRSVITYLRFSSAIQGAEGADSTRRQNDLFRQWLKKNIDAQVVASFSDEGLSGYKGKHLSGQFGDMLSRIESGEFPEGTILLVESIDRIGRLEHLETEALMNRILGNGIEIHTLQDGLVYTKDALADDLGISIIQRVKAYIAHQESKQKSFRVSQKWEQRAKLALAGEQRLTRNVPGWIDPDTFKCNEHAETVRLIFKLLLDGESLHNIARHLQANNISSFSRRKDANGFSVHSVRTVLRSESVIGTLPASQRNDRPAIPNYYEAAIDAATFNKAQEILDKNRKGRTPASDNPLTINIFKGLFRCQCGASVHPTGTKNKYAGVYRCNNNPDGRCDVPPLKRKPFDKWMIDNFLGMIDVGNDGESERKIAALQHEVEIVTARIKKATALLLEMDDIDELKIQLKELNQRRTELQTTIDSMRRKTSLTDKELPQLKDIDLTTKAGRVECQLILSKHLKGLTLGKDSVTVTLQNDTEITIPTNPLPLNDGSPIFEIADKELLDVDTYRL

SEQ ID NO: 3489 - protein, 506 aa, synthetic construct
MRHVITYLRYSSAIQGAEGADSTRRQNDLFKQWLKKNSDAQVVASFNDEGLSGYKGKHLSGQFGDMLSRIESGEFSEGTVLLVEAIDRIGRLEHLETEALMNRIIAHGIEIHTLQDGLIYTRDALSDDLGISIIQRVKSYIAHQESKQKSFRVSQKWEQRAKLALAGEQRLTRNVPGWIDPDTFKCNEHAETVRLIFKLLLDGESLHNIARHLQSNDIKSFSRRKDANGFSVHSVRTVLRSESVIGTLPASQRNDRPAIPNYYEAAIDAATFNKAQEILDKNRKGRTPASDNPLTINIFKGLFRCQCGASVHPTGTKNKYAGVYRCNNHLDGRCDVPPLKRKPFDRWMIDNFLGMIDVGNDGESERKIAALQHEVEIVTARIKKATALLLEMDDIDELKIQLKELNQKRTELQTTIDNMRRKASLTDKELPQLKDIDLTTKAGRVECQLILSKHLKGLTLGKDSVIVTLQNDTEITIPTNPLPLNDGTSIFEIAEKELLEIDAYQL

SEQ ID NO: 3490 - protein, 547 aa, synthetic construct
MKLLVTYIRWSTREQDSGDSLRRQTNLIDAFYAKHKDDYYLLPAHRYVDKGKSGFHQQHKAQGSDFRRMFENVMSGAIPEGSLIVVENFDRFSRADIDTAIDDVRQILRKGVSILTLGDGELYDKSALTDPVKLIKHIIIAERAHQESLVKQKRIAQVWNHKTQLARELKKPMGKQAPGWLELSEDGSHYIVDEDKASLVNIIYDKRLSGMSMFAICKWLNEQGYPTINQRKVRISKTKKPDGNWSALSVKHILTSRSVLGYLPAKISTEDRKTVLREEIESFYPQIVTDSKFYAVQQLLEETGKGKTSSGEHWLYVNILKGLIRCKCGLVMTPTGIRKPVYQGTYRCNGNKESRCNYGTVSRKLLDTQLCSRLFSKLSQLHDEATDTAKLDELQRRLNTVDSELEKLTETLIQLPNITQIQEALRVKQEEKDELIVQLSREKARVKSVSSLDLSGLDMESVEGRTEAQIIIKRLVKEIVVSGNEKLVDIYLHNGNMIRGFPLDGKDDHTLTLEEATDEMQSLDDMLIFGEPVTRIYPAGDMEEVDA

SEQ ID NO: 3491 - protein, 509 aa, synthetic construct
MRRAISYIRFSSERQLKGDSVRRQSKLVTDWLDKNPEFYLDSSLSFKDLGKSAFSGKHLKGGLGDFLTAIEKGLVKAGDTLLIESLDRLSRQDIDIASELLRRILRAGVDVVTLSDGEHYTRESLKDPLSLIKSILIMQRAHEESLRKSERVQAAWNRKKELISEGIKVSRRCPAWLRLNDDRRTFTIIPDKVEVVKRAFDLRLQGLSFWAITRTLNDEGHLSLNQYTPKQKGWSDTAVKKLLRNRAVIGCFTPAGREEVQGYYPAIISESLFYRVQQLNTGQYGRASVSSNPLSVNLFRGIIKCSECGATIVLGGYALKRFGMYRCPNRSANRCSAKAISRKQTDATILYMLALCDRFETENADTIDSLKLQREDLQRKISKMAELAIELDDMTIITEKLRDMKNALSKLNHDIEEETQRIKAITTGSLKDIDRTTKEGMVETQLLIKGVLKEIVIDTAKRRCKVTFHNGKSITLPITENPSEDVTEAIQSLSEVTERGLIDVDEVII

SEQ ID NO: 3492 - protein, 547 aa, synthetic construct
MKLLVTYIRWSTKEQDSGDSLRRQTNLIDAFYSKHKEEYYLLPAHRYVDKGKSGFHQQHKNQGSDFRRMFENVMSGGIPEGSLIVVENFDRFSRADIDTAIDDVRQILRKGVSILTLGDGELYDKSALTDPVKLIKHIIIAERAHQESLVKQKRIAQVWNHKTQLARELKKPMGKQAPGWLELSDDGSHYIVDEDKASLVNLIFDKRLSGLSMFAICKWLNEQGYPTINQRKVRISKTQKPDGNWSALSVKHILTSRSVLGYLPAKISTEDRKTVLREEIEGFYPQIVTDSKFYAVQQLLEETGKGKTSSGEHWLYVNILKGLIRCKCGLVMTPTGIRKPVYQGTYRCNGNKESRCNYGTVSRKLLDTQLCSRLFSKLSQLHDEATDTDRLDELQRRLTTVDIELEKLTETLIQLPNITQIQEALRVKQEEKDELIAQLSREKARVKSVSSLDLSGLDMESVEGRTEAQIIIKRLVKEIVVSGNEKLVDIYLHNGNMIRGFPLDGKDDHTLTLEEATDEMQPLDDMLIFGEPVTRVYPAGDMEEVDA

SEQ ID NO: 3493 - protein, 537 aa, synthetic construct
MQRRAAIYARYSTTLQSERSIEDQVELCRRYLTSEGYREVRTFEDRAKTSETLIGRVGFANLLEAASAGEIDALVVECVDRISRDAGDLHTVHKLLSYAGVEIISASEGVQSELQIGLRGFVGTVFLKDLREKVHRGMSGNIAKGLSAGGKAYGYSPIAGKPGELQVKAHEAEVICQIYKAYAEGASPRDIAHDLNARGELPPRRTKWNASTLSGNGKRGYGILRNSLYAGILVWDRVKMVRNPTTGKRVSREKPVKDWKIAEVPHLRIVEEELWDAVQRRLATQSAAKRSGKSTRNPVRPFSGLIKCGCCGGGMSIHDRNGNTIRIRCSTAKESGSCNNNGKVRLDKIESALLTELRKELSEPTYIDEFIRTYNEESRKLNAADKPDRKKLERAVAEANKLLSRRIELFEMGILEGVEGEAKLTEAKQRVSVVTDVLASFDEKEKALEFNPATASRYVTALDEMISSMQAHDGNPNPKARDAVRGLISEIVVSPTEKDGVPVEVKGRLSALVSNRSKKLGGLVVAEEGLEPPTRGL

SEQ ID NO: 3494 - protein, 549 aa, synthetic construct
MRAAIYARYSTDLQSDASIEDQHRLCLRLIDGNGWQEAETYSDRGLSGASHLRPGYQRLLEDARRNVFDVVVAEGLDRISRDQEHIAAFFKQMRFQGIPIITVAEGEISELHIGLKGTMSSLFLKDLAQKTHRGLEGRVRKGKSAGGITYGYNVVRDMCADGSITTGERRINESQAQIVQRIFQDYSHGLSPRNIASDLNEEGIPGPRGTWGASTIYGNHQRGTGILNNELYIGRLVWNRQRFVKDPNSGKRQAQPNPPEEWVIEDVPDLRIVPDDLWNAVKTRQEKTRNAAISDGIKKLGRTKRARHLFSGMLTCGCCGGGVIQVGKQYYGCSSQRNKGTCDNRLTIKRADLEDRVLSGLKEQLLHPDLIAEFAKAYQEEYNRLAGSIQQERINATRDLAQVERKIAHLIDAISDGMFHASMKDKLTALEARKAELEALIAAASDEPPVLLHPGLSDVYREQVANLTTALRDPSSQAQATSIIRSLLSEIRLVPEDGTYALELVGELAGLLALRAPQNEQSRPEAACSRLCSTQVVAGAGFEPATFRL

SEQ ID NO: 3495 - protein, 546 aa, synthetic construct
MKQADGSSYERQKRTAAEIAAKYDLELVTSYQDFGVSAFKGANSKTGALSRFLDEIGRSVPVGSWLVVENLDRISRQSIIEAQELFLSIIRRGITIVTGMDGRVYSRESVNANPIDLLLSVMLFARANEESQTKRNRTNSSALIKIKSHQENPQNPAVAIEEVGKNMWWTDTTSGYVLPHPVYFPVVQEIVELRKNGRSTAEILDHLNETYAPPPAVSNKKHSKWSRAMVERLFHTRALIGIKEISVDGVNYELKDYYPRVIDDPTFYHLKKNIGARAWNFGDKEEVKPIPLLSGIGLLKCDHCGCAMVKVKGTNKRSDQYRYTCDATRSRRLDCEHPNWSFRGDQLEKAVLQLLADKIWIAEDKANPVPALKVQVDEISRKIDNLIALSAMTGATKELADQITTLNSERETLYNQIKMAEEEMYSVDSQGWEKLAEFDLEDVYNEERLKVRFKIKQALKRIGCSRIDRNKNLFVLEYIDGKTQRVVIENSRGTRKGQIFVDLKTINDRQILESNGLVLHPCLDMLTDKNWKPEEEIPGPLQEFGI

SEQ ID NO: 3496 - protein, 506 aa, synthetic construct
MRSVITYLRFSSAIQGAEGADSTRRQNDLFNQWLKKNSDAQVVASFSDEGLSGYKGKHLSGQFGDMLSRIESGEFSEGTILLVEAIDRIGRLEHLETEALMNRIIAHGIEIHTLQDGLIYTRDALSDDLGISIIQRVKSYIAHQESKQKSFRVSQKWGQRAKLALAGKQRLTKMVPGWIDPETFEVNEHAETVRLIFKLLLDGESLHNIARHLQANNISSFSRRKDANGFSVHSVRTILRSETTIGTLPASQRNDRPAIPNYYEAAIDAATFNKAQEILDKNRKGRTPASDNPLTINIFKGLFRCQCGASVHPTGTKNKYQGVYRCNNHLDGRCDVPPLKRKPFDRWMIDNFLGMIDVGNDGESERKIAALQHEVEIVTSRIKKATALLLEMDDITELKAQVKELNQKRTELQTTINTMKRKTSLSDKGLPQLKDIDLMTKAGRVECQLILSKHLKGLTLGKDSVTVTLQNDTEITIPTNPLPLNDGSPIFEIADKELLDVDAYQL

SEQ ID NO: 3497 - protein, 547 aa, synthetic construct
MKLLVTYIRWSTREQDSGDSLRRQTNLIDAFYAKHKDDYYLLPAHRYVDKGKSGFHQQHKAQGSDFRRMFENVMSGAIPEGSLIVVENFDRFSRADIDTAIDDVRQILRKGVSILTLGDGELYDKSALTDPVKLIKHIIIAERAHQESLVKQKRIAQVWNHKTQLARELKKPMGKQAPGWLELSEDGSHYIVDEDKASLVNIIYDKRLSGMSMFAICKWLNEQGYPTINQRKVRISKTKKPDGNWSALSVKHILTSRSVLGYLPAKISTEDRKTVLREEIEGFYPQIVTDSKFYAVQQLLEETGKGKTSSGEHWLYVNILKGLIRCKCGLVMTPTGIRKPVYQGTYRCNGNKESRCSYGTVSRKLLDTQLCSRLFSKLSQLHDEATDTAKLDELQRRLNTVDSELEKLTETLIQLPNITQIQEALRVKQEEKDELIVQLSREKARVKSVSSLDLSGLDMESVEGRTEAQIIIKRLVKEIVVSGNEKLVDIYLHNGNMIRGFPLDGKDDHTLTLEEATDEMQSLDDMLIFGEPVTRIYPAGDMEEVDA

SEQ ID NO: 3498 - protein, 507 aa, synthetic construct
MKRVISYIRFSSEKQAKGDSLRRQSKMVTDWLKAHPEYYLDQDLSFRDLGVSGFTGKHLKGGLGDFLIAIEKGLVKAGDTLLIESLDRLSRQDVDQASELLRNILRSGVDVVTLSDGEHYTRESLRDPLALIKSILIMQRSHEESLRKSERIQAAWNRKKELISEGIKISKRCPAWLKLNDDRKSFSVIPDKVETVKRCFQLRLEGKSIWEIVRTMNAEGHQTLHQHKPGSFGQSSVQDLLKNRSVIGYFTPKGCEEISSYYPSVIDETTFYKVQQLSHSRYGRKPVSDKPLSVNLFKGVIRCSECGHALIITGFSDTRSGIYRCPLRNENRCSAKGLSRKQTDGTLLTLLSRLDRFDSDMTNTIDMLRLHREHISSNIEKLVQLSLEIEDLSAITNKLKQLKNELSQVDADIEKETQRLKSIDVGCLSDCDLTTKAGRIEAQLIIKSAVKEVVLNTAKRRCKVTFHNGRAITLPITENPSEDVTEAIQSLSEVTERGLLDVDEVII

SEQ ID NO: 3499 - protein, 507 aa, synthetic construct
MKRVISYIRFSSEKQAKGDSLRRQSKMVTDWLKAHPEYYLDQDLSFRDLGVSGFTGKHLKGGLGDFLTAIEKGLVKAGDTLLIESLDRLSRQAVDRASELLRNILRSGVDVVTLSDGEHYTRESLRDPLSLIKSILIMQRSHEESLRKSERIQAAWDAKKEAAKAGIKVSKRCPAWLRLNDDRKSFSVIPDKVETVKRCFQLRLEGKSIWEIVRTLNAEGHRSMNQYKPGKFGQTSVQDLLKNRSVIGYFTPKGCEEIAGYYPSVIDETTFYKVQQLSHSRYGRKPASAKPLSVNLFKGVIRCSECGHALIITGFSDTRNGIYRCPLRNENRCSAKGLSRKQTDGTLLTLLSRLDRFDSDMTNTIDTLKLHREHISSNIEKLVQLSLEIEDLNAITSKLKQLKGELSQVDADIEKETQRLKSIDVGCLSDCDLTTKAGRIEAQLIIKSAVKEVVLNTAKRRCKVTFHNGKSITLPITENPSEDVTEAIQSLSEVTERGLIDVDVVEI

SEQ ID NO: 3500 - protein, 508 aa, synthetic construct
MKKAIAYMRFSSPGQMSGDSLNRQRRLITEWLKVNSDYYLDTVTYEDLGLSAFNGKHAQSGAFSEFLDAIEHGYILPGTTLLVESLDRLSREKVGEAIERLKLILNHGIDVITLCDNTVYNIDSLNEPYSLIKAILIAQRANEESEIKSSRVKLSWKKKRQDALESGTIMTASCPRWLSLDDKRTAFVPDPDRVKTIELIFKLRMERRSLNAIAKYLNDHAVKNFSGKESAWGPSVIEKLLANKALIGIYVPSYRARGKGISEIAGYYPRVISDDLFYAVQEIRLAPFGISNSSKNPMLINLLRTVMKCEACGNTMIVHAVSGSLHGYYVCPMRRLHRCDRPSIKRDLVDYNIINELLFNCSKIQPVENKKDANETLELKIIELQMKINNLIAALSVAPEVTAIAEKIRVLDKELRRASVSLKTLKSKAVSSLGDFHAIDLTSKNGRELCRTLAYKTFEKIIINTDNKTCDIYFMNGIVFKHYPLMKTISAQQAISTLKYMVDGEVYF

SEQ ID NO: 3501 - protein, 506 aa, synthetic construct
MRSVITYLRFSSAIQGAEGADSTRRQNDLFKQWLKKNSDAQVVASFSDEGLSGYKGKHLTGQFGDMLARIESGEFPEGTLLLVEAIDRIGRLEHLETEALMNRIIAHGIEIHTLQDGLIYTRDALSDDLGISIIQRVKSYVAHQESKQKSFRVSQKWKQRAKLALAGEQRLTKMVPGWIDPDTFKCNEHAETVRLIFKLLLDGESLHNIARHLQANNISSFSRRKDANGFSVHSVRTILRSETTRGTLPASQRNDRPAIPNYYEAAIDAATFNKAQEILDKNRKGRTPASDNPLTINIFKGLFRCQCGASVHPTGTKNKYAGVYRCNNNPDGRCDVPPLKRKPFDKWMIDNFLGMIDVGNDGEAEGKIASLQHEVEIVTARIKKATALLLEMDDIDELKIQLKELNQKRTELQTMIDNMRRKASLTDKELPQLKDIDLMTKAGRVECQLILSKHLKGLTLGKDSVTVTLQNDTEIIVPTDPLPLNDGTSIFEIAEKELLEIDAYQL

SEQ ID NO: 3502 - protein, 506 aa, synthetic construct
MRHVITYLRYSSAIQGAEGADSTRRQNDLFKQWLKKNSDAQVVASFSDEGLSGYKGKHLTGQFGDMLARIESGEFPEGTLLLVEAIDRIGRLEHLETESLMNRIIAHGIEIHTLQDGLIYTRDALSDDLGISIIQRVKSYIAHQESKQKSFRVSQKWEQRAKLALAGEQRLTKMVPGWIDPDTFKLNEHAETVRLIFKLLLDGESLHNIARHLQSNDIKSFSRRKDANGFSVHSVRTVLRSVSAIGTLPASQRNDRPAIPNYYEAAIDAATFNKAQEILDKNRKGRTPASDNPLTINIFKGLFRCQCGASVHPTGTKNKYQGVYRCNNHLDGRCDVPPLKRKPFDKWMIDNFLGMIDVGNDGEAEGKIAALQHEVEIVTARIKKATALLLEMDDIDELKIQLKELNQKRTELQTTIDNMRRKASLTDKELPQLKDIDLTTKAGRVECQLILSKHLKGLTLGKDSVTVTLQNDTEITIPTNPLPLNDGSPIFEIADKELLDIDAYQL

SEQ ID NO: 3503 - protein, 547 aa, synthetic construct
MKLLATYIRWSTREQDSGDSLRRQTNLIDAFYAKHKDDYYLLPAHRYVDKGKSGFHQQHKAQGSDFRRMFENVMSGAIPEGSLIVVENFDRFSRADIDTAIDDVRQILRKGVSILTLGDGELYDKSALTDPVKLIKHIIIAERAHQESLVKQKRIAQVWNHKTQLARELKKPMGKQAPGWLELSEDGSHYIVDEDKASLVNIIYDKRLSGMSMFAICKWLNEQGYPTINQRKVRISKTKKPDGNWSALSVKHILTSRSVLGFLPAKISTEDRKTVLREEIEGFYPQIVTDSKFYAVQQLLEETGKGKTSSGEHWLYVNILKGLIRCKCGLVMTPTGIRKPVYQGTYRCNGNKESRCSYGTVSRKLLDTQLCSRLFSKLSQLHDEATDTAKLDELQRRLNTVDGELEKLTETLIQLPNITQIQEALRVKQEEKDELIVQLSREKARVKSVSSLDLSGLDMESVEGRTEAQIIIKRLVKEIVVSGNEKLVDIYLHNGNMIRGFPLDGKDDHTLTLEEATDEMQSLDDMLIFGEPVTRIYPAGDMEEVDA

SEQ ID NO: 3504 - protein, 506 aa, synthetic construct
MRTVITYLRFSSAIQGAEGADSTRRQNELFKQWLRKNSDAQVVASFNDEGLSGYKGKHLSGQFGDMLSRIESGEFSKGTILLVEAIDRIGRLEHLETEALMNRIIAHGIEIHTLQDGLIYTRDALSDDLGISIIQRVKSYLAHQESKQKSFRVSEKWKQRAKLALAGEQRLTKMVPGWIDPETFKLNEHAETVRLIFKLLLDGESLHNIARHLQANNISSFSRRKDANGFSVHSVRTILRSETTIGTLPASQRNDRPAIPNYYEAAIDAATFNKAQEILGKNRIGRTPASDNPLTINIFKGLFRCQCGASVHPTGTKNKYQGVYRCNNHLDGRCDVPPLKRKPFDKWMIDNFLGMIDVGNDGEAEGKIASLQHEVEIVTTRIKKATALLLEMDDIDELKIQLKELNQKRTELQTTIDNMRRKASLTDKELPQLKDIDLTTKAGRVECQLILSKHLKGLTLGKDSVTVTLQNDTEITIPTNPLPLNDGTSIFEIADKELLDIDAFRL

SEQ ID NO: 3505 - protein, 506 aa, synthetic construct
MRHVITYLRYSSATQGAEGADSTRRQNELFKQWLRKNSDAQVVASFSDEGLSGYKGKHLTGQFGDMLARIEAGEFPAGTILLVESIDRIGRLEHLETEALMNRIIAHGIEIHTLQDGLIYTRDALSDDLGISIIQRVKSYIAHQESKQKSFRVSEKWKQRAKLALAGEQRLTKMVPGWIDPDTFKLNEHAETVRLIFKLLLSGESLHNIARHLQSNGIKSFSRRKDANGFSVHSVRTILRSETTIGTLPASQRNDRPAIPNYYEAAIDASTFNKAQEILGKNRIGRTPASDNPLTINIFKGLFRCQCGASVHPTGTKNKYQGVYRCNNHLDGRCDVPPLKRKPFDRWMIDNFLGMIDVGNDGEAEGKIASLQHEVEIVTTRIKKATALLLEMDDIDELKIQLKELNRKRTELQTTIDNMRRKTSLTDKELPQLKDIDLTTKAGRVECQLILSKHLKGLTLGKDSVIVTLQNDTEITIPTNPLPLHDGTSIFEIAEKELLEIDAYQL

SEQ ID NO: 3506 - protein, 507 aa, synthetic construct
MKRVISYIRFSSERQAKGDSLRRQSKMVNDWLKAHPEYYLDQDLSFRDLGVSGFTGKHLKGGLGDFLTAIEKGLVKAGDTLLIESLDRLSRQDVDQASELLRNILRSGVDVVTLSDGEHYTRESLKDPLALIKSILIMQRSHEESLRKSERIQAAWNRKKELISEGIKISKRCPAWLKLNDDRKSFSVIPEKVETVKRCFQLRLEGKSIWEIVRTLNDEGHQTLNQYKAGSFGQTSVQDLLKNRSVIGYFTPKGCEEISGYYPAIIDETTFYKVQQLSYARYGRKPASDKPMAVNLFKGVIRCSECGHALIITGFSDTRNGIYRCPLRNENRCSAKGLSRKQTDGTLLALLSRLDRFDSDMTNTIDTLKLHREHISSNIEKLVQLSLEIEDLSAITSKLKQLKGELSQVDADIEKETQRLKSIDVGCLSDCDLTTKAGRIEAQLIIKSAVKEVVLNTAKRRCKVTFHNGKAITLPITENPSDNVTEAIQSLSEVTERSLIDVDEVII

SEQ ID NO: 3507 - protein, 507 aa, synthetic construct
MKRVISYIRFSSERQAKGDSLRRQSKMVNDWLKAHPEYYLDQDLSFRDLGVSGFTGKHLKGGLGDFLTAIEKGLVKAGDTLLIESLDRLSRQAVDRASELLRNILRSGVDVVTLSDGEHYTSESLKDPLALIKSILIMQRAHEESLRKSERIQAAWDAKKEAAKAGIKVSKRCPAWLKLNDDRKSFSVIPEKVETVKRCFQLRLEGKSIWEIVRTLNDEGHQTLNQYKAGKFGQTSVQDLLKNRSVIGYFTPKGREEIAGYFPSIIHETDFYKVQQLSYARHGRKPASAKPLSVNLFKGVIRCSECGHALIITGFSDTRSGIYRCPLRNENRCSAKGLSRKQTDGTLLTLLSRLDRFDSDTTNTIDMLRLHREHISSNIEKLVQLSLEIEDLSAITIKLKQLKGELSQVDADIEKETQRLKSIDVGCLSDCDLTTKAGRIEAQLIIKSAVKEVVLNTAKRRCKVTFHNSKSITLSITENPSEDVTEAIQSLSEVTERGLIDVDVVEI

SEQ ID NO: 3508 - protein, 507 aa, synthetic construct
MKRVISYIRFSSEKQAKGDSLRRQSKMVTDWLKAHPEYYLDQDLSFRDLGVSGFTGKHLKGGLGDFLTAIEKGLVKAGDTLLIESLDRLSRQDIDIASELLRNILRSGVDVVTLSDGEHYTRESLRDPLALIKSILIMQRAHEESLRKAERIQAAWDAKKEAAKAGIKVSKRCPAWLKLNDDRKSFSVIPEKVETVKRCFQLRLEGKSIWEIVRTLNDEGHRSMNQYKPGKFGQTSVQDLLKNRSVIGYFTPKGREEISGYYPAIIDETTFYKVQQLSHYRYGRKPVSAKPLSVNLFKGVIRCSECGHALIITGFSDTRNGIYRCPLRNENRCSAKGLSRKQTDGTLLTLLSRLDRFDSDMTNVIDSLKLHREHISSNIEKLVQLSLEIEDLSAITIKLKQLKGELSQVDADIEKETQRLKSIDVGCLSDCDLTTKSGRIEAQLIIKSAVKEVVLNTAKRRCKVTFHNGKAITLPITENPSEDVTEAIQSLSEVTERSLIDVDEVII

SEQ ID NO: 3509 - protein, 507 aa, synthetic construct
MKRVISYIRFSSERQAKGDSLRRQSKMVTDWLKAHPEYYLDQDLSFRDLGVSGFTGKHLKGGLGDFLTAIEKGLVKAGDTLLIESLDRLSRQDVDQASELLRNILRSGVDVVTLSDGEHYTKESLKDPLALIKSILIMQRAHEESLRKSERIQAAWNRKKELISEGIKISKRCPAWLKLNDDRKSFSVIPDKVETVKRCFQLRLEGKSIWEIVRTLNAEGRQTLNQHKAGSFGQTSVQDLLKNRSVIGYFTPKGCEEISGYYPAIIDETTFYKVQQLSYARYGRKPASDKPMAVNLFKGVIRCSECGHALIITGFSDTRNGIYRCPLRNENRCSAKGLSRKQTDGTLLALLSRLDRFDSDMTNTIDTLKLHREHISSNIEKLVQLSLEIEDLSAITSKLRQLKNELSQVDADIEKETQRLKSIDVGCLSDCDLTTKAGRIEAQLIIKSAVKEVVLNTAKRRCKVTFHNGKAITLPITENPSDNVTEAIQSLSEVTERGLIDVDEVII

SEQ ID NO: 3510 - protein, 507 aa, synthetic construct
MKRVISYIRFSSEKQAKGDSLRRQSKMVTDWLKAHPEYYLDQDLSFRDLGVSGFTGKHLKGGLGDFLTAIEKGLVKAGDTLLIESLDRLSRQDIDIASELLRRILRAGVDVVTLSDGEHYTKESLRDPLSLIKSILIMQRAHEESLRKAERIQAAWDAKKEAAKAGIKISRRCPAWLRLNDDRKSFSVIPEKVETVKRCFQLRLEGKSIWEIVRTLNDEGHQSMSQYKPGKFGQTSVQDLLKNRSVIGYFTPKGCEEIAGYYPAIIDETTFYKVQQLSHSRYGRKPASAKPLSVNLFKGVIRCSECGHALIITGFSDTRSGIYRCPLRNENRCSAKGLSRKQTDGTLLTLLSRLDRFDSDTTNTIDTLKLHREHISSNIEKLVQLSLEIEDLNAITSKLKQLKGELSQVDADIEKETQRLKSIDVGCLSDCDLTTKAGRIEAQLIIKSAVKEVVLNTAKRRCKVTFHNGRIIDLPITENPSEDVTEAIQSLSEVTERDLIDVDEVII

SEQ ID NO: 3511 - protein, 547 aa, synthetic construct
MKLLVPYIRWSTKEQDSGDSLRRQTNLIDAFYSKHKNDYYLLPAHRYVDKGKSGFHQQHKNQGSDFRRMFENVMSGVIPEGSLIVVENFDRFSRADIDTAIDDVRQILRKGVSILTLGDGELYDKSALTDPVKLIKHIIIAERAHQESLVKQKRIAQVWNHKTQLARELKKPMGKQAPGWLELSEDGSHYIVDEDKASLVNIIYDKRLSGMSMFAICKWLNEQGYPTINQRKVRISKTKKPDGNWSALSVKHILTSRSVLGYLPAKISSEDRKTVLREEIESFYPRIVTDSKFYAVQQLLEETGKGKTSSGDHWLYVNILKGIIRCKCGLVMTPTGIRKPVYQGTYRCNGNKESRCSYGTVSRKLLDTQLCSRLFSKLSQLHDEATDTAKLDELQRRLNTVDSELEKLTETLIQLPNITQIQEALRVKQEEKDELIVQLSREKARLKSVSSLDLSGLDMESVEGRTEAQIIIKRLVKEIVVSGNEKLVDIYLHNGNMIRGFPLDGKDDHTLTLEEATDEMQPLDDMLIFGEPVTRIYPAGDMEEVDA

SEQ ID NO: 3512 - protein, 509 aa, synthetic construct
MRRAISYIRFSSERQLKGDSVRRQSKLVTDWLDKNPEFYLDSSLSFKDLGKSAFSGKHLKGGLGDFLTAIEKGLVKAGDTLLIESLDRLSRQDIDIASELLRRILRAGVDVVTLSDGEHYTRESLRDPLALIKSILIMQRAHEESLRKSERVQAAWNRKKELISEGIKVSRRCPAWLKLNDDRRTFTIIPDKVEVVKRAFDLRLQGLSFWAITRTLNDEGHLSLNQYTPKQKRWSDTAVKKLLRNRAVIGCFTPAGREEVQGYYPAIISESLFYRVQQLNTGQYGRASVSSNPLSVNLFRGIIKCSECGATIVLGGYALKRFGMYRCPNRSANRCSAKAISRKQTDATILYMLALCDRFETENTDTIDSLKLQREDLQRKISKMAELAIELDDMTIITEKLRDMKNALSKLNHDIEEETQRIKAITTGSLKDIDRTTKEGMVETQLLIKGVLKEIVIDAAKRRCKVTFHNGKAITLPITENPSEDVTEAIQSLSEVTERGLIDVDEVIV

SEQ ID NO: 3513 - protein, 559 aa, synthetic construct
MKTKLYSYIRFSSMRQNDGSSYERQIRMAREIAAKYDLELVNDYQDLGVSAFKGANSKTGALSRFLDAIGRSVPVGSWLFIENLDRLSRADIVSAQELFLSIIRRGITIVTGMDNKIYSLDTVTANPMDLMFSILLFIRGNEESQTKRNRTNSSALIKIKAHQENPQNPAVAIEEVGKNMWWTDTTSGYVLPHPTYFPVVQEIVELRKNGRSTAEILDHLNETYAPPPAVSNKKHSKWSRAMVERLFHTRALIGIKEVSVDGVNYELNNYYPRVIDDPTFYHLKKNIGARAWNFGDKEEVKPIPLLSGIGLLKCDHCGCAMVKVKGTNKRSDQYRYTCDAIRSRRLDCEHPNWSFRGDQLEKAVLQLLADKIWIAEDKANPVPALKVQVDEISRKIDNLIALSAMTGATKELADQITTLNSERETLYNQIKMAEEEMYSVDSQGWEKLAEFDLEDVYNEERLKVRFKIKQALRRIGCSRIDRNKNLFVLEYIDGKTQRVVIENSRGTRKGRIFIDLKTINDRQILESNGLVLHPCLDMLTDKNWKPEEEIPGPLQEFGI

SEQ ID NO: 3514 - protein, 507 aa, synthetic construct
MKRAISYIRFSSEKQSRGDSLRRQSKMVNDWLKAHPEYYLDQDLSFRDLGVSGFTGKHLKGGLGDFLTAIEKGLVKAGDTLLIESLDRLSRQAVDRASELLRNILRSGVDVVTLSDGEHYTSESLKDPLALIKSILIMQRAHEESLRKSERIQAAWDAKKEAAKAGIKVSKRCPAWLKLNDDRKSFSVIPEKVETVKRCFQLRLEGKSIWEIVRTLNDEGHQTLNQYKAGKFGQTSVQDLLKNRSVIGYFTPKGCEEISGYYPAIIDETTFYKVQQLSHYRYGRKPVSDKPLSVNLFKGVIRCSECGHALIITGFSDTRNGIYRCPLRNENRCSAKGLSRKQTDGTLLTLLSRLDRFDSDTTNTIDTLKLHREHISSNIEKLVQLSLEIEDLSAITIKLRQLKGELSQVDADIEKETQRLKSIDVGCLSDCDLTTKAGRIEAQLIIKSAVKEVVLNTAKRRCKVTFHNGKLIDLPITEDPSEDVTEAIQSLSEVTERGLIDVDEVII

SEQ ID NO: 3515 - protein, 506 aa, synthetic construct
MRTVITYLRFSSATQGAEGADSTRRQNELFKQWLRKNSDAQVVASFSDEGLSGYKGKHLTGQFGDMLARIEAGEFPAGAILLVESIDRIGRLEHLETEALMNRIIAHGIEIHTLQDGLIYTRDALSDDLGISIIQRVKSYLAHQESKQKSFRVSEKWKQRAKLALAGEQHLTRNVPGWIDPDTFKCNEHAETVRLIFKLLLDGESLHNIARHLQSNDIKSFSRRKDANGFSVHSVRTVLRSESVIGTLPASQRNDRPAIPNYYEAAIDAATFNKAQEILDKNRKGRTPASDNPLTINIFKGLFRCQCGASVHPTGTKNKYAGVYRCNNHLDGRCDVPPLKRKPFDRWMIDNFLGMIDVGNDGESERKIAALQHEVEIVTARIKKATALLLEMDDITELKAQVKGLNQKRTEIQTTIDTLKRKTSLTDKELPQLKDIDLTTKAGRVECQLILSKHLKGLTLGKDSVTVTLQNDTEITIPTNPLPLNDGSPIFEIADKELLDIDAYQL

SEQ ID NO: 3516 - protein, 509 aa, synthetic construct
MRRAISYIRFSSERQLKGDSVRRQSKLVTDWLDKNPEFYLDSSLSFKDLGKSAFSGKHLKGGLGDFLTAIEKGLVKAGDTLLIESLDRLSRQDVDQASELLRNILRSGVDVVTLSDGEHYTKESLKDPLSLIKSILIMQRAHEESLRKSERVQAAWNRKKELISEGIKISKRCPAWLRLNDDRRTFTIIPDKVEVVKRAFDLRLQGLSFWAITRTLNDEGHLSLNQYTPKQKGWSDTAVKKLLRNRAVIGCFTPAGREEVQGYYPAIISESLFYRVQQLNTGQYGRASVSSNPLSVNLFRGIIKCSECGATIVLGGYALKRFGMYRCPNRSANRCSAKAISRKQTDATILYMLALCDRFETENTDIIDSLKLQREDLQRKISKMAELAIELDDMTIITEKLRDMKNALSKLNHDIEEETKRIKAITTGSLKDIDRTTKEGMIETQLLIKGVLKEIVIDAAKRRCKVTFHNGRAITLPITEDPSEDVTEAIQSLSEVTERGLIDVDEVII

SEQ ID NO: 3517 - protein, 559 aa, synthetic construct
MKTKLYSYIRFSSMRQNDGSSYERQIRMAREIAAKYDLELVNDYQDLGVSAFKGANSKTGALSRFLDAIGRSVPVGSWLFIENLDRLSRADIVSAQELFLSIIRRGITIVTGMDNKIYSLDTVTANPMDLMFSILLFIRGNEESQTKRNRTNSSALIKIKAHQENPQNPAVAIEEVGKNMWWTDTTSGYVLPHPVFFPVVQEIVELRKNGRSTAEILDHLNETYTPPPAVSNKKHSKWSRAMVERLFHTRALIGIKEVSVDGVNYELKDYYPRVIDDATFYHLKKNIGARAWNFGDKEEVKPIPLLSGIGLLKCDHCGCAMVKVKGTNKRSDQYRYTCDATRSRRLDCEHPNWSFRGDQLEKAVLQLLADKIWIAEDKANPVPALKVQVDEISRKIDNLIALSAMTGATKELADQITTLNSERETLYNQIKMAEEEMYSVDSQGWEKLAEFDLEDVYNEERLKVRFKIKQALKRIGCSRIDRNKNLFVLEYIDGKTQRVVIENSRGTRKGQIFVDLKTINDRQILESNGLVLHPCLDMLTDKNWKPEEEIPGPLQEFGI

SEQ ID NO: 3518 - protein, 506 aa, synthetic construct
MRSVITYLRYSSTIQGVEGADSTRRQNDLFKQWLKKNSDARIIASFSDEGLSGYKGKHLTGQFGDMLTRIEAGEFPEGTILLVEAIDRIGRLEHLETEALMNRILGNGIEIHTLQDGLIYTKDALADDLGISIIQRVKAYIAHQESKQKSFRVSQKWEQRAKLALAGEQRLTKMVPGWIDPETFKCNEHAETVRLIFKLLLDGESLHNIARHLQSKGIKSFSRRKDANGFSVHAVRTILRSETTIGTLPASQRNDRPAIPNYYEAAIDALTFSKAQEILDKNRKGRTPASNNPRTINIFKGLFRCECGATVHPTGVKNTYEGVYRCCRRFDGRCDIPQLKRKPFDKWMIENLLSMIVVGDDGESERKIAALQHEVEVVTARIKKATALLLEMDDITELKTQVKELNQKRTELQTTIDSMRRKASLTDKKLPQLKDIDLTTKAGRVECQLILSKHLESLTLGRGQVTVKLSNGTEIVVPTDPLPLTDGTAIFEIAEKGLLDVDAFQL

SEQ ID NO: 3519 - protein, 507 aa, synthetic construct
MKRVISYIRFSSEKQAKGDSLRRQSKMVTDWLKAHPEYYLDESLTFRDLGVSGFTGKHLKGGLGDFLTAIEKGLVKAGDTLLIESLDRLSRQNVDRASELLRNILRSGVDVVTLSDGEHYTRESLKDPLALIKSILIMQRAHEESLRKAERIQAAWDAKKEAAKAGIKISKRCPAWLKLNDDRKSFSIIPEKVETVKRCFQLRLEGKSIWAIVKALNDEGHQTLNQYKAGKFGQTSVQDLLKNRSVIGYFTPKGCEEIAGYYPAIIDETTFYKVQQLSHSRYGKRSVSDKPLSVNLFKGVIRCSECGHALIITGFSDTRNGIYRCPLRNENRCSAKGLSRKQTDGTLLTLLSRLDRFDSDTTNTIDTLKLHREHISSNIEKLVQLSLEIEDLSAITSKLKQLKGELSQVDADIEKETQRLKSIDTGSLSDCDLTTKAGRIEAQLIIKSAVKEVVLNTAKRRCKVTFHNGKIIDLPITENPSEDVTEAIQSLSEVTERGLIDVDEVII

SEQ ID NO: 3520 - protein, 520 aa, synthetic construct
MKKAVYCYARVSSRGQAKDGYGMSRQQTMLRDYVAAYDDSQHNRGYEFGDISWLYAEGVSAYSGKNIEDGSVLKNFIDDVLQKKITNSVLVIENLDRFSRAAPNRAAGLFLSLINAGCDIHEVETEMIHHQYSDLNIISGGLQRAHNESKRKARLSIKNWDERIKNTIEGTSVLTHRVPSWIEVKNNKYVIKEGEAEKFNLIFKMYADGFGPAAIRDELKKKKMQINESEPTINHLVKIIKDQRLIGKFNSTGRKILDGMIIYPVVVEQSLFETVNDLRKQRNPLGKVNVKANNLFAGLCICMNCGRYVQVNSVDKKGDTYFRCGGSLLKIDKCKERGFKYKIIENALLEHIRNFDFSMLRSNDDDIQIKINYLSIELATKENYSSEILADMEKEYIPDPNDRRILKNLQRRISEIRTEITRLKQSNVGYEKFSDLKESCTDDLLDYKNTNLRLNFNVKIKRVIKNIKMKRLGNAIMLVVNYIGVNEKQAMVIDSKTGDVKFMAVQNDDLKSVEYLINKS

SEQ ID NO: 3521 - protein, 507 aa, synthetic construct
MKRVISYIRFSSEKQAKGDSLRRQSKMVTDWLKAHPEYYLDESLTFRDLGVSGFTGKHLKGGLGDFLTAIEKGLVKAGDTLLIESLDRLSRQNVDRASELLRNILRSGVDVVTLSDGEHYTRESLKDPLALIKSILIMQRSHEESLRKSERIQAAWNRKKELISEGIKISKRCPAWLKLNDDRKSFSVIPEKVETVKRCFQLRLEGKSIWEIVRTLNDEGHQSMSQYKPGSFGQSSVQDLLKNRSVIGYFTPKGCEEIAGYYPAIIDETTFYKVQQLSHSRYGKRSVSDKPLSVNLFKGVIRCSECGHALIITGFSDTRNGIYRCPLRNENRCSAKGLSRKQTDGTLLALLSRLDRFDSDTTNTIDTLKLHREHISSNIEKLVQLSLEIEDLSAITSKLRQLKGELSQVDADIEKETQRLKSIDVGCLSDCDLTTKAGRIEAQLIIKSAVKEVVLNTAKRRCKVTFHNGRAITLPITENPSEDVTEAIQSLSEVTERGLIDVDVVEI

SEQ ID NO: 3522 - protein, 559 aa, synthetic construct
MKTKLYSYIRFSSMKQADGSSYERQKRTAAEIAAKYDLELVTSYQDFGVSAFKGANSRTGALSRFLDEIGRSVPVGSWLVVENLDRISRQSIIEAQELFLSIIRRGITIVTGMDGKVYSRESVNANPIDLLLSVMLFARANEESQTKRNRTNSSALIKIKAHQENPQNPAVAIEEIGKNMWWTDTTSGYVLPHPVFFPIVQEVVELRRNGRSTAEILDHLNATYTPPPAASHKRHSNWSRAMIERLFHTRALIGIKEISVDGVKYELKDYYPRVLDDAEFYHLKKSIGVRACNFGDKEEVKPIPLLSGVGLLKCEHCGSAMVKVKGTNRRPNQYRYSCDAMRSSRIECVHTNWSFRGDQLEKAVLQLLADKIWIAEDKANPVPALKVQIDEISRKIDNLITLSAMTGATKELADQITTLNSERETLYNQIKMAEEEMYSVDSQGWEKLAEFDLEDVYNEDRIKVRFKIKQALKRIGCSRIDKYKNLFVLEYIDGKTQRVVIENSRGPRKGRIFVDLKTINDRQILESNGLVLHPCLDMLTDKNWKPEEEIPGPLQEFGI

SEQ ID NO: 3523 - protein, 559 aa, synthetic construct
MKTKLYSYIRFSSMRQNDGSSYERQIRMAREIAAKYDLELVNDYQDLGVSAFKGANSKTGALSRFLDAIGRSVPVGSWLFIENLDRLSRADIVSAQELFLSIIRRGITIVTGMDNKIYSLDTVTANPMDLMFSILLFIRGNEESQTKRNRTNSSALIKIKAHQENPQNPAVAIEEVGKNMWWTDTTSGYVLPHPTYFPVVQEIVELRKNGRSTAEILDHLNETYTPPPAVSNKKHSKWSRAMVERLFHTRALIGIKEVSVDGVNYELNNYYPRVIDDPTFYHLKKNIGARAWNFGDKEEVKPIPLLSGIGLLKCDHCGCAMVKVKGTNKRSDQYRYTCDATRSRRLDCEHPNWSFRGDQLEKAVLQLLADKIWIAEDKANPVPALKVQIDEISRKIDNLINLSAMTGATKELADQITALNSERETLYNQIKMAEEEMYSVDSQGWEKLTEFDLEDVYNEERLKVRFKIKQALRRIGCSRIDRNKNLFVLEYIDGKTQRVVIENSRGTRKGRIFIDLKTINDRQILESNGLVLHPCLDMLTDKNWKPEEEQAGPLQEFGI

SEQ ID NO: 3524 - protein, 547 aa, synthetic construct
MKLLVTYIRWSTKEQDSGDSLRRQTNLIDAFYAKHKEEYYLLPAHRYVDKGKSGFHQQHKNQGSDFRRMFENVMSGAIPEGSLIVVENFDRFSRADIDTAIDDVRQILRKGVSILTLGDGELYDKSALTDPVKLIKHIIIAERAHQESLVKQKRIAQVWNHKTQLARELKKPMGKQAPGWLELSEDGSHYIVDEDKASLVNIIYDKRLSGMSMFAICKWLNEQGYPTINQRKVRISKTKKPDGNWSALSVKHILTSRSVLGYLPAKISTEDRKTVLREEIESFYPQIVTDSKFYAVQQLLEETGKGKTSSGEHWLYVNILKGLIRCKCGLVMTPTGIRKPVYQGTYRCNGNKESRCSYGTVSRKLLDTQLCSRLFSKLSQLHDEATDTAKLDELQRRLNTVDSELEKLTETLIQLPNITQIQEALRVKQEEKDELIVQLSREKARVKSVSSLDLSGLDMESVEGRTEAQIIIKRLVKEIVVSGNEKLVDIYLHNGNMIRGFPLDGKDDHTLTLEEATDEMQPLDDMLIFGEPVTRIYPAGDMEEVDA

SEQ ID NO: 3525 - protein, 506 aa, synthetic construct
MRSVITYLRYSSAIQGAEGADSTRRQNDLFKQWLKKNSDAQVVASFSDEGLSGYKGKHLTGQFGDMLARIESGEFPEGTILLVESIDRIGRLEHLETEALMNRILGNGLEIHTLQDGLIYTKDALADDLGISIIQRVKAYIAHQESKQKSFRVSQKWEQRAKLALAGEQRLTKMVPGWIDPDTFKLNEHAETVRLIFKLLLSGESLHNIARHLQSNGIKSFSRRKDANGFSVHSVRTILRSETTIGTLPASQRNDRPAIPNYYEAAIDAATFNKAQEILDKNRKGRTPASDNPLTINIFKGLFRCQCGASVHPTGTKNKYQGVYRCNNHLDGRCDVPPLKRKPFDRWMIDNFLGMIDVGNDGEAEGKIASLQHEVEIVTTRIKKATALLLEMDDIDELKIQLKELNQKRTELQTTIDNMRRKASLTDKELPQLKDIDLTTKAGRVKCQLILSKHLKGLTLGKDSVTVTLQNDTEITIPTNPLPLNDGSPIFEIADKELLDIDAYQL

SEQ ID NO: 3526 - protein, 507 aa, synthetic construct
MKRVISYIRFSSEKQAKGDSLRRQSKMVTDWLKAHPEYYLDQDLSFRDLGVSGFTGKHLKGGLGDFLTAIEKGLVKAGDTLLIESLDRLSRQDIDIASELLRRILRAGVDVVTLSDGEHYTSESLKDPLALIKSILIMQRAHEESLRKAERIQAAWDAKKEAAKAGIKVSKRCPAWLKLNDDRKTFSVIPEKVETVRRCFQLRLEGKSIWAIVKALNDEGHQSMSQYKPGKFGQTSVQDLLKNRSVIGYFTPKGCEEISGYYPAIIDETTFYKVQQLSYARYGRKPASDKPLSVNLFKGVIRCSECGHALIITGFSDTRSGIYRCPLRNENRCSAKGLSRKQTDGTLLALLSRLDRFDSDMTNTVDTLKLHREHISSNIEKLVQLSLEIEDLSAITSKLKQLKGELSQVDADIEKETQRLKSIDVGCLSDCDLTTKAGRIEAQLIIKSAVKEVVLNTAKRRCKVTFHNGRAITLPITENPSEDVTEAIQSLSEVTERGLIDVDVVET

SEQ ID NO: 3527 - protein, 559 aa, synthetic construct
MKTKLYSYIRFSSMRQSDGSSYERQIRMAREIAAKYDLELVNDYQDLGVSAFKGANSKTGALSRFLDAIGRSVPVGSWLFIENLDRLSRADIVSAQELFLSIIRRGITIVTGMDNKIYSLDTVTANPMDLMFSILLFIRGNEESQTKRNRTNSSALIKIKAHQENPQNPAVAIEEIGKNMWWTDTTSGYVLPHPVYFPVVQEIVELRKNGRSTAEILDHLNETYAPPPAVSNKKHSKWSRAMVERLFHTRALIGIKEISVDGVNYELKDYYPRVIDDPTFYHLKKNIGARAWNFGDKEEVKPIPLLSGIGLLKCDHCGCAMVKVKGTNKRSDQYRYTCDATRSRRLDCEHPNWSFRGDQLEKAVLQLLADKIWIAEDKANPVPALKVQVDEISRKIDNLIALSAMTGATKELADQITTLNSERETLYNQIKMAEEEMYSVDSQGWEKLAEFDLEDVYNEDRIKVRFKIKQALKRIGCSRIDRNKNLFVLEYVDGKTQRVVIENSRGTRKGRIFIDLETINDRQILESNGLVLHPCLDMLTDKNWKPEEEIPGPLQEFGI

SEQ ID NO: 3528 - protein, 507 aa, synthetic construct
MKRVISYIRFSSEKQAKGDSLRRQSKMVTDWLKAHPEYYLDQDLSFRDLGVSGFTGKHLKGGLGDFLTAIEKGLVKAGDTLLIESLDRLSRQDIDIASELLRRILRAGVDVVTLSDGEHYTSESLKDPLALIKSILIMQRAHEESLRKAERIQAAWDAKKEAAKAGIKVSKRCPAWLKLNDDRKTFSVIPEKVETVRRCFQLRLEGKSIWAIVKALNDEGHQSMSQYKPGKFGQTSVQDLLKNRSVIGYFTPKGCEEISGYYPAIIDETTFYKVQQLSYARYGRKPASDKPLSVNLFKGVIRCSECGHALIITGFSDTRNGIYRCPLRNENRCSAKGLSRKQTDGTLLALLSRLDRFDSDTTNTIDTLKLHREHISSNIEKLVQLSLEIEDLSAITSKLRQLKGELSQVDADIEKETQRLKSIDVGCLSDCDLTTKAGRIEAQLIIKSAVKEVVLNTAKRRCKVTFHNGRAITLPITENPSEDVTEAIQSLSEVTERGLIDVDEVII

SEQ ID NO: 3529 - protein, 564 aa, synthetic construct
MRSPRAYSYVRFSTPKQAQGDSYRRQLQQAREYCTVHNLVLDDKAIEDFGVSAFRGSNRTDGALGRFIDAVKSGEIERGSYLLVESVDRLSRQAIEEALTQFLEIVREGIVIVTLSDNQVFRSGEVDFTKLIVSIVYMARANDESEMKSRRSRAAWSNGRQQARDNNKVIANSRLPSWLTLAGEKIIPIPERVDIVNEMFQMARSGQGYQQIAKAFSENDYKTFGQGKVWRPAGIQSVIKSRAVIGEFQPHVIYEGKRVPDGEPILDYYPAIVSPAIFAEVQHIIDKRSSHSGSYRKGLYNNLFSGVIRCQCGELLRFHNKGSKGQIRNYLVCPMEGVTGCQLPYLLYNRIEPQLLQALSRLSNVMKQRQPQTGKVSVLKDDLAVLRNELEAEGKKRVKAAQSMLDFDDDAVFRTLFEESKNACHVLEDKISQIEGEIMSLELSTRTIGHLLRAEDLNSTEQRQQFNSQLKSAITIDFIYDNTGLVAVIKDLEGELMLEQAFGPKLMSSIVHDYEGHICVKTIADAPYVDPVWVAEERMEYEKGMLVEFDECGDFNIDNFNKNS

SEQ ID NO: 3530 - protein, 507 aa, synthetic construct
MKRVISYIRFSSEKQAKGDSLRRQSKMVTDWLKAHPEYYLDQDLSFRDLGVSGFTGKHLKGGLGDFLTAIEKGLVKAGDTLLIESLDRLSRQDIDIASELLRNILRSGVDVVTLSDGEHYTKESLRDPLSLIKSILIMQRAHEESLRKAERIQAAWDAKKEAAKAGIKVSKRCPAWLKLNDDRKSFSVIPEKVETVKRCFQLRLEGKSIWEIVRTLNAEGHRSMNQYKPGKFGQTSVQDLLKNRSVIGYFTPKGCEEISGYYPAIIDETTFYKVQQLSHSRYGKRSVSDKPLSVNLFKGVIRCSECGHALIITGFSDTRSGIYRCPLRNENRCSAKGLSRKQTDGTLLALLSRLDRFDSDTTNTIDTLKLHREHISSNIEKLVQLSLEIEDLNAITNKLKQLKGELSQVDADIEKETQRLKSIDVGCLSDCDLSTKAGRIEAQLIIRSAVKEVVLNTAKRRCKVTFHNSKSITLSITENPSEDVTEAIQSLSEVTERGLIDVDVVEI

SEQ ID NO: 3531 - protein, 559 aa, synthetic construct
MKTKLYSYIRFSSMRQSDGSSYERQIRMAREVAAKYDLELVNDYQDLGVSAFKGANSKTGALSRFLDAIGRSVPVGSWLFIENLDRLSRADIVSAQELFLSIIRRGITIVTGMDNKIYSLDTVTANPMDLMFSILLFIRGNEESQTKRNRTNSSALIKIKAHQENPQNPAVAIEEVGKNMWWTDTTSGYVLPHPVFFPVVQEIVELRKNGRSTAEILDHLNETYAPPPAVSNKKHSKWSRAMVERLFHTRALIGIKEVSVDGVNYELKDYYPRVIDDATFYHLKKNIGARAWNFGDKEEVKPIPLLSGIGLLKCDHCGCAMVKVKGTNKRSDQYRYTCDATRSRRLDCEHPNWSFRGDQLEKAVLQLLADKIWIAEDKANPVPALKVQVDEISRKIDNLIALSAMTGATKELADQITTLNSERETLYNQIKMAEEEMYSVDSQGWEKLAEFDLEDVYNEERLKVRFKIKQALKRIGCSRIDRNKNLFVLEYIDGKTQRVVIENSRGTRKGQIFVDLKTINDRQILESNGLVLHPCLDMLTDKNWKPEEEIPGPLQEFGI

SEQ ID NO: 3532 - protein, 506 aa, synthetic construct
MRSVITYLRFSSATQGAEGADSTRRQNELFKQWLRKNSDAQVVASFNDEGLSGYKGKHLSGQFGDMLSRIESGEFSEGTILLVEAIDRIGRLEHLETEALMNRIIAHGIEIHTLQDGLIYTRDALSDDLGISIIQRVKSYIAHQESKQKSFRVSQKWEQRAKLALAGEQRLTKMVPGWIDPETFKLNEHAETVRLIFKLLLDGESLHNIARHLQSNDIKSFSRRKDANGFSVHSVRTVLRSESVIGTLPASQRNDRPAIPNYYEAAIDASTFNKAQEILDKNRKGRTPASDNPLTINIFKGLFRCQCGASVHPTGTKNKYQGVYRCNSHLDGRCDVPPLKRKPFDRWMIDNFLGMIDVGNDGEAEKEIASLQHEVETVTARIKKATALLLEMDDITELKTQVKELNQKRTELQTTINTMKRKTSLSDKGLPQLKDIDLMTKAGRVECQLILSKHLKGLTLGKDSVTVTLQNDTEITIPTNPLPLNDGTSIFEIAEKNLLNIDTFQL

SEQ ID NO: 3533 - protein, 559 aa, synthetic construct
MKTKLYSYIRFSSMRQNDGSSYERQIRMAREIAVKYDLELVNDYQDLGVSAFKGANSKTGALSRFLDAIGRSVPVGSWLFIENLDRLSRADIVSAQELFLSIIRRGITIVTGMDNKIYSLDTVTANPMDLMFSILLFIRGNEESQTKRNRTNSSALIKIKAHQENPQNPAVAIEEIGKNMWWTDTTSGYVLPHPVYFPVVQEIVELRKNGRSTAEILDHLNETYAPPPAVSNKKHSKWSRAMVERLFHTRALIGIKEISVDGVNYELKDYYPRVIDDPTFYHLKKNIGARAWNFGDKEEVKPIPLLSGIGLLKCDHCGCAMVKVKGTNKRSDQYRYTCDATRSRRLDCEHPNWSFRGDQLEKAVLQLLADKIWIAEDKANPVPALKVQVDEISRKIDNLIALSAMTGATKELADQITTLNSERETLYNQIKMAEEEMYSVDSQGWEKLAEFDLEDVYNEERLKVRFKIKQALKRIGCSRIDRNKNLFVLEYIDGKTQRVVIENSRGTRKGQIFVDLKTINDRQILESNGLVLHPCLDMLTDKNWKPEEEIPGPLQEFGI

SEQ ID NO: 3534 - protein, 506 aa, synthetic construct
MRSVITYLRFSSATQGAEGADSTRRQNDLFKQWLKKNSDAQVVASFSDEGLSGYKGKHLTGQFGDMLARIESGEFPEGTLLLVEAIDRIGRLEHLETEALMNRIIAHGIEIHTLQDGLIYTRDALSDDLGISIIQRVKSYVAHQESKQKSFRVSQKWKQRAKLALAGEQRLTKMVPGWIDPDTFKLNEHAETVRLIFKLLLDGESLHNIARHLQSNDIKSFSRRKDANGFSVHSVRTVLRSVSAIGTLPASQRNDRPAIPNYYEAAIDAATFNKAQEILDKNRKGRTPASDNPLTINIFKGLFRCQCGASVHPTGTKNKYQGVYRCNNHLDGRCDVPPLKRKPFDKWMIDNFLGMIDVGNDGESERKIAALQHEVEIVTARIKKATALLLEMDDITELKTQVKGLNQKRTELQTTIDNMRRKASLTDKELPQLKDIDLTTKAGRVECQLILSKHLKGLTLGKDSVIVTLQNDTEITIPTDPLPLNDGTSIFEIAEKNLLNIDTFQL

SEQ ID NO: 3535 - protein, 507 aa, synthetic construct
MKRAISYIRFSSEKQSRGDSLRRQSKMVNDWLKAHPEYYLDQDLSFRDLGVSGFTGKHLKGGLGDFLTAIEKGLVKAGDTLLIESLDRLSRQNVDRASELLRNILRSGVDVVTLSDGEHYTRESLKDPLSLIKSILIMQRSHEESLRKSERIQAAWNRKKELISEGIKISKRCPAWLKLNDDRKSFSVIPDKVETVKRCFQLRLEGKSIWEIVRTLNAEGHRSMNQYKPGKFGQTSVQDLLKNRSVIGYFTPKGCEEIAGYYPSVIDETTFYKVQQLSHSRYGRKPASDKPLSVNLFKGVIRCSECGHALIITGFSDTRSGIYRCPLRNENRCSAKGLSRKQTDGTLLTLLSRLDRFDSDTTNVIDMLRLHREHISSNIEKLVQLSLEIEDLSAITIKLKQLKGELSQVDADIEKETQRLKSIDVGCLSDCDLTTKAGRIEAQLIIKSAVKEVVLNTAKRRCKVTFHNSKAITLPITENPSEDVTEAIQSLSEVTEKGLIGVDEVII

SEQ ID NO: 3536 - protein, 547 aa, synthetic construct
MKLLVTYIRWSTKEQDSGDSLRRQTNLIDAFYSKHKNDYYLLPAHRYVDKGKSGFHQQHKNQGSDFRRMFENVMSGAIPEGSLIVVENFDRFSRADIDTAIDDVRQILRKGVSILTLGDGELYDKSALTDSVKLIKHIIIAERAHQESLVKQKRIAQVWNHKTQLARELKKPMGKQAPGWLELSEDGSHYIVDEDKASLVNIIYDKRLSGMSMFAICKWLNEQGYPTINQRKVRISKTKKPDGNWSALSVKHILTSRSVLGYLPAKISTEDRKTVLREEIEGFYPQIVTDSKFYAVQQLLEETGKGKTSSGEHWLYVNILKGLIRCKCGLVMTPTGIRKPVYQGTYRCNGNKESRCSYGTVSRKLLDTQLCSRLFSKLSQLHDEATDTAKLDELQRRLNTVDSELEKLTETLIQLPNITQIQEALRVKQEEKDELIVQLSREKARVKSVSSLDLSGLDMESVEGRTEAQIIIKRLVKEIVVSGNEKLVDIYLHNGNMIRGFPLDGKDDHTLTLEEATDEMQSLDDMLIFGEPVTRIYPAGDMEEVDA

SEQ ID NO: 3537 - protein, 506 aa, synthetic construct
MRTVITYLRFSSATQGAEGADSTRRQNELFKQWLRKNSDAQVVASFSDEGLSGYKGKHLTGQFGDMLARIESGEFSEGTVLLVEAIDRIGRLEHLETEALMNRIIAHGIEIHTLQDGLIYTRDALSDDLGISIIQRVKSYVAHQESKQKSFRVSQKWKQRAKLALAGEQRLTRNVPGWIDPDTFKCNEHAETVRLIFKLLLDGESLHNIARHLQANNISSFSRRKDANGFSVHSVRTILRSETTRGTLPASQRNDRPAIPNYYEAAIDASTFNKAQEILDKNRKGRTPASDNPLTINIFKGLFRCQCGASVHPTGTKNKYAGVYRCNNNPDGRCDVPPLKRKPFDKWMIDNFLGMIDVGNDGEAEGKIASLQHEVEIVTARIKKATALLLEMDDIDELKIQIKELNQRRTELQTTIDNMRRKASLTDKELPQLKDIDLTTKAGRVECQLILSKHLKGLTLGKDTVTVTLQNDTEITIPTDPLPLNDGTSIFEIAEKNLLNIDTFQL

SEQ ID NO: 3538 - protein, 523 aa, synthetic construct
MRQVITYLRFSSKPQERGDSIRRQKGLFERWLKDNPDAKVVDEYSDEGASAYHGHHLKGDFGRMLQKIQDGKYLSGQTVLLVESETRLNRQKARNTENLVDLITGKGVDVICLESGKIYTSTNIDDLDTSIQLKIAAHIAHQQSKEKSIKVSAAWEHRAQLALEGKQQLTKNVPGWIDPDTRKLNEHSSTVVTIFDLLLSGESLHNIARYLQANNIKSFSRREKANGFSVHSVRTILRSESTVGTLAASKRNDRPAIPNYYEPAIDVATFNKAQEILSKNRVGRAPASDNPITINLFKGIIRCQCGASVHPTGVKATYQGVYRCNNVPDGRCNVPTIKRKPFDKWMLDNIIGFLERSDGNNTDKRKAEIEYQISLVTSKLKKAATLLLELDDVTELKEQVKELNIQRINMQSELDELNHRETLSDKPLHHLSEIDLTTKAGRVEAQLILSKFVQSIELQREMIIITLRNGAVIGKSRDLSPALSQDLMKQVVSSSSPRDIDMLSVITSDEEFRKSGKPVTKRS

SEQ ID NO: 3539 - protein, 509 aa, synthetic construct
MRRAISYIRFSSERQLKGDSVRRQSKLVTDWLDKNPEFYLDSSLSFKDLGKSAFSGKHLKGGLGDFLTAIEKGLVKAGDTLLIESLDRLSRQDIDIASELLRRILRAGVDVVTLSDGEHYTRESLKDPLSLIKSILIMQRAHEESLRKSERVQAAWNRKKELISEGIKISRRCPAWLKLNDDRRTFTIIPDKVEVVKRAFDLRLQGLSFWAITRTLNDEGHLSLNQYTPKQKGWSDTAVKKLLRNRAVIGCFTPAGREEVQGYYPAIISESLFYRVQQLNTGQYGRASVSSNPLSVNLFRGIIKCSECGATIVLGGYALKRFGMYRCPNRSANRCSAKAISRKQTDATILYMLALCDRFETENTDTIDSLKLQREDLQRKISKMAELAIELDDMTIITEKLRDMKNALSKLNHDIEEETKRIKAITTGSLKDIDRTTKEGMIETQLLIKGVLKEIVIDAAKRRCKVTFHNGRAITLPITENPSEDVTEAIQSLSEVTERGLLDVDTFQL

SEQ ID NO: 3540 - protein, 507 aa, synthetic construct
MKRVISYIRFSSEKQAKGDSLRRQSKMVTDWLKAHPEYYLDQDLSFRDLGVSGFTGKHLKGGLGDFLTAIEKGLVKAGDTLLIESLDRLSRQDVDQASELLRNILRSGVDVVTLSDGEHYTKESLRDPLSLIKSILIMQRAHEESLRKAERIQAAWDAKKEAAKAGIKISKRCPAWLKLNDDRKSFSVIPEKVETVKRCFQLRLEGKSIWEIVRTLNAEGHQTLNQYKAGKFGQTSVQDLLKNRSVIGYFTPKGCEEISGYYPAIIDETTFYKVQQLSYARYGRKPASDKPMAVNLFKGVIRCSECGHALIITGFSDTRNGIYRCPLRNENRCSAKGLSRKQTDGTLLALLSRLDRFDSDMTNTIDTLKLHREHISSNIEKLVQLSLEIEDLSAITIKLKQLKGELSQVDADIEKETQRLKSIDVGCLSDCDLTTKAGRIEAQLIIKSAVKEVVLNTAKRRCKVTFHNGKVIDLPITENPSEDVTEAIQSLSEVTERGLIDVDEVII

SEQ ID NO: 3541 - protein, 507 aa, synthetic construct
MKRVISYIRFSSERQAKGDSLRRQSKMVNDWLKAHPEYYLDQDLSFRDLGVSGFTGKHLKGGLGDFLTAIEKGLVKAGDTLLIESLDRLSRQAVDRASELLRNILRSGVDVVTLSDGEHYTSESLKDPLALIKSILIMQRAHEESLRKSERIQAAWNRKKELISEGIKISKRCPAWLRLNDDRKSFSVIPEKVETVKRCFQLRLEGKSIWEIVRTMNAEGRQTLHQYKAGSFGQSSVQDLLKNRSVIGYFTPKGCEEISGYYPAIIDETTFYKVQQLSYARYGRKPASDKPLSVNLFKGVIRCSECGHALIITGFSDTRNGIYRCPLRNENRCSAKGLSRKQTDGTLLTLLSRLDRFDSDTTNIVDMLRLHREHISSNIEKLVQLSLEIEDLSAITIKLKQLKGELSQVDADIEKETQRLKSIDVGCLSDCDLTTKAGRIEAQLIIKSAVKEVVLNTAKRRCKVTFHNSKSITLPITENPSEDVTEAIQSLSEVTERGLIDVDVVAI

SEQ ID NO: 3542 - protein, 581 aa, synthetic construct
MPQLYSYIRWSSDRQDKGTTKSRQVAAAKAYAEEAGLELVEIIDPGVSAFRGKNRAGKLGDFIDAVKNNAIPSDSWLYCENLDRLSRDQVDEALRLFLELIGLGLTIVTGMDRKVYNRESIRQNPTDLMISILMFIRGNEESETKSHRTIGNVVALVERHKNGLPVNIKSVGRHPFWIDDSGSQYEAVKKHPVYWSIAREALDMFISGHGVYSVKRALDKKYPNGLRGKEWDYQVLKKMRDNRALIGERTIKVDGQPYKLCNYYPALCKDETEFLILAEKKKQNKFISKKCTTDKIRLLSGFSILRCSKCGGTMHSFMNKNVHRYICTNGTHKQKNCSGWSVIGSLVEHCTMIALLIGYINQSRKNGCDTTSIDEDIINKQSVIEGLNSKITNLTLAISIAKDVNELATLLQSLNTQREKLLVEIEKLKERSVSLKAKGSFEIEITDFLILIQYATFKNLEDENRNKIRKVIHSIIEFIVIDKTDSCITIYIKCYGIDEVFIFGGVQRKPYWRFDIGIINDSKLQMISNYDKNIGRTKERKNKEYLDGLRESYQGLYESAVLMLNEMGYPDINGALFWPNR

SEQ ID NO: 3543 - protein, 547 aa, synthetic construct
MKLLVPYIRWSTKEQDSGDSLRRQTNLIDAFYSKHKNDYYLLPAHRYVDKGKSGFHQQHKAQGSDFRRMFENVMSGAIPEGSLIVVENFDRFSRADIDTAIDDVRQILRKGVSILTLGDGELYDKSALTDPVKLIKHIIIAERAHQESLVKQKRIAQVWNHKTQLARELKKPMGKQAPGWLELSEDGSHYIVDEDKASLVNIIYDKRLSGMSMFAICKWLNEQGYPTINQRKVRISKTKKPDGNWSALSVKHILTSRSVLGYLPAKISTEDRKTVLREEIESFYPQIVTDSKFYAVQQLLEETGKGKTSSGEHWLYVNILKGLIRCKCGLVMTPTGIRKPVYQGTYRCNGNKESRCSYGTVSRKLLDTQLCSRLFSKLSQLHDEATDTAKLDELQRRLNTVDSELEKLTETLIQLPNITQIQEALRGKQEEKDELIVQLSREKARVKSVSSLDLSGLDMESVEGRTEAQIIIKRLVKEIVVSGNEKLVDIYLHNGNMIRGFPLDGKDDHTLTLEEATDEMQPLDDMLIFGEPVTRIYPAGDMEEVDA

SEQ ID NO: 3544 - protein, 559 aa, synthetic construct
MKTKLYSYIRFSSMRQNDGSSYERQIRMAREVAAKYDLELVNDYQDLGVSAFKGANSKTGALSRFLDAIGRSVPVGSWLFIENLDRLSRADIVSAQELFLSIIRRGITIVTGMDNKIYSLDTVTANPMDLMFSILLFIRGNEESQTKRNRTNSSALIKIKAHQENPQNPAVAIEEVGKNMWWTDTTSGYVLPHPVYFPVVQEIVELRKNGRSTAEILDHLNETYAPPPAVSNKKHSKWSRAMVERLFHTRALIGIKEISVDGVNYELKDYYPRVIDDPTFYHLKKNIGARAWNFGDKEEVKPIPLLSGIGLLKCDHCGCAMVKVKGTNKRSDQYRYTCDATRSRRLDCEHPNWSFRGDQLEKAVLQLLADKIWIAEDKANPVPALKVQVDEISRKIDNLIALSAMTGATKELADQITTLNSERETLYNQIKMAEEEMYSVDSQGWEKLAEFDLEDVYNEDRIKVRFKIKQALKRIGCSRIDRNKNLFVLEYVDGKTQRVVIENSRGTRKGRIFIDLKTINDRQILESNGLVLHPCLDMLTDKNWKPEEEQAGPLQEFGI

SEQ ID NO: 3545 - protein, 507 aa, synthetic construct
MKRVISYIRFSSERQAKGDSLRRQSKMVTDWLKAHPEYYLDQDLSFRDLGVSGFTGKHLKGGLGDFLTAIEKGLVKAGDTLLIESLDRLSRQDVDQASELLRNILRSGVDVVTLSDGEHYTKESLRDPLSLIKSILIMQRAHEESLRKAERIQAAWDAKKEAAKAGIKISRRCPAWLKLNDDRKSFSVIPEKVETVKRCFQLRLEGKSIWEIVRTLNAEGHQTLNQYKAGKFGQTSVQDLLKNRSVIGYFTPKGCEEISGYYPAIIDETTFYKVQQLSYARYGRKPASDKPLSVNLFKGVIRCSECGHALIITGFSDTRNGIYRCPLRNENRCSAKGLSRKQTDGTLLTLLSRLDRFDSDTTNTIDMLRLHREHISSNIEKLVQLSLEIEDLNAITNKLKQLKNELSQVDADIEKETQRLKSIDVGCLSDCDLTTKAGRIEAQLIIKSAVKEVVLNTAKRRCKVTFHNGKLIDLPITETPSKDVTEAIQSLSEVTERGLIDVDEVII

SEQ ID NO: 3546 - protein, 514 aa, synthetic construct
MRKVYSYIRFSSTKQAFGDSHRRQSKAIQDWLASHPDHILDESLSFEDLGRSAFHGDHLKEGGALRAFLEAVKQGQIPPDSVLLVESLDRVSRQSISHAQETIRAILEQGITVVTLSDGETYNRQSLDDSLALIRMIILQERSHNESVIKSDRIKKVWSHKRQQFEQDGTKITGNCPGWLKLNSDGKSFSLIPHHVETIHRIFDEKLSGKSLHAIARDLNLENIPTITNKKVDTGWTPTRVRDLLLKESLIGVAYGVSDYFPPAISKEKFHAVQMIRGQGKGKKPTSRQPSSIDILKGICKCAECGSTLRQRNTKKTPEGRYPRGYLECRNRQLGRCNSKAFNRSLIEDILIQKVFPTLQYLSLKSNGDNISVTTLKADITSLEKGINNLISLAEKGLGDLDTLAQRITNNRVELESKKKDLRQAEAIQSLRSDNDIQDSDRKTVEGRIKLQLAIKSFVKEIIFDYYKQEITIRLLNGKSFSGISVARENKDFDHSSVFEVLQKSLLDIDEVHL

SEQ ID NO: 3547 - protein, 506 aa, synthetic construct
MRHVITYLRYSSAIQGAEGADSTRRQNDLFKQWLKKNSDAQVVASFSDEGLSGYKGKHLTGQFGDMLARIESGEFPEGTILLVESIDRIGRLEHLETEALMNRILGNGLEIHTLQDGLIYTKDALADDLGISIIQRVKAYIAHQESKQKSFRVSQKWEQRAKLALAGKQRLTKMVPGWIDPDTLKLNEHAETVRLIFKLLLSGESLHNIARHLQSNGIKSFSRRKDANGFSVHSVRTILRSETTIGTLPASQRNDRPAIPNYYEAAIDASTFNKAQEILGKNRIGRTPASDNPLTINIFKGLFRCQCGASVHPTGTKKKYQGVYRCNNHLDGRCDVPPLKRKPFDRWMIDNFLGMIDVGNDGEAEGKIASLQHEVEIVTTRIKKATALLLEMDDIDELKIQLKELNRKRTELQTTIDNMRRKTSLTDKELPQLKDIDLTTKAGRVECQLILSKHLKGLTLGKDSVIVTLQNDTEITIPTNPLPLHDGTSIFEIAEKELLEIDAYQL

SEQ ID NO: 3548 - protein, 509 aa, synthetic construct
MRRAISYIRFSSERQLKGDSVRRQSKLVTDWLDKNPEFYLDSSLSFKDLGKSAFSGKHLKGGLGDFLTAIEKGLVKAGDTLLIESLDRLSRQDIDIASELLRRILRAGVDIVTLSDGEHYTRESLKDPLSLIKSILIMQRAHEESLRKSERVQAAWNRKKELISEGIKVSRRCPAWLRLNDDRRTFTIIPDKVEVVKRAFDLRLQGLSFWAITRTLNDEGHLSLNQYTPKQKGWSDTAVKKLLRNRAVIGCFTPAGREEVQGYYPAIISESLFYRVQQLNTGQYGRASVSSNPLSVNLFRGIIKCSECGATIVLGGYALKRFGMYRCPNRSANRCSAKAISRKQTDTTILYMLALCDRFETENTDTIDSLKLQREDLQRKISKMAELAIELDDMTIITEKLRDMKNALSKLNHDIEEETKRIKAITTGSLKDIDRTTKEGMIETQLLIKGVLKEIVIDAAKRRCKVTFHNGKVIDLSITENPSEDVTEAIQSLSEVTERGLIDVDEVII

SEQ ID NO: 3549 - protein, 506 aa, synthetic construct
MRSVITYLRYSSAIQGAEGADSTRRQNDLFKQWLKKNSDAQVVASFSDEGLSGYKGKHLTGQFGDMLARIESGEFPEGTILLVESIDRIGRLEHLETEALMNRILGNGLEIHTLQDGLIYTKDALADDLGISIIQRVKAYIAHQESKQKSFRVSQKWEQRAKLALAGEQRLTKMVPGWIDPETFKCNEHAETVRLIFKLLLDGESLHNIARHLQANNISSFSRRKDANGFSVHSVRTILRSETTRGTLPASQRNDRPAIPNYYEAAIDAATFNKAQEILDKNRKGRTPASDNPLTINIFKGLFRCQCGASVHPTGTKNKYQGVYRCNNHLDGRCDVPPLKRKPFDKWMLENFLGMIDVGNDGEAEGKIASLQHEVEIVTTRIKKATALLLEMDDIDELKIQLKELNQKRTELQTTIDNMRRKASLTDKELPQLKDIDLTTKAGRVECQLILSKHLKGLTLGKDSVTVTLQNDTEITIPTNPLPLNDGTSIFEIAEKNLLNIDTFQL

SEQ ID NO: 3550 - protein, 507 aa, synthetic construct
MKRVISYIRFSSEKQAKGDSLRRQSKMVTDWLKAHPEYYLDESLTFRDLGVSGFTGKHLKGGLGDFLTAIEKGLVKAGDTLLIESLDRLSRQDIDIASELLRNILRSGVDVVTLSDGEHYTKESLRDPLSLIKSILIMQRAHEESLRKSERIQAAWDAKKEAAKAGIKVSKRCPAWLKLNDDRKSFSVIPEKVETVKRCFQLRLEGKSIWEIVRTLNDEGHQTLNQYKAGKFGQTSVQDLLKNRSVIGYFTPKGCEEISGYYPAIIDETTFYKVQQLSYARYGRKPASDKPMAVNLFKGVIRCSECGHALIITGFSDTRNGIYRCPLRNENRCSAKGLSRKQTDGTLLALLSRLDRFDSDMTNTIDTLKLHREHISSNIEKLVQLSLEIEDLSAITSKLRQLKNELSQVDADIEKETQRLKSIDVGCLSDCDLTTKAGRIEAQLIIKSAVKEVVLNTAKRRCKVTFHNGKTITLPITENPSDNVTEAIQSLSEVTERGLIDVDEVII

SEQ ID NO: 3551 - protein, 559 aa, synthetic construct
MKTKLYSYIRFSSMRQNDGSSYERQIRMAREVAAKYDLELVNDYQDLGVSAFKGANSKTGALSRFLDAIGRSVPVGSWLFIENLDRLSRADIVSAQELFLSIIRRGITIVTGMDNKIYSLDTVTANPMDLMFSILLFIRGNEESQTKRNRTNSSALIKIKAHQENPQNPAVAIEEVGKNMWWTDTTSGYVLPHPTYFPVVQEIVELRKNGRSTAEILDHLNETYTPPPAVSNKKHSKWSRAMVERLFHTRALIGIKEVSVDGVNYELKDYYPRVIDDATFYHLKKNIGARAWNFGDKEEVKPIPLLSGIGLLKCDHCGCAMVKVKGTNKRSDQYRYTCDATRSRRLDCEHPNWSFRGDQLEKAVLQLLADKIWIAEDKANPVPALKVQVDEISRKIDNLIALSAMTGATKELADQITTLNSERETLYNQIKMAEEEMYSVDSQGWEKLAEFDLEDVYNEERLKVRFKIKQALKRIGCSRIDRNKNLFVLEYIDGKTQRVVIENSRGTRKGRIFVDLKTINDRQILESNGLVLHPCLDMLTDKNWKPEEEIPGPLQEFGI

SEQ ID NO: 3552 - protein, 644 aa, synthetic construct
MLRPICYERVSSIQQIEGGGGLDDQRSALEGYLDKNAGLFENDRLFIQDRGVSAFKNSNISSESQLGIFLQDVQNRKYGEGDALIVMSLDRISRRSSWAEDTIRFIVNSGIEVHDISASTVLRKDDPHSKLIMELIQMRSHNESLMKSVRAKAAWDRKIIEAVQNGTVISNKMPMWLKNVDNRYQVIQEKADLIIRCFEWYRDGFSTGEIVKRIADPKWQMVTVSRLVRDRRLLGEHKRYNDEVIHNVYPKVIDDDLFLTANRMMDRVMLEKNKPAEDLLLESDVVQEIFQLYESGLGSGAIVKRLPKGWSTVNVLRVLRDKNVVTQKIIDNLTFERVNQKLSMNGVANRIRKDITIAQDDYITNLFPKILKCGYCGGNVAIHYNHVRTKYVICRNREERKICDAKSIQYIRIEKNILKCVKNVDFQKLMIESTGSETSVLDGLHEELSSLRREENSYSDKINERKLAGKRVGIHLNDGLTEVQDRIEEIEKEIINAQTVREIPKFDFDMDEVLDPMNIELRAKVRKQLRLVLKAVKYWMFDKRIFIQLEYFNDVLSHMLVIDNKRGGGDVIYEMSIEERKGERIYTVHENGHAVFIASVTIGTDIWSLALSRTRTIDSIGNYLSLLAREGFEIFVNEDQIDWF

SEQ ID NO: 3553 - protein, 507 aa, synthetic construct
MKRAISYIRFSSEKQSRGDSLRRQAKMVTDWLKAHPEHYLDESLTFRDLGVSGFTGKHLKGGLGDFLTAIEKGLVKAGDTLLIESLDRLSRQNVDRASELLRNILRSGVDVVTLSDGEHYTKESLKDPLALIKSILIMQRSHEESLRKSERIQAAWDVKKEAAKAGIKISKRCPAWLKLNDDRKTFSVIPEKVETVRRCFQLRLEGKSIWEIVRTLNAEGHRSMNQYKPGKFGQTSVQDLLKNRSVIGYFTPKGCEEIAGYYPSVIDETTFYKVQQLSHSRYGRKPASAKPLSVNLFKGVIRCSECGHALIITGFSDTRNGIYRCPLRNENRCSAKGLSRKQTDGTLLTLLSRLDRFDSDTTNIIDMLRLHREHISSNIEKLVQLSLEIEDLNAITSKLKQLKGELSQVDADIEKETQRLKSIDVGCLSDCDLTTKAGRIEAQLIIKSAVKEVVLNTAKRRCKVTFHNGRAITLPITENPSEDVTEAIQSLSEVTGRGLIDVDEVII

SEQ ID NO: 3554 - protein, 547 aa, synthetic construct
MKLLVPYIRWSTKEQDSGDSLRRQTNLIDAFYSKHKNDYYLLPAHRYVDKGKSGFHQQHKNQGSDFRRMFENVMSGAIPEGSLIVVENFDRFSRADIDTAIDDVRQILRKGVSILTLGDGELYDKSALTDPVKLIKHIIIAERAHQESLVKQKRIAQVWNHKTQLARELKKPMGKQAPGWLELSEDGSHYIVDEDKASLVNIIYDKRLSGMSMFAICKWLNEQGYPTINQRKVRISKTKKPDGNWSALSVKHILTSRSVLGYLPAKISTEDRKTVLREEIESFYPQIVTDSKFYAVQQLLEETGKGKTSSGEHWLYVNILKGLIRCKCGLVMTPTGIRKPVYQGTYRCNGNKESRCSYGTVSRKLLDTQLCSRLFSKLSQLHDEATDTAKLDELQRRLNTVDGELEKLTETLIQLPNITQIQEALRVKQGEKDELIVQLSREKARVKSVSSLDLSGLDMESVEGRTEAQIIIKRLVKEIVVSGNEKLVDIYLHNGNMIRGFPLDGKDDHTLTLEEATDEMQSLDDMLIFGEPVTRIYPAGDMEEVDA

SEQ ID NO: 3555 - protein, 506 aa, synthetic construct
MRTAITYLRYSSAIQGVEGADSTRRKNDLFKQWLKKNSDAQIVASFSDEGLSGYKGKHLTGQFGDMLARIEAGEFPEGTILLVESIDRIGRLEHLETEALMNRILGNGLEIHTLQDGLIYTKDALADDLGISIIQRVKAYIAHQESKQKSFRVSQKWEQRAKLALAGKQRLTKMVPGWIDPETFKLNEHAETVRLIFKLLLDGESLHNIARHLQSNGIKSFSRRKDANGFSVHSVRTILRSETTIGTLPASQRNDRPAIPNYYEAAIDAATFNKAQEILDKNRTGRTPASDNPLTINIFKGLFRCQCGASVHPTGTKNKYAGVYRCNNHLDGRCDVQPLKRKPFDKWVLENFLGMIDVGNDGESERKIAALQHEVEIVTARIKKATALLLEMDDITELKTQVKGLNQKRTEIQTTIDTLKRKTSLSDKGLPQLKDIDLMTKAGRVECQLILSKHLKGLTLGKDSVTVTLQNDTEITIPTNPLPLNDGSPIFEIADKELLDIDAYQL

SEQ ID NO: 3556 - protein, 507 aa, synthetic construct
MKRVISYIRFSSERQAKGDSLRRQSKMVNDWLKAHPEYYLDQDLSFRDLGVSGFTGKHLKGGLGDFLTAIEKGLVKAGDTLLIESLDRLSRQAVDRASELLRNILRSGVDVVTLSDGEHYTRESLKDPLSLIKSILIMQRAHEESLRKSERIQAAWNRKKELISEGIKVSRRCPAWLRLNDDRKSFSVIPDKVETVKRCFQLRLEGKSIWEIVRTLNAEGHQTLNQYKAGSFGQTSVQDLLKNRSVIGYFTPKGCEEISGYYPAIIDETTFYKVQQLSYAHYGRKPASDKPLSVNLFKGVIRCSECGHALIITGFSDTRSGIYRCPLRNENRCSAKGLSRKQTDGTLLTLLSRLDRFDSDTTNTIDTLKLHREHISSNIEKLVQLSLEIEDLNAITNKLKQLKNELSRVDADIEKETQRLKSIDVGCLSDCDLTTKAGRIEAQLIIKSAVKEVVLNTAKRRCKVTFHNGRIIDLPITENPSEDVTEAIQSLSEVTERGLIDVDEVII

SEQ ID NO: 3557 - protein, 575 aa, synthetic construct
MTKIAYSYTRLSTEKQIKGHGFTRQREAIEKVCCQHGWQLSDQTFNDLGVSAWKGANATTGALSQFIDLAKKGAIRPNSVLIVESVDRLSRQQVDKSLRLMLELLEVGVSIFTLSDSKLYTTNSDSVMLDLMMWLMTAQRAHEESEIKSLRVRAAKKKNKELIRKGIIVTRKCPEWLTVSDDKSCFLVNNERAEIVRKIFTWYSQGFSTKPIALKLNELGIPYWGKSSTWSYRHIRSLLKHRGVIGEIQLLKRIDGRDVADGDPVEDYYPAIIDRGLWATCQQIKSSKTTAKGRVVERGMANLFRGLLKCECGSGLAINSSTVKGRTYRFLRCSQLKTTGCQAKNWHYEKTERILLIALRHSLSSFSEEDHAVSLRECQHYLARISEELKEKERQAENAINYLLDKPSKLLEARLQTLEDDIARLKAIQEQAEHRLEAVHYEKSTALDKVEELQRVLEDIANDDDSRHKANGLLRRLIDTITLGSISNPRSKEFMEVSGNDYHGLIIIKRRDGLELRIEVLKNYGLSISWEGDDFTVIECSPTQQLNSQHVSQRLINLGGQTVDLWDDEGWVASS

SEQ ID NO: 3558 - protein, 490 aa, synthetic construct
MASAILYSRFSSSQQSSGDSLRRQLEAAQKFCSLHGLELSETTFQDLGISGWKDVKRDGLERLIEAVESGAIPNDSYILVEHTDRLSRQGWQAVSDLVKRLVDTGCSFVTIDNGVIYNKETFKNFTGAIPILIAADLAVMESEKKSERLRAVKTNKRNNRVIQGNQPFWITVTDGKPYLNDKAPLARRIVDMSLSGKRPLAIVREFNTEGLESINGGIWQVAVIRNILKNTILYGAKTYFESRDGKYEPVETVAGLYPKICSLQEFNQIKVVSSGQKGRKQIGPFSTILRCSCGRPLINKGKRNDDTYRVCAGVIDGTCTLKGYYRNIDDIIMSQLEYIEVPETKPSTVINNDARISELEQLLIDLEAMRVENKGKPRVLQMVFDSIDEAEKELQELQSIVVVDTQIDLKSVVSIEDVDKQNMILRSIIRNISCKKISNTKTHVRIDFKTGFTKGFMIDQGRKIDGYAINWKSDSERLLKEMESLGVEEE

SEQ ID NO: 3559 - protein, 507 aa, synthetic construct
MKRVISYIRFSSERQAKGDSLRRQSKMVNDWLKAHPEYYLDQDLSFRDLGVSGFTGKHLKGGLGDFLTAIEKGLVKAGDTLLIESLDRLSRQAVDRASELLRNILRSGVDVVTLSDGEHYTKESLKDPLSLIKSILIMQRAHEESLRKAERIQAAWDAKKEAAKAGIKISRRCPAWLKLNDDRKSFSVIPEKVETVKRCFQLRLEGKSIWEIVRTMNAEGHQTLHQHKPGSFGQSSVQDLLKNRSVIGYFTPKGCEEISGYYPAIIDETTFYKVQQLSHSRYGRKPASAKPLSVNLFKGVIRCSECGHALIITGFSDTRNGIYRCPLRNENRCSAKGLSRKQTDGTLLTLLSRLDRFDSDMTNTVDTLKLHREHISSNIEKLVQLSLEIEDLSAITIKLKQLKGELSQVDADIEKETQRLKSIDVGCLSDCDLTTKAGRIEAQLIIKSAVKEVVLNTAKRRCKVTFHNGKAITLPITENPSDNVTEAIQSLSEVTERGLIDVDEVII

SEQ ID NO: 3560 - protein, 507 aa, synthetic construct
MKRVISYIRFSSEKQAKGDSLRRQSKMVTDWLKAHPEYYLDQDLSFRDLGVSGFTGKHLKGGLGDFLTAIEKGLVKAGDTLLIESLDRLSRQDVDQASELLRNILRSGVDVVTLSDGEHYTRESLKDPLALIKSILIMQRAHEESLRKAERIQAAWNRKKELISEGIKISKRCPAWLKLNDDRKSFSVIPDKVETVKRCFQLRLEGKSIWEIVRTLNDEGHQTLNQYKAGSFGQTSVQDLLKNRSVIGYFTPKGCEEISGYYPAIIDETTFYKVQQLSYARYGRKPASDKPMAVNLFKGVIRCSECGHALIITGFSDTRNGIYRCPLRNENRCSAKGLSRKQTDGTLLTLLSRLDRFDSDTTNIIDMLRLHREHVSSNIEKLVQLSLEIEDLNAITSKLKQLKGELSQVDADIEKETQRLKSIDTGSLSDCDLSTKAGRIEAQLIIKSAVKEVVLNTAKRRCKVTFHNGKSITLPITENPSEDVTEAIQSLSEVTEGGLIDVDEVII

SEQ ID NO: 3561 - protein, 559 aa, synthetic construct
MKTKLYSYIRFSSMRQNDGSSYERQIRMAREVAVKYDLELVNDYQDLGVSAFKGANSKTGALSRFLDAIGRSVPVGSWLFIENLDRLSRADIVSAQELFLSIIRRGITIVTGMDNKIYSLDTVTANPMDLMFSILLFIRGNEESQTKRNRTNSSALIKIKSHQENPQNPAVAIEEVGKNMWWTDTTSGYVLPHPTYFPVVQEIVELRKNGRSTAEILDHLNETYAPPPAVSNKKHSKWSRAMVERLFHTRALIGIKEVSVDGVNYELKDYYPRVIDDATFYHLKKNIGARAWNFGDKEEVKPIPLLSGIGLLKCDHCGCAMVKVKGTNKRSDQYRYTCDATRSRRLDCEHPNWSFRGDQLEKAVLQLLADKIWIAEDKANPVPALKVQVDEISRKIDNLIALSAMTGATKELADQITTLNSERETLYNQIKMAEEEMYSVDSQGWEKLAEFDLEDVYNEERLKVRFKIKQALKRIGCSRIDRNKNLFVLEYIDGKTQRVVIENSRGTRKGRIFIDLKTINDRQILESNGLVLHPCLDMLTDKNWKPEEEIPGPLQEFGI

SEQ ID NO: 3562 - protein, 507 aa, synthetic construct
MKRVISYIRFSSERQAKGDSLRRQSKMVNDWLKAHPEYYLDQDLSFRDLGVSGFTGKHLKGGLGDFLTAIEKGLVKAGDTLLIESLDRLSRQNVDRASELLRNILRSGVDVVTLSDGEHYTKESLRDPLSLIKSILIMQRSHEESLRKSERIQAAWNRKKELISEGIKISKRCPAWLKLNDDRKSFSVIPEKVETVKRCFQLRLEGKSIWEIVRTLNDEGHQTLNQYKAGKFGQTSVQDLLKNRSVIGYFTPKGCEEIAGYFPPIIPETDFYKVQQLSYSRYGRKPASDKPLSVNLFKGVIRCSECGHALIITGFSDTRSGIYRCPSRNENRCNAKGLSRKQTDSTLLALLSRLDRFDSDMTNTVDTLKLHREHISNNIEKLVQLSLEIEDLSAITSKLKQLKGELSQVDADIEKETQRLKSIDVGCLSDCDLTTKAGRIEAQLIIKSAVKEVVLNTAKRRCKVTFHNGKVIDLPITENPSEDVTEAIQSLSEVTERGLIDVDEVII

SEQ ID NO: 3563 - protein, 534 aa, synthetic construct
MEKYILYARKSTDMEDKQVLSIEAQLVELRKFAKDNDLVVIDELIEKRTAKMPGRPVFNSMIKRIENGEANGILAWHPDRLARNSIDGGQIIYLLDQTSLNFLRFPIFQFENTSQGKFMLSIMFGQSKYYVDNLSENTKRGLRAKVRNGNFPSQAPFGYLNDSRTKTIILDKRYAPLVKEIFEKYARGDQTMSQLADFLQGNGVITRTGKVFKDDKVKSILQNPFYYGHFLYKGELYEGRHQPIFSKALFDKVQLVIAERGHKKRAKKEAVPFLGLMKCANCGMSITSETKTRTQKNGNFHRWTYYRCSRKKRAIKCTNPPIREKDLLPQLSALLGKYAMSEKMFAFMNERIEQDEQAEIAGNVSLLDDLRTQIAKLTNKKQILLDSYLDQDIDRQTFLTKKSKILSQKKRLEESLVNLQVNQNAWIEPMTKWLETAKSICYLLESDDFDGQKAVLLEIFGSNLFLHNKTITQTLTGVSSKTTFRKGAESGFCLWQELKNVNQKIAQEGEDLDFYSEMVREAGIEPARLLVKGF

SEQ ID NO: 3564 - protein, 507 aa, synthetic construct
MKRVISYIRFSSEKQAKGDSLRRQSKMVTDWLKAHPEYYLDQDLSFRDLGVSGFTGKHLKGGLGDFLTAIEKGLVKAGDTLLIESLDRLSRQDVDQASELLRNILRSGVDVVTLSDGEHYTKESLRDPLSLIKSILIMQRAHEESLRKAERIQAAWDAKKEAAKAGIKISRRCPAWLKLNDDRKSFSVIPDKVETVKRCFQLRLEGKSIWEIVRTLNAEGHQTLNQYKAGKFGQTSVQDLLKNRSVIGYFTPKGCEEISGYYPAIIDETTFYKVQQLSHSRYGRKPSSAKPLSVNLFKGVIRCSECGHALIITGFSDTRSGIYRCPLRNENRCSAKGLSRKQTDGTLLTLLSRLDRFDSDMTNVIDSLKIHREHISSNIEKLVQLSLEIEDLNAITNKLKQLKNELSQVDADIEKETQRLKSIDVGCLSDCDLTTKAGRIEAQLIIKSAVKEVVLNTAKRRCKVTFHNGKVIDLPITENPSEDVTEAIQSLSEVTERGLLDVDEVII

SEQ ID NO: 3565 - protein, 523 aa, synthetic construct
MAVSRNVTVIPAIKRIGNNKNSESKPKIRVAAYCRVSTDSEEQASSYEIQIEHYTNYIKKNKEWELAGIFADDGITGTNTKKRDEFNRMIEECMAGNIDMIITKSISRFARNTLDCLKYIRQLKDKNIAVFFEKENINTMDSKGEVLLTIMASLAQQESQSLSQNVKLGIQYRYQQGEVQVNHKRFLGYTKDENKQLVIDPEGAEVVKRIYREYLEGASLLQIARGLEADGILTAAGKAKWRPETLKKILQNEKYIGDALLQKTYTVDFLSKKRVKNNGIVPQYYVENSHEPIIPRDLFMQVQEEMVRRANLRGGKGGKKRVYSSKYALSSIVYCGQCGDIYRRVHWNNRGYKSIVWRCVSRLEEKGSECTAPTINEEILQTAVVKAINELLANKEPFLSTLQKNIAAILNEGNDNATDDIDSKLEELQQQLLIQAKSKNDYEDVADKIYRLRELKQNALVESAEREGKRQRIAEMTDFFNEQSCELEEYDEQLVRRLIEKVTVFHDKFAVEFKSGVEIDVEG

SEQ ID NO: 3566 - protein, 520 aa, synthetic construct
MKKITKIGVNETLIQKKKLKVAAYCRVSTASDEQRISLEAQKAHYENYIRSNDEWEYVGLYYDEGITGTKRDVRAGLLSMIAVCEDGKIEFIITKSISRFARNTTDCLEMVRKLIDLGVHIYFEKENINTGSMESELMLSILSGLAESESISISENTKWAIQRRFQNGTFKISYPPYGYQNIDGRMIVNPKQAEIVKYIFAEVLSGKGTQKIADDLNRKGIPSKRGGRWTATTIRGILTNEKYTGDVILQKTYTDSRFNRHTNYGEKNMYLVENHHEAIISHEDFEAVEAILNQRAKEKGIEKRNSKYLNRYSFSGKIICSECGSTFKRRIHSSGRRKYIAWCCSKHISQITECSMQFIRDEDIKTAFVTMMNKLIFGHKFILRPLLNGLRSQNNAESFRRIEELETKIENNMEQSQMLTGLMAKGYLEPALFNKEKNSLEAERESLFAEKEQLTHSVNGNFTKVEEVDRLLKFTTKSKMLTAYEDELFENYVEKIIVFSREVVGFVLKCGITLKERLVN

SEQ ID NO: 3567 - protein, 552 aa, synthetic construct
MNKHSPTTTARAALYLRVSTARQAEHDISIPDQKRQGEAYCEQRGLQLVETFIEAGATATNDKRPEFQRMIEAGTTKPAPFDIVVVHSFSRFFRDHFEMEFYVRKLAKNGVKLVSITQEMGDDPMHQMMRQIMALFDEYQSKENAKHVLRAMNENARQGFWNGARPPIGYRIVAAEQRGSKIKKKLEIDPLHADTVRLIYRLFLEGDGTSGAMGVKAIATYLNERRFFTRDGGRWGLAQIHAILTRTTYIGEHRFNTRSHKDREKKPESEVAIMAVPPLIERETFDAVQARLKSRNPMVTPARVSSGPTLLTGICFCAKCGGAMTLRTGQGSTGATYRYYTCSTKARQGKTGCKGRTIPMDKLDHTVADYIGDRLLLPKRLETVLASVIDRRQERTERRREHLAELQRRITEADQRLGRLFDAIEAGMVDKDDAMAKERMVSLKALRDQAAADAERTQLALDSSGNQGVTPDMLKGFARKARERIKLNDGGYRRDHLRALAQRVEVADDEVRIMGSKSELLRTLVAASSVETAAFGVHSSVLKWRTRKDSNL

SEQ ID NO: 3568 - protein, 525 aa, synthetic construct
MKTIRDVLEKGKKGAFYARVSSDRQTIDAQRHHVYEFIKNYECEIVKEYVDHGESAFKKKLIKRPQIMALLRDVEQGKYDFVITYADDRLARSEIEHVQIRVIMNEAKTDVILTSTGELYTERDIITQLIREGGTRYEVERISARTKDAYGQRTDYGQWMGGPVPFGYVQDENTKNFSILEDEKELVLKIYQLYQSGEGFADIAKILNEQKAKTNTIHWKKERVKHILTNPIYAGYVTFGRLKPGSGNSIEDLSKWKMAKCEEIPAIMTKEEWLATFQMFEKKRNKELPPKQLKTEYVLRDLIYCKSCDAPLLPKNQETRGKNGKKYGMKKYMCSNKLCNVWFSTDELHALVFDSVIKEITDKVISKSQTELMYEVEQTLEKGIKQIKKEMQRLKKQVDNCLVWIKDAEREIDELYSQKKKLVEVDPKIDPLLDVMLDYRLHLLHEIRETDELIAKKEAEMKHIEDVDSNQSMLQKNVLQAFRIEFTNLQKDMKRIRQLLVYLIDKIIIDQNGKTEYILKINLEQ

SEQ ID NO: 3569 - protein, 488 aa, synthetic construct
MESYAVYVRVSTDRDEQVSSVENQIDICRNWLERNGFKWDEKRVYKDEGISGTLFVDRPSIQLLLQKAKTKEIDMVVFKSISRLARDLKDSLEIREVFLAHNVRIISVEEGYDSVKAGKNDMAFELWSLFSAQYSRTLSSSITAALSVKVRRGEHIGKVPYGYNRENQKLVINEEEAQVVQMMYKWYLEGWGYKKITNELNRLGIKSKTKKNWQMTSVQRILQSSIYKGTFILNQYTSVKVGGKKKQIRNPEEKWFVFPDHHPKIVKEEIWNQANRKKNKTNKTKITAWNEFRNLAKCAVCGSNMVIVQSHLKKKSGERTEWKYLKCSQYRRAGKHGCVNHVPIQYGDFRQFIISLLVEKGESVTLRLQSNVEKGQEKKIKNLQQLMSTNQQKKKALLDLYLEELINKEEFEKKRNDLEVEIIKADHELLVIQNGNHVQIDIQTIKQAFEQLQKQEQDLIHVFQTLIQKINIHQNGTVDIIYTFESPL

SEQ ID NO: 3570 - protein, 537 aa, synthetic construct
MLVLWMRLYSYIRFSTEKQKDGDSLSRQTEAAKRYAEQHDYDYQDSSFKDLGVSGWSKKERNGLESMLTAVERGSVAKGDMIFIENVDRLTRKGFQDANDLICQIVRMGVHMRFESEGITFTNEKDLNASMNVIRVSIAAEQANQESEKKSERIRASKATRFKEALKAGKRVSNGGYPTWLNVSKDTEPTFKPYAKETIQTIAKMYLNGRSIGDISKHLNNPENGDYWRQGEWNVGKVSRLLDQPALYGVHKSRTWKADGTRFESYARHNQDGVEIQGAYPVVISKTDYDLIQAKREHNKTNLPYMRGTNESTRSRGKLIFPESTCMFCGGNMRYKSSQDRAKSEFICANKKGAGVCDSASMNYMLAEQMLLGLVFQENNLAPLFSDDQPNQELKNKIEALEIERATTLEAIESKKAQGKRYGALQDEVGDIEDEIQALKKELQALETGSVSVYEEMRTWSSVWDADAEERNKVRIFLESIVEAIEITSIKRSTKTMAVQININGNQRRLIATSSGNKKQGKHTINYIKGLFEGVEV

SEQ ID NO: 3571 - protein, 528 aa, synthetic construct
MAYCIYLRKSRADRELELQGFGETLKRHRDTLIELAKKKNLPIGEIYEEVVSGDSIAARPQMQRLLNDVSDGKWEGVLVMEIERLARGDTSDQGIVTKTFTYSNTLIITPMKTFNPTDEFDQEYFEFGLYMSRREYKTIKRRLHAGMEASCKEGNYIHHTPPFGYSIVKNKKSKGYRLEPKPGEAEIVKLIFQWYTKGILKEDGSYELLGTARIADKLNSEYSIKPLGGVWTIPTISTMLRNEHYLGYIVFGKKKRKKVVENGIIVDKWTRNESYGLYKGKHPALVSQDTFNLAQERLSRNPRRPSKTITNPLAGVIKCGMCGRSMYRRPYQKRGQSASLICSEKTCHNVSSAFYLVEDALLTAIKEWIDGYEIKEEANKYDTSVLESKTKLLEEQQKQLITYKNQLTKVFEAYENGIYDSDTFLNRQKTVSESISSTEEAIVKLNKEIANEREIISHQEEIIPKAKKILEIYKTSDDVQLKNDLMKSILDKVVYTKTANGHFKDQRQDDFKLELFPKLPKNKGNSSE

SEQ ID NO: 3572 - protein, 507 aa, synthetic construct
MKRAISYIRFSSEKQSRGDSLRRQAKMVTDWLKAHPEYYLDESLTFRDLGVSGFTGKHLKGGLGDFLTAIEKGLVKAGDTLLIESLDRLSRQDVDQASELLRNILRSGVDVVTLSDGEHYTRESLKDPLALIKSILIMQRSHEESLRKSERIQAAWDTKKEAAKAGIKISRRCPAWLKLNDDRKSFSIIPEKVETVKRCFQLRLEGKSIWEIVRTLNDEGHQTLNQYKAGKFGQTSVQDLLKNRSVIGYFTPKGREEIAGYFPPIIPETDFYKVQQLSYSRYGRKPASDKPLSVNLFKGVIRCSECGHALIITGFSDTRSGIYRCPLRNENRCSAKGLSRKQTDGTLLALLSRLDRFDSDTTNIIDTLKLHREHISSNIEKLVQLSLEIEDLSAITSKLKQLKGELSQVDADIEKETQRLKSIDVGCLSDCDLTTKAGRIEAQLIIKSAVKEVVLNTAKRRCKVTFHNGKIIDLPITENPSEDVTEAIQSLSEVTERGLIDVDVVEI

SEQ ID NO: 3573 - protein, 518 aa, synthetic construct
MLVSNTKVYNCALYCRLSRDDELQGESNSITNQKEILKQYAKENNLNIYDIYVDDGISGTTFDRPDFNRMIKDIEDKKVNMVIVKDTSRLGRDYISFGEYIEKYFPEHQVRFLSIIDNYDSEIDNGIADTLPFRAVLNDLYARDTSKKVKATKHRNAINGLFNGKFAPYGYMKSPENCHKLIINEEYAPNVRRIFDLYLEGKSSIQIAYIFNEEHIPTPSQTMGQEYRLSSLWKTDTIRRILKNEMYIGNMVQGKQTQINYKLKKPIRNKKEDWIIVPNTHEPIVDKEKFYAVQELLKSRTRTRTKTLNLKLKGLLYCKECGKKLGAGTSHYKNGKWNQIYLHCRTYQSLPNLKLCTPHCMNYTKLENAVISELQNICRKYLDEKKCKQIIDDNNNNVKNEIQLNKEKSNLAKAIEVLDFQIEKLYEDKLKCLINDNDFSRMYEKKVNERDSKNKKLEELSTVKFERNVIDYEKIIQDFLKKENVTAYMLNSLIEKIEINQDKQVTIYYKFADLNTLS

SEQ ID NO: 3574 - protein, 599 aa, synthetic construct
MQVKVIKKIDGKLDRRTGKVITDRLRVCAYCRVSTGDEEQINSYESQKKYYDEKINSNSLWVFAGIYADEAITGTLDYKRNEFMRMITDAMEGKFDVIITKSISRFARNTLDTLKYVRKLKERKIAVIFEKENINTLEMSGEFLLTILSSIAQQESESISGNVKLGLKMKKERGEIVGFKHCLGYDYDKDSHEIKIQQDEAEIVRQIFNRYCEGAGSTIIARELTEAGFIPPKGGEKWAESTIRGIIKNEKYKGDVLQGKTFTIDPITHKRMVNKGEEDKYYIENNHEAIVSAETYEKAQKILEKRSGAVETGRRKGNYSRKYTFSSRIFCGFCGSVFVRRNLYKNTKHETKVWQCMNYVKNGKKFCPETKAIREKVIEDCFIEAYELLCQDNKEVINNFLNRIDGFLRENNTKSILQKLEVKKQGIENKINSLINLMIDGTIDKETFNKKKIELNKKIKKIEKDQELFKCQLDDENSFDFGVEKIRKVFDKEAKDIRVFDKDIFEALIYKVVIGDYDSNGNKDPYVIRFIVKSGIENVKDKIESKVIENILNKENLILDFYSWQNYVSFEKQADGSLRKKLETKIRVKVELNSDNTTQ

SEQ ID NO: 3575 - protein, 523 aa, synthetic construct
MVSFDSIIIYLRKSRSDDPAQTVEEVLAKHERILQDYCMKEYGKAIPEKRIYREVVSGETIQDRPVMQQLLKELETGNISGVLIVEPQRLSRGDLQDCGQIINSFRYTNTAVITPGKTYNLSDEYDRKFFEMELTRGNDYLEYTKKILSRGRVASVRQGNYICSVRPYGYKKITLGSGKDKCHTLEIIPEEADVIRLMYHLYIDENMGFTNIARTLDSLHIKPLKSDNWSAATIRDMIDNPIYIGKVVWNSRKVVKKWENEQITKVRPRNKGDDVICVNGRHEAIIDEHTFEAARNKRGLTPKVKKFKELRNPLAGLLFCGTCGHGMSMKKYVDKRSHTGKVTTVMLCNQQAICHTKSAQYEDILAKIKVSLANAISDFKIKLKEQENNNIDMHELRIASLEEELNRLYNKDVRQKDAYEDGIYTKEEYIERNSKLQERILNVKEEIADEKNNVPVKIDYEDKIMTFKDCLSSLDDSDISAADKNILLKSCIDKIIYYNDMPSKPGIGRYIENSFRLEIFLKL

SEQ ID NO: 3576 - protein, 551 aa, synthetic construct
MARAAKQDSNSEIIDGVIYARYSEGPNQTEASIEGQVRECKEYAKRNGIRIINVYSDSKHTGTNDNRAEFQKMLRDSRRGGFSVVVVWKIDRFGRNRAEMAQNKALLKLQGVKVVSAKEYIPDSPEGIILESVLEGMAEYYSANLSQNIKRGMKENALHCKSNGSGKSLGYIVDKDGYFEIEPNEATIVKTIFQKYDEGMKIADIWREIVASGAKTKRGKDFTQYGISRVLSNRAYIGEYRYGDIVTPGGMPRIIDDDLFNRVQERRALRKKAPASRRSNSDVDFLLTGKVFCGHCKGTMRGMSGTSKTGRKFYYYACHDKIFKHNKCTKKNVKKEWLETEVTRITRDDILNKETIEFIADRVVEIQRQEQEDKSMLHYYEQQLRDTQSAINNIMKAIEAGIITSSTKSRLFELEEQKSIIEGEIEREKIITPVIEKEQVIFSLERFFGGDINNKEYQRNIIDMFVNKVILYDDKIIITYNISSQNEISVDVVEQAAFAALDECSSKLSLPPPAGACPCTRSALLYVGRFFIAAHESLFINPTLLFHHGRR

SEQ ID NO: 3577 - protein, 541 aa, synthetic construct
MPKAISYIRFSSRIQASGDSTKRQNKYINEWLKNNPDYQLDESLRFQDLGISGYSGANAKSGAFGEFLAAVESGVIEAGSVLLVESLDRVSRQDIDTARERLRKILLAGVDVVTLADNSWYKKESLNDPLSLIKAVLIMQRANEESATKSKRLRSAWDAKREEAAKGKIMSRRCVAWLRVSDDMSHFELIPDNVKAVQRVFQLRLEGLPFVRIARQMNEEGFYTLNQRNPVKGAWSHTTVKALLDNRSVIGFKVPSNCTVTKGVKEIPNYYPAVISEEHFYAVQQLKQGAGRRPSSEKPLLTNLFKGVMRCAECGFVTIVNCATEKWHGVYRCSMRYEGRCHAKSINRRLADKALVQGLLYNTNRLSLNRDNGSAIGSLQSELEQLQKQRERLIKLAMLADDTESMAKDLKALNSQIKDAEKAVSEVHQREQSSQLETISHLDLTVKKDRIEAQIIIKRIVKEIWLNTAQKKCDVFLHNGLKLLNFPLDRVVDGAQWLEVLPLIDGDEFDFAEFTTKPRHIALEEAPEWVKEMEEQPNQPL

SEQ ID NO: 3578 - protein, 507 aa, synthetic construct
MKRVISYIRFSSEKQAKGDSLRRQSKMVTDWLKAHPEYYLDQDLSFRDLGVSGFTGKHLKGGLGDFLTAIEKGLVKAGDTLLIESLDRLSRQDIDIASELLRNILRSGVDVVTLSDGEHYTRESLRDPLALIKSILIMQRSHEESLRKSERIQAAWDAKKEAAKAGIKVSKRCPAWLRLNDDRKSFSVIPDKVETVKRCFQLRLEGKSIWEIVRTLNAEGHRSMNQYKPGKFGQTSVQDLLKNRSVIGYFTPKGCEEIAGYYPSVIDETTFYKVQQLSHSRYGRKPVSAKPLSVNLFKGVIRCSECGHALIITGFSDTRNGIYRCPLRNENRCSAKGLSRKQTDGTLLTLLSRLDRFDSDMTNTIDTLKLHREHISSNIEKLVQLSLEIEDLNAITSKLKQLKNELSQVDADIEKETQRLKSIDTGSLSDCDLTTKAGRIEAQLIIKSAVKEVVLNTAKRRCKVTFHNGRAITLPITENPSEDVTEAIQSLSEVTERGLIDVDVVEI

SEQ ID NO: 3579 - protein, 509 aa, synthetic construct
MRRAISYIRFSSERQLKGDSVRRQSKLVTDWLDKNPEFYLDSSLSFKDLGKSAFSGKHLKGGLGDFLTAIEKGLVKAGDTLLIESLDRLSRQDIDIASELLRRILRAGVDVVTLSDGEHYTRESLKDPLSLIKSILIMQRAHEESLRKSERVQAAWNRKKELISEGIKVSRRCPAWLRLNDDRRTFTIIPDKVEVVKRAFDLRLQGLSFWAITRTLNDEGHLSLNQYTPKQKGWSDTAVKKLLRNRAVIGCFTPAGREEVQGYYPAIISESLFYRVQQLNTGQYGRASVSSNPLSVNLFRGIIKCSECGATIVLGGYALKRFGMYRCPNRSANRCSAKAISRKQTDATILYMLALCDRFETENTDTIDSLKLQREDLQRKISKMAELAIELDDMTIITEKLRDMKNALSKLNHDIEEETKRIKAITTGSLKDIDRTTKEGMIETQLLIKGVLKEIVIDAAKRRCKVTFHNGKSITLPITENPSDNVTEAIQSLSEVTERGLIDVDVVEI

SEQ ID NO: 3580 - protein, 514 aa, synthetic construct
MRAALYIRVSTQEQAEKGYSIQAQKHTLIEYCKNQGFNDYQVYVDEGISGTSTNKRIALQRLLEDAEQQHFQGVFVWKINRLVRNLVDLLSIVEHLEKYNIPLKSVSEQFETTTPQGRFILTMMGAVGQLERETIVDNTKLGRQQRNKEGWYCGAKILGYDVIAKKICIQEELETNLKVNKQEAAVVKEIFELFASGKGYKAIVNQLNKKGIRTKTGKLFTTGVVCKILKNQVYIGNIACKIDERVCVINGRHPVIISKELWEKVQQKRGDKKKGGIGPRRRYPLNSFLKCPMCQKSMKGTRVVAKRKNGDKKVYDYYQCLGYLNGGIESCFPNLIPALEIELEVYKVLQNFLHQPTIVQDVFSRINEPSSKQKENIVLLNTVKLQLERLIKKKKKLLFHFEEGLVSNEDFLQEIERISEDITVVQNRIRSVEHELKRCKDATLSKVQVRNMLRNFVSLLNESNKEDMDKLFSSFLYQVEVSKEHKLKLVYLKINEYVIQVVEKKDGKQRWKIS

SEQ ID NO: 3581 - protein, 548 aa, synthetic construct
MENIIRVAIYARVSTEEQAEHGYSIDAQLDTLRNYCKVYEKIVVKEYVDRGVSGKSINGRYELQKLLRDAKNGEFDEVVVWKISRLARKTIDLLQIVDELSKHKVAFRSFSENFETETPMGKFALQMMGAVGELERNTIVDNVKMGMKQRARTGRWNGGIVLGYKSISRDSGGKGRESTRLVIVEEEAVIVRKIFNMYSQGKGLKAIANKVNHEGYKTKKGNAFSTATIKEIILNPVYIGKIRFNRYENWSERRRKGKNENIIIVDGKHEPIITNELWKKVQSLRQMKAKKSIKNYEGNFLLTGLMKCPKCGAAMVSSRTTNTLKDGTKKVLRYYSCGAFRSKGSAVCSANSIRADYAEQYVLQRIQEVVKHPKVLKELLHNINKQKKESIKPLKDELQVINKSIQSIENRKQKYFSLYEDSLLNQNMFTDRIQELKEEMERLSVRKSEIEFELGDGDEKILSHEYVKELLVQLNVLLDAIPCDEKKVLYHLLIENIVVNDEKKIENIQLNINEEIQQELLKKPLSKEEMDRGFCISKNGRYSLRISI

SEQ ID NO: 3582 - protein, 509 aa, synthetic construct
MGARVSVLSGPQKVSHEAQIDTATKWATAHDYPVVGSFEDLGVSASVPPDERPELGPWIRERSHEWEVIIWSKLDRGFRSMRHCSDFIKWAETNRKIVVFAEDGLTLNYLNPASVVESTLSELFVSMAAAFAQIELNRFKSRAEDMHRAIRPTTRWAAGLPPLGYQVVDHPSGRGKGLAIDPDAANLVREMADKLVDGWSFVRITEWLNESGKLTSQGRSRKARGLEPKGRWTTTNVIEILTGYRTLGIKTHKGQPVLDDSGEPIRLAPPLFTPERWDEVQRAAQLRKGKPRTPSDTSNPMLGVGYCGAPCSHKRSGSECPGDCQGICGSSLAQQFSKTRPRKSDGHVTFYRYYRCSRTPINCKAVFVVADDLDELLSEQFLLERGDRRVTERVFIPGEDNSYELDFIKDRIERLREDRVSGLYPSGEDELVFRNQMKQLLARRDELASVPVRQPGYENVELEKTYREVWPGATPEEKRKMLIDAEISIRLGESPGKSLRAELVIGTPY

SEQ ID NO: 3583 - protein, 503 aa, synthetic construct
MNKICIYLRKSRADEELEKTLGEGETLYKHRKTLLKFAKDNNLNIVEIKEEIVSGDSLFNRPKMLELLQEVENKKYTGVLVMDIDRLGRGGMKDQGIILDAFKESNTKIITPIKTYDLNDEFDEEMTEFKTFFSRRELKTINRRMQGGRVRSVEDGNYIATNAPLGYDIDYIKKSRTLKINEDEAEIIKLIFKLYTEGDGAGTISSYLNSLGYKTKANNSFGPTSIIAILKNPVYIGKITWKKKEYKKSKDPNKVKDCRTRDKKEWIVANGKHHALIDEDTFNRANDILNEKYHIPYKLSNPPTNPLAGLIICGVCKNKMVMRKTRGIPRILCTHKCGNRSVRFDYFEKELLQSLENYLYNYKFSIENETDDNNKDMYTKHLTLLNKELNTLNTQSLNIFDAYERNVYTEDVFIERIKNINSRKESIEIEINKINDLINQENKKMNSNDIVIFENIIKGYKNTNDIKLKNELFKNIILKIVYNKAKDQKDDDFTIDLYPKLLR

SEQ ID NO: 3584 - protein, 659 aa, synthetic construct
MSKKKIVAACYCRVSTNTKQQASSLDNQQSYFNDFFRDNSNYRLYKIYPDKGISGTLLHREQFDKMLIDAGLDILTVKPMKFEVGKIPDATNAEVDVLSDAKNAKTYATYKKYVVVPSARTPKFTEILVRNTSRFARNIMVADILNELREKDVYVRFLDINKTSENPEDVSFIQLFQTFDEMFSRDLSRKVKAGNERSVARKVVRSTPRLYGFDYIKRGTLQENNQLKARAIEDDVVRRIYRLYAGCISVYDEVLPVCDYKCDTCTIERTAGVGERVISRCLTESGVKTRTGKEFGITTIANVLNNEKYCGYINTGKYDAGALFSNNKKIKIRDEYLLEPDPNIEAIISKELFDLCQERRSSRYDVIKAKGLPSTSSPFGGLLVCSVCGSKYVHNSDRGRGFYLCGLKKRKGLKTCNSVNVSDAIVTEYMYRLMAGALSADLYQDRQAVFKAICKSIADKINYIESKRDPEKVAQLQADRENADSELRAYYKQLIKEEEKGEDSTTLQRLIDDTKEVLSGIQKQLDRYTKKPIAYLDECKILREYAYELLNTPDISLEGLTKRTYTVSEVLNTINCIDVYGPTDYSGGAVSELLLKPRLKMPEMVKNIIIYNEAIFSEGVKEEKTMENLENVHIIPPAKLKEDIDELSAKLEVLETQYF

SEQ ID NO: 3585 - protein, 634 aa, synthetic construct
MKKSALYIRVSTTYQIDKDSLPLQREDLINYSKYVLGIDDYEIFEDAGFSGKNTDRPAFQNMMNRIKSHEFSHLIVWKIDRISRNLLDFCTMYDELKEYNCTFISKNEKFDTSSAMGESMLKIILVFAELERKLTSERVSAVMLSRAEKGLWNGASVPLGYKHTKGMKFPVIDDTEANVIKYIYELYIKNGSTPKVAYQLNQEKVKTKRGGTWTPKTVGDILRNPFYIGTYRYNVRNSGSKRRWKEKSEWVVVENNHSGIISPELFEKANEMLSDNYKGKRQYQRENTNTHIFSQVLVCGKCGSTLIAGLDSARKDGYRPSRYTCYSSRHDNINNCNNFISDITLLPFILNYIANFINLQNRITQRHSLRDIERILLRGKYFADVECIDRKGLEDTYIAFSIGFTDSSYSNGQGNAENNTNSELENLKKEKIKFEKALSRLEDLYLFDEQGISKKDYLFKKRDITQHIQKINEDISDINKKNSRVTTDISFLNKAGNFLIHNELTNKKNIDYRELLQAVDISLIKDFVNTVITQIEIIDKKVYSITFNNGITHKFLYKVKHLQVIRTREKFLYRAFEPQVIEYLKDNSYITRKDIENITGMSHTSANALLLELIDKGLIEKKGNSVATRYFLKA

SEQ ID NO: 3586 - protein, 537 aa, synthetic construct
MGDILKYAKDNGYTVNNSLELKDLGLSAYKAEHIEKGSLGDFLDALDTGIIETDGSAYLCIEQIDRLSRQSIDNAYQVFRRILKANVNVITLMDKKTYTKESLNDLMSIMYSSMLMAQANEESAKKGERILKSFDQKIDKLNNGETIQYVGIFPGWIDNKGTKQKTDFVVNEKAKIVKRAFKMYIEGTSMGDIARIFNEELVEQVAKRRHKNFTNSWSSAKINHLLKNRCVLGELRIAKTGDVYENYYPSIISVDDWDVVQSMTATKKTKKASGRKSINIFTGKMFCAGCGQKYYFETDDKITKKGRTLYYMLKCQGRRVLGCKSKSIKYDDFISSTPNMFGMVTQSKKDNSNKINQIKEKISEISTETKKIEKDIITLETMNENGDLDYATYLKESSKQRKKINVNDARIADFKANIARLSSDNKLEFFDKTDPVSVVKAKRFVNENFAAFVVSSDSKACTALYSNGMVIHFTLNNSKLEKKEKIKPVDGFGEFYELKEEILNAYKSGRMDGKFIEILKATNYWGVETPEKIYDLD

SEQ ID NO: 3587 - protein, 507 aa, synthetic construct
MKRVISYIRFSSERQAKGDSLRRQSKMVNDWLKAHPEYYLDQDLSFRDLGVSGFTGKHLKGGLGDFLTAIEKGLVKAGDTLLIESLDRLSRQDVDQASELLRNILRSGVDVVTLSDGEHYTRESLKDPLALIKSILIMQRSHEESLRKSERIQAAWNRKKELISEGIKISKRCPAWLKLNDDRKSFSVIPEKVETVKRCFQLRLEGKSIWEIVRTLNDEGHQTLNQYKAGSFGQTSVQDLLKNRSVIGYFTPKGCEEIAGYYPAIIDETTFYKVQQLSYSRYGRKPASDKPMAVNLFKGVIRCSECGHALIITGFSDTRSGIYRCPLRNENRCSAKGLSRKQTDGTLLTLLSRLDRFDSDMTNTIDTLKLHREHISSNIEKLVQLSLEIEDLSAITIKLKQLKGELSQVDADIEKETQRLKSIDVGCLSDCDLTTKAGRIEAQLIIKSAVKEVVLNTAKRRCKVTFHNGKVIDLPITEDPSEDVTEAIQSLSEVTERGLIDVDEVII

SEQ ID NO: 3588 - protein, 506 aa, synthetic construct
MRTVITYLRYSSAIQGAEGADSTRRQNDLFKQWLKKNSDAQVVASFSDEGLSGYKGKHLTGQFGDMLARIESGEFPEGTILLVEAIDRIGRLEHLETEALMNRIIAHGIEIHTLQDGLIYTRDALSDDLGISIIQRVKSYVAHQESKQKSFRVSQKWKQRAKLALAGEQRLTKMVPGWIDPDTFKCNEHAETVRLIFKLLLDGESLHNIARHLQANNISSFSRRKDANGFSVHSVRTILRSETTRGTLPASQRNDRPAIPNYYEAAIDAATFNKAQEILDKNRKGRTPASDNPLTINIFKGLFRCQCGASVHPTGTKNKYQGVYRCNNHLDGRCDVPPLKRKPFDKWMIDNFLGMIDVGNDGEAEGKIAALQHEVEIVTARIKKATALLLEMDDITELKTQVKGLNQKRTELQTTIDNMRRKASLTDKELPQLKDIDLTTKAGRVECQLILSKHLKGLTLGKDSVIVTLQNDTEITIPTDPLPLNDGTSIFEIAEKNLLNIDTFQL

SEQ ID NO: 3589 - protein, 514 aa, synthetic construct
MRKVYSYIRFSTTKQAFGDSHRRQSKAIQDWLASHPDHILDESLSFEDLGRSAFHGDHLKEGGALRAFLEAVKQGLIPPDSVLLVESLDRVSRQSISHAQETIRAILEQGITVVTLSDGETYNRQSLDDSLALIRMIILQERSHNESVIKSDRIKKVWSHKRQQFEQDGTKITGNCPGWLKLNSDGKSFSLIPHHVETIHRIFDEKLSGKSLHAIARDLNLENIPTITNKKVDTGWTPTRVRDLLLKESLIGVAYGVSDYFPPAISKEKFHAVQMIRGQGKGKKPTSRQPSSIDIFKGICKCAECGSTLRQRNTKKTPEGRYPRGYLECRNRQLGRCNSKAFNRSLIEDILIQKVFPTLQYLSLKSNGDNISVTTLRADITSLEKGINNLISLAERGLGDLDTLAQRITNNRVELESKKKDLRQAEAIQSLRSDNDIQDSDRKTVEGRIKLQLAIKSFIKEMIFDYYKQEITIRLLNGKSFSGISVARENKDFDHSSVFEVLQKSLLDIDEVHL

SEQ ID NO: 3590 - protein, 507 aa, synthetic construct
MKRVISYIRFSSERQAKGDSLRRQSKMVNDWLKAHPEYYLDQDLSFRDLGVSGFTGKHLKGGLGDFLTAIEKGLVKAGDTLLIESLDRLSRQAVDRASELLRNILRSGVDVVTLSDGEHYTSESLKDPLALIKSILIMQRAHEESLRKSERIQAAWDAKKEAAKAGIKVSKRCPAWLRLNDDRKSFSVIPEKVETVKRCFQLRLEGKSIWEIVRTLNDEGHQSMSQYKPGSFGQSSVQDLLKNRSVIGYFTPKGCEEIAGYYPAIIDETTFYKVQQLSYARHGRKPASAKPLSVNLFKGVIRCSECGHALIITGFSDTRNGIYRCPLRNENRCSAKGLSRKQTDGTLLTLLSRLDRFDSDTTNTVDMLRLHREHISSNIEKLVQLSLEIEDLSAITSKLKQLKNELSQVDADIEKETQRLKSIDVGCLSDCDLSTKAGRIEAQLIIRSAVKEVVLNTAKRRCKVTFHNGKSITLPITENPSEDVTEAIQSLSEVTERGLIDVDEVII

SEQ ID NO: 3591 - protein, 505 aa, synthetic construct
MTLAFSYVRFSTKHQASGTSLERQVNASKLFCSQNGLTLSNQSYHDLGISGFKNVRRPELEQMLEAIQTGDIPSGSYILIEAIDRLSRKGISHTQDILKKILQYDVKVAFVGEDAKTLQGHILNKDSLNDLSSVILVALAADLAHKESLRKSKLVKASKAIAREKAADGEILPGKSVFYLDYDKKNKKYVFNKRVDLARKIIQMRLEGKGPRKIARLLNEENIPGPTGKQWYQMSVKRLLKSPVLYGAYQTHQIIEEKYIPVSLIENYYPALIDYQTFSQIQFDDKRVSKGRPSRHKFSGVLYCECGAVLCRKVNTYETKQGPKEYQYFNCFGAFEGRCKNNKAIKDLHIPLEKAIDKLQIKTRSVKNIKNEQIIAKREKIDQLNKMLLELEMPPVSVLKTISTLEKELQELLEQPDVQPPKSADVKTLVAIKDAEQYNLYLKRLVKRITIFQLNGPKNIRIKIEKTDGHYQSFIVNNGKIMFNADTKALQEHLRKLKEGTSDED

SEQ ID NO: 3592 - protein, 455 aa, synthetic construct
MEKRKLYSYIRWSSDKQAKGSSLQRQLETARRVAHENDLELVEIIDAGLSAFRSKHLEKGSLGAFIEAVKVGQIASDSWLTVESLDRISRDAILKAQGLFMELLELGITIYTGMDNRIYTKSSVTDNPMELMLSIMTFSRANQESMVKSQRQKSATQLKINKFNASVRADNGYPHAIRNSGANVFWSDVSDGTVRPHEYYFPIAKLIVSLRLKGWGYMRIAKHLNENYTPPKGTAKRKHFKDLWSPKLICNFLQSRTLMGEKSIRVDGVEHILKGYYPQVISENEFYSLQNVINRKLANEPNNYIPLLTGIRRFKCGCGAAMVAFFQYDKIRYRCDGMKSLDKRMHCGAKSFNGASIENAIVQICADKIFKDVKTHTSNVGAIQAMLVEAKRKYNRGMDMLLEDTAPQGLNIKLIELEKQIEELQKKLNDELVTEAGVNSSVSWGAVPKDYRDVF

SEQ ID NO: 3593 - protein, 540 aa, synthetic construct
MPKAISYIRFSTKIQSVGDSTKRQSKYINDWLKRNPDYYLDESLRFQDLGISGFSGANAKSGAFGEFLAAVESGYIEAGSVLLVESLDRVSRQDIDTAGEQLRKILRSGVEVVTLVDNEWYTKESLKDSLSMIKAMLVMERAHEESAMKSTRLRSMWAAKRERAANGEIMSKRCAAWLKVSEDRSHFEFIPENVKAVQRVFQLRLEGLSHVKIAKQMNDEGFSTLNQFKSVTGGWSQSSVTELLSNRSVIGFKVPSKSMAVKGVSEIPNYYPSIITDEQFYAVQQLKQGSGRKPSSDLPLLTNLFKGVLRCSECGFIMVVAGVSAKRSGIYKCSMKSEGRCNSVGFSRLQTDRALVQGLLYNTNRLSLNRDNGSAIGSLQSELEHLQKQRERLIKLAMLADDTESMAKDLKALNSQIKDAEKAVSEVHQREQSSQLETISHLDLTVKKDRIEAQIIIKRIVKEIRLNTARKKCDVFLHNGLRLLNFPLDRVVDGAQWLEVLPLIDGDEFDFEGFITKPRHVALEEAPEWVKEMEEQSNQP

SEQ ID NO: 3594 - protein, 547 aa, synthetic construct
MKLLVTYIRWSTREQDSGDSLRRQTNLIDAFYAKHKDDYYLLPAHRYVDKGKSGFHQQHKNQGSDFRRMFENVMSEAIPEGSLIVVENFDRFSRADIDTAIDDVRQILRKGVSILTLGDGELYDKSALTDPVKLIKHIIIAERAHQESLVKQKRIAQVWNHKTQLARELKKPMGKQAPGWLELSEDGSHYIVDEDKASLVNIIYDKRLSGMSMFAICKWLNEQGYPTINQRKVRISKTKKPDGNWSALSVKHILTSRSVLGYLPAKISTEDRKTVLREEIEGFYPQIVTDSKFYAVQQLLEETGKGKTSSGDHWLYVNILKGLIRCKCGLVMTPTGIRKPVYQGTYRCNGNKESRCNYGTVSRKLLDTQLCSRLFSKLSQLHDEATDTAKLDELQRRLNTVDSELEKLTETLIQLPNITQIQEALRVKQEEKDELIVQLSREKARVKSVSSLDLSGLDMESVEGRTEAQIIIKRLVKEIVVSGNEKLVDIYLHNGNMIRGFPLDGKDDHTLTLEEATDEMQPLDDMLIFGEPVTRIYPAGDMEEVDA

SEQ ID NO: 3595 - protein, 455 aa, synthetic construct
MWSHLKRVAIYMRVSTDQQAKHGDSLREQQETLNEYIKQNKDLTVVGEYIDGGISGQKLNRDEFQRLLEDVQNDLIDLIIFTKLDRWFRNLRHYLNTQEILEKHNVSWNAVSQQYYDTTTAYGRTFIAQVMSFAELEAQMTSERIKAVFNNKIQQGEVVSGKIPLGYSVKNKHLVPNEDKRIVIDLFNFYMQIGSLRQCVKYLEEEHGLIRDYQSVRNMLTNMKYIGVHRNNLNYCEPIIDKDIFEIVQKRLSQNIKNDSKHEYIFRGLVRCADCGGSMSCTTFKSKYKRKADGETSIYIRTGYRCTKRKNNHNRCVNKKIFYEKMLEQYILDNIKPQISKFITTTKNEARKKDSIKRKKDAIFTKLERLKKAYLNEVIELEEYKKDRQNLEQELAKIREPKISNNIKSLNSILSEEFFSSYKESNVQQKNELWRTILESIDIDHGGNITINFLQ

SEQ ID NO: 3596 - protein, 507 aa, synthetic construct
MKRAISYIRFSSEKQSRGDSLRRQSKMVNDWLKAHPEYYLDQDLSFRDLGVSGFTGKHLKGGLGDFLTAIEKGLVKAGDTLLIESLDRLSRQDVDQASELLRNILRSGVDVVTLSDGEHYTKESLKDPLALIKSILIMQRAHEESLRKAERIQAAWDAKKEAAKAGIKVSKRCPAWLKLNDDRKSFSVIPEKVETVKRCFQLRLEGKSIWEIVRTLNDEGHQSMSQYKPGSFGQSSVQDLLKNRSVIGYFTPKGCEEIAGYYPAIIDETTFYKVQQLSYARYGRKPASDKPLSVNLFKGVIRCSECGHALIITGFSDTRSGIYRCPLRNENRCSAKGLSRKQTDGTLLALLSRLDRFDSDMTNTIDTLKLHREHISSNIEKLVQLSLEIEDLNAITNKLKQLKNELSQVDADIEKETQRLKSIDVGCLSDCDLTTKAGRIEAQLIIKSAVKEVVLNTAKRRCKVTFHNSKSITLSITENPSEDVTEAIQSLSEVTERGLIDVDEVII

SEQ ID NO: 3597 - protein, 506 aa, synthetic construct
MRTAITYLRYSSAIQGVEGADSTRRQNDLIKQWLKKNSDAQIVASFSDEGLSGYKGKHLTGQFGDMLARIEAGEFPEGTILLVESIDRIGRLEHLETEALMNRILGNGLEIHTLQDGLIYTKDALADDLGISIIQRVKAYIAHQESKQKSFRVSQKWEQRAKLALAGKQRLTKMVPGWIDPETFKLNEHAETVRLIFKLLLDGESLHNIARHLQSNGIKSFSRRKDANGFSVHSVRTILRSETTIGTLPASQRNDRPAIPNYYEAAIDAATFNKAQEILDKNRTGRTPASDNPLTINIFKGLFRCQCGASVHPTGTKNKYAGVYRCNNHLDGRCDVQPLKRKPFDKWVLENFLGMIDVGNDGESERKIAALQHEVEIVTARIKKATALLLEMDDITELKTQVKGLNQKRTEIQTTIDTLKRKTSLSDKGLPQLKDIDLMTKAGRVECQLILSKHLKGLTLGKDSVTVTLQNDTEITIPTNPLPLNDGSPIFEIADKELLDIDAYQL

SEQ ID NO: 3598 - protein, 542 aa, synthetic construct
MQQLKQKRVAIYVRVSTEIQSTEGYSITGQINQIEEYCQFNNFKVVDVYADRGISGKSMNRPELQRMLKDANEGHIDCVMVYKTNRLARNTSDLLKIVEDLHKQNVEFFSLSERMEVNTSSGKLMLQILASFSEFERNNIVENVFMGQTRRAQEGYYQGNLPLGYDKIPDSKHELMINQHEANIVKYIFESYAKGHGYRKIANTLNHKGYVTKKGKPFSISSITYILSNPFYMGKIQFAKYKDWNEKRRKGLNDKPIIAEGKHAPIISQALWDKVQARKKQVSQKPQVHGKGTNLLTGIVHCPQCGAPMAASNTTNTLKDGTKKRIRYYSCSNFRNKGSKVCSANSVRADVIEKYVMDQILEIVKSDKVLKQVVERVNQDNQVDVAALNHDIAYKQQQFDEINTKLKNLVQTIEDNPDLTSALKPTIHQYETQLNDITNQMNQLKHQQNQEKPSYDTKQIAALLQRIFQNIEFMDKSQLKALYLTVIDRIDIRKDENHKKQFYVTLKLNNEIIKQLFNNNNLDEVLLSTSSLFLPQTLYFQI

SEQ ID NO: 3599 - protein, 523 aa, synthetic construct
MRFFSYGRKSVFSDKSDSIDNQFRMNREYCESKFSGQVDSWQQFSDEDFTGANTSRPDLQRMLSFIKGGFCDVLVVYQLDRLSRDVRDFANIYALLEEHGVMFISIKENIDTTTPIGRAMMYVTVVFAQMERETIAARVTDNMLGLAKKGYWTGGNPPVGYVRKHIVVNGKKHCSIDVDPDGARYVTQIFDTFLAYNCSLQGMETRFKNQGIRTQSGKFFSTTQLHKMLTMPYCVEATPEVYDFYAAKGCIMDPGSPREKWDGSVGVIIYGRSTEKNKKHQAQPPEKWTVCLGKHKPFMPAEKWLAVQSRFTQNKCIKDAKWPVPLLKGVLRCKCGNLMQVSRKKKVDGTCSSWYYCRKRMRQGVDACDMGQIKCDLLDEEVLELFRGITADPALIQKFVKAETPADVPDLKAAQARVSACERKIGRLAASLALAEDSAASKYIIAEMERLDVELGALKREATLAEMESHRAAASAKDAKATAAEIAKLIHGLDGFDDKEKNAIARAVIQECTWDGERLFITL

SEQ ID NO: 3600 - protein, 506 aa, synthetic construct
MRSVITYLRFSSATQGAEGADSTRRQNDLFKQWLKKNSDAQVVASFSDEGLSGYKGKHLTGQFGDMLARIESGEFPEGTLLLVEAIDRIGRLEHLETEALMNRIIAHGIEIHTLQDGLIYTRDALSDDLGISIIQRVKSYVAHQKSKQKSFRVSQKWKQRAKLALAGEQRLTKMVPGWIDPDTFKLNEHAETVRLIFKLLLDGESLHNIARHLQSNDIKSFSRRKDANGFSVHSVRTVLRSVSAIGTLPASQRNDRPAIPNYYEAAIDAATFNKAQEILDKNRKGRTPASDNPLTINIFKGLFRCQCGASVHPTGTKNKYQGVYRCNNHLDGRCDVPPLKRKPFDKWMIDNFLGMIDVGNDGEAEGKIAALQHEVEIVTARIKKATALLLEMDDITELKTQVKGLNQKRTELQTTIDNMRRKASLTDKELPQLKDIDLTTKAGRVECQLILSKHLKGLTLGKDSVIVTLQNDTEITIPTNPLPLNDGTSIFEIAEKNLLNIDTFQL

SEQ ID NO: 3601 - protein, 507 aa, synthetic construct
MKRVISYIRFSSEKQAKGDSLRRQSKMVTDWLKAHPEYYLDQDLSFRDLGVSGFTGKHLKGGLGDFLTAIEKGLVKAGDTLLIESLDRLSRQDIDIASELLRNILRSGVDVVTLSDGEHYTSESLKDPLALIKSILIMQRAHEESLRKSERIQAAWNRKKELISEGIKVSKRCPAWLRLNDDRKSFSVIPEKVETVKRCFQLRLEGKSIWAIVKALNDEGHQSMSQYKPGKFGQTSVQDLLKNRSVIGYFTPKGCEEISGYYPAIIDETTFYKVQQLSHYRYGRKPVSDKPLSVNLFKGVIRCSECGHALIITGFSDTRNGIYRCPLRNENRCSAKGLSRKQTDGTLLTLLSRLDRFDSDTTNIIDTLKLHREHISSNIEKLVQLSLEIEDLSAITSKLKQLKGELSQVDADIEKETQRLKSIDVGCLSDCDLTTKAGRIEAQLIIKSAVKEVVLNTAKRRCKVTFHNGKAITLPITENPSEDVTEAIQSLSEVTERGLIDVDVVEI

SEQ ID NO: 3602 - protein, 557 aa, synthetic construct
MKRKKAYIYTRVSTNMQVEGFSLDAQETRIHQYANAFDIEIVKTYQDAGKSGKTMLGRTEFMAMISDIEAEKDKVDYVLVFKLSRFGRNAADTLKSLAIMESHGVNLICVDDGLDSSKDSGKLVITILSAVAEMERENIISQAMEGRRQKARAGQWNGGFAPVGYSLVNGQLQVNQEEAESVKMIFDLFANSDMGTIAIAKHLANLDIKKPIRHNSTLPYFSSSGIARILDNPVYNGKIAFGRRESTRDKISGETKVTQSENYILTDGIHEAIIDDETWNKVRKKREANAHKYKRENPSKGDSIYVLSGLIKCPLCNAGLYGNKSIKRNKNKKDEYYKNYYYYACKHRKHVDGHKCTFNKQLKTGNLDHEVLSIISKLVSRPDFARKLQEKINIQVDTSRIDSEIEQYKSLFRQLNATKLNLIQQIDSLNFEDPHFQQKSIDLDMRLNTIYDKLADVEMLIETSESKREVILKDKMTADNIYKILVNFASFMDVMEDIDKKRLCQMLIEKVEIYDEKNKAGRWVKAIHFKLPIIEEDLEISLDNSTPVEAVVKLSKK

SEQ ID NO: 3603 - protein, 600 aa, synthetic construct
MAQKLYSYQRWSSAVQADGTTKARQTKAAEEYAQKNGLEIEEIVDAGVSGFKSANSDESGALGQFLRAVDEGLIARNAVLFVESLDRITRDEIDTALELFLGILRRGITIVTGMDNKVYTREAIKGNPVDLLTSILMFSRAHEESKTKQNRTNGNALALIDRFLKKGLPVNIKSVGSHPWWIDDSGSMYEAVKPHPVLWACAQLAMDNFMEGISVFKVTQMLNERFPHYYKGKAWAMANVRKLRLNKAVYGVREISVGGKTYVLPDYYPALISEGQFLRLQQIRTTTKYIGKVGEGRVVTDAEGNSKVIAERNNINLLSGMKLFRCGHCGGTMMAMRHGDTIRYLCEKGRGYHHDCKTWSLPGILVEHTLMLVTTIAYIELQQKGQGAKADYTQQINAMESTINGYSTQINKATKLAIALDDVDVDELAETIKELKAKRDNAIIELEVLQRKQLLANDSTFETVMMDFFTYAQYGVLQDPVHEYRSKLRDVVYSAISDVRAWKHDRRLFISFQIKGNDEYYNFSAGNTPYEWGCYVGALPFSQQELEVADGDVPEKVLERVRERYAELHAANMMMLHQAKELLSHVGYPELDSKMFWPRK

SEQ ID NO: 3604 - protein, 627 aa, synthetic construct
MAGIRTENKIYEVGMYCRLSKDDGTDNESASIATQKSILTDYVKKQGWHLAKTYVDDGYSGTNFQRPSFQNMIKDIENGLINCVITKDLSRLGRNYLDCGLYLEVFFPEHNVRYIAVNDGVDTLNKSAMDITPFRNILNEMYSADVSVKIKSAYRARFQQGKFMGTTAPYGYVKDPADHNHLLIDDKVAHVVREIFDLALAGNGIAKIRKHINKQHILRPAAYAVEQGATGYERYFEGNEENRYIWSENSVRGILRSPIYAGNLAGYKRIAANMKSKKRPSKLPEEWEVIPDTHEGIVTQEEFDTVQQLITSRRLPENKGGFENIFAGVIKCADCGYAMRAMSANRRKRPDIIDCVQYSCNNYGRYGNIMCTAHSIEARDLFNAVLTDINRFADMAVNDEKAVRAIEKRLTETDHSRAKALEKEQRKLNKRLAELDRLFSSLYEDKVMERITERNFEMMSGKYQKEQLEIVARLKEVTETLGDSYEKSQGVRDFLSLIRNYQGIKELDATIINALIDKILVSEREKLADGTVRQEIKIYYKFIGFVGELHITPTKRWTALKPKNCTVCGVEYVPRSGISKYCPACAKKIQREKSNESKRRSRERNRQACIELSAKNDRLILSNAMVG

SEQ ID NO: 3605 - protein, 643 aa, synthetic construct
MKKNNVEIIKADSLVRRRGDNFERESKRVAAYCRVSSDSEDQKNSYESQVRHYKDYISQRSDWELAGIYADEGISGTQVGKRQDFQRLINDCVNGEIDYIVTKAIARFARNTLDTLKYVRMLKDMQIGVYFEEENIDTLTMDGELLLTILSSVAQQEVENTSAHVKKGLKMKMQRGELIGFQGCLGYDYDVETKQLSINKKEAKIVRYIFERYLEGIGGKVIARELDELGYKSPRGLDHWNDTTVLGIIKNEKYKGDILMGKTFTVDPISKRRLSNFGEEDKYYIKDNHEPIISKEDFEKAQEIRLRRAGNKKTAANVNGKRERYSKMYAFSSMLECGFCGSILSRRSWHCRSDYRKVVWHCVTSIKKGKKFCKHSKGLEELAIEGAFMEAYRQLYHSNENLMTDLLETIESELNDNSLNKELKRITNKLRTLLKKEENLVNLRLEGKISDTIYNEKYNEISSEKEFLAEEKVNIETTLKSEIDVKKRLTEFKHLLSSQKMLTEFDRAVFESIVEKIIVGGVNSDGEIDPAMLTIIFKTGETQNKDGKQFKSKRKNAKLETDKLCPQNSDEDKKLYSQGTDYTHRSCGIIRKTQLDCPVCSPVFWQAASKDPRTFELSNTHHVDSCHTYTKIKCQQALSRVIA

SEQ ID NO: 3606 - protein, 584 aa, synthetic construct
MKNNNVEIIKADSLVRRRGDNFERDSKRVAAYCRVSSDSEDQKNSYESQVRHYKDYISQRSDWELAGIYADEGISGTQVGKRQDFQRLINDCVNGEIDYIVTKAIARFARNTLDTLKYVRMLKDMQIGVYFEEENIDTLTMDGELLLTILSSVAQQEVENTSAHVKKGLKMKMQRGELVGFQGCLGYDYDVETKQLSINKKEAKIVRYIFERYLEGIGGKVIARELDELGYKSPRGLEHWNDTTVLGIIKNEKYKGDILMGKTFTVDPISKRRLSNFGEEDKYYIKDNHEPIISKEDFEKAQEIRLRRAGNKKTAANVNGKRERYSKMYAFSSMLECGFCGSILSRRSWHCRSDYRKVVWHCVTSIKKGKKFCKHSKGLEELAIEGAFMEAYRQLYHSNENLMTDLLETIESELNDNSLNKELKRITNKLRTLLKKEENLVNLRLEGKISDTIYNEKYNEISSEKVFLAEEKVNIETTLKSEIDVKKRLTEFKHLLSSQKMLTEFDRAVFESIVEKIIVGGVNSDGEIDPAMLTIIFKTGETENKDGKQFKSKRKNAKLETDKLSPQNSDGDKKLYSQEPDNTC

SEQ ID NO: 3607 - protein, 627 aa, synthetic construct
MAGIRTENKIYEVGIYCRLSKDDGTDNESASIATQKSILTDYVKRQGWHLAKTYVDDGYSGTNFQRPSFQNMIKDIENGLINCVITKDLSRLGRNYLDCGLYLEVFFPEHNVRYIAVNDGVDTLNKSAMDITPFRNILNEMYSADVSVKIKSAYRARFQQGKFMGTTAPYGYVKDPADHNHLLIDDKVAHVVREIFDLALAGNGIAKIRKHINKQHILRPAAYAVEQGATGYERYFEDNEENRYIWSENSVRGILRSPIYAGNLAGYKRIAANMKSKKRPSKLPEEWEVIPDTHEGIVTQEEFDTVQQLMTSRRREQNAGGFENIFSGVIKCADCGYAMRAASANRRKRPDIIDCVQYTCNNYGRYGNVMCTAHSIEARDLFNAVLADINRFADMAVNDEKAVRAIERRLTETDQSRAKSLEKEKKKLNKRLAELDRLFSSLYEDKVMERITERNFEMMSGKYQKEQLEIEARLKEVTETLNDSYEKSQGVRDFLSLIRNYQGLKELDATIINALIDKILVSEREKLADGTVRQEIKIYYKFIGFVGELHITPTKRWTALKPKNCTVCGVEYVPSSGISKYCPACAKRIQREKSNESKRRSRERNRRACIELSAKNDRLILFNAMVG

SEQ ID NO: 3608 - protein, 627 aa, synthetic construct
MAGIRTENKIYEVGIYCRLSKDDGTDNESASIATQKSILTDYVKRQGWHLAKTYVDDGYSGTNFQRPSFQNMIKDIENGLINCVITKDLSRLGRNYLDCGLYLEVFFPEHNVRYIAVNDGVDTLNKSAMDITPFRNILNEMYSADVSVKIKSAYRARFQQGKFMGTTAPYGYVKDPADHNHLLIDDKVAHVVREIFDLALAGNGIAKIRKHINKQHILRPAAYAVEQGATGYERYFEDNEENRYIWSENSVRGILRSPIYAGNLAGYKRIAANMKSKKRPSKLPEEWEVIPDTHEGIVTQEEFDTVQQLMTSRRREQNAGGFENIFSGVIKCADCGYAMRAASANRRKRPDIIDCVQYTCNNYGRYGNVMCIAHSIEARDLFNAVLADINRFADMAVNDEKAVRAIERRLTETDQSRAKSLEKEKKKLNKRLAELDRLFSSLYEDKVMERITERNFEMMSGKYQKEQLEIEARLKEVTETLNDSYEKSQGVRDFLSLIRNYQGLKELDATIINALIDKILVSEREKLADGTVRQEIKIYYKFIGFVGELHITPTKRWTALKPKNCTVCGVEYVPSSGISKYCPACAKRIQREKSNESKRRSRERNRRACIELSAKNDRLTLSSEMDD

SEQ ID NO: 3609 - protein, 634 aa, synthetic construct
MKKNNVEIIKADSLVRRRGDNFERESKRVAAYCRVSSDSEDQKNSYESQVRHYKDYISQRSDWELAGIYADEGISGTQVGKRQDFQRLINDCVNGEIDYIVTKAIARFARNTLDTLKYVRMLKDMQIGVYFEEENIDTLTMDGELLLTILSSVAQQEVENTSAHVKKGLKMKMQRGELIGFQGCLGYDYDVETKQLSINKKEAKIVRYIFERYLEGIGGKVIARELDELGYKSPRGLDHWNDTTVLGIIKNEKYKGDILMGKTFTVDPISKRRLSNFGEEDKYYIKDNHEPIISKEDFEKAQEIRLRRAGNKKTAANVNGKRERYSKMYAFSSMLECGFCGSILSRRSWHCRSDYRKVVWHCVTSIKKGKKFCKHSKGLEELAIEGAFMEAYRKLYHSNENLMTDLLETIESELNDNSLNKELKRITNKLRTLLKKEENLVNLRLEGKISDTIYNEKYNEISSEKEFLAEEKVNIETTLKSEIDVKKRLTEFKHLLSSQKMLTEFDRAVFESIVEKIIVGGVNSDGEIDPAMLTIIFKTGETQNKDGKQFKSKRKNAKLETDKLCPQNSDEDKKLYSQGTDYTWACRAGRTYSWANSSFTSNTCDSIAPIDKALSCMKSRSLPSPTSIQTAMTS

SEQ ID NO: 3610 - protein, 557 aa, synthetic construct
MKRKKAYIYTRVSTNMQVEGFSLDAQETRIHQYANAFDIEIVKTYQDAGKSGKTMLGRTEFMAMISDIEAEKDKVDYVLVFKLSRFGRNAADTLKSLAIMESHGVNLICVDDGLDSSKDSGKLVITILSAVAEMERENIISQAMEGRRQKARAGQWNGGFAPVGYSLVNGQLQVNHEEAESVKMIFDLFANSDMGTIAIAKHLANLDIKKPIRHNSTLPYFSSSGIARILDNPVYNGKIAFGRRESTRDKVSGETKVKQSENYILTDGIHEAIIDDETWNKVRKKREANAHKYKRENPSKGDSIYVLSGLIKCPLCNAGLYGNKSIKRNKNKKDEYYKNYYYYACKHRKHVDGHKCTFNKQLKTGNLDHEVLSIISKLVSRPDFARKLQEKINIQVDTSRIDSEIEQYKSLFRQLSATKMNLIQQIDSLNFEDHHFQQKSIDLDMRLNTIYDKLADVEMLIETSESKREVILKDKMTADNIYKILVNFASFMDVMEDIDKKRLCQMLIEKVEIYDDKNKAGRWVKAIHFKLPIIEEDLEISLDNSTPVEAVVKLSKK

SEQ ID NO: 3611 - protein, 508 aa, synthetic construct
MKKAIAYMRFSSPGQMSGDSLNRQRRLITEWLKVNSDYYLDTVTYEDLGLSAFNGKHAQSGAFSEFLDAIEHGYILPGTTLLVESLDRLSREKVGEAIERLKLILNHGIDVITLCDNTVYNIDSLNEPYSLIKAILIAQRANEESEIKSSRVKLSWKKKRQDALESGTIMTASCPRWLSLDDKRTAFVPDPDRVKTIELIFKLRMERRSLNAIAKYLNDHAVKNFSGKESAWGPSVIEKLLANKALIGICVPSYRARGKGISEIAGYYPRVISDDLFYAVQEIRLAPFGISNSSKNPMLINLLRTVMKCEACGNTMIVHAISGSLHGYYVCPMRRLHRCDRPSIKRDLVDYNIINELLFNCSKIQPVENKKDANETLELKIIELQMKINNLIAALSVAPEVTAIAEKIRVLDKELRRASVSLKTLKSKAVSSLGDFHAIDLTSKNGRELCRTLAYKTFEKIIINTDNKTCDIYFMNGIVFKHYPLMKTISAQQAISTLKYMVDGEVYF

SEQ ID NO: 3612 - protein, 557 aa, synthetic construct
MKRKKAYIYTRVSTTMQVEGFSLDAQEAKIQQYANAFDIEIVKTYQDAGKSGKTMLGRTEFMNMISDIEAEKDKVDYVLVFKLSRFGRNAADTLKSLAIMESHGVNLICVDDGLDSSKDSGKLVITILSAVAEMERENIISQAMEGRRQKARAGQWNGGFAPVGYSLVNGQLQVNHEEAESVKMIFDLFANSDMGTIAIAKHLANLDIKKPIRHNSTLPYFSSSGITRILDNPVYNGKIAFGRRESTRDKISGETKVTQSENYILTDGIHEAIIDDETWKKVRKKREANAHKYKRENPNKGDSIYILSGLIKCPLCNAGLYGNKSIKRNKNKKDEYYKNYYYYACKHRKHVDGHKCTFNKQLKTGNLDHEVLSIISKLVSRPGFAKKLQEKINIQVDTSRIDSEIEQYKSLFRQLNATKMNLIQQIDTLNFEVPHFQQKSIDLDMRLNTIYDKIADVETLIETSESKREVILKDKMTADNIYKILVNFASLMDVMEDIDKKRLCQMLIEKIEIYDEKNEAGRWVKAIHFKLPIIEEDLEISLDNSTPVEAVVKLSKK

SEQ ID NO: 3613 - protein, 559 aa, synthetic construct
MKTKLYSYIRFSSMRQSDGSSYERQIRMAREIAAKYDLELVNDYQDLGVSAFKGANSKTGALSRFLDAIGRSVPVGSWLFIENLDRLSRADIVSAQELFLSIIRRGITIVTGMDNKIYSLDTVTANPMDLMFSILLFIRGNEESQTKRNRTNSSALIKIKAHQENPQNPAVAIEEVGKNMWWTDTTSGYVLPHPVYFPVVQEIVELRKNGRSTAEILDHLNETYAPPPAVSNKKHSKWSRAMVERLFHTRALIGIKEISVDGVNYELKDYYPRVIDDPTFYHLKKNIGARAWNFGDKEEVKPIPLLSGIGLLKCDHCGCAMVKVKGTNKRSDQYRYTCDATRSRRLDCEHPNWSFRGDQLEKAVLQLLADKIWIAEDKANPVPALKVQVDEISRKIDNLIALSAMTGATKELADQITTLNSERETLYNQIKMAEEEMYSVDSQGWEKLAEFDLEDVYNEERLKVRFKIKQALKRIGCSRIDRNKNLFVLEYIDGKTQRVVIENSRGTRKGQIFVDLKTINDRQILESNGLVLHPCLDMLTDKNWKPEEEIPGPLQEFGI

SEQ ID NO: 3614 - protein, 520 aa, synthetic construct
MKKVITIEATPSIIRSSSDDFSLKKRRVAGYARVSTDHEDQATSYESQMRYYSEYINGRDDWEFVKMYSDEGISGTNTKLRTGFKAMVEDALNGKIDLIITKSVSRFARNTVDSLTTVRQLKEVGVEIYFEKENIWTLDSKGELLITIMSSLAQEESRSISENVTWGLRKQFAEGKVHFPYTNVLGFRAGEDGAIVVDQDEAKTVRYIFQQALIGKSPYHIAKDLTEQGIPSPSGKSHWNATTIKRMLRNEKYKGDALLQKTYTIDFLTKKKNINRGELPQYYVENNHEAIVDRETFDAVQQVLDNKGRKSSTTIFSSKLVCGDCGHFFGSKVWHSTSKYRRVIYRCNEKYNGSSKCSTPHVTEEEVKQWFVLAVNQVIDNRFEVIDNLSVLLSIGSLEVIDEQIKILETEAEVVSQLVANLVSENAIIRQDQDKYLKKYNQLTTKYEGIVQDIESLELQRMQKSKRNKELRVFINALEKQEGLLLEFDEFLWETMVEHVTVAGAKEISIKFKNGQIIRV

SEQ ID NO: 3615 - protein, 411 aa, synthetic construct
MRTVRRIQPIKSPCKPRFKVAAYARVSDSRLHHSLSTQISYYNRLIQAHPDWELVGIYYDEGISGKEQSNRQGFLNLIKDCEDGKIDRIITKSIARFGRNTVELLTTVRQLRLKNIGVTFEKENIDSLSSEGELMLTLLASVAQEESQNLSENIRWRIQKKFEKGIPHTPQDMYGYRWDGEQYQIEPNEAKVIRKVFKWYLDGDSVQQIVDKLNQEQVLTRLGNPFTVASVREFFKQEAYFGRLVLQKTYREAFSRNPKRNKGQRNKYIIENAHEPIVTKEYFDLVLHEKERRYQLMSQEIHLNKGIFRDKISCSECGYLMIVKVDSKQVNKTVRYYCRTRNRFGASSCSCRTLGEKRLLASFKSKLGIAPDKEWVENNIKHIEYDFGHRIIRVTPVKGSKYPIEIREGRY

SEQ ID NO: 3616 - protein, 627 aa, synthetic construct
MAGIRTENKIYEVGIYCRLSKDDGTDNESASIATQKSILTDYVKRQGWHLAKTYVDDGYSGTNFQRPSFQNMIKDIENGLINCVITKDLSRLGRNYLDCGLYLEVFFPEHNVRYIAVNDGVDTLNKSAMDITPFRNILNEMYSADVSVKIKSAYRARFQQGKFMGTTAPYGYVKDPADHNHLLIDDKVAHVVREIFDLALAGNGIAKIRKHINKQHILRPAAYAVEQGATGYERYFEDNEENRYIWSENSVRGILRSPIYAGNLAGYKRIAANMKSKKRPSKLPEEWEVIPDTHEGIVTQEEFDTVQQLMTSRRREQNAGGFENIFSGVIKCADCGYAMRAASANRRKRPDIIDCVQYTCNNYGRYGNVMCTAHSIEARDLFNAVLADINRFADMAVNDEKAVRAIERRLTETDQSRAKSLEKEKKKLNKRLAELDRLFSSLYEDKVMERITERNFEMMSGKYQKEQLEIEARLKEVTETLNDSYEKSQGVRDFLSLIRNYQGLKELDATIINALIDKILVSEREKLADGTVRQEIKIYYKFIGFVGELHITPTKRWTALKPKNCTVCGVEYVPSSGISKYCPACAKRIQREKSNESKRRSRERNRRVCIELSAKNDRLILYSEMDD

SEQ ID NO: 3617 - protein, 493 aa, synthetic construct
MNLMKVAGGDYMPKVAIYIRVSTTSQAEEGYSIDEQKDKLTSYCNIKDWSIYNIYTDGGFSGSNTERPALEQLIKDAKRKVFDTVLVYKLDRLSRSQKDTLYLIEDIFLENKIDFVSLLENFDTSTPFGKAMVGILSVFAQLEREQIKERMQLGRLGRAKSGKSMMWARPSYGYDYHRDTGTMTVNPWQAIVIRSIFDWYLQGISITKIRDALNEQYGEDKGGKVWQYRAIRLILTNPVYCGYNQYKGQVFPGKHEPIISEDVFDKTQRELKLRQIETYEFTKNPRPFQAKYMLSGLAKCGYCHAPLKITLGKPRKDGSRTSRYECYQRHPKTTKGATVYNNNAKCHSGAYGRHEIEEYVLNEISKLQNDTNYLDELFSNPETESIDRESYQKQIDELTKKLSRLNDLYIDDRITLEDLKKKSLEFTTMRTLLEAELENDPKLQQEERKKDIRKVLSKGDVLSMDYEEQKVVIRALVEKVQVTAESIKIKFKI

SEQ ID NO: 3618 - protein, 557 aa, synthetic construct
MKRKKAYIYTRVSTTMQVEGFSLDAQEAKIQQYANAFDIEIVKTYQDAGKSGKTILGRTEFMNMISDIEAEKDKVDYVLVFKLSRFGRNAADTLKSLAIMESHGVNLICVDDGLDSSKDSGKLVITILSAVAEMERENIISQAMEGRRQKARAGQWNGGFAPVGYSLVNGQLQVNHEEAESVKMIFDLFANSDMGTIAIAKHLANLDIKKPIRHNSTLPYFSSSGIARILDNPVYNGKIAFGRRESTRDKISGETKVTQSENYILTDGIHEAIIDDETWKKVRKKREANAHKYKRENPNKGDSIYILSGLIKCPLCHAGLYGNKSIKRNKNKKDEYYKNYYYYACKHRKHVDGHKCTFNKQLKTGNLDHEVLSIISKLVSRPDFARKLQEKINIQVDTSRIDSEIEQYKSLFRQLSATKMNLIQQIDSLNFEDPHFQQKSIDLDMRLNTIYDKLADVERLIETSESKREVILKDKMTADNIYKILVNFASFMDVMEDIDKKRLCQMLIEKVEIYDDKNKAGRWVKAIHFKLPIIEEDLEISLDNSTPVEAVVKLSKK

SEQ ID NO: 3619 - protein, 557 aa, synthetic construct
MKRKKAYIYTRVSTNMQVEGFSLDAQETRIHQYANAFDIEIVKTYQDAGKSGKTMLGRTEFMAMISDIEAEKDKVDYVLVFKLSRFGRNAADTLKSLAIMESHGVNLICVDDGLDSSKDSGKLVITILSAVAEMERENIISQAMEGRRQKARAGQWNGGFAPVGYSLVNGQLQVNQEEAESVKMIFDLFANSDMGTIAIAKHLANLDIKKPIRHNSTLPYFSSSGIARILDNPVYNGKIAFGRRESTRDKISGETKVTQSENYILTDGIHEAIIDDEIWNKVRKKREANAHKYKRENPSKGDSIYILSGLIKCPLCHAGLYGNKSIKRNKNKKDEYYKNYYYYACKHRKHVDGHKCTFNKQLKTGNLDHEVLSIISKLVSRPDFARKLQEKINIQVDTSRIDSEIEQYKSLFRQLNATKLNLIQQIDSLNFEDPHFQQKSIDLDMRLNTIYDKIADVEILIETSESKREVILKDKMTADNIYKILVNFASFMDVMEDIDKKRLCQMLIEKVEIYDDKNKAGRWVKAIHFKLPIIEEDLEISLDNSTPVEAVVKLNKK

SEQ ID NO: 3620 - protein, 521 aa, synthetic construct
MKKVITIEPAKQVSHKVDLPSFTKRRVAGYARVSTDHEGQTTSYEAQMKYYTDYINSRSDWEFVKMYSDEGISGTNTKARIGFQRMVEDALDGKIDLILTKSVSRFARNTVDSLSTVRKLKEAGVEIYFEKENIWTFDSKGELLITIMSSLAQEESRSISENVTWGRRRQLAEGQVTFSYSQVLGFKKSDTGGFEIDHEEAKIVRYIFHQVLLGNNPNKIARELTAQGIPTPQGKRKWSYGTVKRMLRNEKYKGDALLQKSFTTNFLTKSTKSNEGELPQYYVENSHEAIIKREVFDLVQVELDKLEKKRQTSNIFTGRLFCGDCGGAFGSKVWHSTSKYKRTIYQCNAKYKGEHKCQTPHVTEEEIKAWFLSAINQLLSNRDEIIANTELLIDMAKNTSPLENKIDDLEKKLETIRQDIEDLVDRNAREAQNQELYQEQYDILVTVYQEKQKELQETRSSLEEQKSKRISLDGFIQQLKEQDDLITDFNQELWQTSVERLDIKVGKKISLTFKNGVRIDL

SEQ ID NO: 3621 - protein, 520 aa, synthetic construct
MKKVITIEATPSIIRSSSDEFSLKKRRVAGYARVSTDHEDQATSYESQMRYYSEYINGRDDWEFVKMYSDEGISGTNTKLRTGFKAMVEDALNGKIDLIITKSVSRFARNTVDSLTTVRQLKEVGVEIYFEKENIWTLDSKGELLITIMSSLAQEESRSISENVTWGLRKQFAEGKVHFPYTNVLGFKAGEDGAIVVDQDEAKTVRYIFQQALIGKSPYHIAKDLTEQGVPSPSGKSHWNATTIKRMLKNEKYKGDALLQKTYTIDFLTKKKNINRGELPQYYVENNHEAIVDRETFDAVQQVLDNKGRKSSTTIFSSKLVCGDCGHFFGSKVWHSTSKYRRVIYRCNEKYKGTERCSTPHVTEDEVKQWFISAVNQMLENKYEVLENIDILIQMVNTDSIDERISSLETETEVVGQMVSNLILGNARMSQNQDEYQIKYRQISDKYESLIKEIENLEVQKFSIAKRHKELLDFHNVLKMQDGLLTAFDEFLWESIVESVKINSGKEIYIQFKNGTVATL

SEQ ID NO: 3622 - protein, 557 aa, synthetic construct
MKRKKAYIYTRVSTTMQVEGFSLDAQEAKIQQYANAFDIEIVKTYQDAGKSGKTMLGRTEFMNMISDIEAEKDKVDYVLVFKLSRFGRNAADTLKSLAIMESHGVNLICVDDGLDSSKDSGKLVITILSAVAEMERENIISQAMEGRRQKARAGQWNGGFAPVGYSLVNGQLQVNHEEAESVKMIFDLFANSDMGTIAIAKHLANLDIKKPIRHNSTLPYFSSSGIARILDNPVYNGKIAFGRRESTRDKISGETKVTQSENYILTDGIHEAIIDDETWKKVRKKREANAHKYKRENPNKGDSIYILSGLIKCPLCNAGLYGNKSIKRNKNKKDEYYKNYYYYACKHRKHVDGHKCTFNKQLKTGNLDHEVLSIISKLVSRPGFAKKLQEKINIQVDTSRIDSEIEQYKSLFRQLNATKMNLIQQIDTLNFEVPHFQQKSIDLDMRLNTIYDKIADVETLIETSESKREVILKDKMTADNIYKILVNFASLMDVMEDIDKKRLCQMLIEKIEIYDEKNEAGRWVKAIHFKLPIIEEDLEISLDNSTPVEAVVKLSKK

SEQ ID NO: 3623 - protein, 430 aa, synthetic construct
MSTDQEEQLSSYENQVNYYREFISKHEDYELVDIYADEGISATNTKKRDAFNRLIQDCRASKVDRILVKSISRFARNTLDCIKYVRELKELGVGVTFEKENIDSLDSKGEVLLTILSSLAQDESRSISENATWGIRKKFERGEVRVNTTKFMGYDKDENGRLIINPQQAETVKYIYEKFLEGYSPESIAKYLNDNEIPGWTGKANWYPSAIQKMLQNEKYKGDALLQKTFTVDFLTKKRIANDGQVNQYYVENSHEAIIDKDTWELVQLELARRKAYREEHQLKSYIMQNDDNPFTTKVFCKECGSAFGRKNWTTSRGKRKVWQCNNRYRVKGQIGCQNNHIDEETLEKAVVMAVELLSENVDLLHGKWNKILEENRPLEKHYSTKLAEVINKPSWEFDSYEMCQVLDSITISEDGQISVKFLEGTEVDL

SEQ ID NO: 3624 - protein, 479 aa, synthetic construct
MNKVAIYVRVSTKGQAEEGYSIDEQIAMLTSYCSIHKWTVYETYVDAGFSGATIDRPALSKLSRDAQKKRFNTVLVYDLKRLGRSQRNNIAFIEDILEKNDIGFISLTENFDTSTPLGKAMVGILSAFGQLDRDTIRERMMMGKIGRAKSGKPMMTSTIAFGYTYDKLTSTLNINQAEAIVVKTIFKEYLGGRSLTKLRDYLNENNILRNGKLWNYQGISRILRNPVYMGMIRFRGEVYQGNHEPIIDAETFETTQAELKKRQIETYQFYKNSRPFRAKYMLSGMIRCGYCGAPLEIILGTKRKDGSRYRRYQCVNRFPRTTKGITVYNDGKKCNSKYYEKEDIEVFVLGQVRLLQLNQAKLDKMFETVNEIDVEGIEKQIDQLNNKLKRLNDLYLNDMIYLDELKRQSYALLTQKELLEKELENNPDIQKKIDKENFQRLLDTKDVTTLDYDSQKHILNRLINKVFVKDGHVKIEWKI

SEQ ID NO: 3625 - protein, 437 aa, synthetic construct
MAGIRTENKIYEVGIYCRLSKDDGTDNESASIATQKSILTDYVKRQGWHLAKTYVDDGYSGTNFQRPSFQNMIKDIENGLINCVITKDLSRLGRNYLDCGLYLEVFFPEHNVRYIAVNDGVDTLNKSAMDITPFRNILNEMYSADVSVKIKSAYRARFQQGKFMGTTAPYGYVKDPADHNHLLIDDKVAHVVREIFDLALAGNGIAKIRKHINKQHILRPAAYAVEQGATGYERYFEDNEENRYIWSENSVRGILRSPIYAGNLAGYKRIAANMKSKKRPSKLPEEWEVIPDTHEGIVTQEEFDTVQQLMTSRRREQNAGGFENIFSGVIKCADCGYAMRAASANRRKRPDIIDCVQYTCNNYGRYGNVTKFKLESAVIALGTLFITDPVFAATDPQAKLVQAGNTIKIFYSKIHVTCYLFIKQIILIICLTQLKKN

SEQ ID NO: 3626 - protein, 618 aa, synthetic construct
MAGIKEEKKIYLVGIYCRLSKDDGTDNESASIATQKSILTDYVKKQGWHIAKTYVDDGYSGTNFQRPSFQNMIKDIESGLINCVITKDLSRLGRNYLDCGLYLEVFFPEHNVRYIAVNDGVDTLNKSAMDITPFRNILNEMYAADISVKIKSAYRARFQQGKFMGTTAPYGYIKDPADHNHLLIDDKVAHVVKEIFDLVLKGNGVAKICRHLNKQHILRPAAYAAERGETGFERHFEGNEDKRYIWSGNSVRSILRSPIYAGNLVGYKRIAANMKSKKRPSKLPEEWEVIPNTHEGIVTQEEFDIVQQLITSRRLPQNKGGFVNIFAGVIKCVDCGCALRAMNVHRRKRPEIIDCVQYSCNNYARNGRSECSAHNIEARDLFNAVLADINCFADMAVNDEKAVRAIEKRLTETDQSRAKALEKERKKLNKRLAELDRLFSSLYEDKVMERITERNFEMMSGKYQKEQLEIEARLKEVTETLNESYEKSRGIRDFLALIRNYQGLKELDATVINALIDKILVSEREKMADGTVKQEIKIYYKFIGFVDELHIIPTKRWAAMPAKNCTVCGVEYVPGSGASRYCPACAKKIRREKSNESKRRSREQKRIACMNCPQKMTD

SEQ ID NO: 3627 - protein, 390 aa, synthetic construct
MAGIKEEKKIYLVGIYCRLSKDDGTDNESASIATQKSILTDYVKKQGWHIAKTYVDDGYSGTNFQRPSFQNMIKDIESGLINCVITKDLSRLGRNYLDCGLYLEVFFPEHNVRYIAVNDGVDTLNKSAMDITPFRNILNEMYAADISVKIKSAYRARFQQGKFMGTTAPYGYIKDPADHNHLLIDDKVAHVVKEIFDLALKGNGVAKICRHLNKQHILRPAAYAAERGETGFERHFEGNEDKRYIWSGNSVRSILRSPIYAGNLVGYKRIAANMKSKKRPSKLPEEWEVIPNTHEGIVTQEEFDIVQQLITSRRLPQNKGGFVNIFAGVIKCVDCGCALRAMNVHRRKRPEIIDCVQYSCNNYARNGRSECSAHNIEARDLFNAVLADIN

SEQ ID NO: 3628 - protein, 498 aa, synthetic construct
MAGIKEEKKIYLVGIYCRLSKDDGTDNESASIATQKSILTDYVKKQGWHIAKTYVDDGYSGTNFQRPSFQNMIKDIESGLINCVITKDLSRLGRNYLDCGLYLEVFFPEHNVRYIAVNDGVDTLNKSAMDITPFRNILNEMYAADISVKIKSAYRARFQQGKFMGTTAPYGYIKDPADHNHLLIDDKVAHVVKEIFDLALKGNGVAKICRHLNKQHILRPAAYAAERGETGFERHFEGNEDKRYIWSGNSVRSILRSPIYAGNLVGYKRIAANMKSKKRPSKLPEEWEVIPNTHEGIVTQEEFDIVQQLITSRRLPQNKGGFVNIFAGVIKCVDCGCALRAMNVHRRKRPEIIDCVQYSCNNYARNGRSECSAHNIEARDLFNAVLADINCFADMAVNDEKAVRAIEKRLTETDQSRAKALEKERKKLNKRLAELDRLFSSLYEDKVMERITERNFEMMSGKYQKEQLEIEARLKEVTETLNESYEKSRGIRDFLALI

SEQ ID NO: 3629 - protein, 557 aa, synthetic construct
MKRKKAYIYTRVSTNMQVEGFSLDAQETRIHQYANAFDIEIVKTYQDAGKSGKTMLGRTEFMNMISDIEAEKDKVDYVLVFKLSRFGRNAADTLKSLAIMESHGVNLICVDDGLDSSKDSGKLVITILSAVAEMERENIISQAMEGRRQKARAGQWNGGFAPVGYSLVNGQLQVNHEEAESVKMIFDLFANSDMGTIAIAKHLANLDIKKPIRHNSTLPYFSSSGIARILDNPVYNGKIAFGRRESTRDKISGETKVTQSENYILTDGIHEAIIDDETWKKVRKKREANAHKYKRENPNKGDSIYILSGLIKCPLCNAGLYGNKSIKRNKNKKDEYYKNYYYYACKHRKHVDGHKCTFNKQLKTGNLDHEVLSIISKLVSRPGFAKKLQEKINIQVDTSRIDSEIEQYKSLFRQLNATKMNLIQQIDTLNFEVPHFQQKSIDLDMRLNTIYDKIADVETLIETSESKREVILKDKMTADNIYKILVNFASLMDVMEDIDKKRLCQMLIEKIEIYDEKNEAGRWVKAIHFKLPIIEEDLEISLDNSTPVEAVVKLNKK

SEQ ID NO: 3630 - protein, 618 aa, synthetic construct
MAGIRTENKIYEVGIYCRLSKDDGTDNESASIATQKSILTDYVKRQGWHLAKTYVDDGYSGTNFQRPSFQNMIKDIENGLINCVITKDLSRLGRNYLDCGLYLEVFFPENNVRYIAVNDGVDTLNKSAMDITPFRNILNEMYSADVSVKIKSAYRARFQQGKFMGTTAPYGYVKDPADHNHLLIDDKVAHVVREIFDLALAGNGIAKIRKHINKQHILRPAAYAVEQGATGYERYFEDNEENRYIWSENSVRGILRSPIYAGNLAGYKRIAANMKSKKRPSKLPEEWEVIPDTHEGIVTQEEFDIVQQLITSRRLPQNKGGFVNIFAGVIKCVDCGCALRAMNVHRRKRPEIIDCVQYSCNNYARNGRSECSAHNIEARDLFNAVLADINCFADMAVNDEKAVRAIEKRLTETDQSRAKALEKERKKLNKRLAELDRLFSSLYEDKVMERITERNFEMMSGKYQKEQLEIEARLKEVTETLNESYEKSRGIRDFLALIRNYQGLKELDATVINALIDKILVSEREKMADGTVKQEIKIYYKFIGFVDELHIIPTKRWAAMPAKNCTVCGVEYVPGSGASRYCPACAKKIRREKSNESKRRSREQKRIACMNCPQKMTD

SEQ ID NO: 3631 - protein, 411 aa, synthetic construct
MRTVRRIQPIKSPCKQRIKVAAYARVSDSRLHHSLSTQISYYNRLIQAHPDWELVGIYYDEGISGKEQSNRQGFLNLIKDCEDGNIDRIITKSIARFGRNTVELLTTVRQLRLKNIGVTFEKENIDSLSSEGEFMLTLLASVAQEESQNLSENIRWRIQKKFEKGIPHTPQDMYGYRWDGEQYQIEPNEAKVIRKVFKWYLDGDSVQQIVDKLNQEQVLTRLGNPFTVASIREFFKQEAYFGRLVLQKTYRESFSRNPKRNKGQRNKYIIENAHEPIVTKEYFDLILHEKERRYQLMSQESHLNKGIFRDKISCSECGCLMIVKVDSKQVNKTVRYYCRTRNRFGASSCSCRTLGEKRLLASFKSKLGIVPDKEWVENNIKHIEYDFGQRIIKVTPVKGRKYPMEIREGRY

SEQ ID NO: 3632 - protein, 520 aa, synthetic construct
MKKVITIEATPSIIRSSSDDFPLKKRRVAGYARVSTDHEDQATSYESQMRYYSEYINGRDDWEFVKMYSDEGISGTNTKLRTGFKAMVEDALNGKIDLIITKSVSRFARNTVDSLTTVRQLKEVGVEIYFEKENIWTLDSKGELLITIMSSLAQEESRSISENVTWGLRKQFAEGKVHFPYTNVLGFKAGEDGAIVVDQDEAKTVRYIFQQALIGKSPYHIAKDLTEQGIPSPSGKSHWNATTIKRMLRNEKYKGDALLQKTYTIDFLTKKKNINRGELPQYYVENNHEAIVDRETFDAVQQVLDNKGRKSSTTIFSSKLVCGDCGHFFGSKVWHSTSKYRRVIYRCNEKYNGSSKCSTPHVTEEEVKQWFISAVNQVIDNKLEVIENLSALLSIGSLEIVDEQIKVLETEAEVVSQLVANLVSENAILRQDQDKYLDKYNQLSSKYDDIVQEIESLELERLKKSKRNKELQVFMELLNKHEGLLTDFDELLWETMVESITINLEKKIIFKFKNGAVATI

SEQ ID NO: 3633 - protein, 476 aa, synthetic construct
MDRNKVAIYVRVSTQGQVDDGYSLDEQVDLLTNYCKLKEWTLYDVYVDPGISGKNMHRPEIERLTRDAKRKLFDIVLIYDLKRLGRSQKENIVLVEDVFNPNGIRLVSFTENFDASTPVGKMVFGMLSAYAELDRANIAERMMMGKIGRAKAGKAMSWGMPPFAYNYNKETGDLELDEVKAPIVEMIYSEFLKGASVNKIVQKLNSMNYHGKNHDWKHHAVTVIIDNPVYCGMMNYMGQTYQAKHTPIIDKKTFELAQLERKKRLAKYHNAEWVPPFQRKYIGSKICYCGLCGAHLKSEKDKKNKLTGIRSISFFCPNTRSRGTGECTNPRFKQSVLEGYILNEVAKLQQNPEKLKDIKPAEDNELHNKIATYEKKIKQNTSKLSKLNDLYLNDLISLDDLKQQSKSLLNENEFMEEQIKLLSATTREDELRKKIDTFLAFPDILTADYDTQKQAVELVISRVEATKDGIDIFFNF

SEQ ID NO: 3634 - protein, 520 aa, synthetic construct
MKKVITIEATPSIIRSSSDEFSLKKRRVAGYARVSTDHEVQATSYESQMRYYSEYINGRDDWVFVKMYSDEGISGTNTKLRTGFKSMVEDALDGKIDLIITKSVSRFARNTVDSLTTVRQLKEVGVEIYFEKENIWTLDSKGELLITIMSSLAQEESRSISENVTWGLRKQFAEGKVHFPYTNVLGFKAGEDGAIVVDQDEAKTVRYIFQQALIGKSPYHIAKDLTEQVIPSPSGKSHWNATTIKRMLRNEKYKGDALLQKTYTTDFLTKKKNINRGELPQYYVENNHEAIVDRETFDAVQQVLENKGRKSSTTIFSSKLVCGDCGHFFGSKVWHSTSKYRRVIYQCNEKYKGISKCSTPHVTEEEVIQWFISAVNQVLDNRIEVIDNLYVLLSIGNLEVIDEQIKVLETEAEVVSQLVANLVSENAIIRQDQDKYLKKYNQLTSKYEGIVQDIESLELQRMQKSKRNKELQDFIGTLEKLGKVLTDFDELLWESLVESVMINEDKGAKFKFKNGAVVAI

SEQ ID NO: 3635 - protein, 632 aa, synthetic construct
MKTNNVEIIKADSLVRRRGVNVERHLKRVAAYCRVSSDSDDQKNSYESQVRHYKDYISQRSDWELVDIYADEGISGTQVGKRQDFQRLINDCVNGEIDYIVTKAIARFARNTLDTLKYVRMLKDMQIGVYFEEENIDTLTMDGELLLTILSSVAQQEVENTSAHVKKGLKMKMQRGELIGFQGCLGYNYDVETKQLSINKKEAKIVRYIFERYLEGIGGKVIARELDELGYKSPRGLDHWNDTTVLGIIKNEKYKGDILMGKTFTVDPISKRRLSNFGEEDKYYIKDNHEPIISKEDFEKAQEIRLRRAGNKKTAANVNGKRERYSKMYAFSSMLECGFCGSLLSRRSWHCRSDYRKVVWHCVTSIKKGKKYCKHSKGLEELAIEGAFMEAYRQLYHSNENIVSDLLETIESELNDNSLNKELKKITNKLRTLLKKEENLVNLKLEEKISDSIYNEKYNELSLEKEYLAEEKVNVETTLKSEIDVKKRLTEFKQLLSSQKMLTEFDRTVFESIVEKIIVGGVNSDGEIDPAMLTIIFKTGETQNKDGKQFKSKRKNAKLEPDKLCPQNCDEDKKLYSQGTDNTHRSCEFIGKTQLDCPACSLIFGQAASKVHRTLELLNTHHVECVALLVKA

SEQ ID NO: 3636 - protein, 476 aa, synthetic construct
MDRNKVAIYVRVSTQGQVDDGYSLDEQVDLLTNYCKLKEWTLYDVYVDPGISGKNMHRPEIERLTRDAKRKLFDIVLIYDLKRLGRSQKENIVLVEDVFNPNGIRLVSFTENFDASTPVGKMVFGMLSAYAELDRANIAERMMMGKIGRAKAGKAMSWGMPPFAYNYNKETGDLELDEVKAPIVEMIYSEFLKGASVNKIVQKLNSMNYHGKNHDWKHHAVTVIIDNPVYCGMMKYMGQTYQAKHTPIIDKKTFELAQLERKKRLAKYHNAEWVPPFQRKYIGSKICYCGLCGAHLKSEKDKKNKLTGIRSISFFCPNTRSRGTGECTNPRFKQSVLEGYILNEVAKLQQNPEKLKDIKPAEDNELHNKIATYEKKIKQNTSKLSKLNDLYLNDLISLDDLKQQSKSLLNENEFMEEQIKLLSATTREDELRKKIDTFLAFPDILTADYDTQKQAVELVISRVEATKEGIDIFFNF

SEQ ID NO: 3637 - protein, 478 aa, synthetic construct
MITTNKVAIYVRVSTTSQAEEGYSIEEQLFSLRKYCEAMNWQVYHEYVDAGFSGGKLDRPEITQLIQDAKNKLFDTILVYKLDRLSRSVPDTLYLVRDVFGKRDIGFVSLQENIDTSSAMGNLFITLLSAIAEFEREQITERMEMGKLGRAKSGKTMAWRVTAFGYDYNKETGNLELDPVKAPLVKMVFDEYMQGTSIDNIAEKMNSLDYTGKERPWAHHGVASLLDNPVYYGMNRYKDKIYKGNHEPVITKELFDLVQKERERRRQGTPESHNTPPWQRKYFATKVCRCGLCGERMKLDRGKKRKKDGFTPMVYYCKNSRPYRSATCHNVLYQRDIVEDYIIREVAKIQNNPNILKRGEYRTKEYELERQRKRLNETIKRNTDKLSKLNNLYLNDLITLEDLKKQSDLLIKRKRYSEERLALTYQTTEDDEREYRLKSFLAFPDLLTADYETQRKAVEMIVDRVELTKDKYIIHYNF

SEQ ID NO: 3638 - protein, 627 aa, synthetic construct
MAGIKEEKKIYLVGIYCRLSKDDGTDNESASIATQKSILTDYVKKQGWHIAKTYVDDGYSGTNFQRPSFQNMIKDIESGLINCVITKDLSRLGRNYLDCGLYLEVFFPEHNVRYIAVNDGVDTLNKSAMDITPFRNILNEMYSADVSVKIKSAYRARFQQGKFMGTTAPYGYVKDPADHNHLLIDDKVAHVVREIFDLALAGNGIAKIRKHINKQHILRPAAYAVEQGATGYERYFEDNEENRYIWSENSVRGILRSPIYAGNLAGYKRIAANMKSKKRPSKLPEEWEVIPDTHEGIVTQEEFDTVQQLMTSRRREQNAGGFENIFSGVIKCADCGYAMRAASANRRKRPDIIDCVQYTCNNYGRYGNVMCTAHSIEARDLFNAVLADINRFADMAVNDEKAVRAIERRLTETDQSRAKSLEKEKKKLNKRLAELDRLFSSLYEDKVMERITERNFEMMSGKYQKEQLEIEARLKEVTETLNDSYEKSQGVRDFLSLIRNYQGLKELDATIINALIDKILVSEREKLADGTVRQEIKIYYKFIGFVGELHITPTKRWTALKPKNCTVCGVEYVPSSGISKYCPACAKRIQREKSNESKRRSRERNRRACIELSAKNDRLILYSEMDD

SEQ ID NO: 3639 - protein, 602 aa, synthetic construct
MKTNNVEIIKADSLVRRRGVKVERHLKRVAAYCRVSSDSEDQKNSYESQVRHYKDYISQRSDWELAGIYADEGISGTQVGKRQDFQRLINDCVNGEIDYIVTKAIARFARNTLDTLKYVRMLKDMQIGVYFEEENIDTLTMDGELLLTILSSVAQQEVENTSAHVKKGLKMKMQRGELIGFQGCLGYDYDVETKQLSINKKEAKIVRYIFERYLEGIGGKVIARELDELGYKSPRGLDHWNDTTVLGIIKNEKYKGDILMGKTFTVDPISKRRLSNFGEEDKYYIKDNHEPIISKEDFEKAQEIRLRRAGNKKTVANVNGKRERYSKMYAFSSMLECGFCGSILSRRSWHCRSDYRKVVWHCVTSIKKGKKFCKHSKGLEELAIEGAFMEAYRQLYHSNENLMTDLLETIESELNDNSLNKELKRITNKLRTLLKKEENLVNLRLEGKISDTIYNEKYNEISSEKEFLAEEKVNIETTLKSEIDVKKRLTEFKHLLSSQKMLTEFDRAVFESIVEKIIVGGVNSDGEIDPAMLTIIFKTGETQNKDGKQFKSKRKNAKLETDKLCPQNSDEDKKLYSQGTDYTVRHWYMVGRSVSFPSKILS

SEQ ID NO: 3640 - protein, 411 aa, synthetic construct
MRTVRRIQPIKSPCKPRFKVAAYARVSDSRLHHSLSTQISYYNRLIQAHPDWELVGIYYDEGISGKEQSNRQGFQKLIKDCEDGKIDRIITKSIARFGRNTVELLTTVRQLRLKNIGVTFEKENIDSLSSEGELMLTLLASVAQEESQNLSENIRWRIQKKFEKGIPHTPQDMYGYRWDGEQYQIEPNEAKVIRKVFKWYLEGDSVQRIVDKLNQEQVLTRLGNPFTVASIREFFKQEAYFGRLVLQKTYRESFSRNPKRNKGQRNKYIIENAHEPIVTKEYFDLVLHEKERRYQLMCQESHLNKGIFRDKIFCSDCGCLMIVKVDSKYVNKTLRYYCRTRNRFGASSCSCRTLGEKRLLASFKSKLGFVPDKEWVENNIKHIEYDFGQRIIWVIPVKGRKYPIEIREGRY

SEQ ID NO: 3641 - protein, 520 aa, synthetic construct
MKKVITIEATPSIIRSSSDDFSLKKRRVAGYARVSTDHEDQATSYESQMRYYSEYINGRDDWEFVKMYSDEGISGTNTKLRTGFKAMVEDALNGKIDLIITKSVSRFARNTVDSLTTVRQLKEVGVEIYFEKENIWTLDSKGELLITIMSSLAQEESRSISENVTWGLRKQFAEGKVHFPYTNVLGFKAGEDGAIIVDQDEAKTVRYIFQQALIGKSPYHIAKDLTEQGIPSPSGKSHWNATTIKRMLRNEKYKGDALLQKTYTIDFLTKKKNINRGELPQYYVENNHEAIVDRETFDAVQQVLDNKGRKSTTTIFSSKLVCGDCGHFFGSKVWHSTSKYRRVIYRCNEKYNGSSKCSTPHVTEEEVKQWFVLAVNQVIDNRLEVIDNLSVLLSIGSLEVIDEQIKVLETEAEVVSQLVANLVSENAIIRQDQDKYLKKYNQLTSKYEGIVQDIESLELQRMKKSKRNKELQDFIGTLEKLRKVLTDFDELLWESLVESVMINEDKGAKFKFKNGAVVAI

SEQ ID NO: 3642 - protein, 558 aa, synthetic construct
MKRKKAYIYTRVSTNMQVEGFSLDAQETRIHQYANAFDIEIVKTYQDAGKSGKTMLGRTEFMAMISDIEAEKDKVDYVLVFKLSRFGRNAADTLKSLAIMESHGVNLICVDDGLDSSKDSGKLVITILSAVAEMERENIISQAMEGRRQKARAGQWNGGFAPVGYSLVNGQLQVNQEEAESVKMIFDLFANSDMGTIAIAKHLANLDIKKPIRHNSTLPYFSSSGIARILDNPVYNGKIAFGRRESTRDKISGETKVIQSENYILTDGIHEAIIDDEIWNKVRKKREANAHKYKRENPSKGDSIYILSGLIKCPLCHAGLYGNKSIKRNKNKKDEYYKNYYYYACKHRKHVDGHKCTFNKQLKTGNLDHEVLSIISKLVSRPDFARKLQEKINIQVDTSRIDSEIEQYKSLFRQLNATKLNLIQQIDSLNFEDPHFQQKSIDLDMRLNTIYDKIADVEILIETSESKREVILKDKMTADNIYKILVNFASFMDVMEDIDKKRLCQMLIEKVEIYDDKNKAGRWVKAIHFKLPIIEEDLEISLDNSTPVEAVVKLSKKS

SEQ ID NO: 3643 - protein, 627 aa, synthetic construct
MAGIRTENKIYEVGIYCRLSKDDGTDNESASIATQKSILTDYVKRQGWHLAKTYVDDGYSGTNFQRPSFQNMIKDIENGLINCVITKDLSRLGRNYLDCGLYLEVFFPEHNVRYIAVNDGVDTLNKSAMDITPFRNILNEMYSADVSVKIKSAYRARFQQGKFMGTTAPYGYVKDPADHNHLLIDDKVAHVVREIFDLALAGNGIAKIRKHINKQHILRPAAYAVEQGATGYERYFEDNEENRYIWSENSVRGILRSPIYAGNLAGYKRIAANMKSKKRPSKLPEEWEVIPDTHEGIVTQEEFDTVQQLMTSRRREQNAGGFENIFSGVIKCADCGYAMRAASANRRKRPDIIDCVQYTCNNYGRYGNVMCTAHSIEARDLFNAVLADINRFADMAVNDEKAVRAIERRLTETDQSRAKSLEKEKKKLNKRLAELDRLFSSLYEDKVMERITERNFEMMSGKYQKEQLEIEARLKEVTETLNDSYEKSQGVRDFLSLIRNYQGLKELDATIINALIDKILVSEREKLADGTVRQEIKIYYKFIGFVGELHITPTKRWTALKPKNCTVCGVEYVPSSGISKYCPACAKRIQREKSNESKRRSRERNRRACIELSAKNDRLILSSEMVD

SEQ ID NO: 3644 - protein, 557 aa, synthetic construct
MKRKKAYIYTRVSTNMQVEGFSLDAQETRIHQYANAFDIEIVKTYQDAGKSGKTMLGRTEFMAMISDIEAEKDKVDYVLVFKLSRFGRNAADTLKSLAIMESHGVNLICVDDGLDSSKDSGKLVITILSAVAEMERENIISQAMEGRRQKARAGQWNGGFAPVGYSLVNGQLQVNQEEAESVKMIFDLFANSDMGTIAIAKHLANLDIKKPIRHNSTLPYFSSSGIARILDNPVYNGKIAFGRRESTRDKVSGETKVKQSENYILTDGIHEAIIDDETWKKVRKKREANAHKYKRENPSKGDSIYILSGLIKCPLCHAGLYGNKSIKRNKNKKDEYYKNYYYYACKHRKHVDGHKCTFNKQLKTGNLDHEVLSIISKLVSRPDFARKLQEKINIQVDTSRIDSEIEQYKSLFRQLNATKLNLIQQIDSLNFEDPHFQQKSIDLDMRLNTIYDKIADVEILIETSESKREVILKDKMTADNIYKILVNFASFMDVMEDIDKKRLCQMLIEKVEIYDDKNKAGRWVKAIHFKLPIIEEDLEISLDNSTPVEAVVKLSKK

SEQ ID NO: 3645 - protein, 627 aa, synthetic construct
MAGIRTENKIYEVGIYCRLSKDDGTDNESASIATQKSILTDYVKRQGWHLAKTYVDDGYSGTNFQRPSFQNMIKDIENGLINCVITKDLSRLGRNYLDCGLYLEVFFPEHNVRYIAVNDGVDTLNKSAMDITPFRNILNEMYSADVSVKIKSAYRARFQQGKFMGTTAPYGYVKDPADHNHLLIDDKVAHVVREIFDLALAGNGIAKIRKHINKQHILRPAAYAVEQGATGYERYFEDNEENRYIWSENSVRGILRSPIYAGNLAGYKRIAANMKSKKRPSKLPEEWEVIPDTHEGIVTQEEFDTVQQLMTSRRREQNAGGFENIFSGVIKCADCGYAMRAASANRRKRPDIIDCVQYTCNNYGRYGNVMCTAHSIEARDLFNAVLADINRFADMAVNDEKAVRAIERRLTETDQSRAKSLEKEKKKLNKRLAELDRLFSSLYEDKVMERITERNFEMMSGKYQKEQLEIEARLKEVTETLNDSYEKSQGVRDFLSLIRNYQGLKELDATIINALIDKILVSEREKLADGTVRQEIKIYYKFIGFVGELHITPTKRWTALKPKNCTVCGVEYVPSSGISKYCPACAKRIQREKSNESKRRSRERNRRACIELSAKNDRLILSSEMDD

SEQ ID NO: 3646 - protein, 315 aa, synthetic construct
MAGIRTENKIYEVGIYCRLSKDDGTDNESASIATQKSILTDYVKRQGWHLAKTYVDDGYSGTNFQRPSFQNMIKDIENGLINCVITKDLSRLGRNYLDCGLYLEVFFPEHNVRYIAVNDGVDTLNKSAMDITPFRNILNEMYSADVSVKIKSAYRARFQQGKFMGTTAPYGYVKDPADHNHLLIDDKVAHVVREIFDLALAGNGIAKIRKHINKQHILRPAAYAVEQGATGYERYFEDNEENRYIWSENSVRGILRSPIYAGNLAGYKRIAANMKSKKRPSKLPEEWEVIPDTHEGIVTQEETPRHHRLRTIHLQ

SEQ ID NO: 3647 - protein, 507 aa, synthetic construct
MKRVISYIRFSSEKQAKGDSLRRQSKMVTDWLKAHPEYYLDQDLSFRDLGVSGFTGKHLKGGLGDFLTAIEKGLVKAGDTLLIESLDRLSRQDVDQASELLRNILRSGVDVVTLSDGEHYTRESLRDPLALIKSILIMQRAHEESLRKAERIQAAWDAKKEAAKAGIKVSKRCPAWLKLNDDRKSFSVIPEKVETVKRCFQLRLEGKSIWEIVRTLNDEGHQSMSQYKPGSFGQSSVQDLLKNRSVIGYFTPKGREEIAGYFPPIIPETDFYKVQQLSYSRYGRKPASDKPLSVNLFKGVIRCSECGHALIITGFSDTRNGIYRCPLRNENRCSAKGLSRKQTDGTLLALLSRLDRFDSDTTNTIDTLKLHREHISSNIEKLVQLSLEIEDLSAITSKLRQLKGELSQVDADIEKETQRLKSIDVGCLSDCDLTTKAGRIEAQLIIRSAVKEVVLNTAKRRCKVTFHNGRAITLPITENPSEDVTEAIQSLSEVTERGLIDVDVVEI

SEQ ID NO: 3648 - protein, 576 aa, synthetic construct
MKKNFKMPGSGSETPIRVAIYVRVSTVYQIDKDSLPMMKQDLTSYCKYILNTDDFVIFEDAGYSGKNTDRPAYQKMMSQIRQGLFTHLLVWKIDRISRNLLDFANMYAELKDLGVTFVSKNEQFDTSTAIGEAMLKIILVFAELERNMTSERVTATMINRASNGVWNGGRIPYGYSYDKPTQVFSIDPEENKVYNFLVETYEDTQSIVHTSRKLNEAGYRSRNGNMWSPVAVWTILRNPWYKGVYRYNYYKIPGRKAIKDESEWVIVENHHPASIDTDRFDRIQATLDKNARYRNTPGRKTTQKNVHVFSGLVWCAECGSAFTASPGKLHVSGYRPSKYGCPNVRKTKTCHAKYTSDVVLGEFLLNYILNILNAQKQFAYIHSTDDLQKRLLHGSTFSNVDHVDPDGLASLLNMLEKCSGSDPVLLKRPRSKPKMDPELKRMMADQKKQQRALDRLNDLYLYSDDSISEREYLVRKQQITDRLQEINEAIGMMSQEPWMRTMNDEEFIRQASSFILTQKLADKQYIYYENLAESLDPEILKNFFVSILDSIILRDGRPETVVFRNGLSHTFTYKDS

SEQ ID NO: 3649 - protein, 468 aa, synthetic construct
MARQILHIPAQQRSVMVGGARMPQKKLRVAAYCRVSTAEEEQLNSFENQVAYYTAYINNNPEYELVDIYADEGISGTSTKRRDEFNRMIADCQAGKIDLVITKSISRFARNTQDCLNYSRKLKDMGIGIRFEKEGINTMDGSGELLFTILASLAQDESRSISENTTWGIRSLYKKGILHMNTNRFYGYDKDENGHLIINPEQAKIVKWVFESYMDGTSPDVLARTLNERQVPGCMGKPKWTVDTIMGILQNEKHMGDTILQKTFTADFMTKKMVKNEGQVAQYYISDDHEPIVSKELWQATQQEIRRRKEYMKVHGLRTMGRYTDAQPFTNRIFCGTCGELYWRRRMQRLGYVKYQWKCKQKCLGKESKGCINTDIWETDLHQTFVMAWNSLLEQRKTLLENWNAQLASEDPLVRFRANQFMELTKGNPLDEVDFTLVGKVLDHADILPTGLVRYTFLDGTTIEVTFP

SEQ ID NO: 3650 - protein, 559 aa, synthetic construct
MKTKLYSYIRFSSMRQSDGSSYERQIRMAREIAAKYDLELVNDYQDLGVSAFKGANSKTGALSRFLDAIGRSVPVGSWLFIENLDRLSRADIVSAQELFLSIIRRGITIVTGMDNKIYSLDTVTANPMDLMFSILLFIRGNEESQTKRNRTNSSALIKIKAHQENPQNPAVAIEEVGKNMWWTDTTSGYVLPHPVYFPVVQEIVELRKNGRSTAEILDHLNETYTPPPAVSNKKHSKWSRAMVERLFHTRALIGIKEISVDGVNYELKDYYPRVIDDPTFYHLKKNIGARAWNFGDKEEVKPIPLLSGIGLLKCDHCGCAMVKVKGTNKRSDQYRYTCDATRSRRLDCEHPNWSFRGDQLEKAVLQLLADKIWIAEDKANPVPALKVQVDEISRKIDNLIALSAMTGATKELADQITTLNSERETLYNQIKMAEEEMYSVDSQGWEKLAEFDLEDVYNEERLKVRFKIKQALKRIGCSRIDRNKNLFVLEYIDGKTQRVVIENSRGTRKGQIFVDLKTINDRQILESNGLVLHPCLDMLTDKNWKPEEEIPGPLQEFGI

SEQ ID NO: 3651 - protein, 464 aa, synthetic construct
MARSVTVIPARNRQRETGRKAVQEKKIRVAAYCRVSTDQEDQLHSFEAQVDYYTKYINDHENYEMAGIYADEGISGTNTKKREQFKRMIADCESGKIDLVITKSISRFARNTQDCLAYSRKLKNLGIGIIFEKENISTLDSTGELLFTILSSLAQDESRNISENCKWGIRTKFKNGEMHLNTFKFLGYDKDENGKLVINKEQAKTVRRIYRDFLIGINPAQIAKELTEEKVPGCNGQTKWYPSTIVGILKQEKHMGDALLQKTYTADFLTKRQVKNNGEIAQVYVKDSHKGIIDKQTWNAVQEEFERRERFMEAHGTDRYSYGADCMPFCEKVFCGECGSLFTRHSWRSRGIVQWQCKNHRKDGKVACMNAYIDNADLEKGFVKAFNRLVTDRDKHVERWQQMKSDGTPLEKIRAGQMMEAVGNEPLTRFVPEIAQLVLCEVTVLGAKKYEFFFQEGSRVKVSV

SEQ ID NO: 3652 - protein, 553 aa, synthetic construct
MEKSKRVVGYARVSTEAQDITRQIELITAYCSDRNYHLIKIIQEKISGARKDRKSLNELLDVDDAVADMIIVSELSRLSREDDILSVLSTINELLKQGVDILFLDKQDRIYKAGTILSLYDIITLSVEAKASADERYKIAGRMQTGLRSKLAEFSNMFAGGTVPFGYKVIHNPDYKLNQTPKNLLVVDAKEAEAVKYLFQQLIDGNTIRQTVRVYNKLYPYKLSYSGICRIIRNPKYKGEIYRRGKLYGQIPELQIITPEDFDKANKQMRENSLFQSNAPKYYNPLKGLLFCPCGCGLYMKPNHNSYLIYRCSSAYNDKQKCENYGVKCAYILSSVWTCVKETLHTEEYKRFNTQRANELQGINKQIRETITRKVNSVDELKTQSASLIAKIKKLNNDDLINELETDYNVLCKQIKQTEQEISELNGQIAENDAEIKRNVEQKDFSKMEQSALYKEKLQKAVYHSLSAMRGILEIVFKNGMTRYVLIKKHRNGGTYLLPDTFKGDMERKQIIVPSLRTDKDNPYSAQPMNLRYTFDEFFKAMPVEEYEIPITE

SEQ ID NO: 3653 - protein, 507 aa, synthetic construct
MKRVISYIRFSSERQAKGDSLRRQSKMVNDWLKAHPEYYLDQDLSFRDLGVSGFTGKHLKGGLGDFLTAIEKGLVKAGDTLLIESLDRLSRQAVDRASELLRNILRSGVDVVTLSDGEHYTKESLKDPLSLIKSILIMQRAHEESLRKAERIQAAWDAKKEAAKAGIKISRRCPAWLKLNDDRKSFSVIPEKVETVKRCFQLRLEGKSIWEIVRTLNDEGHQTLNQYKAGKFGQTSVQDLLKNRSVIGYFTPKGCCEIAGYYPSIIPESDFYKVQQLSYARGGRKPASDKPLSVNLFKGVIRCSECGHALIITGFSDTRNGIYRCPLRNENRCNAKGLSRKQTDGTLLALLSRIDRFDSDMTNTIDTLKLHREHISSNIEKLVQLSLEIEDLSAITSKLKQLKGELSQVDADIEKETQRLKSIDVGCLSDCDLTTKAGRIEAQLIIKSAVKEVVLNTAKRRCKVTFHNGKVIDLPITEDPSEDVTEAIQSLSEVTERGLIDVDEVII

SEQ ID NO: 3654 - protein, 464 aa, synthetic construct
MKRAALYIRVSTMEQAKEGYSIPAQTDKLKAFAKAKDMAVTKVYTDPGFSGAKMERPALQEMISDIQNKKIDVVLVYKLDRLSRSQKNTLYLIEDVFLKNNVDFISMQESFDTSTPFGRATIGMLSVFAQLERDTITERMHMGRTERAKQGYYHGSGIVPLGYDYVDGELIINDYEAQIIQEIYDLYVNQGKGQQYITKRMVAKYPDKVKTLTIVKYALTNPLYIGKISWDGKVYDGHHIPIIDKSMYDKAQEIIARKAQKGGEQHGNQLGLLLGITYCGKCGAKVFRYVSGGKKYRYNYYMCRSVKKMLPSLVKDWNCKQPSLRQEVVEKKVIDSLKSLDFKKIERELKQVENKTKSKITTINNQISKKHNEKQKILDLYQYGTFDVTMLNERMKKIDNEINALTANIANLEGTKSESLINKLETLKTFNWETETTENKILIIKEFVERIELFDDEVIIKYKF

SEQ ID NO: 3655 - protein, 508 aa, synthetic construct
MKKAIAYMRFSSPGQMSGDSLNRQRRLIAEWLKVNSDYYLDTITYEDLGLSAFKGKHAQSGAFSEFLDAIEHGYILPGTTLLVESLDRLSREKVGEAIERLKLILNHGIDVITLCDNTVYNIDSLNDPYSLIKAILIAQRANEESEIKSSRVKLSWKKKRQDALESGTIMTASCPRWLSLDDKRTAFIPDPDRVKTIELIFKLRMERRSLNAIAKYLNDHAVKNFSGKESAWGPSVIEKLLANKALIGICVPSYRARGKGISEIAGYYPRVISDDLFYAVQEIRLAPFGISNSSKNPMLINLLRTVMKCEACGNTMIVHAVSGSLHGYYVCPMRRLHRCDRPSIKRDLVDYNIINELLFNCSKIQPVENKKDANETLELKIIELQMKINNLIAALSVAPEVTAIAEKIRVLDKELRRASVSLKTLKSKTVSSLGDFHAIDLTSKNGRELCRTLAYKTFEKIIINTDNKTCDIYFMNGIVFKHYPLMKTISAQQAISTLKYMVDGEVYF

SEQ ID NO: 3656 - protein, 485 aa, synthetic construct
MSKKVAIYTRVSTTNQAEEGYSIDEQIDKLKMYCEAMDWKVSEIYTDAGFSGSKLTRPAMEKMITDIGLKKFDTVIVYKLDRLSRSVRDTLYLVKDVFTKNEIDFISLSESIDTSSAMGSLFLTILSAINEFERENIKERMTMGKIGRAKSGKSMMWAKTAFGYSHNQETGILEINPLEASIVKQIFNEYLKGTSITKLRDKLNEDGHIAKELPWSYRTIRQTLDNPVYCGYIKYKNNTFEGLHKPIISHETYLSVQKELEARQQQTYEKNNNPRPFQAKYLLSGIARCGYCGAPLRIVLGHRRKDGSRTMKYQCVNRFPRKTKGVTTYNDNKKCDSGAYDMQWIEDIVLKTLNGFQKSDNKLRKILNIKEESKVDTSGFQKQLKSINNKIQKNSDLYLNDFITMDDLKKRTEMLQGEKKLIQARINEVDKPSTSEIFDLVKSELGETPISKISYEDKKKIVNNLISKVDVTADNIDIIFKFQLA

SEQ ID NO: 3657 - protein, 572 aa, synthetic construct
MRYVAYLRVSSHNQVETGDSIDGQRNKIINWAKLGNHHIVAWYVDEAKSAYQGPRAEFSRMLDDLEQGLILADGVIVYSLSRFSRNLLVQLQATKTLEKLGISLVSAIESFPENPEDQYVMVTMLGVMNEHQSRQNGKVVSDRLMDTARKGFFTGGIPPYGYKSIEVAGDTSNIRRKLEIVQEEADVVRHIFELAEKGNYGKGIGIKNILNILNGQGLTYRGKRWSKSTLSRVLNNPVYYGERLFGKKSKKDTVVSPAPAILSKEQFDRTRESILARGVNMPNSKSVRSSSLLTGILRCAVCGGSMVVTAGKSGKYKYYQCSLQVQRDTKLCSSKRISKPKLEKEVREKLLPQVFSNEHITNVYSQARDLLKEKSAASRDKILHTTNAINRAKVQAKTLVDLLASGELQPNATVNSHLSELNSTILNLEATLKQQTTLSRLPVKNVGEKQLTNFVRCISEHIRSSTDEQLKQLLLSTFKEIKVQPAKKLFATGANINILRIATNAKTGTDFSVPVFGTIWRRDRDLNPRYAINVCRFSRPVLSTTQPSLRCGTYTRYWHEFCKGLICSYLFK

SEQ ID NO: 3658 - protein, 537 aa, synthetic construct
MLVLWMRLYSYIRFSTEKQKDGDSLSRQTEAAKRYAEQHNYDYQDSSFKDLGVSGWSKKERNGLESMLTAVERGSVAKGDMIFIENVDRLTRKGFQDANDLICQIVRMGVHMRFESEGITFTNEKDLNASMNVIRVSIAAEQANQESEKKSERIRASKATRFKEALKAGKRVSNGGYPTWLNVSKDIEPTFKPYAKETIQTIAKMYLNGRSIGDISKHLNNPENGDYWRQGEWNVGKVSRLLDQPALYGVHKSRTWKADGTRFESYARHNEGGQEIQGAYPVVISKTDYDLIQAKREHNKTNLPYMRGTNESTRSRGKLIFPESTCMFCGGNMRYKSSQDRTKSEFICANKKGAGVCDSASMNYMLAEQMLLGLVFQENNLAPLFSDDQPNQELKNKIEALEIERATTLEAIESRKAQGKRYGALSDEVGDIEDEIQALKKELQALETGSVSVYEEMRTWSSVWDADAEERNKVRIFLESIVEAIEITSIKRSTKTMAVQININGNQRRLIATSSGNKKQGKHTINYIKGLFEGVEV

SEQ ID NO: 3659 - protein, 558 aa, synthetic construct
MTKLYSYIRFSSMRQSDGSSYERQIRMAKEIADRYNLELVNDYQDLGVSAFKGANSKTGALSRFLDEIGRSIPVGSWLFIENLDRLSRQDIISAQELFLSIIRRGITIVTGMDNKIYSIETVTANPMDLMFSILLFIRGNEESQTKRNRTNSSALLKIKAHQQNPQSPAVAIEEIGKNMWWTDTTSGRVLPHPVYFPVLQKIVQLRQEGHSAGAILDYLNEHHEPPAPTSNKKHGKWSRAMVSRLFATKALIGVKTVNVDGVEYELRDYYPRVLSDSEFYFLRKNIIKKAWDYNHDKEKVIPLLSGIGVLRCVHCGATMVKQTAANGKREQYRYCCDGRKSGRTDCPYPNWGFRAVTLEGAVLQLLADKIWIAEDKTNPIPEIQVKIDEISRKIDNLINLSAMMGATKELANQITDLNSQREALHEEIRLFEREMYSVDSQGWDKLAQFDLSDVQNEERLKVRMKIKGALHEIECSRIDSKKNLFVLVYLDGLRQRLVIENNRGLKKGQIFVDLKTINDRQILESAGMVLHPCIEMIIDADWKAPEEIPGLLSEEFGI

SEQ ID NO: 3660 - protein, 571 aa, synthetic construct
MGRLPKAYSYIRFSTPKQAQGDSYRRQIQQAIDYCAKHNLELDEKAIEDFGVSGFRGSNWTDGALGRFIEAVKSGAIAKGSYLLVESMDRLSRQTVLKAFSQFIEILNAGIAVVTLSDGEIFRATDDGNNFDFAKLIISIVYMARANDESEMKSRRSRAAWSNGRKEARESNKVMTNSRLPTWLTREGERIVPIPERAAIVNEMFEMAKSGCGYEQIAKAFLEKGYKTFGKEADWRPAGIQAVIKSQAVIGVFQPHVIENGERVPDGEPILGYYPTIVSPALFEEVQHLIGTRSKHSGSYRKGTYSNLFSGVLRCQCGELLRYHNKGKAGNPRNYLVCPKQNITGCNLPNMLYDKVEPQLLQAVSLLSAVMGQRGAASEKTLALKDELAILQRKLELEAKKRNKAAQSMLELDDDAVFRELFTQCKANCQALEVQIHQLEDDITGRELSEKTLGKMIVPDDLNNTEQRQRFNSQLKAAVKEISIISTGDSVAAVFKDLDGQFMLEQAFKPKLAGSSIRDISGEELLRTTAEAPYIDADWVKAESNEFESIHHKSDSEFDDDFEDLSSEASK

SEQ ID NO: 3661 - protein, 567 aa, synthetic construct
MKEDNRIVALYVRVSTGYQVDKDSLPFQKKELKAYCEHVLHIDKNRIEIFEDAGKSGKNTKRPAFERMMDKVKAGQVSHVVVYKIDRISRNLIDFSIMYNEFKYHRVAFISLNEQFDTSSAMGEAMLKIVLVFAEMERKLTSERVTDVMIGRAQSGLWNGARVPYGWDWDDEKKCPVHSKVEAKYVKQMYADYLNGGSSVSIAKSYNANKIPTKRGGEWTSKTIADVIRNPMNKGDYRYNYRESARGRKKPQEEVIYIKGVFEPLVSINDWEKANKLMDGRGFKMNSSGQVIMNKRCNVFTGLIFCGKCGERYNVRSKDCRQGSGFRPSSYACGKKSRKGTCDNQNISDVIIAPIMINYIAAMVDVSKHKKQIKTTKELEQVILKRINFSDVAGISEDSLQATLDLLYGKTGTQLWSAVTVSKEQDSKNKQRLVELQEKLKKTDRAIERLKKAFLFDDDGLDEKEFLEMKSRLEIDRVKIENEIKGMEAESISVNVNQVEFIKTASQYLLMHELNKDENINYKELAITDEDSIKTLFNSVLDHITVIDKHITEIVFKNGLTHKLLYK

SEQ ID NO: 3662 - protein, 576 aa, synthetic construct
MKKNFKMPGSGSETPIRVAIYVRVSTVYQIDKDSLPMMKQDLTSYCKYILNTDDFVIFEDAGYSGKNTDRPAYQKMMSQIRQGLFTHLLVWKIDRISRNLLDFANMYAELKDLGVTFVSKNEQFDTSTAIGEAMLKIILVFAELERNMTSERVTATMINRASNGVWNGGRIPFGYSYDKPTQVFSIDPEENKIYNFMVETYEDTQSIVHTSRRLNEAGYRSRNGNMWSPVAVWTILRNPWYKGVYRYNYYKIPGRKAIKDESEWVIVENHHPASIDPDRFDRIQATLDKNARYRNTPGRKTAQKNVHVFSGLVWCAECGSAFTASPGKLHVSGYRPSKYGCPNVRKTKTCHAKYTSDVVLGEFLLNYILNILNAQKQFAYIHSTDDLQKRLLHGSTFSNVDHVDPDGLASLLNMLEKCSGSDPVLLKRPRSKPKMDPELKRMMADQKKQQRALDRLNDLYLYSDDSISEREYLVRKQQITDRLQEINEAIGMMSQEPWMRTMNDEEFIRQASSFILTQKLADKQYIYYESLAESLDPEILKNFFVSILDSIILRDGRPETVVFRNGLSHTFTYKDS

SEQ ID NO: 3663 - protein, 515 aa, synthetic construct
MKTALYLRKSRADLEAEARGEGETLAKHRSTLLKIAKEMNLNVLSVREEIVSGESLVKRPEMLALLEEIEDKKYDVVLCMDMDRLGRGGMKEQGIILETFKRSNTKIMTPRKTYDLNDEWDEEYSEFEAFMARKELKIITRRMQRGRIASVEAGNYLGTHAPYGYDIHRLNKRERTLTINSEEASVVRMIFDWYANEDMGANAIRSKLNDLGYKSKLGNEWNPYSILDILKNNVYIGKVTWQKRKEVKQPDAVKRSCARQDKSDWIIADGKHEPIIPESLFEQVQEKLNSRYHVPYNTNGIKNPLAGIIKCSKCGYSMVQRYPKNRKETMDCKHRGCENKSSYTELIEKRLLEALKEWYINYKADFEKHKQDDKLKETQVIQMNEAALRKLEKELMDVQKQKNNLHDLLERSVYTVDMFLERSNVVSDRITEITSTMENLKKEIKTEIKKEKVKKDTIPQVEHVLDLYFKTDDPKKKNSLLKSVLEKAVYKKEKWQRLDDFELVLYPKLPQDGDI

SEQ ID NO: 3664 - protein, 487 aa, synthetic construct
MKYAVYVRVSTDKDEQVSSIQNQIEICRYWIEKNGFEWDENSIYKDEAVSGTAWLERRAMQLILGKARKKELDTVVFKSIHRLGRDLRDALEIKEILLGHGVRLVTIEEGYDSYYEGKNDLKFEMYAMFASQLPKTLSVSISAALAAKVRRGEYTGGTVPYGYKIVDKKYVINQEEAEIVREMYELYDNGLGYLRISNALNDVGKYKRSGKLWTYSAVKLIITNPMYKGDYVMGRSTEVKVDGRKKRIQEPREKWVVFENHHPAIIERPLWDKINNPKINKKIKRRVAVTNELRGIARCIHCGSPFVLHTYKYKNKEGEELNYGYLTCGTYKLTGGRGCVKHSGLRYERLRSLVLRKLKEKERDLEKVFKLNDKDKHQEKQKKLRKEKKELEIKRERLLDLYLDGGSIDKETFTKRDTNFAKNIKEKELEILKLDDVKALIVEQQKVKDAFKLLEDSENLYPVFKKLIAGIDISQNGAVDIRYRFEE

SEQ ID NO: 3665 - protein, 547 aa, synthetic construct
MKLLVTYIRWSTKEQDSGDSLRRQTNLIDAFYSKHKEEYYLLPAHRYVDKGKSGFHQQHKNQGSDFRRMFENVMSGAIPEGSLIVVENFDRFSRADIDTAIDDVRQILRKGVSILTLGDGELYDKSALTDPVKLIKHIIIAERAHQESLVKQKRIAQVWNHKTQLARELKKPMGKQAPGWLELSEDGSHYIVDEDKASLVNIIYDKRLSGMSMFAICKWLNEQGYPTINQRKVRISKTKKPDGNWSALSVKHILTSRSVLGYLPAKISSEDRKTVLREEIEGFYPQIVTDSKFYAVQQLLEETGKGKTSSGEHWLYVNILKGLIRCKCGLVMTPTGIRKPVYQGTYRCNGNKESRCSYGTVSRKLLDTQLCSRLFSKLSQLHDEATDTAKLDELQRRLNTVDSELEKLTETLIQLPNITQIQEALRVKQEEKDELIVQLSREKARVKSVSSLDLSGLDMESVEGRTEAQIIIKRLVKEIVVSGNEKLVDIYLHNGNMIRGFPLDGKDDHTLTLEEATDEMQSLDDMLIFGEPVTRIYPAGDMEEVDA

SEQ ID NO: 3666 - protein, 573 aa, synthetic construct
MKVAIYSRKSKYTGKGDSIGNQIQMCKDYIENLYKNKKIEYSIYEDEGFSGKNTNRPEFQKLLNDIKKEKFNVLICYRLDRISRNVADFSSTLDELQVYGVDFVSIREQFDTTSPMGRAMIYIASVFAQLERETIAERVRDNMIELAKNGQWLGGSPPLGYSRKRETCYDENGNEKAISFLVQEPDEVKLVKLLYDTYLKLGSIHQTERYLMNNGICAPSGRLFATSTMHKILKNPLYAKSSDEILKYLEDDGINVFGSPDGIHGILEYNRTSVIIRDGKKTNPFKDKSEWIAAVSKRCEGFIDSDTWLKAQKQLKTNSALSPNLGKTNNALLTSKLKCKCCGSSMGVALGRRLNETGLCKVYYRCNLKRRSSGHLCNSKNLIGDKVDECVLDSLVEMAKNKQAFLDRILKSKKENKKLKEDKLKKSTLEKQIANKTKQLNGLLDKLSVADDLLDIFMNKIRSLKSEISQLEENLKSIGENIENNSSELYDIEFINAVLDKCVNIKNESVESKRRIINFLIEEIIYDSETELLEIYPIGSGGSKKKRYNTFIKEITSDPLLLHFYSRTSWTAY

SEQ ID NO: 3667 - protein, 556 aa, synthetic construct
MAMMNEMEYRTIGSALAGGYRAAVYCRLSKDDDLQGESASIANQRDMLEKYCEKQGWEVVAVYQDDGFTGLNMERPDLQRMLRAIERRQINLVITKDLSRLGRNYLQTGHLIEDFFPRNGVRYIAMNDGIDTLRDNNDIAPFKNILNEMYSKDISKKVHSSYLLKAQKGQFTGCLAPFGYRKDPEDKNHLLIDEETAPIVRLIFGYALNGHGPNYIRRRLEEEKIPCPTWWNRERGLRNTRTKWEKKDPENGRYMWDFSVIKDLLMNPVYTGAIASQKKDYRFKIGTIGEKKPEDWIVVEGQHEPLIDSMSFDIVQNKLKSRQRPGQTNEISLFAGLLKCGECGKSLTVRYTNAKHPQQIYSCKTYNAFGKNHCTQHRIDYDTLYSHVLRKIRECARAALMDGEAVADRLTNTCEAEQREQREAMERSLTRDEERIEVLDKMVMRLYEDMIAGRISEQNFNTMLEKTQTEQTELKTKVSEGRKRLSDEVQLANDAKQWVEAIQEYANITELDAATLNRLIKEIVVHEHIDEDKTRHISIEIHFNLKPIPEVEQVTA

SEQ ID NO: 3668 - protein, 549 aa, synthetic construct
MSRKKQVYEKITALYCRISLDDGGDNESMSISNQKLMLRDFAEKHGMFQYEYYVDDGYTGRNFNRPSFQRMIADIEAGKVGCVVTKDLSRLGRNYIEAGSYIEIFFPKHNVRYIAVTDGVDSLTRQEMDITPFKNILNDMYSRDISKKVLAGITTRSRQGKFCGGTPPFGLMRDPEDKGHLILDPETAPIIRKIYDYALDGLGCMRISKRLMEEKIPITRVKANTEFDANYYSWGGARISHILRNPFYKGAHLVFRTHQKGIRSNTYDIIPRDQWEVIEGCHEAIVTPEEWQQVQELIDRRPTIQGNSCPFYNLFHGLVYCATCGKSMQVRYEKVGRTGKNRFTGEMREPIDKAYYICQTYNRMGCKVCSSHKIEARDLYNLVLKDIQELAAQAMKDADAFYQRLSSRMERRYLVDASQTEKERKRLEARNQEIDGMFLSLYTDKAKGVLTEQRFMKLTAALEQEQEANQKRLHDLALMQSRADAQESEVRTFIKEIRRYAAIEELDEAVLNRLISKILIGEVKKVDGQKVQEVKIVYNFVGEIPEIAA

SEQ ID NO: 3669 - protein, 561 aa, synthetic construct
MKNKKIKCDIYTRVSTTMQVDGYSLDAQKEKLKRYAEFQNMEIVNEYSDEGKSGKSVEGRPEFQRMLDNIENGTDEVQFVLVFKLSRFGRNAADVLNSLQRMQDFGVNLICVEDGIDSSKDSGKLMISVLSAVAEIERENILVQTMEGRKQKAREGKWNGGFAPYGYELVNGELQIAEDEAEIIRLIYDKFIHTNMGISAIAAWLNQHGYKKKKRQNNTLDAFAASFIKGVLDNPVYCGKLAYGRRKNEKVSGTRNEYRIVKQENYMLHDGIHKGIVSETDWELAHQKREKTGVKYEKTHSLDHEHILSGILRCPLCGSGMYGNVNRKKKKDGTLYKDYFYYACKHRRLVDGHKCGYRKQWSEEKINNAVEEVIRKLVKNPKFEEAILNKIGSRIDTEEIEKEIEGLEKQHRQLTGAKARLGQQMDNLDIMDKFYEKKYQDMETRLYRLYDEIEGVENSIEEVKNRLLNIRQQKISEENVYQFLLYFDKLYDKFTDLEKKEFLNSFVEQVDIYEQEQPDGRFLKHIKFRFPVYFGDRETQELCWDNESTVESICLLERVSN

SEQ ID NO: 3670 - protein, 648 aa, synthetic construct
MNRYGKRCVLYPRVSTEMQVDGYSLEGQKNMLTRFADREEMIVVDTYEDAGKSGKSIEGRPAFQKMLRDIEDGLDIDYILVYKLSRFGRNAADILNSLELVQSYGVNLICIEEGIDSSQTSGKLLISVLSAVAEIERENIIEQTMNGRREKARQGGWNGGFAPYGYTLEDNKLMIEETEAVAIRKIFELYTSSEIGLGGIANQLNLQGIRKIPRQNGTLEDWTGHFIKLILDNPVYCGKIAYGRRTKEKVKGTKNDYQMKRNDDYILTEGQHKGIVSEEVWEKAHAKRLRTGVKQPSKIGRDRVHLLSGLLKCPVCGSPMYTNKHAWTNKDGTYKEIYYYVCSRNRMVRGKHCEYKAMLKKTDIEPMVIEAIREIVRNEEYAQAIKKRIGVQIDTKAVDKELEGYQAKLKEVDLNKTRLEREIDSLPADAKYRERKLHDMTLRLDSLYDVIVELEEKIEDARLRRDAIKQQAITLKNIYKIMVNFDCVYNIINDEEKRNVVTALIKEIEIYRNDESEYPLKRIGLNFPVFKDGGEVTELLWDKGNTVETVVLLSQQKPDDTIEIDLDLDELDATSAELKATYQEIKDYVLKEFGLKVSSLYISQVKRKCGIEVGENYNLPKSENARVPQCPKEKEDAIKAALKYFAMI

SEQ ID NO: 3671 - protein, 558 aa, synthetic construct
MLQQSNSTITSIYPMGNQTEELTALYCRLSQDDKQEGDSNSIINQKKILKRYAIEHGYQPYVFFVDDGFSGTNFNRPDFQRMIAEVEAGRIKRVIVKDMSRLGRDYLQVGMYTEIMFPNMDVHFIAVNDGVDSHVGDNEFTPFRNIINEWYAKDTSKKIRAVKRSKGMAGEHIGSHAPYGYMKNPDNKKEWLIDEEAAEVVREIFRLCVNGYGPTRIANILTERKILCPTYYALEHGEKPRTVLPPDKYLWSATVVSHILERMDYLGHTVNFKTHVKSYKNRKKIDNSPEQWKIFENTHEAIIDKETFEIVQKIRSGKRRPTKMGDMPMFSGLLYCADCGSKMTFHRQMAQSAEKHNFVCSNYRHNSKSCTMHYIRNVVVEQIVLENLKEVIRYVSDYEDEFVQMVMDTDMRQRNKELLQKKKRLTEIHSRIQELDKIFQRIYEDNISGKLSDERFMKLSRGYEEEQHTLQEEQTSLEKELQKEEKQSVDVKQFLSVVRKYTNLTELTPEIVHEFIDKIIVHAPDKSSGKRLQEIEIIYNHIGVFDHSKVTLWKGKAV

SEQ ID NO: 3672 - protein, 510 aa, synthetic construct
MSYFIYARKSRKDAELEALGIDVLERHITTLLELAKTLSLPIGAIYREVVSGDSIDTRPVMTQVLSEVEACMWDGALVMDVDRLARGDTIDQGRVQRAFFYSNTRIVTPSKTYDPANEYDNEYFEFSLFMSRREYATIKRRMQRGRERSSSDGYYVGNVAPYGWERVIAPDGKHYSLAPHQTEAPVLDLMYDLCGNKQYGYQKACTYMSNMGILARSGKPFAPSTLKGIISNPANIGKVRWGYRKTVRAVKDGRVVKSRPNATDYILADAAWAPRINIDLFERANQPKGCFSAPIRSDRPIQNLFAGLVRCSQCGRLMVRKKAQTKTPYDFLICQYAECSTVGIRIDELEEALLGWLKDYIAKYEFSDTHEEDTAAIAAKELIVTNFETEHQTLLKQRESLFDFLEQGIYTKEIFIERSNALEQRIRDCMNNITAAREDLYVTIARQANRKNFVPKCKNLLSEWGSLTVPEKNSALKQLIDRIVLTKTKRNKKNQKNSEFTIDVYPKVPK

SEQ ID NO: 3673 - protein, 584 aa, synthetic construct
MAYRKITDIRDTIGMRAVFYARVSTAEEEQLNAIELQIEENRGCIKDHGWKLVGEYIDRSKSGTMVKGRDDYQRLYEDLYEDLFDIVVIKDQERLQRNTLDWYLFINRVVQTGKLLFMYMDGKFYSPDDALITGVRAIIAEEFSRNLSKKLHNYHDHRIEKARQGQEIALQGSGNVYGWDKKDGKYYINPEQAKVRRLMCEGIMARKGSTLIAKELNEAGYRNTVGKPWKPMDIPKFVYDCKNVGTMIINKERHDFESKQTIKLPKEEWVYVENALPPIVTQEEWDLICKIHEERVIATGSDKRGKKTSGYSFSGKLVCGICGAPYWRKQRVSKDEYWVCSTKQTKGRKTRKRDSTMGKAGEINPLGCDNENISYNSLMEIMGVVSERLQANTDTIKQDMINWLTKLRKQLLEANGGHTEADLQRELSRKSKLLDAYLDGILNKQEYQKKAEELDERIIQLKAETEKNKANSGDIAEIDKVLANIDEEVARYVDGNEKLKVEYLLEHLEQVQIFPDKVIVIVPILSDGIVVEKTQYVSREKRCRQDYLYENDRRSGKADKRRNIYVWIHRKGFVEGTLKSGLPD

SEQ ID NO: 3674 - protein, 627 aa, synthetic construct
MTEKQGFMTALYERLSRDDELNGESNSISNQKKLLEQYAKEHGFTNLVHFTDDGISGTRFDRPGFLAMMKEVESGKVGTILIKDMSRMGRDYLKVGQYMELLRQKNVRLIAVNENVDSFREDDDFTPFRNIMNEWYARDTSKKIKSTFKAKGKSGKHVASTTPYGYLKDKDDPNVWIVDEEAAVVVRRIFHMTMDGYGPYQIARALKEDKVEIPAVHMAKKDAGLWKGRVEEIKDPYGWGSSTVAGILKKREYLGHTVNFKTRKHFKDKKSHYVSEDNWTVFENTQEAIIDQETFDNVQRIRSNVRRYPDGWGEAHPLTGLMYCADCGSKMYVHRVNNGKRVPQYTCSAYSKVPVGTLCQTQHRINADVVMELIKELLKAVAEYSQLNREEFLETVKKAQTSQQSSEITRLKSRLAEAKKRVQELEKLICRIYEDNILGKLPDERYAILDGQYSKEQKELSAEIADMEAELSGYEEGRRSAEKFIALVDKYQNFEELTTYMLNEFVEKIVVHERDRKGSIETTQEVEIYFNFIGKYLPPHFGEVEMTPEEIEEMKKREARKDRLHQNYLKRKANGKQQEYYERTKAKKKAEMDAKKEEIRQEDIAKGVFVPVSLLPPAEPKKGVASA

SEQ ID NO: 3675 - protein, 509 aa, synthetic construct
MYVIYLRKSRKDSDLEALGIDVLKRHEETLLELARARSLPIGAIYREVVSGDSIDARPEMVRLLSEVESGIWEGVLVMEVERLARGDTIDQGRVQRAFFYSNTLIVTPGKTYNPAIENDNEYFEFSLFMSRREYATIKRRMQAGRIRSVKDGYYVGNIAPYGWRRVKADDCKHFTLVPDEKENPVLKLMYDFMGNKKYGFQKTCSALTGMGIVSRSGKPFNPATVKTIISNPVNIGMLRWNYRKSQKAIVNGKIATSRPKADDYILAKGKHPGCISEDLYYRANSVNSSMTAPVKRSCRIQNPFAGIVRCSCCGRVMVRKKMSAKQPRDYLICQYAGCATVAIELDELENAVLEWIRNYIADYKVNNFESADDSEQESLRSILVNLEKEKETTLKQRGSLFDLLEQGIYTKEIFFERSTALEDKIKDFDKKIESVNADIVRLDLSKKNRSTFVPKCQELLNAWDTFDAADKNTALKNVIERIDFTKTEKNARGQRHSSFSIDVFPRISR

SEQ ID NO: 3676 - protein, 522 aa, synthetic construct
MGNVMLIPARRQVGSNARKQEEEKPKLRVAAYCRVSTDNDEQATSYEAQVEHYTEYIQKNSDWEFAGIYADDGISGTNTKKREEFNRMIDDCKAGNIDMIITKSISRFARNTLDCLKYIRQLKDMNIPVLFEKESINTMDAKGEVLITIMASLAQQESQSLSQNVKMGLQYRYQQGKVQINHNRFLGYTKDADGNLVIDPEQAETVKRIYREYLEGLSMDKIAAGLERDGILTGAGGKKWHTSTINKILRNEKYIDDALLQKTYTTDFLNKTRVKNNGLVPQSYVEGDHEAIIPKDIYLQVQEELVRRRVVKTSANGKKRSYSCNHCFSQIVICGECGEMFRRLHWNNRGVKSIVWRCISRLESTGLECHARTINDLVLQDAVVKAINQMLGDKSNYQAQLQLNIAAVIRASQATTIDSIDENLMALQQELIQKANSKEDYDEIADEIFRLRELRQKTTVDTAARDEQIKRINDLQGYISQQTALLTEFDEALVRRWIKQITIWDDRITVELKSGVSINVDA

SEQ ID NO: 3677 - protein, 1017 aa, synthetic construct
MKKKSGKTLMQKWKNKIGGKLSALDKKKLVLTNIPYALAAFYADRAFFLYRNSPGEDMGNKLLYAMEHADRIFAGFMLSNNWKDLLAGIVVAVVLKVLVWQKQADAKKLRKGIEYGSARWGTVEDIKPYMSEDPWMNIPLTATEALTMESRPKQPKYARNKNIVVIGGSGSGKTRFFVKPSVMQMNCSMVITDPKGTLIEECGKMLAKGPPKKDKNGNIMKDKSGKVVHEPYVIKVLNTINFSKSLHYNPFAYIRSEKDILKLVTTIIVNTKGEGEKASEDFWVKAEKLLYTALIAFIWYEGDEEEKNLNTLLDLLNESETREEDETYQNPVDMMFQELEERDPQHFAIRQYKKYKMAAGVVCSKRLLNQAVGKSLRTHNLKPKKGAQVMRKNEKITALYERLSRDDFGKDDDQQRESNSISNQKAMLEEFAARQGFTNIVHFTDDGISGTCFDRPGFLAMMKEVEAGNVEYLCIKDMSRMGRDYLKVGQIMEILRQRGVRLIAINDGVDSARGDDDFTPFRNIMNEYYARDTSRKIRSTFQSKGKSGKHLTGTVIYGYLWNEARDQWLVDPEAAEVVKRIFAMTIEGYGPYQIASKLKSEKVLIPSAYLAQHGEGVNKNKTFKDVYGWGSSTICNILEKREYLGHTINFKTRKHFKDKKSHYVPEDEWTIFENTHEAIIDQQTFDLVQKIRGNVRRYPDGWGEAAPLTGLLYCADCGGKMYVHRTNNGKRISQYTCSQYTKVPCGTLCKTQHRINEDVVLSLVSEMLKSIAEYAKHDRAEFVRVVQEAQSSQQTTEVRKQRTRLATAKQRVSELEVLLCKIYEDNILGKLSDSRYATLDAQYEKEQTELTAEISVLEKAVKSYEKHEKDADRFIALIDKYENFDKLTIAMLNEFIEKILVHERDRKGSIQTTQEVEIYFNFVGRFVPPAFGEVELTPEELEEIRKREERKDRLHQNYLKRKASGAQKRYEDKIKGRKKAEIEAKKAAIRAEDIAKGVFVPVSSLPQREPMKGVQTA

SEQ ID NO: 3678 - protein, 470 aa, synthetic construct
MRNIRIGKNTSNNKKTGLYIRVSTNVQFEEGYSVGAQTEKLEKYCNYQEIDNYDLYIDGGYSGSNLNRPEMKRLIKEIQEGKVESVVVVKLDRLSRSQKDTIYLLEDVFEANGVGFISLNENFDTTTPYGKAMVGILSVFAQYERENIRERTQMGITERIKTGKWRGTKPPFGYDYNNGDDVLVPNKDAETVRKIFALYKEGYSTYALAKMFDLKGDKQVSDMLSRVTYIGKLKYNKEIVDGLHEPIVDKKLFDEVQELRKTRTRATSHKSQYLLTGLIYCGLCGAKMRYQKWSGGRVMIYCYSLDHSKPHLVKNPNCQNGKLDAAEVEEVVVNDMLKLSKEYEIIEGKSEQQNQKGFEAMNQRKTVLEGKLKSLYNLYASDTNNNVLLETIGEINKELENLNTQIEQYTLKNTRAKDMAARAKAFKSVADSWEFMSFNERQKTVREYIKKIKISNDYVEIEYNDLLTRQ

SEQ ID NO: 3679 - protein, 536 aa, synthetic construct
MLRQTNQQPITALYPRLSHEDELQGESNSISNQKRILETYAKQNGFSNLRWYTDDGYSGANFQRPGFQAMLADIEAGKVGTVIVKDMSRLGRNYLQVGMYTEMIFPQKGVRFIAINDGVDSAQGDNDFAPLRNIFNEWLVRDTSKKIKAVKRSKGMSGKPITSKPVYGYLMDEDENFIIDEEAAPVVKQIYNFCLAGNGPTKIARMLTEQQIPTPGTLEYRRTGSTRRYHPGYECKWATNTVVHILENREYTGCLVNFKTEKLSYKVKHSVENSPEKQVIFENHHDPIIDTQTWERVQELRKQRKRPNRYDEVGLFSGILFCADCGSVMYQQRYQTDKRKQDCYICGNYKKRTHDCTAHFIRTDLLTAGVLSNLRKVTSYAAKHEARFMKLLIEQNEDGGKRRNAAKKKELEAAEKRIAELSAIFKRLYEDSVTGRISDERFTELSADYEAEQRELKERAAAIQAELSKAQEATVNAEKFMNVVRRHTSFEELTPTLLREFVEKIVVHECSYDENKTRRQDIEIYYSFVGKVDLPE

SEQ ID NO: 3680 - protein, 547 aa, synthetic construct
MIRKKIKVAAYARVSTDKDDQLNSLDNQRIYFQNYIKGHPDWEFIDVYWDEGISGTQTKNRVGFNNMIADAINGKIDLIITKEVSRFARNTVDTLSYTRKLKQFDVGVIFILDNIDSRDVDAEFRLTIMASNAQEESRKTSERVKWGQKRQMEKGVVFGRSLLGYIVDNGKISINQEEVPIVKKIFHKYTIEGKGTHVIARELLEEGIEPKRVKKWSNTVILRVLRNEKYVGDLCQKKTITPDYLTHKKKYNRGEEEMVYIKDHHEPIISRELWKATQEELKRRSVSKKQKLKHSSRYWCSGKIKCAECGNRFVGRSRILKNGQKYKTWKCFENVTHGSKKKKLNGEIVGCCNNAINEKSLVVCMNYCISFMQDGKELLKKEILQEIGKIKKEKENKLFGEESIRESIEHYERKKRKSIDLMLDGLISEEDFINQKNWYDEKIKNLKDKLIEESKKDREDKKEYIIQSYRNALDEIMDIDNPSEMVYKEILDHIDVHKNKVLDIWLKSVPFGIRLKIETEGRSTTYKTKILETELIEKSKGVISKTI

SEQ ID NO: 3681 - protein, 617 aa, synthetic construct
MEIKFIKGNKVALGAFRKTVRKLRVAAYCRVSTDSEDQIKSYNSMIKYYTDLIEKNDEWEFVGIYADKAITGTNVKKRNDFKRLIEDCTNGEIDMIITKSIPRFARNTLDTLKYVRMLKEMNVAVYFEVEKINTLKDGEFLTTILSSVAQQEVENTSAYVKKGLKMKMKRGEMVGSHRCFGYEVDKETRQLKIVEEEATAVRYIFNRYLEGAGGRVIANELNKKGIFTINNVEWSAPTVLGIIKNEKYKGDMLQGKTFTIDPISKRRLHNNGEEDKYYVIDHHEPIVSKEIFDKAQKLRKAKSTKKLANGTDQVVINRRYAFSSMLKCGYCGKNLVRKQWHSNSKYSKAVWYCSEPCRKGVKYCPNAKAISESVLEEAFVESYNRLCDNKQDVLEDLLAKIKTILKKEKIEEAIKQTDESIQKIKVRRNKLLNEYLNGTIPQDIYEENERLLKTTLLNKKNELKYLKKQLDEKDNISNRISEFRKNIMNNPILEEFDRVVFESIVEKAIVGGFDENGNKDPYKITFIYKTGIQDEIKEAKKKFVAKAYEQKEKDTEMYSFSSNDQNNMCTNDNGNINRNIHGNHCSNGTNRDQCGTGSTLKCCDRWSSSDRRFLFWR

SEQ ID NO: 3682 - protein, 559 aa, synthetic construct
MKTKLYSYIRFSSMRQNDGSSYERQIRMAREVAAKYDLELVNDYQDLGVSAFKGANSKTGALSRFLDAIGRSVPVGSWLFIENLDRLSRADIVSAQELFLSIIRRGITIVTGMDNKIYSLDTVTANPMDLMFSILLFIRGNEESQTKRNRTNSSALIKIKAHQENPQNPAVAIEEVGKNMWWTDTTSGYVLPHPVYFPVVQEIVELRKNGRSTAEILDHLNETYAPPPAVSNKKHSKWSRAMVERLFHTRALIGIKEVSVDGVNYELKDYYPRVIDDPTFYHLKKNIGARAWNFGDKEEAKPIPLLSGIGLLKCDHCGCAMVKVKGTNKRSDQYRYTCDATRSRRLDCEHPNWSFRGDQLEKAVLQLLADKIWIAEDKANPVPALKVQVDEISRKIDNLIALSAMTGATKELADQITTLNSERETLYNQIKMAEEEMYSVDSQGWEKLAEFDLEDVYNEERLKVRFKIKQALKRIGCSRIDRNKNLFVLEYIDGKTQRVVIENSRGTRKGRIFIDLKTINDRQILESNGLVLHPCLDMLTDKNWKPEEEIPGPLQEFGI

SEQ ID NO: 3683 - protein, 522 aa, synthetic construct
MKLSHILQPNMKAAFYGRHSTDKQDMDMQLNSVMEVIRKYDCIHTHSFLDKAVSARKNKITSRKELENMFEAAKRKEFDFVIVYKSDRLARDPLEHQTIRIVMKTLDIPIIISSTESVYNTDTDLIVQLMEDGFTKYEVDTIIARTRSGLENKAKQGKWLGGKPPFGYTYDKNSGQFIEHTEELCYVKEIFNLYVNGHGFQYIANTLPNGSRRGKDWGKENVKAIVLNPFYCGLLSWRRQTDGKQNARDIWIEAPNHYVKPIISRTTWESCWRIYSEKRNGNMVPKHYKTSFLLQGLLSCERCQELMKTKNQQTVSSTNKQYGGKIYFCTNCKLRIDADLLHDKVVNQTLTDVKISGFHNVYHAIEQKIQYEIQELNNNIQKHQRLFENYTIKLHNITEELKQRMKNNDDKRFLKSLAIYRLDIQRKLDGVTQQINAFKQKIILKEKVEKSKETWLHTLNEVFQDDVKLQEISDMDKRRFLLPLIQSVSIKENKKRNEYDISLQLRTDFSKRDVKNQISLIL

SEQ ID NO: 3684 - protein, 515 aa, synthetic construct
MYRPEELDVFIYLRKSRKDLEEEKKALEHGQHYDTLERHRTQLLELAHKEHHNIIDIFEEVVSGEYISERPMMQKLLREVEAGIADAVLVMDLDRLGRGDMVDQGTIYRVFRYSETFIITPTEVINPNDENQELTFSIKSLIAREELKTIVKRMQRGRRASAKEGKSISRVPPYGYLRDNNLKLYPDPEKSWVIPKIFELMANGIGRQAIAQELDRLGIAPPEGEYWNPSTISSIIKNEVYLGHIIWGKIRYIKQNGKYIRKKVPKERWQRHNHAHPPLVSEELFQKANTAHSKRWRPPTIKTKKLSNPLAGILLCELCGHSMLYQPRKDRPNPQVRCIQPSCKGVQKGASLTLVEQRILDGLKQIIESFEIQENMVQKKKSSNNIDLQQKALEKKEQQINDLQKQKSNLHDFLEKGVYDVDTFLERQKSIAVRLKTTQEAIEELKHEIKKILEKEKHIHEFIPRIKNVLEAYYATNDIEKKNHLLKSVLEKVTYLRKKEWKRKDEFVVELYTRI

SEQ ID NO: 3685 - protein, 556 aa, synthetic construct
MAMMNEMEYRTIGKALAGGYRAAVYCRLSKDDDLQGESASIANQRDMLEKYCEKQGWEVVAVYQDDGFTGLNMERPDLQRMLRAIERRQINLVITKDLSRLGRNYLQTGHLIEDFFPRNGVRYIAMNDGIDTLRDNNDIAPFKNILNEMYSKDISKKVHSSYLLKAQKGQFTGCLAPFGYRKDPEDKNHLLIDEETAPIVRLIFGYALNGHGPNYIRRRLEEEKIPCPTWWNRERGLRNTSTKWEKKDPENGRYMWDFSVIKDLLMNPVYTGAIASQKKDYRFKIGTIGEKKPEDWIVVEGQHEPLIDRMSFDIVQNKLKSRQRPGQTNEISLFAGLLKCGECGKSLTVRYTNAKHPQRIYSCKTYNAFGKNHCTQHRIDYDTLYSHVLRKIRECARAALMDGEAVADRLTNTCEAEQREQREAMERSLTRDEERIEVLDKMVMRLYEDMIAGRISEQNFNTMLEKTQTEQTELKTRVSEGRKRLSDEIQLANDAKQWVEAIQEYANITELDAATLNRLIKEIVVHERIDEDKTRHISIEIHFNLKPIPEVEQVTA

SEQ ID NO: 3686 - protein, 465 aa, synthetic construct
MKGNAGDTIVKKIDLSPELVRVALYIRVSGEEQKIKGLSLEAQQERLEVYARERGWVIVGIYIDAAKTARKNIHKRTDFQRMMDSVKRDEVDILLFCRLDRWFRSVADYYKIMEVLEAHNCDWKTTDEEYDTTTANGRLYINVKLSIAQNEADIDGERIDVVFDSKIAHGTVVSGSAPFGFRVNEEKRLEVVPEDAAIVQDAFNYFETSISQRATVRYIRETYGVNWCDATFRRMLKEKLYTGVYDRGGRFNDHFCPAIISKQQFDRVQALLERNARSVPSGKVYIFTSILTCAECGHKLVGYKSSDYYYYRCNQHFQRGRCSHNHSAREDVVEKWLFEHLAEELERCQLEWEVAAAKKKASVARTDKAALKRKLTKLKELYVNDLIDIEDYKRDYQIYTAALKQIPEPSIEPPPDFAAVRRLLDNDFKTIYENLTREEKRTLWRSVIKEIRIDNDQNITGVVFG

SEQ ID NO: 3687 - protein, 604 aa, synthetic construct
MKKVFVYHRVSSDQQLDGSGIARQAELLEGYLERTGICAEMDDPAPVVLSDQGVSAFKGLNISEGELGAWMEQVRNGMWDSSILVVESIDRFSRQNPFDVMGYINALMAHNVAIHDVMANIVISRSNSKDLPFVMMNAQRAYDESKYKSDRIRKGWAKKREHAFNKGTIVTNKRPQWIEVENDKYVLNHKAAVVKEIFALYQTGMGCPTIAKQLQTKEGEQYKFNRPWTGELVHKILTNRRVTGKIFISEIIRNHDDIENPVTQKKYDMDVYPVVINEEEFELVQELLRSRRPNAGRVTVKKDGQEEVLIKSNLFSGIARCTECGGPMYHNVVRAKRTPKKGDPKIEEYRYIRCLNERDGLCENKAMTYETVERFVVEHLLGMDLSTVIKEHEFNPEIEVLRIQIDQVKDQITNYENGIERRKSAGKPISFDMREELDDAKSALERLLARQASLATVQVDVPVLQDVNVTELYDVNNVDIRTRYENELNKIVSNIRLKRNGTSYTIDINYKQNELKRHVLFVENKKKEQTLISEVIIEDVDGGKFYYTPSFMIRLKDGEIRFQQTNEDLSIVDYSLLLNYVDAIDRNDAVGVWMRNQFNFLTSN

SEQ ID NO: 3688 - protein, 598 aa, synthetic construct
MKSNNVEIIKADSLVRRRGVNVERHLKRVAAYCRVSSDSEDQKNSYESQVRHYKDYISQRSDWELAGIYADEGISGTQVGKRQDFQRLINDCVNGEIDYIVTKAIARFARNTLDTLKYVRMLKDMQIGVYFEEENIDTLTMDGELLLTILSSVAQQEVENTSAHVKKGLKMKMQRGELIGFQGCLGYDYDVETKQLSINKKEAKIVRYIFERYLEGIGGKVIARELDELGYKSPRGLDHWNDTTVLGIIKNEKYKGDILMGKTFTVDPISKRRLSNFGEEDKYYIKDNHEPIISKEDFEKAQEIRLRRAGNKKTVANVNGKRERYSKMYAFSSMLECGFCGSILSRRSWHCRSDYRKVVWHCVTSIKKGKKFCKHSKGLEELAIEGAFMEAYRQLYHSNENLMTDLLETIESELNDNSLNKELKRITNKLRTLLKKEENLVNLRLEGKISDTIYNEKYNEISSEKEFLAEEKVNIETTLKSEIDVKKRLTEFKHLLSSQKMLTEFDRAVFESIVEKIIVGGVNSDGEIDPAMLTIIFKTGETQNKDGKQFKSKRKNAKLETDKLCPQNSDEDKKLYSQGTDYTHRVCRSAHSCGTVIQ

SEQ ID NO: 3689 - protein, 588 aa, synthetic construct
MKKEVKVIKGDTTLKRTASGCVERSIKRVAAYCRVSTDTEDQINSYNSQVEHYTEFIQKNNEWTLAGIYADEAITGTQVDRRIDFQRLINDCMNGDIDMIITKSISRFARNTLDTLKYVRKLKEFNVAVFFEEENINTLTMDGELLLTILSSVAQQEVENISANVKKGLRMKMERGEMVGFQGCLGYDYDPETKSISINEKEAEIVRYIFRRYIEGVGGMVISRELEEQGYLSPRGNKRWTETTVLGIIKNEKYKGDLMMGKTYTVDPISKRRLDNFGEQDKFYIENHHEPIISEEDFEKAQGIRLRRSKNRNTVANNGGKREKYSRKYAFSSMLECGFCGHNLSRRNWHSSSEYTKVIWQCVNATKNGKKYCPHSKGIEEEAIEKAFMESYRQVCHNNVEITNEFLKTVEEELKDNSLSKDLKKISNQLDKILKKEKDLVELRLNESISMDIYQDKYNEIAISKEKLLAEKRTLEVTLTDEKALKKRLEGFKKLLESNKYLEEFDRAVFESIVDKIIIGGTNDEGEIDPAMITIIYKTGKKDSQDGRLFKSRRKNAKEVNEETENKLYPQSSDEVNNLCSYPMDNTH

SEQ ID NO: 3690 - protein, 464 aa, synthetic construct
MKRAALYIRVSTMEQAKEGYSIPAQTDKLKAFAKAKDMAVTKVYTDPGFSGAKMERPALQEMISDIQNKKIDVVLVYKLDRLSRSQKNTLYLIEDVFLKNNVDFISMQESFDTSTPFGRATIGMLSVFAQLERDTITERMHMGRTERAKQGYYHGSGIVPLGYDYVDGELIINDYEAQIIQEIYDLYVNQGKGQQYITKRMVAKYPDKVKTLTIVKYALTNPLYIGKISWDGKVYDGHHTPIIDKSMYDKAQEIIARMAQKGGEQHGNQLGLLLGITYCGKCGAKVFRYVSGGKKYRYNYYMCRSVKKMLPSLVKDWNCKQPSLRQEVVEKKVIDSLKSLDFKKIERELKQVENKTKSKITTINNQISKKHNEKQKILDLYQYGTFDVTMLNERMKKIDNEINALTANIANLEGTKSESLINKLETLKTFNWETETTENKILIIKEFVERIELFDDEVIIKYKF

SEQ ID NO: 3691 - protein, 588 aa, synthetic construct
MKKDVKVIKGDTTLKRTASGCVERSIKRVAAYCRVSTDTEDQINSYNSQVEHYTEFIQKNNEWTLAGIYADEAITGTQVDRRIDFQRLINDCMNGDIDMIITKSISRFARNTLDTLKYVRKLKEFNVAVFFEEENINTLTMDGELLLTILSSVAQQEVENISANVKKGLRMKMERGEMVGFQGCLGYDYDPETKSISINEKEAEIVRYIFRRYIEGVGGMVISRELEEQGYLSPRGNKRWTETTVLGIIKNEKYKGDLMMGKTYTVDPISKRRLDNYGEQDKFYIENHHEPIISEEDFEKAQGIRLRRSKNRNTVANNGGKREKYSRKYAFSSMLECGFCGHNLSRRNWHSSSEYTKVIWQCVNATKNGKKYCPHSKGIEEEAIEKAFMESYRQVCHNNVEITNEFLKTVEEELKDNSLAKDLKKITNQLDKILKKEKDLVELRLNESISMDIYQDKYNEITVSKEKLLAEKRTLEVTLTDEKALKKRLEGFKKLLESNKYLEEFDRAVFESIVDKIIIGGTNDEGEIDPAMITIIYKTGKKDSQDGRLFKSRRKNAKEVNEGNDNKLYPQSSDEVNNLCSYPMHNTH

SEQ ID NO: 3692 - protein, 455 aa, synthetic construct
MANEIKQVALYIRVSTDQQAKHGDSLDEQQHTLNEYVRQQGNMRVFKTYIDDGISGQKLYRDEFQKLLDDVKKGRIDTILFTKLDRWFRNLRHYLNIQEILDKNNVTWLAVTQPFFNTETAMGRSFVNQSMGFAELEAQLTSERIRAVFDNKIRKGEVVSGKVPLGYEIKDKHLVPNEKAEIVKEIFQYYLETGSMRATVRHLENHFNMTRDYQSVRQMLTNRKYIGELRDNKNFCEPIIDRDVFERVQLQLSKNIRMNKKRDYMFTGLLVCSECGCNYSATAVISRYVRKDGTTNPNERHLYRCTKNRNNVKKCSNKKGIYETTLENFLLENIEKQAKDLSVKMQREPEVKKTKNTNDKIKKKIDRLKKAYLNEVITLEEYKKDRKELEALLIPEMDNKIAKIDLNSLHNYSTAEFRDGYKQLTISEKSSLWRQVIKNIVVYPDGNLKINFIGY

SEQ ID NO: 3693 - protein, 464 aa, synthetic construct
MDKKAAIYIRVSTQEQATEGYSIQAQTDRLTKYVEAKDFILYKKYIDAGYSASKLERPAMQELIQDVQSKKVDVVIVYKLDRLSRSQKDTMYLIEDIFRPNDVELISMQESFDTSTAFGSATVGMLSVFAQLERKSISERMITGRVERAKKGFYHTGGQDRPPAGYQFNSDNQLIINEYEAAAIKDLFRLYNDGLGKSSISEYLKKNYPGKNKWLPSSIDRMLKNSLYIGKVKFSGVEYDGIHEPIIDEVTFYKTQKEIARRKQSNTKRYNYVALLGGLCECGICGAKMANRRAVGRKGKVYRYYRCYSKKGSPKHMMKTDGCSSKAQQQFIIDEAVINNLKNIDVEAELKRRSAPQTNTSLISSQIESIDKQINKLIDLFQVDSMPLDVISEKIDKLNKEKQSMEKLLERKNRLDKTELQHRFDILKSFDWDNSSIESKRAVIEMLVQKVIIHDNSIEIILVE

SEQ ID NO: 3694 - protein, 503 aa, synthetic construct
MPQRNNGIAYSYVRFSSKRQELGDSLRRQTEMAEEYAIKNGLKLSSKNFQDLGISAFREGKRASLVDMLAAIEEGQITAGSTIIIEALDRLSRRGIDATLETVKEILRKDVQVVSLSDGLLLTKNSLNDLQSVIRIAIAADLAHKESERKALRLRETKGQQREAALSGKPINKILPFWLQRTEAGYAFSDKAGVARQIVQLKQEGKGSNMIAKTLNRLGIAGVRTAQWNHASITKMLKNPALYGAYQTGETTKDRELIKLELVEAYYPALINKEEWLLLQSDQSKSKRGRRSANNPYSGLLRCECGGALVKRQHTVKGKLYVYHGCLNAKDGRCTQNISIKGLDGALTTILGRLEFKKKQTLSQSIHQERQQLEARINDLNSKLQVLDDIPLSVIKSIGTMESRLKEITDQIAKDEREQRGIEAVKSEKLSSITDGLELNLLLKRVLKSITVIRSGNGWAVKVLHLSGHKQNFLMVDGEIKFLSDTIALQNLLAGFREATENN

SEQ ID NO: 3695 - protein, 560 aa, synthetic construct
MSKEKIKVYLYTRVSTSIQIDGYSLEAQKSRMKAFALYNDYEIVGEYEDAGKSGKSIEGRIQFTRMMEDIKSGKDGVSFVLVFKLSRFARNAADVLSTLQTMQDFGVNLICVEDGIDSSKDAGKLMISVLSAVAEIERENIRVQTMEGRIQKAREGKWNGGFAPYGYQLIDGKLLINEEEAIAIRTIFDQYVNTSIGANGLSKYLENHGIRKIPRQNGKNPLFDAGLIRKILKNPVYNGKIAFGRRTLEKVHGTRNEYRQVDQDDYIVAEGIHEAIIPDELWQAAQVKLKAQAKKYEHVNKGKNMRTHLLSGIVKCPICGAGMFGNKSIKYKKDGTKYKDFYYYGCKHRLMNRGHKCTYNKQIREELLDDAVAEVIIKLVSNPKFASMMQEKINMKVDTSAIENEIDNYQKELRKSHSTKFKLIEEIDNLDVEDKHYKRRKNDLDDRLYRMYDKIEELESLLIDAKAKKQTIEAEKLTGDNIYKVLIYFDKLYKVMNDVERRQLITALISEIQIYEEKQPNGQWLKSITFKLPIIDKDLNIGLDNDEQVESVTLLTKAVD

SEQ ID NO: 3696 - protein, 449 aa, synthetic construct
MLKRAALYIRVSTDQQAKHGDSLDAQIATLKDYVSTQDNLTIIDTYIDDGISGQKLYRDEFQRLLEDIKKNRIDIILFTKLDRWFRNLRHYLNIQEILDNSGVTWLAVSQPFFNTDTAYGRSFVNQSMSFAELEAQMASERIKAVFENKIRKGEVVTGSVPFGYKICDKKLIPNENAPIAKDIFKHYSIHNSIRLTVEYLFNEYDITRSSRTIKHMLRNRKYIGEVSGNKNYCPPIVDKETFEKVQNLLDKNISSIAKRTYIFSGLVVCSCCGKKMTGRYRKRKYIKKDGTVMYYTKKVYRCNGNTYKRNKCPNKINIPEEILEEYLLNNIKADAENFEAKQKKIAVSAPEKNNNSKILKKIERLKKAYLNEVISLDEYKKDRKELEQMIVQVKPKETIVFKSNWFNKNIESTYRDFDEEEKRFVWRSVLKNLLVDPHGKITINFLTKN

SEQ ID NO: 3697 - protein, 546 aa, synthetic construct
MQSDFQTNRVAIYCRLSKDDEFKKGESASIQNQRDMLIDYCKQRNWTISDIYVDDGYTGLNIDRPDFQRMLVDIKAKKIDTVITKDLSRLGRNYLQTGKFTEEFFPKNGVRYIAVNDGVDTNQDNNEIVPFKNVLNEFYSRDVSKKMKSAYYTRAKQGKFTGCLAPFGYKKDENNPHLLVIDEETSWIVEKIFDYAARGYGVQYIRTLLREEKIPTPTWWNRKKGLRNAVTKWEKTMEGGEYVWDCTTLTEMIQNPVYLGHIASQKANHKFKIGWISDKPQEEWLVVEDMHEALIDEDTFEIANEKLKSRKRPFKTGELSLFAGLIKCPDCGKSLNLARNNSKKKEKLFTCNTYRRYGKDFCSQHRIMYGEVYRVVLEDIRSNAKLALKDEKEVLKILELNQEEELDSQVVLAGQMIEEDSLRYKELETKVERLYDDWIDKRINETNFNRLMEKTQKEQDILLERIKVNEEKIKNSESKDINISKWIESIKKYQNIKKLDRHILNELIDKIFVYEKEIIDGEVVQTVEIFYNFLLNTKELNIKYHL

SEQ ID NO: 3698 - protein, 464 aa, synthetic construct
MKRAALYIRVSTMEQAKEGYSIPAQTDKLKAFAKAKDMAVAKVYTDPGFSGAKMERPALQEMISDIQNKKIDVVLVYKLDRLSRSQKNTLYLIEDVFLKNNVDFISMQESFDTSTPFGRATIGMLSVFAQLERDTITERMHMGRTERAKQGYYHGSGIVPLGYDYVDGELIINDYEAQIIQEIYDLYVNQDKGQQYITKRMVAKYPDKVKTLTIVKYALTNPLYIGKISWDGKVYDGHHTPIIDKSMYDKAQEIIARKAQKGGEQHGNQLGLLLGITYCGKCGAKVFRYVSGGKKYRYNYYMCRSVKKMLPSLVKDWNCKQPSLRQEVVEKKVIDSLKSLDFKKIERELKQVENKTKSKITTINNQISKKHNEKQKILDLYQYGTFDVTMLNERMKKIDNEINALTANISNLEGTKSESLINKLETLKTFNWETETTENKILIIKEFVERIELFDDEVIIKYKF

SEQ ID NO: 3699 - protein, 464 aa, synthetic construct
MDKKAAIYIRVSTQEQATEGYSIQAQTDRLTKYVEAKDFILYKKYIDAGYSASKLERPAMQELIQDVQSKKVDVVIVYKLDRLSRSQKDTMYLIEDIFRPNDVELISMQESFDTSTAFGSATVGMLSVFAQLERKSISERMITGRVERAKKGFYHTGGQDRPPAGYQFNSDNHLIINEYEAAAIKDLFRLYNDGLGKSSISEYLKKNYPGKNKWLPSSIDRMLKNSLYIGKVKFSGVEYDGIHEPIIDEVTFYKTQKEIARRKQSNTKRYNYVALLGGLCECGICGAKMANRRAVGRKGKVYRYYRCYSKKGSPKHMMKTDGCSSKAQQQFIIDEAVINNLKNIDVEAELKRRSAPQTNTSLISSQIESIDKQINKLIDLFQVDSMPLDVISEKIDKLNKEKQSMEKLLERKNRLDKTELQHRFDILKSFDWDNSSIESKRAVIEMLVQKVIIHDNSIEIILVE

SEQ ID NO: 3700 - protein, 464 aa, synthetic construct
MKRAALYIRVSTMEQAKEGYSIPAQTDKLKAFAKAKDMAVTKIYTDPGFSGAKMERPALQEMISDIQNKKIDVVLVYKLDRLSRSQKNTLYLIEDVFLKNNVDFISMQESFDTSTPFGRATIGMLSVFAQLERDTITERMHMGRTERAKQGYYHGSGIVPLGYDYVDGELIINDYEAQIIQEIYDLYVNQGKGQQYITKRMVAKYPDKVKTLTIVKYALTNPLYIGKISWDGKVYDGHHTPIIDKSMYDKAQEIIARKAQKGGEQHGNQLGLLLGITYCGKCGAKVFRYVSGGKKYRYNYYMCRSVKKMLPSLVKDWNCKQPSLRQEVVEKKVIDSLKSLDFKKIERELKQVENKTKSKITTINNQISKKHNEKQKILDLYQYGTFDVTMLNERMKKIDNEINALTANISNLEGTKSESLINKLETLKTFNWETETTENKILIIKEFVERIELFDDEVIIKYKF

SEQ ID NO: 3701 - protein, 455 aa, synthetic construct
MANEIKQVALYIRVSTDQQAKHGDSLDEQQHTLNEYVRQQGNMRVFKTYIDDGISGQKLYRDEFQKLLDDVKKGRIDTILFTKLDRWFRNLRHYLNIQEILDKNNVTWLAVTQPFFNTETAMGRSFVNQSMGFAELEAQMTSERIRAVFDNKIRKGEVVSGKVPLGYEIKDKHLVPNEKAEIVKEIFQYYLETGSMRATVRHLENHFSMTRDYQSVRQMLTNRKYIGELRDNKNFCEPIIDRDVFERVQLQLSKNIRMNKKRDYMFTGLLVCSECGCNYSATAVISRYVRKDGTTNPNERHLYRCTKNRNNTKKCSNKKGIYETTLENFLIENIEKQAEELSVKMQQEPEVKKTKNTNDKIKKKIDRLKKAYLNEVITLEEYKKDREELEALLIPERDNKIAKIDLNSLHNYSTAEFRDGYKQLTISEKSSLWRQVIKNIVVYPDGNLKINFLGY

SEQ ID NO: 3702 - protein, 455 aa, synthetic construct
MANEIKQVALYIRVSTDQQAKHGDSLDEQQHTLNEYVSQQGNMRVFKTYIDDGISGQKLYRDEFQKLLDDVKKGRIDTILFTKLDRWFRNLRHYLNIQEILDKNNVTWLAVTQPFFNTETAMGRSFVNQSMGFAELEAQMTSERIRAVFDNKIRKGEVVSGKVPLGYEIKDKHLVPNEKAEIVKEIFQYYLETGSMRATVRHLENHFSMTRDYQSVRQMLTNRKYIGELRDNKNFCEPIIDRDVFERVQLQLSKNIRMNKKRDYMFTGLLVCSECGCNYSATAVISRYVRKDGTTNPNERHLYRCTKNRNNVKKCSNKKGIYETTLENFLLENIEKQAEELSVKMQQEPEVKKTKNTNDKIKKKIDRLKKAYLNEVITLEEYKKDREELEALLIPERDNKIAKIDLNSLHNYSTAEFRDGYKQLTISEKSSLWRQVIKNIVVYPDGNLKINFLGY

SEQ ID NO: 3703 - protein, 559 aa, synthetic construct
MKTKLYSYIRFSSMRQNDGSSYERQIRMAREVAAKYDLELVNDYQDLGVSAFKGANSKTGALSRFLDAIGRSVPVGSWLFIENLDRLSRADIVSAQELFLSIIRRGITIVTGMDNKIYSLDTVTANPMDLMFSILLFIRGNEESQTKRNRTNSSALIKIKAHQENPQNPAVAIEEVGKNMWWTDTTSGYVLPHPTYFPVVQEIVELRKNGRSTAEILDHLNETYAPPPAVSNKKHSKWSRAMVERLFHTRALIGIKEVSVDGVNYELKDYYPRVIDDATFYHLKKNIGARAWNFGDKEEVKPIPLLSGIGLLKCDHCGCAMVKVKGTNKRSDQYRYTCDATRSRRLDCEHPNWSFRGDQLEKAVLQLLADKIWIAEDKANPVPALKVQVDEISRKIDNLIALSAMTGATKELADQITTLNSERETLYNQIKMAEEEMYSVDSQGWEKLAEFDLEDVYNEERLKVRFKIKQALKRIGCSRIDRNKNLFVLEYIDGKTQRVVIENSRGTRKGQIFVDLKTINDRQILESNGLVLHPCLDMLTDKNWKPEEEIPSPLQEFGI

SEQ ID NO: 3704 - protein, 701 aa, synthetic construct
MLRATNSPDERITAEHRGKLAYIYVRQSSVNQVRHHQESTQLQYRLVERAVGLGWPHERVHVIDDDLGKSGSGSVEREGFKKLIAEIGLGNAGLVISLDASRLARNNRDWHQLLDLCALFGVIIADGERLYDPCAYHDRLLLGLSGIMSEAELHQIRQRLHQGERQKAARGELRLCLPAGLAHDRSGQITLNPDEEVQARLDLVFGKFRELGSARAVMRYLRKENLPLPIRPLRGPAPHEVVWQEATNPRVLSILHNPGYAGAYVYGRRRQTGGRIRQDVYRPRTAKVPIEDWEVCLQAAHPGYIGWEEFMDNQRRLENNINHYEAGHTGAPRKGAALLQGIAVCGRCGRRMSLRYSGPAGNYPVYTCRADRGHDGGPLCQEVRALPVDARIEGILLEALAPDRIAIAIAALGQIEEEAHQLERQWALRRERARYEAERARRQYDAVEPENRLVARSLERAWEEKLRAAEAIEQDYERWRSDEPLVLSEADRDGLLALGENLPGIWRAPSTTAAERKSILRLIICEVVLDQKRLQGQVWIKILWQTGATSEHSVQRHVHTYGDYIDVDKLRARVAELNAAGKMDKEIASSLNSEGFLAARNCAFKGENVWLLRRRWGIPTVKINGTSSNPVRWPDGTYSVQGAAAALGITPQVIFDYLARGWLKGHQHAKGQPWQIELTQDQIDILRARAQRNRRSRKQAS

SEQ ID NO: 3705 - protein, 545 aa, synthetic construct
MQDEFLGNQHSSGPVRAYSYVRMSTRKQLRGDSLRRQLERSKTFADEHSLLLDDSLQDLGVSAWRGRNFKTGALGRFLSMVESGEIPKGSYLLIESLDRLSREAVPDALTLFMAIINAGIIIATLGEDRQIYSRDRLNGDWTKLIIGLAVMSRGHEESQTKSERISAVAKRKREQAREGKGHITSITPAWIDAKRIDANRYEFTLNQHAETVRAIYEMATRGLGATVIARKLNVDGVPAFKSKDGWYQSIIKALLTRHDVIGTFQPHRMQDGKRVPDGDPIEGYFPAAIEKDLFLRVQAMRSNPGRPGRKGDTFANLFTGLCHCTHCGGPMTMKLSRVKGNENGRYLVCANYVRRHRCTEGKRHFRYEPLEAVILDHVKEIDLADALQAVRFDTVLDAIDETIAALTLQLEGLRRKEQRLASAIEDDSQPPDAILNLLKARQSERQAVEAELRHQQAERQRQSIRHDNSADMGDRIAKLRVAWEQAEEATRYELRSEAHAAIRELITEVSFDSSSYTAVVVIENGVSAYKVKDGRISGLFRVFAA

SEQ ID NO: 3706 - protein, 606 aa, synthetic construct
MKQSEIRQTAYSYIRMSSQQQMKGDSLRRQLELSRQYAAANNLVLDESLTDIGISAWTGANVQDGALGRFLQLIQSGLIKRGSYLLVESLDRLSRQQVRNAIGPFIDIINAGVTIVTLADKQVYSETTVDENWTQLMMSLAIMSRAHEESQTKSKRLKEAHANKKKLAAQGIGRYSHNMWGWIDQIEVAANKFKYQLNQHAATVRKIYEMADAGLGQLVITRKLNDEGIATFRRSKKGWQQPNVGGILRNEAVIGTYQPTHAINGKATPNGPPIKNYLPAAIPEELFWRVQRNKQRRASSGRKGKQLTNLFTSLCVCQHCNGPIRVRLAGTGGKTHRHLHCDNRYRAAGCPSVGGGFRYDILEAAILDKIKEFDIEIGTGRQTADREVLLHEIMTKEIQLDEMEKRKTKLLRALELSDDDAAMSDILSKLSERRTTVEQLTTQIAEMKGDLARIDAEATTIASAVERLQLERLIWSTGSDDEVYASRSRVSAMMHSYIDVIAFDFNRKTYRVSIGGHLVLYEFYRDGRLLQKIDNRSRVRKHGVPVIWKDKDESGHAVEGTGKKVIPMGWSVETLTTTIPQSRQDPNAHLVDKRKRIVGTLINKKH

SEQ ID NO: 3707 - protein, 523 aa, synthetic construct
MEHNVVTPKAYSYLRFSTPEQMRGDSFRRQSDMAQQWALRNAVELDDKLTFQDLGVSAYMGANAETGMLREFLEAVRAGMIERGSFLLIESLDRLSRNTARKAMRLLEDICELGISVVTLSDGKVYTDSNLSTDPISFMMAFMVMIRANEESATKARRLGQAWKEKRRRAIEEATPMTSITPAWLRLDKVNGGFVVVEERAEIVRRVFRMALDGMGQHQIADTFNTEGMPTFGRGNYWHRSYIKKLLENPAVVGTFIPHTLDRSGVKKRRIPQSPVERYFPAIITERVFQDVQAQRVGVGRLARQGGKYPIASLFAGLAQCPLCGGTMTRVSKGPKGGVPKLVCARAKTGAGCRYQGVAIEQAERALVQNAGWLIELAPAGDDRVDDALDWTRANLEAVQEQISNVLEAIAGGASGAAINERLEQLEAAKDSIEKQLVGLEREQSAQTGKLVERRLADLYDALTMRPLEEWEPEDRQLANSSLRQVVSAVVIDYATGHLEFLWKHGGTSKIVFGFPMEDAATL

SEQ ID NO: 3708 - protein, 533 aa, synthetic construct
MKRAAIYARYSTDLQNDKSVEDQIRLCEAHAQRIGAQIVKTFHDRAKSGASMFGRAGLSQLMQDAETGTFEVLISESPDRVSRDIADLAHIHKTLKFRGVEMNCVNGGVMDTMQIGMYGVVGQMQREEGAKKVKRGMVGVVRSGRSAGGRAYGYEPVPGQPGELRIVPDEAQIIVRIFKQYSAGTSPRTIAGALNEEGITPPRGDKWNASTINGSGTRGYGILRNPIYDGRMIWNRVRMVKDPSTGRRVSRANDASEHETIGVPHLRIVDEWLFQKVLERKAATGGEHKMMQPRSKRLLSGLLRCGACGGGMVIVGPDRGGNRIQCSTYRESGTCDNRRRFYIDRIEEQVIDSLRMAFADTSVIEAYVKTYEEELKRRRGNAFKSRAAAQRGLNDAKDGITKIIEKIVKGLIEDDEAAVLLTGLREERSRYQAILDTVDEPVNVIELQPKALRSFRASIESLAKILRSSDGNVPIELGETFRQLVAAVVVEPTPAGEAYSVSLKAYLSSLVSSDLSVIKLVAGEGLEPPTRGL

SEQ ID NO: 3709 - protein, 558 aa, synthetic construct
MTLAYSYARISSKKQLGGDGLRRQVEAAEKYALEHGLEIDTSLSDVASGFHQDHVKFGALGGFLELVKTGKIAEGSVLIVESLDRLSRADVITAQQQLLGIIQTGIEVVTLVDGYRYSRNKDFSQLIISLMSMARAYDESQVKSVRGKAYLAQLHSDVKAGIKARVHHLPSWLEQTQIGASKEYEFTLRASASTIRKIFELYDAGYGIAKIAIWLNDNGVLTLQESRRDNPDPSKIWRRKVVGEILNSVAVRGDLAIGDAVVEGYYPAAVDPVTWWRVNDRYNNKSKKATNGRTGLGYTNLFAGISKCFHCRGPARVIGGGSGHRYITCEKIKETGVACTGEGRYGKTSLRYDVLEKAVLDNVATYCHLPETPTVSADDLRRRMNEVRDGIADIDKRISNIIAMAEVADHPDDRTDLMTRLKALRSDKSRQSTELERMAVEIRDIETVRDDFTTIHKTIEDERLKWGSLTGDDLYSSRQLVASKLREIVSVVSIDVLDQLAYVAVGGATRGWTLDRDGRVVGKFDFSHLPLETLQKITSGVGLKASSEMIKRVKAAGA

SEQ ID NO: 3710 - protein, 557 aa, synthetic construct
MTTAYIYARISSKKQIDGDGLRRQVEAAEKYAKDNNFDVDDTLYDIASGFHQKHVSGGALGAFLELVKSGKIQPGSVLIVEALDRLSRANVLVAQNQLFSLLLSGVDVVTLEDNFRYSRDNDSLNQFYNSPHKMARGYDESNIKSLRGKAYLAQLHEDVKAGRKARVHHLPSWLEQTQIGTSKEYEFTLRESVSTVQKIFELYEKGYGIAKIAIWLNENGILTLQESRRSNPDPNKIWRRKVVGEILNSVAVRGDLAIGDTVVEGYYPAAVDPVTWWRVNDRYNNKSKKATNGRTGLGYTNLFAGISKCFHCGGPARVIGGGSGHRYITCEKIKETGELCTGKGKYGKTSLRYDILEKAVLDNVATYCHLPEIPTVSSDDLKRQVIEIQTGIADIDRRISNIIAMAEITDHPDDKTDLMTRLKALRSDKSRQTAEIERVTSEIRTLETVRDDFTTIHKTIEDERTKWDTLSGDDLFQSRSLVNSKLREIVSVVSIDAVDQSAYVSVAGATRIWEINAKGEVTRSTDFSDLSEDALVKMASGVGLKADRNAIQRVKQI

SEQ ID NO: 3711 - protein, 560 aa, synthetic construct
MNANATPALAMPRRAALYLRVSTGRQAEQDLSIPDQRRQLVGYCEGRGIEIVAEYVEPGASATDDKRPSFQRMMDEATQKPPPFDTIIVHSFSRFFRDQFQLEFYFRRLAKNGVKLTSITQDLGEDPMSAMMRQIMALFDEYQSKENAKHTLRAMRENARQGYWNGSRPPFGYRIVAAEMRGARTKKKIEPDPALIDTVRMIFRLARLGVEGGDGPMGVRQIAHYLNGRGLRTQTGGRWGIGTVHDLLTRSTYMGVHRFNVSGKRKGTTKNPEDIVEVAVPAIIDKEEFEEVGEMMRSRAHQLKAARFVSGGTLLGGVVFCADCGGAMTLRTSGKGEEYRYYTCCTAARQGKTGCNGRSIRMDELDGLVVDHLETRLLAPKRLETVLAGIVDRRADRVDKEKDRITALRHLAADTEEKLTRLYRAIEEGLADLDDPNLKGRITELKRIRDSAKADVERAEGRDAKAPTITMDSVQEFAKAVRTQMRREDGSFRRSQIQMLVQRAEVGANQILIRGSALKLLQTLAEASGGKPRVETAGLAVRSSVLNWLPGPDSNRRPVD

SEQ ID NO: 3712 - protein, 588 aa, synthetic construct
MKRAALLLRCSTDAQDYERQKLDLLDTIKGMGYTTSDDLVFGQYITGKDDVRKKDRESVAECKQAVREGKVDAIFINEVSRLSRDSIAGRLFIREFNDEYKIPVYFRDLGMWTINPTTRIVDRSFETMLGFYFDMAQNELKSMKTRFASGKRKNAREGKTIGGAVPFGFYKDEDGKLQVDEEQAQVVRLVYNKYLEDGGSIPSVCRYLLSCGYDKKFNKKFGTGSVRNLLRERRYIGEQRYNLVNPDEPDEAKKQEVYIYKVDAIIDTTIYNKVQIKLDKNRTTETKKVNKDKKIHLLAKLITCPICGDSYTSKTASANKSGERYRIWNYCCVSKYNFSECTSDITLNADNIESIIWQLTKREILALQELSLEERQSKIDEAEQKLASYKDELDVIAKSIDKLNVKKKKLVALFLDIEDDDTAIFNEQREAINKEIDSYNNRIQFLNTEITICEGNIARFKEADFTDEVLDKIEQDLLKKKELIKEYIKVIRPYRLTKARLILEVESKQTNYCILFEPRNSKRRCWYIQSSLAQWQNGLLKTSTAPLGNFFYIPMASLLLDEPDDLDAIASFEDMKEICSVNNYVIEY

SEQ ID NO: 3713 - protein, 595 aa, synthetic construct
MNTKVKLIKASNTGARNRNALHLDLKRVAAYCRVSTDSKDQLESYKSQVDYYTNLIKNNKNWTLAGIYADEATTGTTATKRADFMRLISDCQNGDIDMIITKSISRFARNTLDTLKYVRLLKENNVGVVFEEENIDTLTMDGELLLTILSSVAQQEVENTSAHVKKGLKMKMEKGELIGFQGCLGYDYDPITKSISINEEEAKIVRYIFKRYLEGNGGSVIGRELEEQGYLTPRGKTKWSDTTVLGIIKNEKYIGDILMGKTFTVDPITKRRLANFGESDKYHIENHHEPIISREDFEKAQEIRLRRAQNRNTIANKDRKREKLSRQYAFSSMLECGFCGEILSRRTWHTSSIYKKINWQCVRSTKKGKKYCPHSKGIQEAAIEKAFVESYRQLCHADSTVIDDFLKIVEEEINDNTLVKDLKKLENQLNRIISQERKLVDLHLEDSIDEEVYAKKYKKLTKQKEELLDEKKTLELTIKDENSIKERLKQFKKILENKEIIEEFNRTVFESIVDKVVVGRIDKDGTVHPYDLTFYFKTGVKDSQDSNNFKDKRKNAKDNDINKLCSYKDDEDKKLCSQSKDNARRVRSVANQGVR

SEQ ID NO: 3714 - protein, 543 aa, synthetic construct
MAKTRIERALGYVRVSTQRQAEGGISLANQEQRLTAHYAHRGVDLVDIYRDGGLSGTTENRPGLQALFEHALGAGSGITEIGVYSFSRLFRDHYLLEHYRRKLKRAGIRLVAITQEVGHDAEGDLVRSVLSNFDEYQSRQTAKFTLDTMMRNAEAGFWNGAVPPFGYTSEIAEMRGPKAKKRLVIEPSEALQVQQIFRMKRVGVGRGPMGYKKIVCHLNATGATLRGRKWQVSNIKDILNRSTYRGKHLYGVNDVRNGIKRPEEEWQTIDVPVIIPEAEWLEVQAGIARNAPHVTPARIVSSPTMLAGIAKCGHPECGHALTIATGKGGRYRYYRCSRRLRRGETACQGTSIRDEKLETIVIDALADRLLRPERLQQLLANLLDDSSAAVRERQAHLKALRTERTRVDGAIQNMFDFIEQGIVSPRDTDFTARLAGQRARRADLEQEILLIERQLSAADRQVTSDAIDRLGEVILGKLRSNDPTARQGYARRFIAKVVVAPDLITITGPIKPLAIAANGDPDDRTPMVPSIDREWCRLQDSNL

SEQ ID NO: 3715 - protein, 511 aa, synthetic construct
MKRITKIDAAAKQTKKLRVAAYARVSTDSADQLVSLDAQKEHYEQVIKNCPNWVYAGLYYDEGVSGTKMAKRDGLLRMLADCERGLIDYILVKSISRFSRNTVESVETVRRLSAMGIYIFFEKENIDTGKMEGELMLSIMSSLAEDESRSLSDNNKWSIQKRFQNGTYVIGTPAYGYKNVDGRMVIDEEKAETVRRIFASVLEGKSGTKIAAMLQEEGIPTARGGKWQSSVIIGMIRNETYIGVAVFQKTYKDDQFNSRVNYGEKGMYCIEGHHEPIVSEEVFRAANFAVDNNAREKGITKSRKYTKRYALSGKVFCDECGGKCKRKKIYGEVWYGCDTHVKDKKKCRQLPVRADMVEAAFVNMMNKLIYGRADVLLPMSGRLLGGGDKEVLGRLESLNTELAMVAERRQAADKFFVKGLLDAAVYREELDALAQKEKEINAARAGIEGDPDLDFDRQLALNELLKYTAKADQLTAFSDEVFTKHVDRVIIFSRKEVGFVMKCGPVFRERI

SEQ ID NO: 3716 - protein, 519 aa, synthetic construct
MAMAQNITFIPAVKTVGTQKPAEKKQKVRVAAYCRVSTEFEEQESSYETQVSHYTSYINGNPEWEMVEVYADNGISGTRTAKREAFNRMIKDCEAGRIDMIITKSISRFSRNTVDCLKYTRKLKEMNIAVFFEKENINTLDAKGEVLMTIMAALAQQESESLSANVRLGIQFRNQQGKVQVNHNWFLGYTKDESGKLVIVPEEAEVVRRIYREYLEGASFVKIRRGLEADGILNGAKHARWHETNIKQILTNEKYIGDALLQKTYTVSVLDKKRSRNDGVMPKYYVEGCHEAIIDRETFLLVQEEIARRSSLYKGGKKRVYSSKYALTGNVICAHCDNIYRRVVWSVGNEKPVVWRCVSRLTTGQECSARTVPEEDLHAAIASAVNMAYSNRDDIIPVLKENIENVVGCDVDDEIEVIDGMIRKSQMDLLDAGRDEARVQEIGERIVSLRERRQNVLTQAALRKDEIDRIKAMIGFIEEQTGEAEYSEALVRSMIEKVTIHDDRITVEFKSGLAIDVDA

SEQ ID NO: 3717 - protein, 542 aa, synthetic construct
MKEMKRKSVGCYVRVSTISQDIDKFSINGQITQIKEYCQFHGYEVFDIYADRGVSGKTMNRPELQRMLKDAKEGKLDCVMIYKTSRLARNTSDLLTIVEGLHKQNVEFFSLSENMKFDSNSGKLLLQILASFSEFERNNIAEGAYMGQLRRSQEGYYQGNLPLAYDKIPDSKHELMINQHEANIVKYIFESYAKGHGYRKIANALNHKGYVTKKGNPFSISAVTYILSNPFYIGKIQFAKYKDWNDKRRKGLNDKPVIAEGKHTPIISQSLWDKVQARKKQVSEKPQVHGKGTNILTGLISCPQCSAPMAASNTTNTLKDGTKKRIRYYSCSNFRNKGSKVCSANSVRADVIEKYVMDQILEIVKSNKVLKQVVERVNQENQVDVAALNHDIAYKQQQFDEINTKLKNLIQTIEDNPDLASTLKPTIHQYETQLNDITNQMNQLKQQQNQEKPSYDTKHIALLLQRIFQNIESMDKSQLKALYLTVIDRIDIRKDGNHKKQFYVTLKLNNEIIKQLFNNTPLDEVLLSTSSLFLPQTIFLQI

SEQ ID NO: 3718 - protein, 449 aa, synthetic construct
MKQAIGYLRQSTTKQQSLAAQKQIIKALAEKHNIQHITFYSDKQSGRTDKRNGYQQITELIQQGQCDVLCCYRLNRLHRNLKNALKLMKLCQKYHVHILSVHDGYFDMDKAFDRLKLNIFISLAELESDNIGEQVSNGIKEKARQGKLITTHAPFGYHYKRGTFTINKNESPTVIAVFNYYLQGNGYKKITQFLEEDNKLIDRKPYQVRNIIMNPNYCGRVINHYGQYDNMFPSIVSTNMYEQAQALRSQKQIKRTPSDNQLKQKIKCPYCGSTLTNMTIRKKNHTLRYYVCSRNMNASHFVCEFKGINAPKLETQVLTTCQDFFQNQQLYLKINDVIQKRIKKQRALETKSTLTQQQLIDKLAKGSIDAETFRKQSQSLLQQSKPTLSINEQQIQRSFENVIQQRFTLNMLYPYIDEIHISKNKSLVGIYFKNEPLNIVNQATQSSIA

SEQ ID NO: 3719 - protein, 449 aa, synthetic construct
MKQAIGYLRQSTLKQQSLAAQKQTIKALAKKHSIKQITFYSDKQSGRTDKRNGYQQITELIQQGQCDVLCCYRLNRLHRNLKNALKLMKLCQKYHVHILSVHDGYFDMDKAFDRLKLNIFMSLAELESDNIGEQVKNGIREKASQGKLITTHAPFGYHYHNGIFMIDTVKAPTVKAVFNYYLQGYGYKKIAQYLEADDKFINRKPYQVRNIILNPNYCGRVINQYGQYKNMFPAIVSTTIYEEAQVTRTQKQVKRKPSENQLKKKIKCPCCGSTLTNITIRKTNHSLRYYVCPKNMNASRFACDFKGINAENLEKQVLETCQNFFRDQQLYSKIKHAIEKQLKKQKMHNTNNTLTHEKLIEKLAQGTIDVETFREQSQSINLQHKPIQAISDIRIKASLQKVIQKSFTLNMLHPYIDEIHITKNKELSGIYLKDEPLNIVNQAVQSSTA

SEQ ID NO: 3720 - protein, 457 aa, synthetic construct
MRCAIYRRVSTDEQAEKGFSLENQKLRLESFATSQGWEVVEDYVDDGFSGKDTNRPALQRMFSDVDKFDVILVYKLDRFTRSVKDLNEMFETIKENEIAFKSATESVDTTTATGRMILNMMGTTAQWERETISERIKDVFGKLRENGIFSTGHPPYGYRCSGNKSIEIVEEQAEIVRYIYELSKTMGLFKISVELNRKGIKTRRNNKFGQSAIKRILHNPFYCGYMEVNNKWVPIKNEGYIPIISEEEFKTTQKILTKRNKAQTRSRSVSYYPFSGIVLCPECQRAMRGDRAKYGDYYYRYYRCVYGRENINCTNRKRIRAEQVDKAFAEYISGSFENTTIKLDSRDIKSDIEYELKHLDSKIERLSDIYIEGDITKSKYNEKMNSLLNEKEKLKRDLTSCKENVDAEFVRDQINKLESIWHLIDDKTKSESIRSVFDTIKIKQEKNKVTIMDHTLL

SEQ ID NO: 3721 - protein, 544 aa, synthetic construct
MELKNIVNSYNITNILGYLRRSRQDMEREKRTGEDTLTEQKELMNKILTAIEIPYELKMEIGSGESIEGRPVFKECLKDLEEGKYQAIAVKEITRLSRGSYSDAGQIVNLLQSKRLIIITPYKVYDPRNPVDMRQIRFELFMAREEFEMTRERMTGAKYTYAAQGKWISGLAPYGYQLNKKTSKLDPVEEEAKVVELIFDLFLNGLNGKDYSYNAIATHLTNLQIPSPAGKKKWNRFTVKAILENEAYIGTVKYKVREKEKDGKRTIRPENEQIIVPDAHTPIIDKDQFQEANKKIENKIPLLPNRSDYKLNELAGVCICADCGGPLSKYEAKRKRQNKNGTESLYHVKVLRCLNNKCMNVRYNDVEESILDYLKYLQALNDNELTKHLGNVIQSHENKNNIRSKKQMNEQFEQREKELKNKLNFIFDKYESGIYSDEIFLQRKSVLDKELQELKKAKDEINGLVDFKGGLDINQLKENIKNAIELYESSENREEKNKLLRITLQKVIVKMTAKRKGPIPAQFEITPILRYNFLIGETVSSYES

SEQ ID NO: 3722 - protein, 547 aa, synthetic construct
MNTVTNKIRVAAYARVSSLKQVDNYSIAAQLAEVEKYCTLHDYEMTSPYIDNGISGAEMNNRPALQQMLKDLKMNKFDKIVVWKLSRLGRSMKDILQIVEECEKNNVSFYSVSEHLGIDSDMHKLMLNIMGSLGEYERAILKDNIRLASSNKANEGKSVGGQTPYGYDRIDGNLIINQHESRIVKEIYQMYSQGMNYTAIAKTLNDKHEVTKLGKPHSKDSISYILKNKVYRGLVVYNQYVDWKKKGRKGYNDKPIITEGKHEAIVSQELWNKVQAQHKARKCYKRGNNKTDNLLTGLLKCKSCNANYVISNTVNTLKDGSKRRFRYYICRTRKQKGSDCKEAPNIRADFIEDYVFQNIKNLIRKPDLIQKVVNAVNSKRTPDTTQIKHEIANKQFQIEELRSKYDNLIEATEQDSSIIESIQPALLKYTQQIRELENSITHLERKQLVEHPKIDTNTVIDIFAVLFKNLESTNKTSLKNIYHLVIDHIYVEADKGNKKQFYITFKFNKDIVATLLNNINPDEQLLNCSSSFLSQIYSETFFLEFSL

SEQ ID NO: 3723 - protein, 463 aa, synthetic construct
MDKIIGYARQSIDKKKIENSVKSQIKAIQAYTNKHHLQDVTFLSDVKSGRTTTRDGYQSMLDMIRNNECQHIIVFRINRLNRNYHDFLEFQELCETHQVLITSLCDGQFDLSDKTQAFKIRFLAILGETESKIISENVNSANALKAKNHQLLGTNAPFGYIYKNKSFDIDPTKVATIKFVFNSYIQQGWGYKKISQALNNHIELFNRTPKQVKRILTNAKYAGLIRNQFGEYKGNFKPIIDETIFHQAETIRVSKQTLKHQHPMVLLRKKIKCICGATMTPIRMKRKHMTHPITYYICPLNENVGYKKCDMGYLVASEIDQQTIDIIEDNILTKPTLQCLESMVQKRLATKIHRSKPNFSKATLIEELSKKQISIEDYKMKINELEIWQYKMNYYQQSNSDINVHKITKNILNNYTLYLDQLTEMITRVTVDQDKNITGVFLKDYPINLLKEKDDINVVSKTK

SEQ ID NO: 3724 - protein, 506 aa, synthetic construct
MRAVITYLRYSSAIQGVDGADSTRRQNELFKQWLRKNSDAQVVASFNDEGLSGYKGKHLSGQFGDMLSRIESGEFPEGTILLVEAIDRIGRLEHLETEALMNRIIAHGIEIHTLQDGLIYTRDALSDDLGISIIQRVKSYIAHQESKQKSFRVSQKWEQRAKLALAGEQRLTRNVPGWIDPETFKLNEHAETVRLIFKLLLDGESLHNIARHLQSNGIKSFSRRKDANGFSVHSVRTILRSETTIGTLPASQRNDRPAIPNYYEAAIDASTFNKAQEILGKNRTGRTPASDNPLTINLFKGLFKCQCGASVHPTGTKNKYAGVYRCNNHLDGRCDVPPLKRKPFDRWMIDNFLGMIDVVSDGESERKIAALQHEVETVTARIKKATALLLEMDDITELKSQVKELNHKRTELQTTIDTLKRKTSLTDKELPQLKDIDLTTKAGRVECQLILSKHLKGLILCKDSVTVTLQNDTEITIPTNPLPLNDGSPILEIAKKELLEIDAYQL

SEQ ID NO: 3725 - protein, 494 aa, synthetic construct
MRVAIYIRVSTDMQAEDGFSIEGQRTRLTSYAASQDWEIHDFYIDEGQSAKDLKRPEMERMLADMEEHKFDVVLVYKLDRLTRSVSDLHDLLKRFDKHSVKFKSATEIFDTTTAMGRLFITIVAAMAEWERGTISERVRFGIEQMILEGKRPGGVMPYGYTQDGELIEEEAEIIRYARKLYMSGLGYQSVAVRLNREGKLRRGKLWTAATVAYTLENPFYAGILRLGSKLPGGNYVNHGRDDRVKCLYGDGDHPVIFTRLEYEETKEYMKRRTNGGFSRVQTYWFSGVLRCGRCGASMFGKMSNKRKRTDGSLVRTPYYICSNKHANKSCDMPIFRQVHVEHLFMEYIKQVTTDQETVKQVAATMQNNEVKIVDEIALAKKELKKIAERREKWQYMFVEGLITKDQIRKRIMEEDAAEEEIKKHLAENKNMMSAVPKSDDLKELDQLWPEMDDEEKKDMIFTLCSKIVLCTDETNVKGVKNKFFDAYIGEVLYN

SEQ ID NO: 3726 - protein, 507 aa, synthetic construct
MKRVISYIRFSSERQAKGDSLRRQSKMVNDWLKAHPEYYLDQDLSFRDLGVSGFTGKHLKGGLGDFLTAIEKGLVKAGDTLLIESLDRLSRQDVDQASELLRNILRSGVDVVTLSDGEHYTRESLKDPLALIKSILIMQRAHEESLRKAERIQAAWNRKKELISEGIKVSRRCPAWLRLNDDRKSFSVIPEKVETVKRCFQLRLEGKSIWEIVRTLNDEGRQTLNQHKAGSFGQSSVQDLLKNRSVIGYFTPKGCEEIAGYYPAIIDETTFYKVQQLSYARYGRKPASDKPLSVNLFKGVIRCSECGHALIITGFSDTRSGIYRCPLRNENRCSAKGLSRKQTDGTLLALLSRLDRFDSDTTNIIDTLKLHREHISSNIEKLVQLSLEIEDLNAITNKLKQLKNELSQVDADIEKETQRLKSIDVGCLSDCDLTTKAGRIEAQLIIKSAVKEVVLNTAKRRCKVTFHNGKVIDLPITEDPSEDVTEAIQSLSEVTERGLIDVDEVII

SEQ ID NO: 3727 - protein, 507 aa, synthetic construct
MKRVISYIRFSSERQAKGDSLRRQSKMVNDWLKAHPEYYLDQDLSFRDLGVSGFTGKHLKGGLGDFLTAIEKGLVKAGDTLLIESLDRLSRQDIDIASELLRRILRAGVDVVTLSDGEHYTKESLRDPLSLIKSILIMQRAHEESLRKAERIQAAWDAKKEAAKAGIKISRRCPAWLKLNDDRKSFSVIPEKVETVKRCFQLRLEGKSIWEIVRTLNAEGHQTLNQYKAGKFGQTSVQDLLKNRSVIGYFTPKGCEEISGYYPAIIDETTFYKVQQLSYARYGRKPASDKPMAVNLFKGVIRCSECGHALIITGFSDTRNGIYRCPLRNENRCSAKGLSRKQTDGTLLALLSRLDRFDSDTTNTIDTLKLHREHISSNIEKLVQLSLEIEDLSAITSKLRQLKNELSQVDADIEKETQRLKSIDVGCLSDCDLTTKAGRIEAQLIIRSAVKEVVLNTAKRRCKVTFHNGKIIDLPITENPSEDVTEAIQSLSEVTERGLIDVDVVEI

SEQ ID NO: 3728 - protein, 514 aa, synthetic construct
MRKVYSYIRFSSTKQAFGDSHRRQSKAIQDWLASHPDHILDESLSFEDLGRSAFHGDHLKEGGALRAFLEAVKQGLIPPDSVLLVESLDRVSRQSISHAQETIRAILEQGITVVTLSDGETYNRQSLDDSLALIRMIILQERSHNESVIKSDRIKKVWSHKRQQFEQDGTKITGNCPGWLKLNSDGKSFSLIPHHVETIHRIFDEKLSGKSLHAIARDLNLENIPTITNKKVDTGWTPTRVRDLLLKESLIGVAYGVSDYFPPAISKEKFHAVQMIRGQGKGKKPTSRQPSSIDIFKGICKCAECGSTLRQRNTKKTPEGRYPRGYLECRNRQLGRCNSKAFNRSLIEDILIQKVFPTLQYLSLKSNGDNISVTTLKADITSLEKGINNLISLAERGLGDLDTLAQRITNNRVELESKKKDLRQAEAIQSLRSDNDIQDSDRKTVEGRIKLQLAIKSFIKEMIFDYYKQEITIRLLNGKSFSGISVARENKDFDHSPVFEVLQKSLLDIDEVHL

SEQ ID NO: 3729 - protein, 507 aa, synthetic construct
MKRVISYIRFSSEKQAKGDSLRRQSKMVTDWLKAHPEYYLDQDLSFRDLGVSGFTGKHLKGGLGDFLTAIEKGLVKAGDTLLIESLDRLSRQDVDQASELLRNILRSGVDVVTLSDGEHYTSESLKDPLALIKSILIMQRAHEESLRKSERIQAAWDAKKEAAKAGIKVSKRCPAWLRLNDDRKSFSVIPEKVETVKRCFQLRLEGKSIWEIVRTLNDEGHQSMSQYKPGKFGQTSVQDLLKNRSVIGYFTPKGREEIAGYFPPIIPETDFYKVQQLSYSRYGRKPASDKPLSVNLFKGVIRCSECGHALIITGFSDTRNGIYRCPLRNENRCSAKGLSRKQTDGTLLALLSRLDRFDSDTTNTIDTLKLHREHISSNIEKLVQLSLEIEDLSAITSKLKQLKGELSQVDADIEKETQRLKSIDVGCLSDCDLTTKAGRIEAQLIIKSAVKEVVLNTARRRCKVTFHNGKVIDLPITENPSEDVTEAIQSLSEVTAKGLIDVDVVEI

SEQ ID NO: 3730 - protein, 507 aa, synthetic construct
MKRVISYIRFSSEKQAKGDSLRRQSKMVTDWLKAHPEYYLDESLTFRDLGVSGFTGKHLKGGLGDFLTAIEKGLVKAGDTLLIESLDRLSRQDVDQASELLRNILRSGVDVVTLSDGEHYTRESLKDPLALIKSILIMQRSHEESLRKSERIQAAWNRKKELISEGIKISKRCPAWLKLNDDRKSFSVIPDKVETVKRCFQLRLEGKSIWEIVRTLNAEGHRSMNQYKPGKFGQTSVQDLLKNRSVIGYFTPKGCEEIAGYYPSVIDETTFYKVQQLSHSRYGRRSVSGKPLSVNLFRGVIRCSECGHALIITGFSDTRSGIYRCPLRNENRCSAKGLSRKQTDGTLLALLSRLDRFDSDTTNTIDTLKLHREHISSNIEKLVQLSLEIEDLNAITSKLKQLKGELSQVDADIEKETQRLKSIDVGCLSDCDLTTKAGRIEAQLIIKSAVKEVVLNTAKRRCKVTFHNGKIIDLPITENPSEDVTEAIQSLSEVTERGLIDVDVVEI

SEQ ID NO: 3731 - protein, 507 aa, synthetic construct
MKRAISYIRFSSEKQSRGDSLRRQSKMVNDWLKAHPEYYLDQDLSFRDLGVSGFTGKHLKGGLGDFLTAIEKGLVKAGDTLLIESLDRLSRQDVDQASELLRNILRSGVDVVTLSDGEHYTKESLKDPLALIKSILIMQRSHEESLRKSERIQAAWDAKKEAAKAGIKISKRCPAWLKLNDDRKTFSVIPEKVETVKRCFQLRLEGKSIWEIVRTLNDEGHQSMSQYKPGSFGQSSVQDLLKNRSVIGYFTPKGCEEIAGYFPPIIPETDFYKVQQLSYSRYGRKPASDKPLSVNLFKGVIRCSECGHALIITGFSDTRNGIYRCPLRNENRCSAKGLSRKQTDGTLLALLSRIDRFDSDMTNTIDTLKLHREHISSNIEKLVQLSLEIEDLSAITSKLKQLKGELSQVDADIEKETQRLKSIDVGCLSDCDLTTKAGRIEAQLIIKSAVKEVILNTAKRRCKVTFHNSKSITLPITETPSEDVTEAIQSLSEVTERGLIDVDEVII

SEQ ID NO: 3732 - protein, 507 aa, synthetic construct
MKRVISYIRFSSERQAKGDSLRRQSKMVNDWLKAHPEYYLDQDLSFRDLGVSGFTGKHLKGGLGDFLTAIEKGLVKAGDTLLIESLDRLSRQAVDRASELLRNILRSGVDVVTLSDGEHYTSESLKDPLALIKSILIMQRAHEESLRKSERIQAAWDAKKEAAKAGIKVSKRCPAWLKLNDDRKSFSVIPEKVETVKRCFQLRLEGKSIWEIVRTLNDEGHQSMSQYKPGKFGQTSVQDLLKNRSVIGYFTPKGCEEIAGYYPAIIDETTFYKVQQLSHSRYGRKPVSAKPLSVNLFKGVIRCSECGHALIITGFSDTRNGIYRCPLRNENRCSAKGLSRKQTDGTLLALLSRLDRFDSDTTNTIDMLRLHREHISSNIEKLVQLSLEIEDLSAITSKLKQLKNELSQVDADIEKETQRLKSIDVGCLSDCDLTTKAGRIEAQLIIKSAVKEVVLNTAKRRCKVTFHNGKVIDLSITENPSEDVTEAIQSLSEVTERGLIDVDEVII

SEQ ID NO: 3733 - protein, 568 aa, synthetic construct
MTVEQFQRPAYIYCRYSSEMQSQGDSLRRQFQRCNEAIKKHNLYVKERITDEAFSGFHGDNLINGKLKDFIDRAIAGDIEKNAFLIVENLDRITRLQPSKAVNVITQILSSGLEIYQTSPECLFTFKNKKDEAMTIIMITLFAQRAHEESDTKSYRIKEAWISRIERILKGEQKILMDKPPYWLDVVEKDFDVNGKTKRLKCYQVNQTRTDEVLLILEYLKSMGIKESCKMMNAESTGKKWTVKAVQRLLQSKTLYGELDLKLSVREDGKKELQSRGLEMPQIYPAIISKPEFDEILELIKIRASGRGGGRKSTQFHNIFSKILFCAHCGGAYRYMHKREYSYLVCYNSEVHTCKYEKVLSLRFYDVQNAILAYGGYFDFNVLFKGVELKEYAADITDKQAELDAKREAFSNMFNSIMLKNNGIISSMYQSSLDMTERSIDELEKEIEALKQKDILNPSKRIKANGGALLLDPALLSTAFGRAKLNAHLKRMVERIELSHNKVTNDGYNLLKVKFIGVETVLEIKFQGTKRIFDDGGQDFSKIFDDDSDGFIDEEEWNKQSSMLNDMF

SEQ ID NO: 3734 - protein, 605 aa, synthetic construct
MRILLDLTQPFPEDTKFAVSYLRVSTKAQTETGYDEEGLSIAAQRDANQKKAEQLGAVIVAEFVDAAESAKTADRPELQAMLRFIHELRVISYVIVDKVDRLARNREDDVLINMAVRKAGAQFVSSKENIDETPSGKLLHGIMASIAEFYSANLATEAKKGMRQKAKSGGTPGHAPLGYRNVRERIDGREIRTVAVDSERAPLIQWMFSAYATGDWTMRQLTAELNRRGLRIPATKKLPERPLRYQHIDKMLVNRYYTGFVRYEGVWYEGRHTALIDTVTFEQVQAVRTARAAAREKVQKHPHYLKGSIFCGRCSGRFGVMNARNRWGTVYPYFYCLGRAKKEDCTQSTVLIADVEVAVADYWSRIQLSESRIAAIREQVMAALVGRQHSNRVELDRQEKRRKELQNQQLKLIEMRYADAISLEHLKSEQERITRELAQAQQIIDQCSTEIEAVMKVVEEALLLCANAHRLYLSAPPDVRRQLNQAVFARFWIIDDQVQGADLTQGFAHLLAPDLAQLSEVKNGEDTKIETRSRPGKGRARSTGVQRANLELVRPRDAIERPNGPLPADTTNPGPNRDRGSNVTVLVSEGGLEPPRPIKGTSTSS

SEQ ID NO: 3735 - protein, 507 aa, synthetic construct
MKRVISYIRFSSEKQSRGDSLRRQSKMVTDWLKAHPEYYLDQDLSFRDLGVSGFTGKHLKGGLGDFLTAIEKGLVKAGDTLLIESLDRLSRQAVDRASELLRNILRSGVDVVTLSDGEHYTSESLKDPLSLIKSILIMQRAHEESLRKAERIQAAWDAKKEAAKAGIKVSKRCPAWLRLNDDRKSFSVIPEKVETVKRCFQLRLEGKSIWEIVRTLNDEGHQSMSQYKPGKFGQTSVQDLLKNRSVIGYFTPKGCEEIAGYYPAIIDETTFYKVQQLSYARYGRKPASDKPLSVNLFKGVIRCSECGHALIITGFSDTRSGIYRCPLRNENRCSAKGLSRKQTDSTLLALLSRLDRFDSDMTNTVDTLKLHREHISNNIEKLVQLSLEIEDLSAITSKLKQLKGELSQVDADIEKETQRLKSIDVGCLSDCDLTTKAGRIEAQLIIKSAVKEVVLNTAKRRCKVTFHNGKLIDLPITETPSDNVTEAIQSLSEVTERGLIDVDEVII

SEQ ID NO: 3736 - protein, 582 aa, synthetic construct
MTNKPTAYAYIRYSSRKQGLGDKDSVDRQMNSIKAIAEQRGIEVRPENVFSDTGVSGYTGKNQEKGKLKDLIDLILNQQVKQGDYVFVESIDRLSRQRMRLSKDLVYKILDRGVTLVTTIDGQVYSRDNDDLRQDIMLTVIAERAHEESKTKSVRRISAWKRAKEQAESTGKIFNAHRPPYGIRFNKESEKFEIEPVEAQEILDIFESLKLVGINQTIKKLNSSSKRRWTQFHIRNLIDTKYPLGFFCSQRKVDGKLIFEKYIENYYPQIVPYDLWQEAITTMQSRKINKQSGRVSPDNYNVFRHIAKCGVCGENMYFHQNFNVRTNSYYYLNCRSNLETDGSCRHRFRYDFAFGILLQTVYQATTDEDYNVHPWQLLANEDWEEGTTIKVLSENSKITQMSEEDESEIIAAESFRELLAQLLARKETVSAKHKELVMAENEYLGHKIKLENFEKSLESGDGVISATFLKTLANQELKVAEAEKMVNQLKTEIAKSRSDITFYNYKDVIELNKTQEGRLRINQFFLQNNIHFKFRFDKTTRTLYAWIIQSNKEVERQARGFPINNPLSEFGLKNLTEYRDEG

SEQ ID NO: 3737 - protein, 697 aa, synthetic construct
MSQKISADHLCRGAVVYVRQSTMSQVVEHTESQNRQYALAESARAMGFASVTTIDDDLGRSGSGSIERPGFQKLVASVCAGSVGAVFCLEASRLARNGRDWHHLIDLCALVGTVVVDHDGIYDPVLVNDRLLLGLKGTMSEYELSLLRQRGIAARDSKARRGELRFALPPGYCWNELGQIEMDPDERVAESIRVLFRKFRELGSARQVLLWAIQSNVKLPVTRHGPAGIRIEWSRPAYHTVVQMLEHPVYAGAYVFGRTTQRTAVVDGRARKTEGHSKPMKEWSVLLHDHHPGYITWDQFEEHQRMIAENTHMKKRASRRSARGGRALLTGLARCGRCGRMMRVNYGMRAGHAHRYYCRGDEAHVGAILCIGIGGVRVDKAVAAAILEAVSEHAVEAAIRAAEQTSRADDDVRRALSCELEEARYDASLAARRYEVVDPTKRLVARELETRWNAALERVAHLEERAALLDREVASRPAIDQAQLMTLAYDLPAAWNAPGTDMRTKQRLTRILIQEVVIDLDDSTNEAIATVHWTGGRHTELRVARVNVGRYPSSQHFSAVEVMRKLGGQWPDRELAVTMNRMRCKSPDGKTWTTVRVTELRERLGIAPFDPMPSHAETICVEEASRRLGIYGSSIHRLIREGILPATQLMPSAPWQVPVAALDSEAVREGVRAIKERRPPHFKAQQEAEKSLKLPGF

SEQ ID NO: 3738 - protein, 557 aa, synthetic construct
MSKEKIKVYLYTRVSTSIQIEGYSLEAQESRMKAFAIYNDYEIVGEYEDAGKSGKSIEGRIQFNRMMEDIKSGKDGVSFVLVFKLSRFARNAADVLSTLQIMQDYGVNLICVEDGIDSSKDAGKLMISVLSAVAEIERENIRIQTMEGRIQKAREGKWNGGFAPYGYKLEDGKLFINEEEAIAIRTIFDQYVNTTIGANGISKYLENHGIRKIPRQNGKNPLFDAGLIRKILKNPVYNGKIAFGRRTLEKVHGTRNEYKQVEQDEYLISEGIHEAIVSDEVWQAAQVKLKSQAKKYEHVNKGKDTRTHLLSGIVKCPICGVGMFGNKCIKKKKDGTKYKDFYYYGCKHRQMIRGHKCTFRKQIREELLDDAVAEVIVKIVSNPKFASMMQEKINMKVDTSEIETEIDNYQKELRKCHSTKFKLIEEIDNLDVEDKHYKRRKQDLDDRLYRMYDKIDELESSLIDAKAKKQTIEAEKLTGDNIYKVLIYFDKLYKVMNDVERRQLITALISEIQVYEEKQPNGQWLKSITFKLPIIEENLNIGLDNDEHVEMLSLLKK

SEQ ID NO: 3739 - protein, 529 aa, synthetic construct
MTIAYSYIRFSSSQQSQGDSLRRQTQLVERYCNEHNLTLSDTTFQDLGVSAFNSANSNEDSGLGQFLSALNQGLIDTGSYLIVESLDRLSRAKVQTALRQMLNIIELGVKIVTLMDNRIYDQESDTTDLIISLTIMERAHNESKTKSERIRAAWENKRQNPHTTNRHGITPFWLTLNSDKRSYTIVNKHADIVRKIYQLSIDGWGVVKIVRFLNESEIPAPKGGSWSSTTVCRVLNTKAVLGHYEPTQNRQSLNTVIENYYPAVIDEQTYYLSQKRKSERSTPESAGRKTEYPNPLHQIAKCKLCGSSMYYDNKSKTLKYLTCREFKKKNCTNKPIRIELIHRFILEVFNSPMYIKQHVELADKSHQRDTNKLLELEGNINEKKKALKGLLSFTNDFTNALIRDEVKTRSEHIQELEKQLESAKAEQAVERDTDTQVSFKEALKLTINAFQLPLEGKTELSTEELFNTRVRLNRVLKQTFNTLSILHDKESKRITIDTEATDNNKLSFSVETNQKAISEPLSNRVWLMY

SEQ ID NO: 3740 - protein, 507 aa, synthetic construct
MKRVISYIRFSSEKQAKGDSLRRQSKMVTDWLKAHPEYYLDESLTFRDLGVSGFTGKHLKGGLGDFLTAIEKGLVKAGDTLLIESLDRLSRQNVDRASELLRNILRSGVDVVTLSDGEHYTKESLRDPLSLIKSILIMQRSHEESLRKSERIQAAWNRKKELISEGIKISKRCPAWLKLNDDRKSFSVIPEKVETVKRCFQLRLEGKSIWEIVRTLNAEGHQTLNQYKAGSFGQTSVQDLLKNRSVIGYFTPKGCEEISGYYPSIIHETDFYKVQQLSYSRYGRKPASDKPMAVNLFKGVIRCSECGHALIITGFSDTRSGIYRCPLRNENRCSAKGLSRKQTDGTLLALLSRLDRFDSDMTNTIDTLKLHREHISSNIEKLVQLSLEIEDLSAITSKLKQLKNELSQVDADIEKETQRLKSIDVGCLSDCDLTTKAGRIEAQLIIRSAVKEVVLNTAKRRCKVTFHNSKSITLSITENPSEDVTEAIQSLSEVTERGLIDVDEVII

SEQ ID NO: 3741 - protein, 550 aa, synthetic construct
MKVALYARYSSDNQRDASIADQFRMCRLHAEKQGWQIVEEYSDHAISGSSLLRPGIQALISDATRGRFDLILAEAMDRLSRDQEDIAGLFKRMSYSDVKMFTLSEGEVSHLHVGLKGTMNALFLKDLADKTRRGQRGRVEAGKSGGGNSYGYDVVKKLDASGEPIRGDRTINEAQAEVVRRIFRDYAAGKSAKTIAFSLNRDGIAAPSGGDWGFSTINGNPKRGNGILNNEMYVGKIVWNRQRFVKDPDSGKRQARPNPESEWVIQEAPELRILDDDLWNAVKARQGDNRIERDESGLADVRTMNYRRRPKYLFSGLTKCACCGGGYSAISATLIGCSTARNKGTCDNRVNIRREELETRVLNALRTRLVDPEMFARFCEVFTQEMNRLRREGRAGIASAEAEIAKIDRELDTLLNLILKGGAADAINAKMVLLEQRKKELALFLAEAEEPPPLLHPSMALQYRKRVQQLYEALQDEEEEKRIEAADILRSLVDKIVLTPVDGKVEIDVQGDLAGILMISAQTKNPALGAGSSQVKVVAGARFELTTFRL

SEQ ID NO: 3742 - protein, 543 aa, synthetic construct
MGKNGARVYSYLRFSDPRQATGSSADRQLAYASAWASKHGMELDATLTLRDEGLSAYHETHVKQGALGAFLRAVDEGRIPAGSVLIVEGLDRLSRAEPLLAQAQLGQIVNAGITVVTASDGREYNREGLKAEPMNLVYSLLVMIRAHEESDTKSKRVKAAVRRQCEAWVTGSYRGRIVSGKDPQWLAWDGDSWQFIPERVEAVRFALDAYRSGIGAARLVRLMHEKGMVLSDWGIAAQQVYRLVRLPALRGAKRISIDGEDFMLEDYYPRLLSDEEFSELETLVGQRYRRRGKDEIVGIVTGIGITRCGYCGTALVAQNLMQRVKADGSLEDGHRRLHCVSYSKNGGCNGGSCSSVPIERAVLAYCSDQMNLQRLLEPSSAGEDLRPRLVEAQKGVAEIERQLERVTDALLADDSGAAPLAFVRKARELEEDLERRRSAVQALEQELVAKSASAPAAGASKWAELAERAKSMADAEAREQARQLVMDTFETLVVYMRGVIPNPKGRYIDVMMKSRAGQTRWIRVDRRTGVWKEGADRPTTRRP

SEQ ID NO: 3743 - protein, 473 aa, synthetic construct
MAIRVAIYTRISRDDEGDGLGVARQREDCERLADLRGWAVAKVYEDNDVSAYKRNVRRPEFELMLSDLADGLIDGVVAYDLDRLARQPKDLERLIDLFDERKRRVFATVTNDVNLGTADGRTMARVMVAFANKSSHDASRRIQRKHLELARQGKSSGGPAPYGWQSDGRAVDPVAAGHIRAAQSQLLAGVRIGTIRTDWQRRGLAHPREGTTRLPHHAVERMLTNPRLCGYRTYRGEILLDDDGQPVLGQWETINTVEEWEAVCAVVAERKQKFPGRSLARKYLLSGIARCGLCHSKIRGQVNRRRNANGKGPTFSYQCSVVNGGCGKVGRAGESVDEFVISLVLAEQRERAASTAVQGDEPWPNASALADVEADIAALTQAAKGKEITVSTLLQLLPDLERRRDELKLERARHSKGRQQLATQTVDSIEDFRSLPIERQQALILHSLSTVLVHPAGRGKRRFDPSLIEPVWR

SEQ ID NO: 3744 - protein, 597 aa, synthetic construct
MKQKQKTLQRITGDDYVAYLRVSSKGQVDTDYNPEGVSIPAQREKVEERGRELGASKAAEFVDPGRSARTIDERQEFQEMIAYLREHPNVRYVIVYMLSRFARNRLDDAIMVATLEKLGVKLISAVEKNIDDTPTGRMLHGMLAVINEYSSNQSAEDIKYKMGQKAKNGGTITRTPVGYLNTVEIIDGRRVRTVAIDPVRGPFIRLAFELYATGEYTVDEVAGELYDRGLRMPRDARYPTERGISTNRLYVVLRDDYYCGWITHDDKKYKGRHAPLVPQDLFDQVQMVTDTRNTARERRRVHHHELKGSLFCGSCHDRRGDRRRMIVQHATNRHGNVYRYFFCNGRFDHICELPYVPIEQAEEAVEDHYATVRFTPEFIATMRSELAAMVDEQQATTKILQAQLTKQLRALDTKENNLIDLAADGSLPQAKIKAKLQEITKQRDRLTTRLHDVDEDLSTAAEIIEACLQLLQDPQALYQRCNGQQRRQLNQALFEALYIDEDSNGDLRVSHILKEPFGILHEAQSQHPAPTGPLEAPPSLRAVLPAPKRQSAPPQPGTGAGLQLTGAALVGGPWKVPGSNNLLMVGDTGFEPVTSSV

SEQ ID NO: 3745 - protein, 507 aa, synthetic construct
MKRVISYIRFSSEKQSRGDSLRRQSKMVTDWLKAHPEYYLDQDLSFRDLGVSGFTGKHLKGGLGDFLTAIEKGLVKAGDTLLIESLDRLSRQDVDQASELLRNILRSGVDVVTLSDGEHYTKESLRDPLSLIKSILIMQRAHEESLRKAERIQAAWDAKKEAAKAGIKISKRCPAWLKLNDDRKSFSVIPEKVETVKRCFQLRLEGKSIWEIVRTLNDEGHQTLHQHRAGKFGQTSVQDLLKNRSVIGYFTPKGCEEISGYYPAIIDETTFYKVQQLSYSRYGRKPASDKPLSVNLFKGVIRCSECGHALIITGFSDTRNGIYRCPLRNENRCSAKGLSRKQTDGTLLTLLSRLDRFDSDTTNVIDTLKLHREHISSNIEKLVQLSLEIEDLSAITIKLKQLKGELSQVDADIEKETQRLKSIDVGCLSDCDLTTKAGRIEAQLIIKSAVKEVVLNTAKRRCKVTFHNGKVIDLSITENPSEDVTEAIQSLSEVTERGLIDVDEVII

SEQ ID NO: 3746 - protein, 517 aa, synthetic construct
MQTKKAYLYIRVSTDEQADKGFSLQYQEDSLKRFCQIHGYEIAGLYKEDYSAKTFNRPVFKQLLPVLKKNRKENSLLLFTKWDRFSRNAPEAYGMISQLNKLGVDPQASEQPLDMSIPESRIMLAFYLSAPDADNARRALNVSTTMRNIKKGGRWVSTAPKGFKNIRYENKKATIIPNEDAKHVVWVFEEIAKGVLSADEVRQLANKRGFVVSRSYFWTMIRNPLYCGKIFVPAFKDEEAYYENSVHESLISQELFYRVQNILDGKKRAANVNTLQQEELPLRGFLVCSKCGSRLTGSASKGKLLRYYYYHCQHGCKERYRADIANREAIRELQEVSAKKEVFQLYKVILEKELKKTSKEVCDDNRKVVAEINKHKERIANAETLMLDREIDLSEYKAIKGRYEANIRQLETEMQNDTPRRSDYIKYLDFGFNILQNVDTIYTGSNAELKKQILCSIYSEKLVFDGIKYRTPVYHEALALILNADKGFSRNEKGQSHNNLTLSSGVARTGFEPVSPP

SEQ ID NO: 3747 - protein, 526 aa, synthetic construct
MKGHQKYKAVIYARVSSVQQKTQGHGLTSQQTRCAEFARSKGYEVVEVFFDDMTGKVTKRPGMTAMLAFLKRSKETHVVIVDDISRLARSVKTHLILRNSISKAGGRLETPSIQFADDDDPDTLFFENIQAASAQHQAEKNGQNARNRTRSRALEGYWAWNAPLGLRFARVPGHGNLLVPDGAVAEVVKEALLGYASGRFETLSEVMRFLDKHPAYPEVRRRQLRVERVRELLERPIYAGYVDMPAWGLHMIPGKHEALISFATFQTIQDRLQGKAKAPATPSLSEAFPLRGAVCCSACGNRLTSCFSKGRSKLYGYYVCVNRRCYSKGKSVRQEVMEQEFEDILRRLTPSANLMALAHAMFSDLWHGRIAAAKAKAAAIEAELRKADKSIGQYLDRIAETTTPTLIDAYEQRIRELSKRKAELREEVVVEASPKGTFDEVYRTALMFLSNPWKLWQSERIEDKRGVLKAVLAEPLTYVRGEGYRNPKTSAPFGFMAALHEGCRMVDATGIEPVTPTMSTPRMRCF

SEQ ID NO: 3748 - protein, 570 aa, synthetic construct
MARLISYLRMSTSEQLRGFSLERQRKLIAEFAAKNGLSVEEENTLEDIGRSSFSDDAQQKELAKFFENLNAGKYEPGDVFALENIDRLTRRGPVDAILKVNQIISKGLKLAIISGNEQRIIEDVNDVFTIINLSIDASRANKESKNKSDKGLSNWQEKRNLAASQKIAMTAQAPAWLDTEIFYIFDEEKKKNIKRRKYVLNEEKAEAVRLIFDLYLSGNGALKIKNILNERSIPTFKGAEYWEPSIITKIIKNPATFGLYQPKKQGTGKRDLIAAGEPINDYFPAVITRDLFEQCERIREGNGTRKGRKGKLFTNLFTGLLTCSKCDGPVHLINPGIDKRNKVQKSIYYLVCKRAKFTKECTTKRVRYDDFETALLKAIQEINLADILNENNPLEILIKKQRSKETEINKKKKLIENFQRQFLENDGDLPAFMISQAKDAEISIKELEEEQREIAGEIAQLNVYNSNVENAIEELKENADYETRSKINLLFHEIIKNISLDTENQFYAIRFKNGVLRLISAAGFVLTTDEQTQADINAILQSIEGPDIPREIATDAEKLIEYLKAREVVE

SEQ ID NO: 3749 - protein, 564 aa, synthetic construct
MSKVFSYIRFSSAKQSAGDSYARQVKAAKAFCDEHGLEMADPREYLFFDAGRSAFKGKHLDDTGELARFLSYVEDGTIPSGSYLVVESLDRLSRERVRDALPRFLDLLAKGINVYTSVDKRLYTKDYNELDLIISIISMSRAHEESATKGDRVSSAWRAKQKEARTTGKPLGKLRPLWLDVRPDGYVLNADKAAVVRRIFDLSTKGHGSRIIAATLNQEGIPAFSAGRKNFSGLWGFSTVRHILDSRTVLGEYQPHVFIEGKRTPDGEPIKGYFPAAVTEDDFYLAQAARTSRKTHTVTKATTNFNVLAGILNCYKCGAAMHLQGQRGRKYYKCSKTTRGLCDAGIISAPRTEEVFKEILTKVDSLSLVQDSSGSLQKGLQIVEGRIASLKARQDDAAASHAEFPSRITAKLLHELEADIGALESERATISEQLVSDNVINKDDFFERLDLVSFEGRVAANNLIKRLGLFIFASKNGRTDETYWITKSNAIPLPFSAEAPNLLFYLMHRGKEIRFEAMYDEYVDLQVAQGEINEVEAIFDKTESWDELPSELLALLKARHGIAK

SEQ ID NO: 3750 - protein, 528 aa, synthetic construct
MTYQEGGEAMKKITKIEGNKVASIIKPKLRVAAYCRVSTGGDEQLVSLQAQKSHYETYIKANPEWEYVGLYYDEGISGTKKENRTELLRMLSDCENKKIDLIITKSISRFARNTTDCLEMVRKLLDLGIYIYFEKENINTQSMESELMLTILSGLAESESISISENNKWAIQRRFQNGTFKISYPPYGYDNIDGQMVVNPEQVEIVKYIFAEVLSGKGTQKIADDLNQKGIPSKRGGRWTATTIRGILKNEKYTGDVILQKTYTDSRFNKRTNYGEKNRYLIENHHEAIISHEVFEAVEAALNQRAKEKGIEKRNDKYQNRYSFSGKIICSECGSTFKRRIHSSGTRKYVAWCCSKHLKQITECSMQFIRDEDIKTAFVTMINKLIFGRKLILQPLLDALRGMSNSDNLSRIQELEKQIEKNAEQRELLVKLMAKGYLEPALFNRENNELQMEADNYMGQKEALIHALNGELSKVQEVSNLIKFTNKAEMINTFSEQIFNDYVEKIIVFSRVEIGFVLKCGITLRERM

SEQ ID NO: 3751 - protein, 539 aa, synthetic construct
MQNQRVYSYTRFSDPKQAAGSSAERQMAYAERWAADRGLVLDSTLSLKDEGLSAYHQKHVTQGALGVFLLAVSEGRISPGSFLVVEGLDRLSRAEPIQAQAQLAQIVNAGITVVTASDGREYNRERLKAQPMDLVYSLLVMIRAHEESDTKSKRVKAAIRRSCEGWIAGTYKGIIRNGKDPHWAKWNGTKFELMPERAEAVLLALDLFKGGHGGARIVQELNKRGMSFSDGGAAAASALYKLFKRKDLVGTKTLTLDGEEYNLFDYYPRLLSDNEFAELQAMNATRTRRKGKGEIPGIITGMAILYCGYCGSAVVGQNMMDRNKKADGTLLDGHRRLICCGHNLGRSCSVAGSCSAVPIEKALLAYCSDQFNLSSLTKGDDRSQSLRDQLVAVKNTIIEMDRQLGRVTEALLAADDGSVPLIFVRKARELEMGIAEAKSQENNIEVELRKNSARMNPDQADAWAALVDGTLGLDYDTRMRTRQLVQDTFERIVIYHSSTSPADNGNKKIDLLLIAKGGQPRLLRIDRKTGAWAAGEEMR

SEQ ID NO: 3752 - protein, 604 aa, synthetic construct
MKKVFVYHRVSSDQQLDGSGIARQAELLEGYLERTGICTDMDDPAPVVLSDQGVSAFKGLNISEGELGAWMEQVRNGMWDSSILVVESIDRFSRQNPFDVMGYINALMTHNVAIHDVMANIVISRSNSKDLPFVMMNAQRAYDESKYKSDRIRKGWAKKREQAFNKGTIVTNKRPQWIEVEKDKYVLNEKSAVVKEIFALYQTGMGCPTIAKQLQRKEGKQYKFNRPWTGELVHKILTNRRVTGKIFISEIIRNHDDIENPVTQKKYDMDVYPVVINEEEFELVQELLKSRRPNAGRVTVKKDGQEEVLIKSNLFSGIARCTECGGPMYHNVVRAKRTPKKGDPKIEEYRYIRCLNERDGLCENKAMTYETVERFVVEHLLGIDLSTVMKEQEFNPKIEVLRIQIDQVKDQITNYENGIERRKSAGKPITFDMREDLDDAKFELEQLLARQASLATVQVDVPVLQDINVTELYDVNNVDIRTRYENELNKIVSNIRLKRNGTSYTIDISYKQNELKRHVLFVENKKKEQTLISEVIIEDVDGGKFYYTPSFMIRLEDGEISFQQTNKDLSIVDYSLLLNYVDAVDRNDTVGVWMRNQFNFLTSN

SEQ ID NO: 3753 - protein, 452 aa, synthetic construct
MKAAIYIRVSTQEQVENYSIQAQTEKLTALCRSKDWDVYDIFIDGGYSGSNMNRPALNEMLSKLHEIDAVVVYRLDRLSRSQRDTITLIEEYFLKNNVEFVSLSETLDTSSPFGRAMIGILSVFAQLERETIRDRMVMGKIKRVESGLPLTTAKGRTFGYDVVDTKLYVNKEEAQHLQLIYDIFEEEKSITFLQKRLKKLGFKVKSYSSYNKWLMNDLYIGYVSYSDKVHVKGIHEPIISEDQFYRVQEIFSRMGKNPNMNKESSSLLNNLIVCEKCGLGYVHRAKDTVSRGKKYHYRYYSCKTYKHTHELEKCGNKTWRADKLEEIIIDRVKNYSFATRNVDKEDELDSINAKLKVEHLKKKRLFDLYINGSYEVAELDKMMADIDAQINYYNSQIEANKELKRNKKVQESLAELATVDFDSLEFREKQIYLKSIINKIYIDGEQVTIEWI

SEQ ID NO: 3754 - protein, 642 aa, synthetic construct
MKKAALYVRVSTMHQIDKDSLPFQRQELQNYAKYALGIDQCEIFEDAGYSAKNTDRPKYQQMMNRIRQGEFSHLLVWKIDRISRNLKDFSEMYDELKKYKVTFVSKNEQFDTSTAMGEAMLKIILVFAELERKITAERVFSIMLSRAEQGLWNGGSVPIGYELPSVSEGDNEKPFPVVCEKEASVVRYIFNLYEKLASTSKVAFVLNNKQITTKQGSNWTAKAVRDVLRNSFYIGTYEYNKRESEGSRRLKDKEEWVVKKDNHTPIVSKEQYYRVNKMLDDNYKGIGDAQRANIHTHIFSKMLYCGKCGMLLTSGLDVARKDGYRPSRYTCSTNKQVENIHNCNNFVSDITITPFILNYISNLIRFQDKATPKHTVKDMERALLRGRVFVDVLGIDKAALKETLTILINGSSKQVYSQNSTSESININFELEELKKEKTKFEKALSRLEDLYLFSDEGISQKDYIFKKRELIDRVEKLDAEINVIYQNSVNETHNKFVDNAKYFLITQELQQSRDVDYREMLDVVGIEVLADFVQSVIDRIIIKDKKVAAITFKNGITHKFAYKPLQERKAHGREKFLYQSYEEVVLNYLREHGSASRTEIENLTNMKRSSTLALLNELMEKNLIEKRGNSVAIRYFIINKK

SEQ ID NO: 3755 - protein, 523 aa, synthetic construct
MAVSRNVTVIPAIKRVGNNKNSESKPKIRVAAYCRVSTDSEEQASSYDIQIEHYTNYIKKNKEWELAGIFADDGITGTNTKKRDEFNRMIEECMAGNIDMIITKSISRFARNTLDCLKYIRQLKDKNIAVFFEKENINTMDSKGEVLLTIMASLAQQESQSLSQNVKLGIQYRYQQGEVQVNHKRFLGYTKDENKQLVIDPEGAEVVKRIYREYLEGASLLQIARGLEADGVLTAAGKAKWRPETLKKILQNEKYIGDALLQKTYTVDFLSKKRVKNNGIVPQYYVENSHEPIIPRDLFMQVQEEMVRRANLRGGKGGKKRVYSSKYALSSIVYCGQCGDIYRRVHWNNRGYKSIVWRCVSRLEEKGSECTAPTINEETLHTAVVRAINELLANKEPFLSTLQKNIATVLNEKNDNATDDIDRKLEELQQQLLIQAKSKNDYEDVADEIYRLRELKQNALVENAEREGKRQRIAEMTDFFNEQSCELEEYDEQLVRRLIEKVTIHDGRVEVEFKSGISIDIEN

SEQ ID NO: 3756 - protein, 521 aa, synthetic construct
MKKITKIEGNTANPFIKPKTRVVAYCRVSTDSNEQLVSLQAQKAHYESYIKANPEWEYAGLYYDEGISGTKKENRSDLLRMLSDCETGRIDLIITKSISRFARNTTDCLEMVRKLIDLGVHIYFEKENINTGSMESELMLSILSGLAESESISISENTKWAIQRRFQNGTFKISYPPYGYQNIDGQMIVNPKQAEIVKYIFAEVLSGKGTQKIANDLNQKGIPSKRGGRWTATTIRGILTNEKYTGDVILQKTYTDSHFNRHTNYGEKNMYLVENHHEAIISHKDFEAVDAVLNQRAKEKGIEKRNSKYLNRYSFSSKIICSECGSTFKRRIHSSGPRKYIAWCCSKHISQITECSMQFIRDDDIKTAFVSMMNKLIFGQKFILRPLMDGLRNQNNAAGFRRIGELETKIENNMEQSQMLTGLLAKGYLEPALFNKEKISLEAERERLLVEKDQLTRSINGNFAKVDEVDRLLKFTTKSKMLKTYEDELFENYAEKIIVYSREIVGFELKCGITLKERLVN

SEQ ID NO: 3757 - protein, 560 aa, synthetic construct
MPKVFSYVRFSSAKQSAGDSKARQIKSAKAFADEHGYELADPTDYLFFDAGRSAYKGRHLDDTGELARFLAFVEDGTVPTGSILVIESLDRLSRERVRDALPRFLDLLAKGINVYTSTDKRLYTSDYNEIDLIVSIITMSRAHEESATKGSRVSSAWRNKHKDARETGKPLGKLRPLWLDVTPDGYLLNPDHAKVVQRIFDLSAQGHGSRVIAANLNQEGIPAFSAGRKNFSGLWGFSTIRHILESRTTLGEYQPHIFIDGVRTPSGDPIKSYFPPVITEEQFYLAAAARASRRLHKITKVTKNFNVLAGIFFCQKCGGAMHLQGFKDRKYFKCANKQKGLCDTGVIGSERSELVFQEVLAKVDSLSLVRSSSGSLTKKLQVSDGRIEELRAKQANAEASHQEFPSRITAKLLQQIEVDLEALVADRNAIAQNLATDQVVSKSDFFEKLDLTSYEGRVAANNLVKRLDVRISVSKLGRLDEVYRVLISSTLAFLISHHERKLTIRSMDARILDKQVMHGEITQEQREQLEHIRDAGESEGAIKRAAALFKWEQSASTTTE

SEQ ID NO: 3758 - protein, 534 aa, synthetic construct
MTKKCYPYVRFSSTRQEDGSTRQRQNELIDAFVSKHGLEVDRHLEDAGTSAYHGKNASAEGVLGQFLREVRMGEIEKGSYLLIENFDRLSRDKIVRSNKIFTDLLFAGVRIVILDRDKVYDAENLDFGDWINALVEFERANAESKRKSDFSSKAWNYNREKMRSGEIVTKKVPTWLKVENNAFVIDYEKVERINTLFKLSLSKGLQEATREYNELYSEKLAIHQTQYLLSNRKLIGEHSPQKIHYDESGQLKRKDEGDPISNYYPVVVDEKLFYQVQEVIKSRKPFSGRYSNQRYNVFRDLVVCKACGGTIRYMNKGERDYFICTNSMTGKCVLNSHFGQLSIRGKKLFSMFFAFTAGLNISALLEENTQAEELKSQTMKLEAKRTQITQRLENFKAEVKTMILEGKTIPSTYNELITELESNRTNIDQEIESNTKKLDQIYTSEKSFSNLKSNDISTVLYDRSDEAIEKRVKYNAELKKIIRTIKIDYLNTFLQIEFFNGVTRRIDEDGKAYDYNMEELTATMYEAAKKYAPQ

SEQ ID NO: 3759 - protein, 554 aa, synthetic construct
MTKAYAYIRYSRAIQATGDSEHRQLTALELFETSTGTKIVEVMYDKGKSAFRGDNARSGNFKEMLDRMQSGAIRPGDYLVVESIDRITRQRVLDGVELLQGILKKGINIYTTVDQKTYSYNDPSRDFENLLMISLIAKRANEESETKSGRLLSAWKARKAKAENGEVIIKKGKSIPYGLRVEHGKFVIQKEEQGEIQKLFELLLKFGLNTAITKINETSLKKWNNGTVNKILKNKTVIGCMATHRIEYTEEGKARKILTGFIEGYYPNLIEPSLFYKAIDAMSNRKQKNWSGRRTEQDFNIFKHCIYCEQCGGKMYYDHRGSRYKGKIYPFFKCDNARVQKHICTADNIRFEYVFGSLLECVYLVNRVATGITKDFKGISTQARYLNPKINNLLKIDDSQQNIELEEKRKKLVASRTKLDGMNLRMIEADYNVPTEYMRQMSSLELEIEALKKSIALLDDTGSDGINIEDTQTIIDLFQTDDGRAKLNSFFKSNDIIFYASHIKSTRCTVFRMHRKNSDVDERISGTTKVFPLKNILQEFGLGDLQSMFDLTIN

SEQ ID NO: 3760 - protein, 597 aa, synthetic construct
MTSRPKAYSYVRFSTPEQAKGDSRRRQYKAAIEYADRHDLELVKDSNYAFLDAGVSAYRGTNVNRVTSSLGRFYDYVKQGKIVSGSYLLVESLDRLSREQVTEALPRFLDLLNSGIVVVTFGDGTVYRKSAEPMQLVMSIFHMSRAHSESSVKGKRVSEAWQQKQSLARSKGLPLGAACPQWLSFDGEAYRVIADRAKTVRRVFDLTVQGYGQRAIVKLFNSEGVPVFGSENRNKSGLWGNSSIAKILANRSVLGEYQPNIWTEGQRRTSGEPIKGFYPAVIDEELYYAALDGRRSRDVSKITKTTSNFNVWAKIALCAYCKSPMHLVNKGAPPKGQKYLRCSKSAKGACINRSVRLDVSELVFKEMLAKLNMTSLIKDNAQLLRKRISELDGRLESARVKLVDMSALMESHPSRTLAEAAANIEGNMSKMEIELDQCKLDLSSEYVADKFDFFKKLDLVSYEGRYLANQQVQRLGVKVRIKHDDIRVQYGVMVGEFPKFFYMADHGQALLFVPFSSDLLRAGIRQNDLQATRFITKPGGMLKEALSDESMAAYKINVPGDIDVHQFQFSAADNEAANQKLLKMFVKQSRGGDKGAS

SEQ ID NO: 3761 - protein, 534 aa, synthetic construct
MPYAVGYARFSSAKQGSGTSLERQQEMIAKWIGENPEYKIYPKTFEDLGRSASKGDHLKHGFGKLQEAIELKEIGEGDVILVEAIDRIGRLPELKMFSLINQIIEAGVRIITLQDETVYGPIITAGQIWLLLGKVQQAFTYSQELGGRIKKSYTIREQMARKGLIPKRRTPIWLNTDGTLKDDIAAAMKTAFEDALSGLGERRILKRLKAMHSAFEKSHPASVRKWLTNKTAIGFWREHLIYPPIVSQELFYQVQRCFEEAYVPASSPTKHFLSGLVKCGNCGSSFQVKVNKSSPNSMHCSARAIHGIDRCENGTSFPVPVLLHICHDTATLAVENALQNIELSKTKKQSIILEGRLNDIAKKITNLMDSLEQYGPVPELDIQIKLLLSERTKLENEKLYLAEDDTVNTSNYENAWDYQHELIEDDPMRLNALLQSVGYQIKCYANRSILANTIGNELSKSTYINYNRKIQAYRLLVNGNIYNIANREGTFTKERLRTFEEMLRAQREGTALYKEVQLPPEQQEMYDFLESLEG

SEQ ID NO: 3762 - protein, 515 aa, synthetic construct
MQTAIYLRKSRADLEAEARGEGETLAKHRSTLLKIAKEMNLNVLAVREEIVSGESLVKRPEMLALLEEIEDNKYDVVLCMDMDRLGRGGMKEQGIILETFKRSNTKIMTPRKTYDLNDEWDEEYSEFEAFMARKELKIITRRMQRGRIASVEAGNYLGTHAPFGYDIHRLNKRERTLTINSEEASVVRMIFDWYANEDMGASAIRSKLNDLGYKSKLGNEWNPYSILDILKNNVYIGKVTWQKRKEVKRPDTVKRSCARQDKSDWIIADGKHEPIIPESLFEQVQEKLNSRYHVPYNTNGIKNPLAGIIKCSKCGYSMVQRYPKNRKETMDCKHRGCENKSSYTELIEKRLLEALKEWYINYKADFEKHKQGNKLKETQVIQMNEVALRKLEKELVDVQKQKNNLHDLLERGVYTVDIFLERSKAVSDRINEITSTMENLKKEIKTEIKKEKVKKDTIPQVEHVLDLYFKTDDPKKKNSLLKSVLEKAVYKKEKWQRLDDFELVLYPKLPQDGDI

SEQ ID NO: 3763 - protein, 532 aa, synthetic construct
MPVKNTLPRAFSDVFRDDETINVYSYIRFSSKAQALGFGEVRQLEQLNRFFEQYPQARQVERYEDLGVSAFKGKNLKSGQLARFVERIKSKEILPNALLLVESFDRISRMGGYDALELIISIIQSDCSIYTLFDNRLYSKRKKDSSVDISLIQNILERANDESKSKSERISDAKARNLEKGENGGIITKRCPFWISFVDDKFVLNEHAKAVKRMTELCFDFGFQSIAKELNKENHPKKYTDSTIGKVLHKHAIYGSFLAMKNDENGNRTIVNKEIRNYYPAIISESEFHRISEKLKERQDPSLAGRKAQEFRNILRGLVFCKCGSTFRFHAQKSLYVDLVCHSSTLGQCKYALPGKGIRHRYARIEEIFLAYQSLIPFHKIIVKNEDIKALEKEHQEILGQIIIKEKALANNFSILEKSSDSAQKYITNRIDEVSQELDKLKADEHKLNLQINSLHLTTKSDLKSIEIFRLLITEKGRIKINNFLHSQKIKLIITPVKKKFFSLDIYHDEKHIDTIDVTPDGYAAHHKPHLK

SEQ ID NO: 3764 - protein, 539 aa, synthetic construct
MTAGGAKVFSYLRFSDPRQSTGSSVDRQLAYALAWATKNLMLLDETLTLKDEGLSAYHERHVKQGALGAFLRAIDEGRIPRGSVLIVEGLDRLSRAEPLLAQAQLAQIINGGVTVVTASDNREYNRASLKAQPMDLVYSLLVMIRAHEESDTKSKRVKAAIRRQCEGWIAGTYRGLIRNGKDPQWLQLTSEGWQLIPDRVAAVTRALELYSQGLGAGRAANVMHDEGFKLTEWGISGLQIYRMIKQPALRGVKRLNLDGEDYELEEYYPRVLSDTEWAELQHLASQRFRRRGAGEIPGIITGVGLAFCGYCGTAVVAQNIMNRRRADGTIADGHRRLHCTSYSKNGGCSYGGSCSVVPVERAVLSFCSDQINLTRLMQAGDAGETIQKQLVVARAAVAKITTQLSKVTDALLADESGAAPLAFVRKARELEAQQTAAEQKVAQLEHEAIATSGAVRPAQAERWAELAAEVEAGDYSAREKVRQLVMDTFNRIVIYMRGMQTDGRNGPFIDVQLFSRSGQHRLLRINRKNGDWVASEDWE

SEQ ID NO: 3765 - protein, 506 aa, synthetic construct
MRSVITYLRYSSAIQGAEGADSTRRQNDLFKQWLKKNSDAQVVASFSDEGLSGYKGKHLTGQFGDMLARIEAGEFPASTILLVESIDRIGRLEHLETEALMNRILGNGIEIHTLQDGLIYTKDALADDLGISIIQRVKAYIAHQESKQKSFRVSQKWEQRAKLALAGEQRLTKMVPGWIDPDTFKCNEHAETVRLIFKLLLDGESLHNIARHLQANNISSFSRRKDANGFSVHSVRTILRSETTIGTLPASQRNDRPAIPNYYEAAIDVSTFNKAQEILDKNRKGRTPASDNPLTINIFKGLFRCQCGASVHPTGTKNKYAGVYRCNNNPDGRCDVPPLKRKPFDRWMIDNFLGMIDVGNDGEAEGKIASLQHEVEIVTARIKKATALLLEMDDITELKTQVKGLNQKRTELQTTIDNMRRKASLTDKELPQLKDIDLTTKAGRVECQLILSKHLKGLTLGKDSVTVTLQNDTEITIPTNPLPLNDGSPIFEIADKELLDIDAYQL

SEQ ID NO: 3766 - protein, 509 aa, synthetic construct
MRRAISYIRFSSERQLKGDSVRRQSKLVTDWLDKNPEFYLDSSLSFKDLGKSAFSGKHLKGGLGDFLTAIEKGLVKAGDTLLIESLDRLSRQDIDIASELLRRILRAGVDVVTLSDGEHYTKESLKDPLSLIKSILIMQRAHEESLRKSERVQAAWNRKKELISEGIKISRRCPAWLKLNDDRRTFTIIPDKVEVVKRAFDLRLQGLSFWAITRTLNDEGHLSLNQYTPKQKGWSDTAVKKLLRNRAVIGCFTPAGREEVQGYYPAIISESLFYRVQQLNTGQYGRASVSSNPLSVNLFRGIIKCSECGATIVLGGYALKRFGMYRCPNRSANRCSAKAISRKQTDATILYMLALCDRFETENTDTIDSLKLQREDLQRKISKMAELAIELDDMTIITEKLRDMKNALSKLNHDIEEETKRIKAITTGSLKDIDRTTKEGMIETQLLIKGVLKEIVIDAAKRRCKVTFHNGKVIDLPITENPSEDVTEAIQSLSEVIERGLIDADVVEI

SEQ ID NO: 3767 - protein, 611 aa, synthetic construct
MRTVKAYIYSRVSSLQQVDAFGLDRQISTVLDFLENAKLPAELGYQLDPSNHEVLDSDKGLSGYAGHNFTKGSLGRFKERVKSGEITEGCLLIESVDRFSRKQGYDAIDEFTFLIKRNIDIVEVETGQIYSYKLDHKLSTLSTSIERAYQESKRKARISKKSWQKRKKDSVDTGIALNNNTPDWLSLSQDKKSYELDVQKVQTITKIFELYRDGYGVTQIVNLMNKEGERYNGKGWNTVTVYNKLRDRRLNGYLVGKYTTIPKKDNESTNDAEKRILENIKIKKEANDNAKRIYPVVIEDDLFSRVQSMMDRNVSSKKQKSTTTKQRNLFNGLTKCNECGSPMIVQSMSNGGQYLRCYRQRTKDEKCNSKMLRYFETEKVLLQHIKNLNLDEIYGDEKSNQSLDTLKRLLSDVNGKIALLNEKVQSANDESELFAIMEFKRKRILEKDELIAKINSLENQCEAVTLNYTYDIEQLTNQDNTVIRRKANEHIAKVISSVKCRRIDSSYIGAYYLYDITYHRDILKHILITDNSGKLISEITISEKDNERTYLVREEDQTVFKVESNGNAWVMYASRTKTIDDLLYYINTMMVGREPDDFTYLLNEDHIEWID

SEQ ID NO: 3768 - protein, 589 aa, synthetic construct
MSAHVTILRNTVLPVKFNTMNRPRLYSYIRYSSERQGKGSSIERQKSYIAEMAKQIATEYDLEIFEEYQDLGVSAYKGKNVQEGALSDFIAQVESGLIPKGSFLLIESLDRFSRQNAMQAVNLFTSLLLNGITVITGIDKQVYRQTEVNTETLQQLMFSVMLFSRANEESSTKSHRTIASALSKIRRHQERKPGDPVVAIKELGSDKWWTDSSTGYVNPHPVLFPIAKKIIQLKQDGWSNRMILQHLKNNYDGPVIGNKKSKGIWNMQHCSRILEPAIYGRKVITVNNAEYVLDDYYPAIISKDEYEALKLQVGNKGFAPNRESNPEIPLLSGIGILHCAHCSCYMVKAKSTLKNHPHAYRYQCASRDLHQDCNKWGFRASTLERTILQLIADRIFLQTKYQPSGLEGKIADIQSQIENYVLAIGSAKSPAIINSLTSQIDQLEQEKQSLIVEKRLYDESIVQMNTEGWDKFRKFDIDDALNPLRTKIRANIKTVIMRVDCSRIDKKHNLFTITYRDQHKQRIVIENNSGWKKGKIYVEAQTINDIQILESEGLILHDHIDILINRDKFMTEAKKRLEHPRTLLDELTE

SEQ ID NO: 3769 - protein, 585 aa, synthetic construct
MRKLYSYVRWSTDKQSGNTSLERQTLKAQEFATIHNLEYVQILDAGISAFRGKNTTEGALGGFIEAVKAGVIPSDSYLYVENLDRLTRQDVATALNLFTGLLRLGLTIVTGMDGKIYTNEGLKNVTDLMMSLFLFSRAYEESLTKQKRAHETALRLIERHRAGLPVNIKSAGSAPWWIDASMSTYEAVKPHPVHWPAAKKAVELMLEGWGCFKVASYLNDHPEEFPPPRGNKGKGKKRGECWAVANLKKMRDNRALFGEKVITIGGATHTLTDYYPAICTRAEFAQLHDIACNNRHKVGEERRIITLLSGLRLLRCGHCNGSMSFFSKEGRIRYVCETGKNKTSDCKVWSVSGLLVERCLMLPLIRGYMDFMSGKASASEDLTQKIEDKKAEVLNVDTQIANLTSAIQLGGNIPALVSSIQALEQSKSAALVELERLTQRQALQDAKDQQVETLVDFYELLTPTMLEDTSDERRLKVREVVRAVIESVTLSKASDKALTLTYELPDKTVYTFTGELIESKKGKPTKSYRVEVENRGIRIDGIEDTPAGREAISRANEAEQEYHRIISQILVDFPPLKGSHFFGKR

SEQ ID NO: 3770 - protein, 531 aa, synthetic construct
MSIAYSYIRFSSTQQAQGDSLRRQTQLAQRYCEENNLTLSDTNFQDLGVSAFHSDNVKEDSGLGQFLEALEQGAIPEGSYLLVESLDRLSRAKVQTALMQMLRITQLGVKIVTLMDNRLYDRDLDTTDLIISLTIMERAHNESKTKSERIKAAWTNKRQNPSTTNRHSSTPFWLTLNPDKRTYTVNEEYAELVRKIYQLSIDGWGVIKIVRYLNENGITAPKGASWATTTVNRILNSKAALGHYEPTQNRKSLNTLIEDYYPPIIDEKTYYLSQQRKFERSKPEAAGRKTEYPNPLNQIAKCKKCGSSMYYENKSQSLKYLTCREFKKKNCTNKPIRMELIYRFIYEVFNSPMYHQQHAKLVDKSKQKNVNNHAELKGRYEAKRKAYEELLEASSSFSDPIILKELQKRSTSILELSKQIEEAKAKETVEQARTVHINFTEALQLAVNAFHLPLEGVKVEELSTDELFNTRVRLNRILKQAFNHLSIFHCNESKRITIETEVTEDYPIDLRYETNQKAIKEPMKNRIWSVY

SEQ ID NO: 3771 - protein, 604 aa, synthetic construct
MKKVFVYHRVSSDQQLDGSGIARQAELLEGYLERTGICAEMDDPAPVVLSDQGVSAFKGLNISEGELGAWMEQVRNGMWDSSILVVESIDRFSRQNPFDVMGYINALMAHNVAIHDVMANIVISRSNSKDLPFVMMNAQRAYDESKYKSDRIRKGWAKKREQAFNKGTIVTNKRPQWIEVENDKYVLNHKAAVVKEIFALYQTGMGCPTIAKKLQTKEGEQYKFNRPWTGELVHKILTNRRVTGKIFISEIIRNHDDIENPVTQKKYDMDVYPVVINEEEFELVQELLKSRRPNAGRVTVKKDGQEEVLIKSNLFSGIARCTECGGPMYHNVVRAKRTPKKGDPKIEEYRYIRCLNERDGLCENKAMTYETVERFVVEHLLGMDLNTVIKEQEFNPEIEVIRIQIDQVKDQITNYENGIERRKSAGKAVSFEMREELDDAKLELEQLLARQASLATVQVDLPVLQDVNVTELYNVNNVDIRTRYENELNKIVSNIRLKRNGNFYTIDIIYKQNELKRHVLFIENKKKEQKLISEVIIENVDGAKFYYTPSFVISVKDGEIRFQQTKEDLTIIDYSLLLNYVDAVDRCDAVGVWMRNNMSFLFTK

SEQ ID NO: 3772 - protein, 644 aa, synthetic construct
MLRPICYERVSSIQQVEMGNGLDDQRSSLTAYLDKNSDKFTNDRVFITDAGLSAFKNANISPESQLGIFLQDVGNRKYGKGDALIVISLDRLSRRSSWAESTIQYIVNSGVEIHDISTNLVLRADDPMSKIHMELIQHRSHNESLMKSVRAKLAWDNKILRALQNGEVISNRMPNWLKNVDNKYQVIPEQAELIVKCFEWYREGLSTGEIVKRIGKKWQMVTVSRLIRDRRLLGEHERYNGEVVPNVYPKIIDEDLFLTANRMMDRVMLEKKKPAEDLLLEPDVVREIFKLYESGLGSGAIVKRLPKGWSTVNVLRVLRDKKVVTMKIIDNLTFERVNEKLSRNGIANRIRKDITIAQDDYITNLFPKILKCGNCGGNIAIHYNHVRTKYVICRNREEKKICDAKSFQYTRIEKNILQLVKNIDFNKLMMEGQSDSDLLLASLREELSTLKKEEETYQIKINERKVAGKKTSLPLMTGLTEVQDRIEEIESDILNAKNIKEIPVFDFDINKVLDPMNVELRAKLRKELRLVLKSVKYWIFGKRIFVQLEYFNEILSHVLVIDNKRGGGEVLHEIVISESNGERVYTVNEEGKTVFIASVTSGTDMWSLAISRTKTLDDVGLYLNLLNRENFEIVVNEDLIDWID

SEQ ID NO: 3773 - protein, 507 aa, synthetic construct
MKRVISYIRFSSEKQAKGDSLRRQSKMVNDWLKAHPEYYLDQDLSFRDLGVSGFTGKHLKGGLGDFLTAIEKGLVKAGDTLLIESLDRLSRQDVDQASELLRNILRSGVDVVTLSDGEHYTSESLKDPLALIKSILIMQRAHEESLRKSERIQAAWDAKKEAAKAGIKVSKRCPAWLKLNDDRKSFSVIPEKVETVKRCFQLRLEGKSIWEIVRTLNDEGHQTLNQYKPGKFGQTSVQDLLKNRSVIGYFTPKGREEIAGYFPPIIPETDFYKVQQLSYSRYGRKPASDKPMAVNLFKGVIRCSECGHALIITGFSDTRNGIYRCPLRNENRCSAKGLSRKQTDGTLLALLSRLDRFDSDTTNTIDTLKLHREHISSNIEKLVQLSLEIEDLSAITIKLKQLKNELSQVDADIEKETQRLKSIDVGCLSDCDLTTKAGRIEAQLIIKSAVKEVVLNTAKRRCKVTFHNSKSITLSITENPSEDVTEAIQSLSEVTERGLIDVDEVII

SEQ ID NO: 3774 - protein, 506 aa, synthetic construct
MRHVITYLRYSSATQGAEGADSTRRQNELFKQWLRKNSDAQVVASFNDEGLSGYKGKHLSGQFGDMLSRIESGEFSKGTILLVEAIDRIGRLEHLETEALMNRIIAHGIEIHTLQDGLIYTRDALSDDLGISIIQRVKSYLAHQESKQKSFRVSEKWKQRAKLALAGEQRLTKMVPGWIDPETFKLNEHAETVRLIFKLLLDGESLHNIARHLQANNISSFSRRKDANGFSVHSVRTILRSETTIGTLPASQRNDRPAIPNYYEAAIDAATFNKAQEILDKNRKGRTPASDNPLTINIFKGLFRCQCGASVHPTGTKNKYAGVYRCNNHLDGRCDVPPLKRKPFDRWMIDNFLGMIDVGNDGEAEGKIASLQHEVEIVTARIKKATALLLEMDDITELKAQVKGLNQKRTEIQTTIDTLKRKTSLTDKELPQLKDIDLTTKAGRVECQLILSKHLKGLTLGKDSVTVTLQNDTEITIPTNPLPLNDGSPIFEIADKELLDIDAYQL

SEQ ID NO: 3775 - protein, 623 aa, synthetic construct
MTIEEVEALRPRKAVLYLRVSSKKQTQTAIDIDKDGNSIATQRDICEQKAEAVNADIIEEFVEPGVSAQTIEKRPVFQALLRFLQNNRDVDYVIVYARSRAFRNFTDAAITRRHLDKLGVRLLSAREDFGEGTYAEAMEAVTDIMNQVQNQLSGEDIRIKMRNKAVNGGTLGKARLGYLNIRKDIDGRMINSVGLDETRAPLVLKAFELYATGRYSIEQLEATMADIGLTNRRTARFPEGPVSASKLHQMLKDPYYVGYVIYKGDAYPGRHEPIIGQDLFDQVQDILSSRSGAGSRDRIHNHFLKGMLYCGKCLKLGRQSRVIYTEAKGRGGTIHEYFFCRARQEGKCDLPYLPAYLVEDSVADSYSRLVLDEDFKQDVRRRLEEALLGEQKDIKEMYARYTNQLKEVEAKESRLVDVAADGILPASKVREKMHELRVQRSRIEDSLANIGEEIAVGGQLLTKALDQIADPKAYYEKATDKIRRLLNESFFLRFFVYQGGAVGADLNEPFDDIFAAQTAFRSSKTPRAVSVPGSSQSSQIGPFLGDSGVLARQFPDIKNGADFSTPSLLFKLKSVYSNHGSNKATLVGMTGFEPATSSSRTKRATKLRYIPIRCESNCSRIAE

SEQ ID NO: 3776 - protein, 566 aa, synthetic construct
MKPKAYSYIRFSSPEQAKGDSQRRQREAAENYCKENGLELAKAKEYTFFDAGRSAYKGEHVGDSGELARFLEHVKNGDISSGSYLLVESLDRLSRDTVMVALNQFTDLLRKGIKIVTLTDKRVYSEDSPSIAMELIISITVMMRAHEESDTKGKRVSAAWQNKRNLAREQKVPLGKACPAWLALKEGAYEPNDDRVKVIRKIFDMTIQGYGLTAVSKRLNDDGIPVFGTVGEKRRNMSGAWGTSSVLKILNNRSLLGEYQPMHIIGGVRCNDGEVVKGFYPPIIDEEIFLQAKAARSQRQTSGATKQTKNFNCWQGLAKCRVCGDAMHLVNKGKPPKGYVYLQCFGTKKGICKNGIIRIEHAELVFKEVLAKVDSMSLVHGKSADIRKNLEVAEGRLAGVIRKLEHATEAQTEFPSKAGGKLLLDLEQEHEHLSMKRDELRQQLASTRVISKEDFFQKLDLVTYEGRAAANSLLKRLRVVILFKRYTPKNFRCWVLDKSDEEITDEIDQMLFGVLYKDGILTVQALDNDVYDRQIEQDEITAEDVNRDYEGGIDGQWFGSVFRKTK

SEQ ID NO: 3777 - protein, 531 aa, synthetic construct
MSIAYSYIRFSSAQQAQGDSLRRQTQLAQRYCEENNLTLSDTNFQDLGVSAFHSANAQEDSGLGQFLTALSEGLIPEGSYLLVESLDRLSRAKVQTALEQMLGILRRGVKIVTLMDHCIYDGDSDSRDLIISLTIMERAHNESKIKSERLKAAWDNKRQNPNSTNRHGSTPFWLTLNSDKRTYTVKEEYAELIRKIYQLSIDGWGLVKIVRYLNESGIPAPKGRSWAVTTVSKLLSSKAVLGHYEPAQGGKSLNTVIENYYPSIIDEETYYISLQRKKERSAPEAAGRKTTYPNPLVHIAKCRLCGSSMFFENKQPSLNYLTCREFKKKNCTNKPIRMELIYRFIYEVFNSPMYHQQHAKLVDKSKLKDVNKLAELKGKYEAKRKAYEELLEASTSFSDPIILKELQKRSTSILELSKQIEEAKAKETVEQARTVHINFTEALQLAVNAFHLPLEGVKVEELSTDELFNTRVRLNRILKQAFNHLSILHCNKSKRITIETEVTEDYPIDLRYETNQKAIKESMKNRIWSVY

SEQ ID NO: 3778 - protein, 514 aa, synthetic construct
MNNNKALAVLYVRFSTKKQETGDSQRRQIESAEQWCERNNAELSAQTYEDLGVSAFKEGGKRPALEDLINAIRMGKIPRDSYLLIEDHDRLSRRGWRYTQDLVYQLVQLGVRLVMLKTGVVYDANNINNIADNIVLMISAERAHQESERKSHLIKASREKARRDKKVTGKLPAWVSRDGDGFTFNDKKATIQELINCKLSGKSHQSTAKHLNSLKMTTGNDSAWSASGVRAIVQNHALYGAKAYFDTGKDGRMNKEPIEIVSDIFPALITHEQYQVLNKRQQAGRTSKRGAYSRLLKCGACGGAMTTRTSNYKGKPRAYKMCVKATEGSCNQVERIREPEVYLNQALHFLKYESSSTLYVSRTSEYQQRLETLNATVDLLTKNGNVEALARVYADIKEVSDLIEESKVLDQNNVDIKVDFSLISSIEDVEQRNIELRKVLREIRFYCIEKVGQTSKWKVVIEQINGIKKYLVLDQKYGFGNTVVDYASLLTQGTEDNRESWEIEDSEEWESYSY

SEQ ID NO: 3779 - protein, 469 aa, synthetic construct
MKRAALYIRVSTMEQAKEGYSIPAQTSKLKAYAEAKDYYVVNTYTDPGYSGAKLDRPGLNQLISDVKAKKIDIVIVYKLDRLSRSQKNTLYLIEDVFQKHSVDFISMLESFDTSTPFGRATIGMLSVFAQLERDTITERMHMGRTERAKQGYYHGSGVVPLGYDYINGELIINEYEATIVREIFDLYVNHGKGQQYITKKMVKKYPDKVKTLTIIKYALRNPLYIGKISWDGNVYQGNHTPLISQDLFNQAQLIFKEKAKLGSTNHNQKSLLAGFIHCGKCGAKVFREVGGGGSYKGKRYNYAYYTCRSVKKMMPSLVKDWDCNQKRLRCKDVENKVIAAVKNLDFKKIKMDIENKKVDTVDQINELKKAIKKKQVEKSKLIDLYQFGNIEVETLNNRIDSINIVLDELKNDLNSLKIKDDKNEKILLLEEAKNFDWENTGTELKIDLIRRLINDVTLKNEDVIINFIF

SEQ ID NO: 3780 - protein, 597 aa, synthetic construct
MSKIIPYGYLRVSSLEQVRTGGGLDTQDEEVRRYITQKSDVFDIDRMVMMSDEGLSAYSGRNIKEGELGRFLADVNAGLVPAGSALVCYSVDRLSRQNPWVGTQLISTLIGAGIEIHSVAENQILRSDDPVGAIMSTIYLMRANNESVIKSERAKSGYAKRLNESIKSRKVLTRQMPRWLYEHEGAYAVDSDMKRVIDFTFDSYIAGQSTGYIASELNNKGWIYGNTEWRGSYVARLIRDERLIGKHIRYSKQVKGVKREIIAIIPNFYPVVVEVDKFHLANNMLTNVAENIRGRTRITYGDTSILRNIFSNIIKCGKCGGDTSVLQNTRVKMVDGERKYLPYKTFLRCRTKYELKKCKQRDIRYEIIERAILLHLMELDIATLLASPVDNQVELYRSELESCISDKIQYEKMIGERKKEGKRIRPNTIDALEEVEDRIDELNRLIESHVEDKFVPDFNIDLEKIADVSNVKDRSLLKKGIATIAKKILYKRIGDYIIVEVTYRNIKVKHVFVIDNKSSNVIVNFSIEYDGDSALYRCNDFSLSYEKNSNVFIIGSDIDIKDYAHMMNFVDYSSDEMSKDVKEYLVNNFSKLSFSVV

SEQ ID NO: 3781 - protein, 629 aa, synthetic construct
MPQLYSYIRWSTDRQDKGTTRTRQVAAAKAYAEEAGLEMVEIIEPGVSAFRGKNRAGKLGDFIDAVKNAAIPSDSWLYCENLDRLSRDQVDEALRLFLELIGLGLTIVTGMDRKVYNRDTIRQNPTDLMISILMFIRGNEESETKSNRTVGNVVALVERHKEGLPVNIKSVGRHPFWIDDTGSQYEAVKKHPFYWNIAREIIDMFLSGNGVYSVKKYLDEKYPNGLKGREWDYQVLKKMRDNRALIGERTINIRGVPYKLENYYPWLCKDEAEFFLLEKRKQQNNYKSKKDGADTIKLLSGLSILRCSKCGGTMHSFMNHGKARYICTNGVHLQKKCSGWSITAQLVEHCTMIALLIGYMDKSRKNGSDTTLIEEELNEKEKLIKSLDSKISNLVTAIAIAPDVNSLAHSLNEINSKRKELVLSVEKLKERLVSLQGKGSFEVDIMEFLILIQWAVFTNMEDNDRDKIRKIIDAIIEYIVVDKINDCITIKIKYYGNDEVLVFGGVDRKPHWRFSIDFDTGKEGALTVLENDLINMPEIQKAVGYLHKLKESYVAMYDAAVTMLSEVGYPEIKGSQFWPNTGKHEKVTVAFEGVVYTISFNGRLPKAITSALETTGLTRQQFIEKFKVQ

SEQ ID NO: 3782 - protein, 604 aa, synthetic construct
MKKVFVYHRVSSDQQLDGSGIARQAELLEGYLERTGICAEMDDPAPVVLSDQGVSAFKGLNISEGELGAWMEQVRNGMWDSSILVVESIDRFSRQNPFDVMGYINALMAHNVAIHDVMANIVISRSNSKDLPFVMMNAQRAYDESKYKSDRIRKGWAKKREQAFNKGTIVTNRRPQWIEVENDKYVLNHKAAVVKEIFALYQTGMGCPTIAKQLQRKEGEQYKFNRPWTGELVHKILTNRRVTGKIFISEIIRNHDDIDNPVTQKKYDMDVYPVVINEEEFELVQELLKSRRPNAGRITVKKEGQEEVLIKSNLFSGIARCTECGGSMYHNVVRAKRTPKKGDPKIEEYRYIRCLNERDGFCENKAMTYETVERFVVEHLLGMDLNTVIKEQEFNPEIEVIRIQIDQVKDQITNYENGIERRKSAGKAVSFEMREELDDAKLELEQLLARQASLATVQVDVPVLQDVNVTELYKVNNVDIRTRYENELNKIVSNIRLKRNGKSYTIDINYKQNELKRHVLFVENKKKEQTLISEVIIEDVDGAKFYYTPSFMIMLKDGEIRFQQSKEDLSNIDYSLLLNYVDAVDRNDAVGVWMRNQFNFLTSN

SEQ ID NO: 3783 - protein, 543 aa, synthetic construct
MESCDQLMTAKVYSYLRFSDPRQATGSSADRQLQYAQRWAAEKGLVLDASLSLRDEGLSAYHQHHIKQGALGVFLQAVEDRRIAQGSVLIVEGLDRLSRAEPIQAQAQLAQIINAGITVVTASDGREYNRAGLKAQPMDLVYSLLVMIRAHEESDTKSKRVKAAIRRQCDGWMAGSYRGLIRNGKDPQWLRLTPGGWELIPDRVAAVKRALELYSQGLGAGRAANVMHEEGFKLTEWGISGLQIYRMIKQPALRGVKRLSLDGEDYELEDYYPRVLSDTEWAELQHLASQRFRRRGAGEIPGIITGVGLAFCGYCGTAVVAQNIMNRRRADGTIADGHRRLHCTSYSKNGGCTYGGSCSVVPVERAVLSFCSDQINLTRLMQAGDAGQTLQKQLVVARAAVTKITTQLSKVTDALLADESGAAPLAFVRKARELEAQQTVAEQKVAQLEHEAIATSGAVRPAQAERWVELAAEVEAGDYSAREKVRQLVMDTFNRIVIYMRGMQTDGRNGPFIDVQLFSRSGQHRLLRINRKNGAWVASEDWE

SEQ ID NO: 3784 - protein, 525 aa, synthetic construct
MPSAFSYVRFSSGKQAKGSSEHRQRAMLGQWLEQHPSFTLSDLRFEDLGRSGFSGEHLDHGLGQLLAAIDSGAIKSGDVILVEAVDRIGRLEPLEMLPLFSRIVKAGVSVITLEDGHVYDRSSVNETSLFLLVAKIQQAHEYSNRLSRRINASYTARREKAKAGLGIKRETPVWLTTDGQLVPHVAPHIAQAFQDYADGLGERRICRKLRESGLEEFSKTNATTVRRWLKNRTAIGYWNDIPDVYPHVVDPALFYQVQQRLDAPKVDRAKPSAHYLTGLVKCAVCGRNYNYKQRKHTDPAMLCTSRARLAGEGCSNSKTYPVIVLDQVRKLTSLPFLQHAMESASSQADPSSQRLAVIDGEIGELSRKISEATKALLVLGFTPEIQESLEQLKTAREALEEERATLLLPQAEKLTTAQLEAFSNGLLDDEPMKLNHVLQTAGYSMVVHPDGSIDVDGKRFVYEGASRKEKVYKLRLIGEDKQWSLPILTPQMATYKSLFMAAVRLPGDPSEEELRRFEEAKHSER

SEQ ID NO: 3785 - protein, 525 aa, synthetic construct
MSANVIIIPPRKIAGNTVDKHKDKPKLRVVAYCRVSTDSEEQATSYDTQVQHYTDYISRNPLWEFAGIYADDGISGTSTKKRVGFNDMIHDCMSGKVDMVITKSISRFARNTIDCLKFVRQLKDKNIPIIFEKENINTMEASGELLLTIMASLAQQESASLSQNVKLGLKFRYQEGKVQINHNWFLGYTKDDEGNLVILEQEAKVVRRIYREYLEGASLRDIAEGLEKDGIKNGAGHLKWNLSNIKGILQNEKYIGDALLQKTITTDFINHVRIKNDGTEPQYYVKDSHASIIPRDIFFKVQEEMLRRANMFSGEENKKRRVYSSKYALSSLCVCSKCGDVYRRIAWNNRGVHSVVWRCCTRWENGPSACDAPTVKEEELQSAIVKAINKVFSISDEVLDMLKNNIREIIAGNNLSEIEMVDKRIADKQAILLTLLKAKKDYTKTANEIDELKVKKQQLLIEKAGQEDAKRRIREMEDFLKSERHDISEYDEKLVRKYIKKIKVYEDRFSVTFKSEISVDVERAS

SEQ ID NO: 3786 - protein, 531 aa, synthetic construct
MKEIIKIDSTMRKTGFEKKTRVAAYARVSSDSDEQLLSLEVQKEHYENYIKSNPCWEYAGLYFDEGISGTKIDKRESLKQLLKDCQSGQIDRIVTKSISRLARNTVDCLEIVRKLTGLGIYLYFEKENIDTEHMSSELMLSILSSIAQSESRSISENNTWAIQKRFENGSFVISCPAYGYKNENKKMIIVPEQARVVKEIFNMALSGMGGEAIARVLTDKKIPTKKGGSWTSSTVNAILNNKTYTGDVIFQKTFTDDSFNRHKNCGEKKQYVIENHHEAIISHETFNLVKEIIAWRRSENNIVCGSGKYNKLYAFSAKIRCGECGSKCKRRIIYQHNKAYGIWVCITHLEDIHACSQKSVMESYLKISFLQMLNKLKAGYVQMLTPLVESLRGVNNKDGLNKVIELEEKKLKLQEQEQVLSKLLAGGYIEMDSYYLESNQLRTEIDTCLKEKLKLSNSLNGNLTHLNEVQKLQRFVSVTEVFSEFKDEDFLDFVDDVVVKSRTRFLFILKCGLELEEEVKETWHASHMVTE

SEQ ID NO: 3787 - protein, 525 aa, synthetic construct
MPSAFSYVRFSSGKQAKGSSEQRQRSMLGQWLEQHPSFTLSDLRFEDLGRSGFSGEHLDHGLGQLLAAIDSGAIQSGDVILVEAVDRIGRLEPLEMLPLFSRIVRAGVSVITLEDGHIYSKDSVNETSLFLLVAKVQQAHDYSNRLSRRINASYTARREKARAGLGVKRETPVWLTTDGQLVPHVAPHIAQAFQDYADGLGERRICRKLRESGLEEFSKTNATTVRRWLKNRTAIGYWNDIPDVYPHVVDPALFYRVQQRLDAPKVDRAKPSAHYLTGLVKCAVCGRNYNFKQRKHTDPAMLCTSRARLAGEGCTNSKTYPVIVLDQVRKLTSLPFLQHAMENASSQADPSSQRLAVIDGEIGELSRKISEATKALLVLGFTPEIQESLEQLKTAREALEEERATLLLPQAEKLTAAQLEAFSNGLLDDSPMKLNHVLQTAGYSMVVHPDGSIDVDGKRFVYEGASRKEKVYKLRLIGEDKQWSLPILTPARAESLAKSVAGGYLPPNTPEDVARYFEKVRHLVR

SEQ ID NO: 3788 - protein, 547 aa, synthetic construct
MKLLVTYIRWSTKEQDSGDSLRRQTNLIDAFYSKHKNDYYLLPAHRYVDKGKSGFHQQHKNQGSDFRRMFENVMSGAIPEGSLIVVENFDRFSRADIDTAIDDVRQILRKGVSILTLGDGELYDKSALTDPVKLIKHIIIAERAHQESLVKQKRIAQVWNHKTQLARELKKPMGKQAPGWLELSEDGSHYIVDEDKASLVNIIYDKRLSGMSMFAICKWLNEQGYPTINQRKVRISKTKKPDGNWSALSVKHILTSRSVLGYLPAKISTEDRKTVLREEIEGFYPQIVTDSKFYAVQQLLEETGKGKTSSGDHWLYVNILKGLIRCKCGLVMAPTGVRKPVYQGTYRCNGNKESRCSYGTVSRKLLDTQLCSRLFSKLSQLHDEATDTAKLDELQRRLNTVDGELEKLTETLIQLPNITQIQEALRVKQEEKDELIVQLSREKARVKSVSSLDLSGLDMESVEGRTEAQIIIKRLVKEIVVSGNEKLVDIYLHNGNMIRGFPLDGKDDHTLTLEEATDEMQSLDDMLIFGEPVTRIYPAGDMEEVDA

SEQ ID NO: 3789 - protein, 538 aa, synthetic construct
MQRAALYARFSTDLQSERSVDDQLALCREYAARQGYRLAGDYFDKARSGASIFGRDGLLRLMDDARAGAFEVVVVEALDRLSRDQEDLAGLFKRLSFANVEIMAVHDGKADAMQVGIRGLVSTLFLTDLKHKIRRGMHGVVRDGRHAGGKAYGYRPTPGQPGVMVIDEAEAAVVRRIFAEALAGCLPREIAAGLNADGISPPRGSVWNASTIAGNAKRGYGMLRNPVYAGKIIWNRVRMVRDPDTGKRISRANDATEWREADAPHLALVSREDFEAAIAALDGRAKKARGGEYVKRPKRLLSGLIRCGHCGGGMSIHDRPNYPPGAIRIKCSRSVESITCDNHRKYRLDKIEAAVIEGLTTQLAHPEYLAEYVRVYREERRKESQRVSRDRGRIERRIIDLTGQMDRMMSLFARGVISADAIEAQYGPLETERKHLRGELADQDAPDVIELHPQAVSRYKAAVDDLAGHLSSLDARIDGGTIASFRTLVDSVVIHDAADGGVEAEVIGHLAALIGREAELLGGRVVAEEGFEPPTHGL

SEQ ID NO: 3790 - protein, 567 aa, synthetic construct
MSRSPKAYSYIRFSTPKQAQGDSYRRQLELATEYCQKHQLQLSDKALEDFGVSAYRGSNRTNGALGRFIDAVKDGKIKEGSYLLVESVDRLSRQAIEDALRQFLEMIGLGIVIVTLIDGRVYKSGAVDITSLLVSIVSMARANDESKTKSKRSSEAWENGRKHARENNQVMKNSRLPSWLKLEEGKIIAIPERVKVVNEMFELAKSGCGYEQIAKIFLEKGYKTFGKKADWRPAGIQAVIKSESVVGVFHPHQIKDGKRIPEGDPIWGYYPAIVEPMLFNEVKHLINQRNNHSGSYRKGTYNNLFSGILRCQCGESLRYQNKGRAGSPRNYLVCPKQNITGCNLPNMLYDKVEPQLLQAVSILSEVMQRRVGENEKFLSLQEQLATLRTQLDVESRKKDKAAQSILDFDDDATFRNAFVKSKASCKVIEEKIRELENELMSLELSEKTILNLLKPEELISTEQRQLFNSQLKAVLKEIKFSYDGYDLAAVFKGLDDKFMLEQAFKPKLAGSSVRDLSGEELLRTTSEAPYIDAAWVKGEIEEYALHRKDVSSGLDDEFEDLSLQESK

SEQ ID NO: 3791 - protein, 494 aa, synthetic construct
MKAWLYARFSSSQQADGDSINRQVKAAQQWCGTNGVELQETSFRDLGVSGWKSIKRPMFEQLIKAMSEGKIPRGSYVLFESTDRLSRRGWRHTQELIRTITCVYDCKLVILDKGQVYTKENVNDVVQNILLMVAADMAEKESQRKSDLVSAAYKSKRQGGDVSRWPFWIDKTERGFVLNENAETIRLIIALRLKGVGALGIASELNRRGIKSSRGGNWGHTSIRVVLSNSALYGTKDFYSMKTIKQYDDNGEEIRVTDNQLVSSMPDVFPSLCDFTTWQQIQIKGEKPGRKGQSSPFHNMLFCKCGAGLSVQLGSAGERYRKCSRAKVGACDQVAIRNFDETLIDCLGRITYESSDTQKDELPELQARLAKLEGVKDALMAAGAMDALVDVYKDIAKAKDAVANAQKIAVVPTTQLKEVFSGTVDEQRVALKRVINRVVVNRMKNTASIKIHLTNGHLKVFGVNVGVKKQSGVNAVVSVTDTESFLSEIKVINT

SEQ ID NO: 3792 - protein, 545 aa, synthetic construct
MNKYHLYQRVSKQIQAEEGQGIQRQEQACEHWISDYNKRLLSEGKSAYSKGLIYEDRGKSAYTAANFKRGELGALINDIENGKIEKGDLIVIELIDRFSRANVDFVRSQFQRIIDAGVKIAITKWNLVFEENMESVSSVTGRILLEIGMYLAYQESSQKSSRIKASRKLLEDSGRKSIAKPPFWLARNSDLKSYTIIEENAEIIRKIFDLKLNFNYGPQKIIKSLGDLDIYRYSFDENGNLIKTTKNSPLSESSINAYIRNTNVIGKLDGKDYYPRIIDDRTFYAVQKRTRENTGGVGEIFRNVFVGVGKCGCLIRKENENGCGSLAKCGYIMAFSSRKVKNPTKGMYLKCNRKRKSTKCESENINYYLAQNKIYNVLKSLKFDIDQSVDISHLEEKINTIDKSMSKIRDYMTQYSDDEEWENQYKIKRMEREKIENEIKASKSRITGKLSNLDIDFSKEKDRVLFNQFLKDNRITVYFTKERMEIIIGSLNNFSIKCGYDDSNRDIDHIIESYSKNGLVGIEEKSGKSEGKGLLRFNLPTVPGS

SEQ ID NO: 3793 - protein, 559 aa, synthetic construct
MASIQAITKHHDVELLPENIFSDTGVSAHDGSNKKKGKLKDLIDMINDVHIKPGDYIFVESIDRLSRQRLLQAKELVNGILEKGVILITTIDGQRYEKPNETNRIDDLQQDILLSVIAKRAHEESKTKSVRRKSAWNRAKKLADDEKAIFNGHNPPYGISYNKEENRFEIVEDEAQEIRDIFESLKYVGISLTIRKINAYAKRKWTNKNIHLLFQTKYVLGSYMAQRRDENKNKVFERFIEGYYPQIVSYELFNEALEAMKLRAHRKHYGNQTVGSLNIFRHSIKCDCCNASMLFEKQTNPKGVCYGYFHCFTRKELKTNCNQPRFRFDLAYGLFLELVYQATTKEDFDVHPWQSMELEEEKRDRDYITIGESTRLYMATPEDNQIEEKIESFRELLISLLSNKKRQAADNKKLVELRNALLEQKSYKDNLLKSFAGFTNGVIPQEFLAVVSSTELKINDIEAELSKLQAEINTRKTSINIYSENDVIELYSTEEGRLKINQFFIANDIVFRFSFEKETRTLYCKINYQGMMIDKIAKQFDLHNPLKEFGINNLNEYFN

SEQ ID NO: 3794 - protein, 485 aa, synthetic construct
MTKKVAIYTRVSTTNQAEEGFSIDEQIDRLTKYAEAMGWQVSDTYTDAGFSGAKLERPAMQRLINDIENKTFDTVLVYKLDRLSRSVRDTLYLVKDVFTKNKIDFISLNESIDTSSAMGSLFLTILSAINEFERENIKERMTMGKLGRAKSGKSMMWTKTAFGYYHNRETGILEIVPLQAAIVEQIFTDYLSGLSLTKLRDKLNEAGHIGKDIPWSYRTLRQTLDNPVYCGYIKFKDSLFEGMHKPIIPYETYLKVQKELEERQQQTYERNNNPRPFQAKYMLSGMARCGYCGAPLKIVLGHKRKDGSRTMKYHCANRFPRKTKGITVYNDNKKCDSGTYDLSNLENTVIDNLVGFQENNDSLLKIINGNNQPTIDTSSFKKQISQIDKKIQKNSDLYLNDFITMDELKNRTDSLQAEKKLLKAKISENKFNDSTDVFELVKTQLGSIPINELSYDNKKKIVNNLVSKVDVTADNVDIIFKFQLA

SEQ ID NO: 3795 - protein, 658 aa, synthetic construct
MTLSDDARSMAQDDALPARKILYKYIRFSSIQQARGSSFARQNERLEKYAKENGFEVNDSLDLRDFAKSGFHGINKEIDQGLGRFIAAIDKGLIPTDGTAYLAVEQFDRISREDIDKAQDLFKSILRKNVNVITLMDGRIYTKKSLSNFMEVLYSLFLMEQAHQESLKKSDRIKGAYTNKIKRLHERVKEQKEDLAAWEKNPVGKKPVFEPLINEIQFSSQVPEWIDQKIEIISGRKFRKFVVNEEKAKIIRYALSLLNDDNGYMNVSQQLNEEQIPRLDFVTRRQRSTRKNIWTNSSVNNFVNSDSIFGELAIHDNNFVDKEFEYEGIATSKKVMTRTHVVNIPNYYPPVVDKKLIMGLRARANSKKKGRVAGRSTNDNLFQNMLFCGKCGDSMHMKQSKRETKTGTYVRKYLACYSAVHNACDAKMIPYGDVEREIIKYLIMPFDENQLDGAAKVVSDSRNERMLELEGEIKAIEDRIDEFTKEIKSNKSLKPSIALSLLSEMETDKDYKILQLKELQEQKDTIIDSLGAKPVGNFDLSTEDGRVSFKIAVKQRYAGFVLFTSDQVVMVMHKRGGSEFFKIQVINRRGKAIAPVRTADTMTLFQNMLNHIKELARTYKEGKLYEIIKAYKTNDITLFEEDYKNRGAEQPTTYKRGE

SEQ ID NO: 3796 - protein, 507 aa, synthetic construct
MKRAISYIRFSSEKQSRGDSLRRQSKMVTDWLKAHPEYYLDQDLSFRDLGVSGFTGKHLKGGLGDFLTAIEKGLVKAGDTLLIESLDRLSRQNVDRASELLRNILRSGVDVVTLSDGEHYTRESLKDPLALIKSILIMQRSHEESLRKSERIQAAWNRKKELISEGIKISKRCPAWLKLNDDRKSFSVIPDKVETVKRCFQLRLEGKSIWEIVRTLNAEGHRSMNQYKPGKFGQTSVQDLLKNRSVIGYFTPKGCEEISGYYPAIIDETTFYKVQQLSYARYGRKPASDKPMAVNLFKGVIRCSECGHALIITGFSDTRNGIYRCPLRNENRCSAKGLSRKQTDGTLLALLSRLDRFDSDMTNTIDTLKLHREHISSNIEKLVQLSLEIEDLSAITSKLRQLKNELSQVDADIEKETQRLKSIDVGCLSDCDLTTKAGRIEAQLIIKSAVKEVVLNTAKRRCKVTFHNGKAITLPITETPSEDVTEAIQSLSEVTERGLIDVDEVII

SEQ ID NO: 3797 - protein, 547 aa, synthetic construct
MKLLVTYIRWSTKEQDSGDSLRRQTNLIDAFYAKHKDDYYLLPAHRYVDKGKSGFHQQHKNQGSDFRRMFENVMSGVIPEGSLIVVENFDRFSRADIDTAIDDVRQILRKGVSILTLGDGELYDKSALTDPVKLIKHIIIAERAHQESLVKQKRIAQVWNHKTQLARELKKPMGKQAPGWLELSDDGSHYIVDEDKASLVNIIYDKRLSGMSMFAICKWLNEQGYPTINQRKVRISKTKKPDGNWSALSVKHILTSRSVLGYLPAKISSEDRKTVLREEIEGFYPQIVTDSKFYAVQQLLEETGKGKTSSGEHWLYVNILKGLIRCKCGLVMTPTGIRKPVYQGTYRCNGNKESRCSYGTVSRKLLDTQLCSRLFSKLSQLHDEATDTAKLDELQRRLNTVDSELEKLTETLIQLPNITQIQEALRVKQEEKDELIAQLSREKARVKSVSSLDLSGLDMESVEGRTEAQIIIKRLVKEIVVSGNEKLVDIYLHNGNMIRGFQIDGKDDHTLTLEEATDEMQSLDDMLIFGEPVTRIYPAGDMEEVDA

SEQ ID NO: 3798 - protein, 506 aa, synthetic construct
MRTVITYLRFSSATQGAEGADSTRRQNELFKQWLRKNSDAQVVASFSDEGLSGYKGKHLTGQFGDMLARIESGEFSEGTVLLVEAIDRIGRLEHLETEALMNRIIAHGIEIHTLQDGLIYTRDALSDDLGISIIQRVKSYVAHQESKQKSFRVSQKWKQRAKLALAGEQRLTRNVPGWIDPDTFKCNEHAETVRLIFKLLLDGESLHNIARHLQSNDIKSFSRRKDANGFSVHSVRTVLRSESVIGTLPASQRNDRPAIPNYYEAAIDAATFNKAQEILDKNRKGRTPASDNPLTINIFKGLFRCQCGASVHPTGTKNKYAGVYRCNNHLDGRCDVPPLKRKPFDRWMIDNFLGMIDVGNDGESERKIAALQHEVEIVTARIKKATALLLEMDDITELKAQVKGLNQKRTEIQTTIDTLKRKTSLTDKELPQLKDIDLTTKAGRVECQLILSKHLKGLTLGKDSVTVTLQNDTEITIPTNPLPLNDGSPIFEIADKELLDIDAYQL

SEQ ID NO: 3799 - protein, 523 aa, synthetic construct
MKEKQSNIIYIPARRRIKTDSEDSNRGKLRVAAYCRVSTESEEQAGSFTTQVNHYTNYIGKNPEWQLVDIFADEGITGTNTKNRKEFNRMIDECMAGEIDLIITKSISRFARNTVDCLNYIRQLKEKRVAVFFEKENINTLDSTGEILITIMASLAQQESESISKNIKLGLQYRYQAGQVRFNTTNFLGYDTDETGHLIINEKQAKVVKRIFKEYLEGKGTGIIARGLMEDGILTGSGRTTWSGDDINRIISNEKYMGDALLQKTYTVDCLTKERVKNDGTVPQYYIEDNHEPIVSKEVFNLAQQEKARRSNLYTGKRKQKRVYQGKYALSGKVICEHCGDIFRRVKWNSRGSKATVWRCVTRLTDHTQCQARTVKEDLLHEAVLEAINEFIGDKGNYLKVLEKNITQVLNNKYDETAEDVDNQLHDLQKQLYQFANQKEDYERIAERIFKLRERKQQLLIENATNEEKRRRWSDIKAFLKTQHTRLEEYGEGLTNRLVEGVVIKDECIEVELKTRDIINIDK

SEQ ID NO: 3800 - protein, 518 aa, synthetic construct
MKKVTKIKGTVVKKVRKIRVAAYIRVSTSTDAQMESFEAQEAHYQKLFQDHKEWTSVGIYADEGISGTSMVNRDGLQRLLDDCRQGMIDLIITKSISRFARNLTECLETVRELSSLDVAIHFDKEGLNTQQMDSELLLSMLSALTESESKSISENNKWSFKKRIENGSYKHSVAPFGYDISDGQLVVNEEKASIVKSIFTWYLSGDGTYVIAKRLNDLGIKPDRGKEWRDNSVMYILKNERYIGDALFQKTYTDDNFKRHWNDFEVEMMYVEGMHAPLISREIFDQVQILIEERREQILNKDTKVYNNRYSLSGKIQCNQCGANFVRRTHYISGERSYIAWACSNQLKNPELCGIKFIKESHLRVAFITMLNKLIFGRKEILEQTIRKLSQLDPKAASKRDNLSDELKEVQDKLYELTKLVEADIIDQAFFYEEENHLLKEKKRIYAKLRRIDSKEHQYSYQLQELKELYYALDRREYFTRYEDDLMERYVKKIHVVSRDQVVFELTSGLKLAERVMV

SEQ ID NO: 3801 - protein, 441 aa, synthetic construct
MAAYCRVSTDQEEQLSSYENQVNYYKNYIQQNPNYEFAGIYADEGISGTNTKKRDEFNRMIADCRAHKIDRIITKSISRFARNTLDCLNYVRELKELGIGVIFEKENIDTLDAKGEVLLTILSSLAQDESRSISENSTWGIRRRYENGKFGMSTKRFIGYDKDENGNLIVNPEQAKIVVRLYEEYLSGKTVDHIKRIFEAEGIKSWNGKAKWQATTLQSMLLNEKYKGDAILQKSYTVDFLTKKRVKNEGQIQQYHIEDNHEAIIDPLIWEAVQHEHQRRSDYCEEHCLNAYSRTPETNPFAGKIICGTCNQAFTRRGWKTGNRYRKVWQCQERYRAKGVQGCTNRHVDEAILQQAFTMAWNALIDNRDEIKVRWETLAEFGNPLEQYRAVQFADITENAKHITEFEIDFMLNTLDHITVFESGKLVVTFMDGTEIECNGE

SEQ ID NO: 3802 - protein, 427 aa, synthetic construct
MLIKIIKPKDELLKSKKLKVCAYARVSTESLKQEDSLENQTTTYERLIKSNPDYEFVGVYADQGISGYSENRSAFQSMIARAKIGEIDLIITKSVSRFARNTVTVLKVARALKELGIGIFFEEQDINTLSGDGEMMLAVLSSFAQEESRSMSENNKWSLKKKFERGEVLLNTTRFMGYDKDEYGDLVINQEQAKIVSRIFNMYLGGMGVFKIAAQLNSENIPSLTGGKWHEGTIRGMLTNEKYKGDCILQKYYTPENRRNSTVRNNGEVQSYYIEENHPSIISKEDWDRVQQIMQRRKEQRRIGVNGTDKYKNRYPLSGMLICPHCCKSLRRRQVHNKKIEWWCSTYMQEGKSTCKGVKISDEEVAKQNITEPTVIEEVKIDGKKYYGYTRKTDYDKGIRNQPNTPENKNGSLLPRVHRPRRTAIKL

SEQ ID NO: 3803 - protein, 452 aa, synthetic construct
MKAAIYIRVSTQEQIENYSIQAQTEKLTALCRSKDWDVYDIFIDGGYSGSNMNRPALNEMLSKLHEIDAVVVYRLDRLSRSQKDTITLIEEYFLKNNVEFVSLSETLDTSSPFGRAMIGILSVFAQLERETIRDRMVMGQIKRVESGLPLTTAKGRTFGYDVVDTKLYINEEEAKHLQLIYDIFEEEKSITFLQKKLKELGFKVKSYSSYNKWLMNDLYIGYVSYSDKVHVKGIHEPIISEDQFYRVQEIFSRMGKNPNMNKESSSLLNNLIVCEKCGLGYVHRAKDTVSRGKKYHYRYYSCKTYKHTHELEKCGNKIWRADKLEEIIISRVKNYSFATRNLDKEDELDSITEKLKTEHSKKKRLFDLYINGTYEVAELDKMMADIDAQINYYNSQIEANKELKRNKKVQESLAELATVDFDSLEFREKQIYLKSIINKIYIDGEQVTIEWI

SEQ ID NO: 3804 - protein, 517 aa, synthetic construct
MHAVVYARYSSEKQDSTSIDDQLSVCRARANRDGFEIIAMHHDGAVSGSTQVGSREGGKALLADAMAGRFEVLLLEGLDRLSRDQVEQESIVRRLEHRNIRIIGVCDGYDSEAPGRKVMRGVRGLINEIYLDDLRAKTHRGMAGQFDRGFIAGGKLYGYDIEKTEQGSRYVINEEEAAIVRWIFRSVAEGKGYRAIALKLNDDGVISPRGNKWTTSGVYGSPLKGTGMINNSLYAGIYIWNRSQWVKDPDTGKRKRIERPQSEWKKIDVPELRIIDKVTWAKVRHRIDDGRDEYGRKSAHRPLKSLLGGILRCPHCQGPMAGRDRYYYGCSVHHNTGPLACSGYRIRRQHVDNRMLSIVRQDLLSPAAARLYEKEFRQHLKDNSNAGKVKAAKKRLGEVEQEISRMIDAIVSVGASPALSARLKAAERERDSLNEIVGQGDQETEVPDIRGIFKRQLLNLGEALKREPEIARTAMGQIFGRVGLELRGNEVWGQIKTSPALLMVAGDASRNGSGDRI

SEQ ID NO: 3805 - protein, 547 aa, synthetic construct
MKLLVTYIRWSTKEQDSGDSLRRQTNLIDAFYSKHKEEYYLLPAHRYVDKGKSGFHQQHKNQGSDFRRMFENVMSGVIPEGSLIVVENFDRFSRADIDTAIDDVRQILRKGVSILTLGDGELYDKSALTDPVKLIKHIIIAERAHQESLVKQKRIAQVWNHKTQLARELKKPMGKQAPGWLELSEDGSHYIVDEDKASLVNIIYDKRLSGMSMFAICKWLNEQGYPTINQRKVRISKTKKPDGNWSALSVKHILTSRSVLGYLPAKISTEDRKTVLREEIESFYPQIVTDSKFYAVQQLLEETGKGKTSSGDHWLYVNILKGIIRCKCGLVMTPTGIRKPVYQGTYRCNGNKESRCSYGTVSRKLLDTQLCSRLFSKLSQLHDEATDTAKLDELQRRLNTVDSELEKLTETLIQLPNITQIQEALRVKQGEKDELTFQLSREKARVKSVSSLDLSGLDMESVEGRTEAQIIIKRLVKEIVVSGNEKLVDIYLHNGNMIRGFPLDGKDDHTLTLEEATDEMQSLDDMLIFGEPVTRIYPAGDMEEVDA

SEQ ID NO: 3806 - protein, 523 aa, synthetic construct
MKIKNKKRTRAYVRVSTLKDSQKDSPEHQEGLIRETVAKEGKEVDYVYLDRGTATTIMDRDDVKEMIQDAKNGEFNEIWFASLSRFSRDTLDSISLKRILVNALGIRLVSIEDMYDSAKEDNEMIFGIISSVNQKQSENISTSSKRGIRQSALKGNFTGSIPPFGYNKVEVEGRKTLEIISDQAEIIKSIFNMYIRKGMGEKAIVNYLNDPVHLIPSPKGGLWGVSTIQRILQNENYTGYLVSGKYEMKQFYDDIDDLQNRQKRLVARDPESYNRTSFQTHPEIISVEDFKLAQELRLVRGGGKRGGSRAFKNAFAKIMFCKDCGSAMVTMKGKSRDGGKEYRYLMCSKRRRQGEKGCINAKWMPYIPLRDQIIETAIKLMREKINMTSAQRDVESLYSFKENSYGKDIKKIENKIIENRKLLFELRRQHMLNELSDDQYEFEKGMYDKEITESESKLKSLNKKVDDHRDWTVLKNTLEEALVFLENQSNYDNAESIRNTLIKLIEKIDVDKNGRIEMHTVLG

SEQ ID NO: 3807 - protein, 558 aa, synthetic construct
MTKLYSYIRFSSMRQSDGSSYERQIRMAKEIADRYNLELVNDYQDLGVSAFKGANSKTGALSRFLDEIGRSIPVGSWLFIENLDRLSRQDIISAQELFLSIIRRGITIVTGMDNKIYSIETVTANPMDLMFSILLFIRGNEESQTKRNRTNSSALLKIKAHQQNPQSPAVAIEEIGKNMWWTDTTSGRVLPHPVYFPVLQKIVQLRQEGHSAGAILDYLNEHHEPPAPTSNKKHGKWSRAMVSRLFATKALIGVKTVNVDGVEYELRDYYPRVLSDSEFYFLRKNIIKKAWDYNHDKEKVIPLLSGIGVLRCVHCGATMVKQTAANGKREQYRYCCDGRKSGRTDCPYPNWGFRAVTLEGAVLQLLADKIWIAEDKTNPIPEIQVKIDDISRKIDNLINLSAMMGATKELANQITDLNSQREALHEEIRLFEREMYSVDSQGWDKLAQFDLSDVQNEERLKVRMKIKGALHEIECSRIDSKKNLFVLVYLDGLRQRLVIENNRGLKKGQIFVDLKTINDRQILESAGMVLHPCIEMIIDADWKAPEEIPGLLSEEFGI

SEQ ID NO: 3808 - protein, 502 aa, synthetic construct
MTLAFSYVRFSTKSQAVGTSLDRQLNASRLFCSERNLNLSPKGYHDLGVSGFKHVKRPELDQMLEAIRSGDIPSGSYILIEAIDRLSRKGISHTQDVLKQILLHKVKVAFVGEDAKTLAGQILDEHSLNDLSKVILVALAADLAHKESARKSKLVKSAKAIIRQKAIEGYKIRGHTMFWIDWSEKQKNFVLNDRVKDVELIINYRIKGNGPRKIAKMLNDDYISSPRGKQWNHMSVSAILKSPVLYGAYQTHQIFENKKIPDVLIENHYPAIIDYETFIQIQADSSRANKGRPSKSNPFSGLLRCQCGQAMNFSRKTNIGKNGKILEYEYHFCIGSTDGRCEHKKRIRDLVPLLVSLMDKLQIKEPTNKNVNIELIKSKQEKIEHLNKMLIELDTPPLSVLKTISALEKELQILLNTPIAPEITQKHVKNLGSITDAQEYNQHLKQLVRSIVIYQGNEKKSIRVKVNKSDGHSQNFLIKNGIVKFKSDTKALQELLNGFRKN

SEQ ID NO: 3809 - protein, 581 aa, synthetic construct
MPLLYSYIRWSSDRQAKGTTLQRQMASAKEFALTNGLELVEIIDPGVSAFRGKNTKSGKLGDFIDAVKEGIIPDDSWLYVENLDRLTRQDVTTAQKLFIELLDLGLTLVTGMDRRVYTLESVNQNPTDLMISILMFSRANEESKTKQTRTVGNVETLVERHKQGLPVNIKSCGKHPFWIDDTGSQYEAVRQHPEYWKIAREAIEQFLQGHGIYKVKRYLDEKYPNGLNGKEWDYQVLKRLRENRALIGERTIKIGNREHKLIGYYPSLCIDEVEFLKLQELKEQNGYKSKKDKPSDSINLLSGLTLMRCSKCGGTMTGFLNRGKPRYICLNGRHLQKGCVGWSVASPLVDHCVITTLLIGYIDTNRKENQDTTELTKLIERKSNDINAIDSSIANISLAIEKGANIDQLVDRVKVLSFDREKIIKEVDKLRTRKTVIETKGSFELTIMEFMDLIQWDVFVDIANESRNKIRAVINDIIEYVVIDKTDGCITIKVKCLGSDDVFVYGGDKRKPFWKFYVEQHFDETTELLTSGISIDEKLLEAANLYGKVVDTYKTYYETVKDMMAVVGYPEIDGAAFWPNR

SEQ ID NO: 3810 - protein, 558 aa, synthetic construct
MTKLYSYIRFSSMRQSDGSSYERQIRMAKEIADRYNLELVNDYQDLGVSAFKGANSKTGALSRFLDEIGRSIPVGSWLFIENLDRLSRQDIISAQELFLSIIRRGITIVTGMDNKIYSIETVTANPMDLMFSILLFIRGNEESQTKRNRTNSSALLKIKAHQQNPQNPAVAIEEIGKNMWWTDTTSGRVLPHPVYFPVLQKIVQLRQEGHSAGVILDYLNEHHEPPAPTSNKKHGKWSRAMVSRLFATKALIGVKTVNVDGVEYELRDYYPRVLSDSEFYFLRKNIVKKAWDYSHDKEKVIPLLSGIGVLRCVHCGATMVKQTAANGKREQYRYCCDGRKSGRTDCPYPNWGFRAVTLEGAVLQLLADKIWIAEDKTNPIPEIQVKIDEISRKIDNLINLSAMMGATKELANQITDLNSQREALHEEIRLFEREMYSVDSQGWDKLAQFDLSDVQNEERLKVRMKIKGALHEIECSRIDSKKNLFVLVYLDGLRQRLVIENNRGLKKGQIFVDLKTINDRQILESAGMVLHPCIEMIIDADWKAPEEIPGLLSEEFGI

SEQ ID NO: 3811 - protein, 541 aa, synthetic construct
MPKAISYIRFSTKIQSVGDSTKRQSKYINDWLKRNPDYYLDESLRFQDLGISGFSGANAKSGAFGEFLAAVESGYIEAGSVLLVESLDRVSRQDIDTAGEQLRKILRSGVEVVTLVDNEWYTKESLKDSLSMIKAMLVMERAHEESAMKSTRLRSVWAAKRERAANGEIMSKRCAAWLKVSDDRSHFEFIPENVKAVQRVFQLRLEGLSHVKIAKQMNDEGFSTLNQFKSVTGGWSQSSVTELLSNRSVIGFKVPSKSMAVKGVSEIPNYYPSIITDEQFYAVQQLKQGSGRKPSSDLPLLTNLFKGVLRCSECGFIVVVAGVSTKRSGIYKCSMKSEGRCNSVGFSRLQTDRALVQGLLYNTNRLSLNRDNGSAIGTLQSELEQLQKQRERLIKLAMLADDTESMAKDLKALNSQIKDAEKAVSEVHQREQSSQLETISHLDLTLKKDRIEAQIIIKRIVKEIRLNTAGKKCDVFLHNGLKLLNFPLDRVVDGAQWLEVLPLIDGDEFDFEGFTTKPRHLVLEEAPEWVKEIEAQPNQPL

SEQ ID NO: 3812 - protein, 547 aa, synthetic construct
MKLLVTYIRWSTKEQDSGDSLRRQTNLIDAFYSKHKEEYYLLPAHRYVDKGKSGFHQQHKAQGSDFRRMFENVMSGAIPEGSLIVVENFDRFSRADIDTAIDDVRQILRKGVSILTLGDGELYDKSALTDPVKLIKHIIIAERAHQESLVKQKRIAQVWNHKTQLARELKKPMGKQAPGWLELSEDGSHYIVDEDKASLVNIIYDKRLSGMSMFAICKWLNEQGYPTINQRKVRISKTKKPDGNWSALSVKHILTSRSVLGYLPAKISTEDRKTVLREEIEGFYPQIVTDSKFYAVQQLLEETGKGKTSSGEHWLYVNILKGIIRCKCGLVMTPTGIRKPVYQGTYRCNGNKESRCSYGTVSRKLLDTQLCSRLFSKLSQLHDEATDTAKLDELQRRLNTVDSELEKLTETLIQLPNITQIQEALRVKQEEKDELIVQLSREKARVKSVSSLDLSGLDMESVEGRTEAQIIIKRLVKEIVVSGNEKLVDIYLHNGNMIRGFPLDGKDDHTLTLEEATDEMQSLDDMLIFGEPVTRIYPAGDMEEVDA

SEQ ID NO: 3813 - protein, 526 aa, synthetic construct
MDRTRRVYSYLRFSDPKQSEGGSVDRQLDYARRWAVEHGLVLDESLTMRDEGLSAYHQRHVTRGMLGLFLAAVDEGRVPPGSVLIVEGLDRLSRAEPIQAQAQLAQIINAGITVVTASDGKEYNRQRLKDQPMDLVYSLLVMIRAHEESDTKSKRVKAAIRRQCDAWLTGKWRGIIRNGKDPAWVAWNGQAFELIPDRAESVRLAIEMFMDGHGAMAIISRLRSSGVTFAANASHLYKMIRNRALVGDRVLTVDGEEFVLPGYYPALMSEAEFAELQRLASQRHRRKGKGEIPGVITGMGICRCGYCGSAMVAQNLMSRKKRPDGKPHDGHRRLICVASSNAQACKVNGSCSVVPVEDAIMEWCADAMNLASLMSGGDAGVGLRAELAAARARVVEIERQIERVTEAMLSSDAPPSSFAKKARELENDLAHEQDIIGRCESELAARARLQIPGMADAWAALVDGVKALDYDARLKTRQLVADTFSRIDVYHSGLLPGDGKVIDIVLHGRSGAVRVLSGVLRGGTVE

SEQ ID NO: 3814 - protein, 550 aa, synthetic construct
MATKARVYSYLRFSDPKQAAGSSADRQLEYARRWASEHGMTLDSALSMQDEGLSAYHQRHVKRGALGVFLAAIDEGRIPSGSVLIVEGLDRLSRAEPIQAQAQLAQIINAGITVVTASDGREYNRAGLKAQPMDLVYSLLVMIRAHEESDTKSKRVRAAIHRQCQGWIAGTWRGVIRNGRDPHWLELTKPGEFKLVPERAEAVRLAVRMFREGNGAVTIMRALEEQGLQITNGGNPAGQLYKIVRNRALVGEKVLEVEGQEYRLPGYYPPLLTAEEFADLQHVAGQRIRRKGTSEIPSLIAGMRVTYCGYCGSAMVAQNLMNRGRRADGQPQHGHRRMICVGNSQGSGCAVSGSCSVVPIEHALMTFCADQMNLTRLHEGGNREASISGQLAVARAAVADTTAKIEKVTDALLSAAAGQAPAAFMRRARELEETLAGQQAEVDALEHELASAAATPPPALAQAWAELVEGVRALDYDARIKARQMVADTFERIAIYHRGIEPVQTRSWKGTIDLVLVAKRGSTRVLHVDRQTGEWRAGEELTTEALPAPL

SEQ ID NO: 3815 - protein, 477 aa, synthetic construct
MKAAIYNRVSKDEQFREGYSIESQKEHCISFTKSQKWLVYDTYVEEGVSAKNLNRPAIQALIADAKEHKFEVVVFYKLDRLVRSVRDLDDLLKLFDENNIAIRSVTEPFDTTTAIGRFLITLVAAIAQWERETISERVVVNMTKKAMLGERNGGKPPFGYEYINGELVIKEEEARFVRDIFRLYNNGKGMRTIALFLNQFGIKKDIRTIGKMLDNPVYTGKLRWGNNSKLDVIVSEDIKHPTIIDEDIFNLTQQYRKLRTVEGKKATSPFHFSGVLRCARCGSALSGYTKKSRGSKHYICIAKKNSGTCDLPMFTEKALTTEFFLNLSADDPERFFQLSQEDLKAHPIEQQDQSLKIDELKKELAAIKTRKKTWLMALGNQVISQEEYLEMTQEDTKKETILSEELNNVVEDYSPLDYESVISLLNNISDMWESANDFEKKSFINELFETITVDIPSEYKRAPGKSPSVIIERFKLK

SEQ ID NO: 3816 - protein, 559 aa, synthetic construct
MKTKLYSYIRFSSMKQADGSSYERQKRTAAEIAAKYDLELVTSYQDFGVSAFKGANSRTGALSRFLDEIGRSVPVGSWLVVENLDRISRQSIIEAQELFLSIIRRGITIVTGMDGKVYSKESVNANPIDLLLSVMLFARANEESQTKRNRTNSSALIKIKAHQENPQNPAVAIEEIGKNMWWTDTTSGYVLPHPVFFPIVQEVVELRRNGRSTAEILDHLNATYTPPPAASHKRHSNWSRAMIERLFHTRALIGIKEISVDGVKYELKDYYPRVLDDAEFYHLKKSIGVRACNYGDKEEVKPIPLLSGVGLLKCEHCGSAMVKVKGTNKRPNQYRYSCDAMRSSRIACVHTNWSFRGDQLEKAVLQLLADKIWIAEDKANPVPALKVQIDEISRKIDNLITLSAMTGATKELADQITTLNSERETLYNQIKMAEEEMYSVDSQGWEKLAEFDLEDVYNEDRIKVRFKIKQALKRIGCSRIDKYKNLFVLEYIDGKTQRVVIENSRGPRKGQIFVDLKTINDRQILESNGLVLHPCLDMLTDKNWKPEEEIPGPLQEFGI

SEQ ID NO: 3817 - protein, 540 aa, synthetic construct
MKSMTRAAIYARFSSDLQNERSCEDQVAWCEAWAERQGLFVVAAFSDEAVSGASAHNRPRLAGMLRMAKEKRFDVLVCEDLDRLARKQADLHRIRDELTFHGVRIMTVSDGTVTAMHAGLKGLMSEMFLTELGNKTRRGLMARVSAGATGGGLSYGYRAVPGRPGEHEINEREAQVVRRIFADYVGGSTPREIASALNAEGVPGPRGGKWNSSTLNGSKSRANGVLQNRLYIGEIVWNRQRFIKDPSTGKRVSRLNPESEWQRSDAPHLAIVDRTIFGLASARKAERTQASGPVAAKPRHFLSGLTKCGCCGASYTVMGNDRIGCAGHRERGDCDNSRSITRMHVEDRVLQALDTYLADPDMIAAYLAEYHATRRELARTKIDQRQSVAARLPDLDRQIESLVDLIVEGRATDALLDRLRRLEAERDDLRAQAQALSIDNEPVVLHPSATDRYRQLIGELRQHLDGMREGQPRDAVFECLRSMIEKVVITPTGARQPVDIQVHGLLAQLLVRKKETPLNAEAFRGALVAGAGFEPATFRL

SEQ ID NO: 3818 - protein, 556 aa, synthetic construct
MIRAAIYARFSTELQNEKSTEDQIALCRAYAARNGLNVVAVYEDKARSGASLLGRDGLLTLMKAAGQKTFDTIVVEALDRLSRDMADLSGLHKRLSFLGIEIQAVHDGIADAVLIGIRGLVGQMQREDGAKKVRRGMAGVVRDGRHAGGRAYGYRPILGRPGELEVVEREAEVVRRIFDAYSAGRTPRDLAGDLNRDGIAPPRGTRWNGSTINGNAQRGVGLLFNELYVGRIIWNKVRMVKNPDTGKRVSRPNPKDQWQMKEVPHLRIVDDDVWQKAQALKVARVNASSSFKRRPAHLLSGLLRCGICASGMSVHDRDKTGKTRVRCSAVRESGSCSNRRIIYLPEIERAVLDSMREQLRAPDLIEAYIRKYNQERRELAARANSMRSALEGKRDRVKGELQRTIDLVIRGVIAEEDAKQRIAELKTQLSLIEGQFDRLDEPPSTVALHPATLQRYVKTVDDLSTALADHATAPDDRGPLIRNFRQLVHSVTLHPKPAREGFEIEVKGKLAALIGGAAFPSARHASLGGRFGAAVGNDSGCEVVAGEGLEPPTPGL

SEQ ID NO: 3819 - protein, 529 aa, synthetic construct
MNHRLVRIAKPAGLVKALLYARVSSKEQEKEGFSIPAQCKLLRDYALQQRFEIVQEFIDVETAKTSGRTNFTEMVKYLRKHPGIRSVLVEKTDRLYRNLKDWVTLDELDVEIHLAKEGVTLSRDSRSSEKFMHGIQVLMAKNYIDNLSEEARKGQMEKAEQGIWPTKAPLGYVNTMGKDGRKVIEPHPELASVVTQLFERYATGQYSLKALAKAAHGDGLIYPKSGNPVPVSTVHMILRNRLYTGLFQWNGKLHQGKHEPLVSIELWERVQGILTGRNAVPTHPIGNEFAFTGLMTCTECGCAVVAEIKKGKYVYYHCTGHANKGRGGYADCRRKYVREEVLDQAFANLLDRLHFDEEILEWVKAALMASHADERREHKQSIHRCQVEYKRLEDRLHAMYLDKLDGRIDNAFYDRMSAQWRTEQTRLLREIERHGSAEESYMEDGIRLLELARNASRLFAKQPVHEKKRLLNLVLSNCQWDKGEVHAVFRQPFDLLAETVASGEANGTRQTALSKGSPVWLGNLDSNQD

SEQ ID NO: 3820 - protein, 568 aa, synthetic construct
MSRPVKAYSYIRFSTPKQAQGDSYRRQLQQAMDYCAEHNLQLDDKTIDDFGTSAFRGANMTEGALGRFVDAVKHGEIEQGSYLLVESVDRLSRQAVEEALEQFLAIVRAGIVIVTLSDKQVFRRGQVDFTKLIVSIVYMARANDESEMKSRRSRAAWSNGREQARKNNKVIANSRLPSWLTRDGEQIVPIPERVAIVNEMFEMAKSGCGYEQIAKVFLEKGYKTFGKEADWRPAGIQAVIKSQAVIGVFQPHVIENGHRVPADEPILGYYPTIVSPALFEEVQHLISKRNKHSGSYRKGTFNNLFSGVLRCQCGESLRYQNKGRAGSPRNYLVCPKQNTAGCKLPNMLYDKVEPQLLQAVFLLNRVMKQRVEGEDKTIALRTMLAELRVQLEVETQKRKKAAQLVLDNDNDADYRVLFEQCKKKTQALEEQIQRAESDLMSRELSVKTLKYIVEPEDLSSTEQRQRFNGQLKTALKEIRFRFDGGYLWAEYMDIDGGRVLTQIFEDKLAGSSIYDGSSYLVRKTQTEAPYGVDPSVMQQEMDDYIQNLQKNDDGTDPDFEDLSSEYSK

SEQ ID NO: 3821 - protein, 584 aa, synthetic construct
MPLLYSYIRWSSDRQATGTTLDRQMASAASAKEFALLNGLELVEIIDPGVSAFRGKNTKSGKLGDFIDAVKERIIPDDSWLYVENLDRLTRQDVTTAQKLFIELLDLGLTLLTGMDKRVYTLESVNQNPTDLMISILMFSRANEESKTKQARTVGNVETLVERHKQGLPVNIKSCGKHPFWIDDTGSQYEAVRQHPEYWKVAREAIDQFLQGHGIYKVKRYLDEKYPNGLNGKEWDYQVLKRLRENRALIGERTIKIGNREHKLIGYYPSLCTDEVEFLKLQELKEQNGYKSKKDKPSDSINLLSGLTLMRCSKCGGTMTGFLNRGKPRYICLNGRHLQKGCVGWSVTSPLVDQCVITTLLIGYINTNRKEGQDTTELTKLIERKSNDINAINSSIANITLAIEKGANIDQLIDRLKVLSSDRETIIKDVDKLKTRKTVIETKGSFELTIMEFMELIQWAVFVDITNESRNKIRTVINDIIEYVIIDKTDGCITIKVKCLGSDDVFVYGGDKRKPFWKFDVEQHLDESTELLTSDIGIDEKLLEATNLYGKMVDVYKTYYETVKDMMAVVGYPEIDGAAFWPNR

SEQ ID NO: 3822 - protein, 576 aa, synthetic construct
MGYIADIYIRVSTDEQADKGYSQRNQEEMLRKYCLNQSIEIRDVIYEDHSAKTFNRPQWKNLITTLKKKKNHVNLILFTKWDRFSRNTGDAYQMINILRGLGVEPQAIEQPLDLSIPENKMMLAFYLAAPEVENDRRALNVFYGMRRAKKEGRYMGLAPVAYENKTSENGKKFIAPKEPDASVLRYAFKEIAKGIFNTEQVFKQAKEKGLKCSKNAFWQVIRNPLYCGKIFVPQFKDEESCFVDGQHEGIISESLYYEVQDVLDGRGRNYRPKIKTIDEFPVRGYLVCPECSKLLTGSKSKGRSRYYAYYHCIGGCTHRVNAEKVNAAIVEDLIEFLPKIQNRSFYEETISKDYLGGTLEVQLEKKEILAEIKDYEDRLSHTRDLLATRQIEAEDYREMKSVYSSKISALEAKLNRVNYDSDNIQDLIKQGINKIIEIEKNVMKGELAEISKDIGSIYPEKIIFSESQVRTARRNDFIQHINLINKKLYTKKNGTKVDFSTLSREVGVAGFEPATSCSQSRRDDRATLHPEWCFISSFKKAERQGLEPWHRFPDDRLAICSITALAPLLTFKNKTD

SEQ ID NO: 3823 - protein, 452 aa, synthetic construct
MKAAIYIRVSTQEQIENYSIQAQTEKLTALCRSKDWDVYDIFIDGGYSGSNMNRPALNEMLSKLHEIDAVVVYRLDRLSRSQRDTITLIEEYFLKNNVEFVSLSETLDTSSPFGRAMIGILSVFAQLERETIRDRMVMGKIKRIEAGLPLTTAKGRTFGYDVIDTKLYINEEEAKQLRLIYDIFEEEQSITFLQKRLKKLGFKVRTYNRYNNWLTNDLYCGYVSYKDKVHVKGIHEPIISEEQFYRVQEIFSRMGKNPNMNRDSASLLNNLVVCGKCGLGFVHRRKDTVSRGKKYHYRYYSCKTYKHTHELEKCGNKIWRADKLEELIIDRVNNYSFASRNVDKEDELDSLNEKLKTEHVKKKRLFDLYISGSYEVSELDAMMADIDAQINYYEAQIEANEELKKNKKIQENLADLATVDFNSLEFREKQLYLKSLINKIYIDDEQVTIEWL

SEQ ID NO: 3824 - protein, 543 aa, synthetic construct
MRTVIYARFSSNLQNSRSIDDQVTVCRERCEAEGWPIVDVFADYAIGGGAGMSEDQRPSMAAMLERVDAGDIDQVLADSTSRIARNQGDAHHIRERINFAGARLFTLADGEVDALRGGIKGLLDEQQRKDLGHNIRRAQRGRAAQGLAPAGLAYGYRSANRIDDRGQLTRGLREIDPDRAEVVRQIFAEYAEGRSARQIAEDLNIAGIAPPSGEFWQINTILGSRTRNDGILRNYLYKGQLVIGRTQKLIDPRTRKTRIRPRPREEWSFNEVPHLRIIDDATWDAVQDQLAKFGAKPPHEARRPAKLLSKLAKCGQCDNSFTIVRKERWGCRGFRQGGPAVCANNRTIDNEDFERRVINGLTEQLLDPEMVSAFVREYHEDYTRRAADLAARDGHLRAAVDEAEERIARLVDAIADGGGHFAEIRTALQRATEERDGLRAELADLECLPVVALHPQIAERYREMVRNLAAAMKSPEALKIAAPELRALIDTIIMTPSNRGNGLDIQIVGRLANMLAIANGKPTEQNAPTGTLTMERVAGIEPA

SEQ ID NO: 3825 - protein, 520 aa, synthetic construct
MTEKNIMVIPARKRVGSTAAKEKIKKLRVAAYCRVSTETEEQNSSYEVQVAHYTEFIKKNNEWEFAGIFADDGISGTNTKKRDEFNRMIAECMDGNIDMVITKSISRFARNTLDCLQYIRQLKDKNISVYFEKENINTMDAKGEVLLTIMASLAQQESQSLSQNVKLGLQYRYQQGKVQVNHKRFMGYTKDEDGNLIIVPEEAEIIKRIYREYLEGQSLVRIGRGLEEDDILTAAGKPRWRPESVKKILQNEKYIGDALLQKTVTVDFLTKKRVKNEGHVPQYYVENSHEAIIPKELFLQVQEEIHRRSNIYTGASKNKRIYSSKYALSAITFCGDCGDIYRKTYWNIHGRKEFVWRCVTRIEQGPEVCKNRTVKEDELYGAVMTAINKLLAGGNNMIKTLEENIHAVIGETTEYQISEINNLLEEKQKELIKLANKGQDYEHLADEIDELRDKRQILLVEDASLSGENEQINELIEFIRNNKFRTLEYDDKLVRKIIQSVTVYEDHFIITFKSGIELEV

SEQ ID NO: 3826 - protein, 559 aa, synthetic construct
MKTKLYSYIRFSSMKQADGSSYERQKRTAAEIAAKYDLELVTSYQDFGVSAFKGANSRTGALSRFLDEIGRSVPVGSWLVVENLDRISRQSIIEAQELFLSIIRRGITIVTGMDGKVYSKESVNANPIDLLLSVMLFARANEESQTKRNRTNSSALIKIKAHQENPQNPAVAIEEIGKNMWWTDTTSGYVLPHPVFFPIVQEVVELRRNGRSTAEILDHLNATYTPPPAASHKRHSNWSRAMIERLFHTRALIGIKEISVDGVKYELKDYYPRVLDDAEFYHLKKSIGVRACNYGDKEEVKPIPLLSGVGLLKCEHCGSAMVKVKGTNKRPNQYRYSCDAMRSSRIACVHTNWSFRGDQLEKAVLQLLADKIWIAEDKANPVPALKVQIDEISRKIDNLITLSAMTGATKELADQITTLNSERETLYNQIKMAEEEMYSVDSQGWEKLAEFDLEDVYNEDRIKVRFKIKQALKRIGCSRIDKYKNLFVLEYIDGKTQRVVIENSRGPRKGRIFVDLKTINDRQILESNGLVLHPCLDMLTDKNWKPEEEQAGPLQEFGI

SEQ ID NO: 3827 - protein, 531 aa, synthetic construct
MRTLIYARYSSQLQNSRSIDQQIGVCRDRASREGWPVIDVFTDYAIGGAAGTDESQRPGLAAMLARVEQGDIDQVLIDTTSRLARNQGDAHHLRERLNFHGARLFTLGDGEIDSFKGAIKGLLDEQQRVELRHNIKRGQAGTVRQGRSPAGLAYGYRLANRFDEAGRPVRGLREVDEDEADIVRRIFTEYAAGRSPVAIARQLNAEGVPGPRGNSWRASTIRPDRTRGNGMLSNRLYIGELVHNRTSKVIEPVTRTTRIRPNPESAWIIESVPQLRIVDAALWEAVQAELERNRIEAKPVKARRPRHILSGLGQCGTCGGAWNISTGRFWSCGARRDGGTCSNNRTISTESYEREALAALQEHLLDPDVVSTYVREYHEEYARRARQARRRKAGLERQLQSAAAKVERLVAAVAEGAGEFAEIREALRAARLDRDRLAAELAEIDAFRVITLHPAIAEEYRRQVADLRTALAEPAAREAAIPVLRELIDRIILTPNPAGRGVRVEVRARLAAVVELATGEQPRSAEGRKAG

SEQ ID NO: 3828 - protein, 506 aa, synthetic construct
MRSVITYLRFSSATQGAEGADSTRRQNDLFKQWLKKNSDAQVVASFSDEGLSGYKGKHLTGQFGDMLARIESGEFPEGTLLLVEAIDRIGRLEHLETEALMNRIIAHGIEIHTLQDGLIYTRDALSDDLGISIIQRVKSYIAHQESKQKSFRVSQKWEQRAKLALAGEQRLTKMVPGWIDPDTFKLNEHAETVRLIFKLLLDGESLHNIARHLQSNDIKSFSRRKDANGFSVHSVRTVLRSVSAIGTLPASQRNDRPAIPNYYEAAIDAATFNKAQEILDKNRKGRTPASDNPLTINIFKGLFRCQCGASVHPTGTKRTYQGVYRCNNHLDGRCDVQPLKRKPFDRWMIDNFLGMIDVGNDGESERKIAALQHEVEIVTARIKKATALLLEMDDITELKTQVRELNQKRTDIQTTIDTLKRKTSLSDKGLPQLKDIDLMTKAGRVECQLILSKHLKGLTLGKDSVTVTLQNDTEITIPTNPLPLNDGSPIFEIADKELLDIDAFRL

SEQ ID NO: 3829 - protein, 506 aa, synthetic construct
MRSVITYLRYSSAIQGAEGADSTRRQNDLFKQWLKKNGDAQIVASFSDEGLSGYKGKHLTGQFGDMLARIEAGEFPEGTILLVESIDRIGRLEHLETEALMNRILGNGIEIHTLQDGLIYTKDALADDLGISIIQRVKAYIAHQESKQKSFRVSQKWGQRAKLALAGEQRLTKMVPGWIDPETFKLNEHAETVRLIFKLLLDGESLHNIARHLQSNGIKSFSRRKDANGFSVHSVRTILRSETTIGTLPASQRNDRPAIPNYYEGVVDIPTFNKAQEILDKNRKGRTPASDNPLTINIFKGLFRCQCGASVHPTGTKNKYAGVYRCNNHLDGRCDVQPLKRKPFDKWVLENFLGIIDVGNDGESERKIAALQHEVEIVTARIKKATALLLEMDDITELKTQVKGLNQKRTEIQTTIDTLKRKTSLSDKGLLQLKDIDLMTKAGRVECQLILSKHLKGLTLGKDSVTVTLQNDTEITIPTNPLPLNDGSPIFEIADKELLDIDAYQL

SEQ ID NO: 3830 - protein, 452 aa, synthetic construct
MKAAIYIRVSTQEQIENYSIQAQTEKLTALCLSKDWDVYDIFIDGGYSGSNMNRPALNEMLSKLHEIDAVVVYRLDRLSRSQRDTITLIEEYFLKNNVEFVSLSETLDTSSPFGRAMIGILSVFAQLERETIRDRMVMGKIKRIEAGLPLTTAKGRTFGYDVIDTKLYINEEEAKQLRLIYDIFEEEQSITFLQKRLKKLGFKVRTYNRYNNWLTNDLYCGYVSYADKVHVRGIHEPIISEEQFYRVQEIFSRMGKNPNMNKESASLLNNLVVCSKCGLGFVHRRKDTVSRGKKYHYRYYSCKTYKHTHELEKCGNKIWRADKLEELIIDRVNNYSFASRNVDKEDELDSLNEKLKTEHVKKKRLFDLYISGSYEVSELDSMMNDIDAQINYYESQIEANEELKKNKKIQENLADLATVDFDSLEFREKQLYLKSLINKIYIDGEQVTIEWL

SEQ ID NO: 3831 - protein, 506 aa, synthetic construct
MRTVITYLRFSSATQGAEGADSTRRQNELFKQWLRKNSDAQVVASFSDEGLSGYKGKHLTGQFGDMLARIESGEFSEGTVLLVEAIDRIGRLEHLETEALMNRIIAHGIEIHTLQDGLIYTRDALSDDLGISIIQRVKSYVAHQESKQKSFRVSQKWKQRAKLALAGEQRLTKMVPGWIDPDTFKCNEHAETVRLIFKLLLDGESLHNIARHLQANNISSFSRRKDANGFSVHSVRTILRSETTIGTLPASQRNDRPAIPNYYEAAIDAATFNKAQEILDKNRKGRTPASDNPLTINIFKGLFRCQCGASVHPTGTKNKYQGVYRCNSHLDGRCDVPPLKRKPFDKWMIDNFLGMIDVGNDGEAEKEIASLQHEVETVTARIKKATALLLEMDDITELKTQVKELNQKRTELQTTINTMKRKTSLSDKGLPQLKDIDLMTKAGRVECQLILSKHLKGLTLGKDSVTVTLQNDTEITIPTNPLPLNDGTSIFEIAEKNLLNIDTFQL

SEQ ID NO: 3832 - protein, 506 aa, synthetic construct
MRHVITYLRYSSAIQGAEGADSTRRQNDLFKQWLKKNSDAQVVASFNDEGLSGYKGKHLSGQFGDMLSRIESGEFPEGTILLVEAIDRIGRLEHLETEALMNRIIAHGIEIHTLQDGLIYTRDALSDDLGISIIQRVKSYIAHQESKQKSFRVSEKWKQRAKLALAGKQRLTKMVPGWIDPDTFKLNEHAETVRLIFKLLLDGESLHNIARHLQANNISSFSRRKDANGFSVHSVRTILRSETTIGTLPASQRNDRPAIPNYYEAAIDASTFNKAQEILDKNRKGRTPASDNPLTINIFKGLFRCQCGASVHPTGTKNKYQGVYRCNSHLDGRCDVPPLKRKPFDRWMIDNFLGMIDVGNDGEAEKEIASLQHEVETVTARIKKATALLLEMDDITELKTQVKELNQKRTELQTTINTMKRKTSLSDKGLPQLKDIDLMTKAGRVECQLILSKHLKGLTLGKDSVTVTLQNDTEITIPTNPLPLNDGTSIFEIAEKNLLNIDTFQL

SEQ ID NO: 3833 - protein, 558 aa, synthetic construct
MTKLYSYIRFSSMRQSDGSSYERQIRMAKEIADRYNLELVNDYQDLGVSAFKGANSKTGALSRFLDEIGRSIPVGSWLFIENLDRLSRQDIISAQELFLSIIRRGITIVTGMDNKIYSIETVTANPMDLMFSILLFIRGNEESQTKRNRTNSSALLKIKAHQQNPQNPAVAIEEIGKNMWWTDTTSGRVLPHPVYFPVLQKIVQLRQEGHSAGVILDYLNEHHEPPAPTSNKKHGKWSRAMVSRLFATKALIGVKTVNVDGVEYELRDYYPRVLSDSEFYFLRKNIVKKAWDYSHVKEKVIPLLSGIGVLRCVHCGATMVKQTAANGKREQYRYCCDGRKSGRTDCPYPNWGFRAVTLEGAVLQLLADKIWIAEDKTNPIPEIQVKIDDISRKIDNLINLSAMTGATKELANQITDLNSQREALHEEIRLFEREMYSVDSQGWDKLAQFDLSDVQNEERLKVRMKIKGALHEIECSRIDSKKNLFVLVYLDGLRQRLVIENNRGLKKGQIFVDLKTINDRQILESAGMVLHPCIEMIIDADWKAPEEIPGLLSEEFGI

SEQ ID NO: 3834 - protein, 566 aa, synthetic construct
MQRKTPVYAYIRMSTIEQAKGDSERRQLGQIERFLQENDGELVEPVFLDRLSSFNGKNIKKGAIKDFLERVKNGQIEKGSVLVIESFDRISRQGGYLAHAVILDIIKNGVDIATLSPYKRYSINSENQFIEGIEIQTLLYRAHEESRTKSDRITRQHQARREKAKDKNVVYGSLPFWLIRTADWIEFKEPEATDVKLCLSLLKTYGMYTATAKINEQRKSSKIFSKETVSHLLNRSAVCGDLQTHRIEYDEAGNKIRVPGEVIHDYYPALISRAEFEELRAEIQNRRTTKSTGRVSGFKNIFRNVMTCTYCFSPMRLAHMKWKNGGKKYLVCTKSETNQCIEKGRLWYDYDDVERVFFNEVNLSILKKSLTQKTKIDDAEIEKLRSNLLKAEDQKTNVLKAIEMGTVSKTLINRLEELEKYSDEIQKRIDELKAENALRRSQNEAAIFDYEQLDAALNDEEQRAVINKILRTNQAEISILKGGIGCDFIIEISVGDRLETEISYHKQDDFINRYEHDLPENQTSDLVIHEDQTDPYAEENEGQVFEMFDSASMPIIEINQHNKKPD

SEQ ID NO: 3835 - protein, 533 aa, synthetic construct
MTKKCYPYVRFSSTRQEDGSTRTRQNELIDAFVSKHGLEVDRHLEDAGTSAYHGKNASAEGVLGQFLREVRMGEIEKGSYLLIENFDRLSRDKIVRSNKIFTDLLFAGVRIVILDRNKVYDAENLDFGDWINALVEFERANAESKRKSDFSSKAWNYNREKMRSGEIVTKKVPTWLKVENNAFVIDHEKVERINTLFKLSLSKGLQEATREYNELYSEKLAIHQTQYLLSNRKLIGEHSPQKIHYDDAGQLKRKDEGDPIANYYPVVVDEKLFYQVQEVIKSRKPFAGRYSNQRYNVFRDLVVCKACGGTIRYMNKGERDYFICTNSMTGKCVLNSHYGQLSIRGKKLFSMFFAFTSGLNISALLEENTQAEELKSQTMKLEAKRSQITQRLENFKAEVKTMILDGKTIPSTYNELITELESNRTNIDQEIESNTKKLDQIYTSEKSFSNLKSNDISTILYDRSDEAIEKRVKYNAELKKIIRTVKIDYLNTFLQIEFFNGVTRRIDEDGKAYDYNMEELTASMYEAAKKYAP

SEQ ID NO: 3836 - protein, 507 aa, synthetic construct
MKRVISYIRFSSERQAKGDSLRRQSKMVNDWLKAHPEYYLDQDLSFRDLGVSGFTGKHLKGGLGDFLTAIEKGLVKAGDTLLIESLDRLSRQDVDQASELLRNILRSGVDVVTLSDGEHYTKESLRDPLSLIKSILIMQRAHEESLRKAERIQAAWDAKKEAAKAGIKISRRCPAWLKLNDDRKSFSVIPEKVETVKRCFQLRLEGKSIWEIVRTLNAEGHQTLNQYKAGKFGQTSVQDLLKNRSVIGYFTPKGCEEISGYYPAIIDETTFYKVQQLSYARYGRKPASDKPMAVNLFKGVIRCSECGHALIITGFSDTRNGIYRCPLRNENRCSAKGLSRKQTDGTLLALLSRLDRFDSDMTNTIDTLKLHREHISSNIEKLVQLSLEIEDLSAITSKLRQLKNELSQVDADIEKETQRLKSIDVGCLSDCDLTTKAGRIEAQLIIKSAVKEVVLNTAKRRCKVTFHNGKTITLPITENPSDNVTGAIQSLSEVTERGLIDVDEVII

SEQ ID NO: 3837 - protein, 560 aa, synthetic construct
MTKLYSYIRFSSMRQGEGSSYERQIKMAKEIADRYGLELVNDYQDLGVSAFKGANSKTGALSRFLDEIGRSIPVGSWLFIENLDRLSRQDIISAQELFLSIIRRGITIVTGMDNKIYSIETVTANPMDLMFSILLFIRGNEESQTKRNRTNSSALLKIKAHQQNPQSPAVAIEEIGKNMWWTDTTSGYVLPHPVYFPILQKIVKMKQEGHSTGSVLDYLNEHHEPPAPTSNKQHRKWSIAMVSRLFKTKALIGVKEVNVDGVQYELKDYYPRVLSDSEYYFLKNNLIKKAWSFGHAQEKTIPLLSGIGLLKCAHCGSPMVKRKAANGKVEQYRYTCDGEGSGRTDCLYPNWGFRASSLEGAVLQLLADKVWIAEDKANPIPEIQVQIDEISRKIDNLINLSAMTGATKELANQITDLNTQREALHEEIRLFEREMYSVDSQGWEKLAQFDLSDVQNEERLQIRLKIKGALRSIECARIDRNKNLFTLVYLDGLRQRLVIENNRGIRKGQIFVDLKTINDRQILESAGMVLHDHIDILIDEKAFYDGLPKEEDGPLSKFGI

SEQ ID NO: 3838 - protein, 558 aa, synthetic construct
MTKLYSYIRFSSMRQSDGSSYERQIRMAKEIADRYNLELVNDYQDLGVSAFKGANSKTGALSRFLDEIGRSIPVGSWLFIENLDRLSRQDIISAQELFLSIIRRGITIVTGMDNKIYSIETVTANPMDLMFSILLFIRGNEESQTKRNRTNSSALLKIKAHQQNPQNPAVAIEEIGKNMWWTDTTSGRVLPHPVYFPVLQKIVQLRQEGHSAGAILDYLNEHHEPPAPTSNKKHGKWSRAMVSRLFATKALIGVKTVNVDGVEYELRDYYPRVLSDSEFYFLRKNIIKKAWDYSHVKEKVIPLLSGIGVLRCVHCGATMVKQTAANGKREQYRYCCDGRKSGRTDCPYPNWGFRAVTLEGAVLQLLADKIWIAEDKTNPIPEIQVKIDEISRKIDNLINLSAMTGATKELANQITDLNSQREALHEEIRLFEREMYSVDSQGWDKLAQFDLSDVQNEERLKVRMKIKGALHEIECSRIDSKKNLFVLVYLDGLRQRLVIENNRGLKKGQIFVDLKTINDRQILESAGMVLHPCIEMIIDADWKAPEEIPGLLSEEFGI

SEQ ID NO: 3839 - protein, 624 aa, synthetic construct
MIKTFIYSRVSSQEQLSGGGLDRQETDVREYVTRNGLDQYEIVAMVDRGISGYDGSNMRDGELGKWYKDAITGMYWGSHLVLEAIDRFSRRDPMLAMEDFTVLVNKGGIKVHIVKFNTFINGDNLPMLSMMMNLAHSESKQKSDRISKGWQRRRRMALDNGTAITARTPYWIDVRDNEYRLNNSSIAVVEAFAMYKQGLSCGLIAKKLNELKHYFPYMWTKTAVQHIVDGLNTSGIIDAPRAIKTIKAFYKSGFSVEDIAKKMNAEFQFMKEWNAPAVHKLLQNKSVTGLVEIQKRKLIQEFDSDGKPLELRTKIEGEKYFESIYPQIISIDDFELIQKLLESNRKVDTKTGKGQTTGGTVTQNEDGELVKQFILSSLCRCYKCGGAMFNNIVRSKRKNGKVDTYSYLRCLNERDAHCDVKALNYPVIERAIIEHVKGLNFDTMFKGTNNSELELLKTREVELLRDIATYEDAIAARKAAGKNTSPVLVTSLVDAQDDLEALQKKIRAISGVTVNAEELTSLNESVFDVAEYELRNMVELELQKIIKRITFNCTEKNIYFITIQYNTGTVLQHGLKVDKKKGVIETYELHEGNKGYVSNGEVITPALIEAAESKNIGIFEGKVM

SEQ ID NO: 3840 - protein, 517 aa, synthetic construct
MKTIHKLARPQLPEPPKLKVAAYARVSTSSNEQLASLQTQITHYENHIQNNDQWEYVGVYYDEGTSGTKVEKRDGLHRLIKDAELGKIDLILTKSISRFSRNTVDCLNLVRKLTDIGVTIFFEKENINTGDMESELLLSILSSLAESESYSHSENMKWANRKRMAKGIFKTVPPYGYQRKGADFYLIPDEAKVIEQIFKWALEGVSAYQVAKRLNEKNIFTRKGSKWQDSGINNILHNIVYTGTMIHQRYFNDDQFRKKKNNGELPMYRIDNNHPPIISWEDYERVQELITLRANAKGTSKGSQKYSQRYVFTKRIICDKCGCNYKRVHIAGKGNTKVVKWSCTGHLKNKDGCYALPITDESLKTAYLTMLNKLILGHTIVLEPLINTPVEGKASKQELEKLSIEITKIDEKLEVLASLNASGVVSTKTALEEQGRLQMELNKLQEKQHKIMESVNGTSTQRIQLEQLHQFTKRSEMLTEWDEDLFLRFAELIVVYSRQEVSFELKCGLLLKERLEA

SEQ ID NO: 3841 - protein, 516 aa, synthetic construct
MAGKKVTVIPMKPRQWAAENTEEKPKLKVAAYCRVSTEMEEQASSYEAQVQHYTDYIQRNSDWELAGIFADEGISGTGTKKRDGFNRMIEACQKGDVEYIITKSISRFARNTVDCLQYIRQLKDLHIAVFFEKENINTMDAKGEVLLTIMASLAQQESQSLSQNTKMGVQYRFQQGQLRINHNHFLGYTKDEDGNLVIEPKEAEVIKRIFREYLEGSSLQEIANGLMSDGILTGGKRKLWRGEGVRLILRNEKYMGDALLQKTYTTDFLTKKRVKNDGSYAQQYYVENSHPAIIPRDIFMQVQQELDRRKSMKNKHSQCFSGKYALSGITVCGDCGNAYRRVHWKNRGTVWRCKSRVDKREHNCSGRTIYEKDLHEAIIKAINETVVDREDFLQQLSENINSVLTDGLTGRLEELDSKLKELESEIISMAIGGQGYDELASQIFSLRDERDAVAKQIAANTNLQQRVDEMVVFVKEHDVINEYSEVLVRRLIEKVTIFEKNIVVDFKSGVRVTVEI

SEQ ID NO: 3842 - protein, 560 aa, synthetic construct
MTKLYSYIRFSSSRQADSSSYERQKRTAKEIADRYGLELVTSYQDLGVSAFKGANSKTGALSRFLDEIGKSVPVGSWLVVENLDRISRQSIIEAQELFLSIIRRGITIVTGMDGKVYSKESVNANPLDLLLSVMMFARANEESQTKRNRTNSSALLKIKAHQQNPQSPAVAIEEIGKNMWWTDTTSGYVLPHPVYFPILKKIVKMKQEGHSTGSVLDYLNEHHTPPAPTSNKQHRKWSIAMVSRLFKTKALIGVKEVTVDGVQYELKDYYPRVLSDSEYYFLKNNLIKKAWSFGHAQEKTIPLLSGIGLLKCAHCGSPMVKRKAANGKVEQYRYTCDGEGSGRTDCLYPNWGFRASSLEGAVLQLLADKVWIAEDKANPIPEIQVQIDEISRKIDNLINLSAMTGATKELANQITDLNTQREALHEEIRLFEREMYSVDSQGWEKLAQFDLSDVQNEERLQIRLKIKGALRSIECARIDRNKNLFTLVYLDGLRQRLVIENNRGIRKGQIFVDLKTINDRQILESAGMVLHDHIDILIDEKAFYDGLPKEEDGPLSKFGI

SEQ ID NO: 3843 - protein, 515 aa, synthetic construct
MKTAIYLRKSRADLEAEARGEGETLAKHRTTLLKIAKEMNLNVLAVREEIVSGESLVKRPEMLALLEEIEDNKYDVVLCMDMDRLGRGGMKEQGIILETFKRSNTKIMTPRKTYDLNDEWDEEYSEFEAFMARKELKIITRRMQRGRVASVEAGNYLGTHAPFGYDIHRLNKRERTLTINPEEASVVRMIFDWYAHEDMGANAIRSKLNDLGYKSKLGNEWNPYSILDILKNNVYIGKVTWQKRKEVKQPDAVKRSCARQDKSDWIIADGKHEPIIPESLFEQVQEKLNSRYHVPYNTNGIRNPLAGIIKCSKCGYSMVQRYPKNRKETMDCKHRGCENKSSYTELIEKRLLEALKEWYINYKADFEKHKQGEKLKETQVIQMNEAALRKLEKELVDVQKQKNNLHDLLERGVYTVDIFLERSKAVSDRINEITSTMENLKKEIKTEIKKEKVKKDTIPQVEHVLDLYFKTDDPKKKNSLLKSVLEKAVYKKEKWQRLDDFELVLYPKLPQDGDI

SEQ ID NO: 3844 - protein, 558 aa, synthetic construct
MTKLYSYIRFSSMRQSDGSSYERQIRMAKEIAARYNLELVNDYQDLGVSAFKGANSKTGALSRFLDEIGRSIPVGSWLFIENLDRLSRQDIISAQELFLSIIRRGITIVTGMDNKIYSIETVTANPMDLMFSILLFIRGNEESQTKRNRTNSSALLKIKAHQQNPQSPAVAIEEIGKNMWWTDTTSGRVLPHPVYFPVLQKIVQLRQEGHSAGVILDYLNEHHEPPAPTSNKKHGKWSRAMVSRLFNTKALIGVKTVNVDGVEYELRDYYPRVLSDSEFYFLRKNIVKKAWDYSHDKEKVIPLLSGIGVLRCVHCGATMVKQTAANGKREQYRYCCDGRKSGRTDCPYPNWGFRAVTLEGAVLQLLADKIWIAEDKTNPIPEIQVKIDEISRKIDNLINLSAMTGATKELANQITDLNSQREALHEEIRLFEREMYSVDSQGWDKLAQFDLSDVQNEERLKVRLKIKGALHEIECSRIDSKKNLFVLVYLDGLRQRLVIENNRGLKKGQIFVDLKTINDRQILESAGMVLHPCIEMIIDADWKAPEEIPGLLSEEFGI

SEQ ID NO: 3845 - protein, 566 aa, synthetic construct
MLILKGDQKLSTDNIMHLIGKINALIYARVSTTDQANKGFSIESQIERCKERAISKFGYKESEIIALVEPGGMGDDPNRPALNHALYLLEKGLGKKFIVLHPDRLTRDNTLQGVVSRRIWGMGVDIEFIEFEVNPHDPESMLMYNIQGSIAQYNKAKIHANSKRGRLAKAKKGEFPSFKRLYGYKFNTVTDLPEYNEEEKEILLEMKDMLLNKKMSSNEIAKELSRRGVAAPNGKTWYQATVSRMLQNEDYTGDFYYGKSKVVQINGKKKQVPTNKDEWILIKIPPMWDKATREQIIERLKSNFKGRSRATKDYLLKNKAKCGRCGGACGSGITSKTKSGVYKYYSCRAKTAKGYQNGKKVVSCEGKNWRVDIVDEVFWNWFIKLMKNPEKFLESFLEEASDQKKIDELKAKANRLEKQLGEIDEEIANYVILFGKGKIKESMFDQLSQPLEQNKEHIENEIKIINSQLAANKQTEDKKQKMIEYIGSFSKMIKNEITIEEKRQFLDFFIEKVTLFDDDHMEVVWKSSSLNNENSHVDFLNGEQGGEFINSHKRLNHIQAYGRQTA

SEQ ID NO: 3846 - protein, 693 aa, synthetic construct
MLILKGDQKLSTDNIMHLIGKINALIYARVSTTDQANKGFSIESQIERCKERAISKFGYKESEIIALVEPGGMGDDPNRPALNHALYLLEKGLGKKFIVLHPDRLTRDNTLQGVVSRRIWGMGVDIEFIEFEVNPHDPESMLMYNIQGSIAQYNKAKIHANSKRGRLAKAKKGEFPSFKRLYGYKFNTVTDLPEYNEEEKEILLEMKDMLLNKKMSSNEIAKELSRRGVAAPNGKTWYQATVSRMLQNEDYTGDFYYGKSKVVQINGKKKQVPTNKDEWILIKIPPMWDKATREQIIERLKSNFKGRSRATKDYLLKNKAKCGRCGGACGSGITSKTKSGVYKYYSCRAKTAKGYQNGKKVVSCEGKNWRVDIVDEVFWNWFIKLMKNPEKFLESFLEEASDQKKIDELKAKANRLEKQLGEIDEEIANYVILFGKGKIKESMFDQLSQPLEQNKEHIENEIKIINSQLAANKQTEDKKQKMIEYIGSFSKMIKNEITIEEKRQFLDFFIEKVTLFDDDHMEVVWKSSSLNNENSHVDFLNGEQGGEFINSHKRLNHIQEQGFNFYATSQLDIPQPQRQYKYVWQQYLERFNEIKKMHFEELKTVGEISKELNISDWIILDLFKSQNVDKLSFQELSKRRRTKDFAFLYDLHFNKKMSLKEISRAFDYSPPYIRQVFKDQGIKHLTFKNQYKN

SEQ ID NO: 3847 - protein, 498 aa, synthetic construct
MYARVSSKEQDREGFSIPAQTKLMKDYADANDIQVAREFVDVETAKKSGRTSFNEMLQYVRRHPTVRTLLVEKTDRLYRNLKDWVTVDDLDIEIHFVKEGVVLSQDSRSSEKFMHGIKVLMAKNYIDNLSEETRKGMLEKAEQGLWPTVAPIGYLNVEGPNGKKIITIDPALGPLVQRLYEWYSTGQYSLKEVSKKARQAGLTYRKSGAPIGVSTVHTILRNRIYTGAFEWLDKVYQGSHAPLVSEDLWGAVQDVLDGRKAANIRASVNDFPFTGMMTCGHCGCAMVGEIKKQRYIYYHCTGFKGKCGEPYVREEVLEQRFAGLLRQLRFDDAAFELIQRALRESLQDETRERRAAIERLRGEADRLQARIERMYEDKLDGVVSDDFYRRMQIVWREERDRCLKDIERHHSADDEYIDNGIALIRLGREAHDLFEQASASEKRRVLNLVLSNCSWAHGELTAKFRQPFDLLSETIAQSTFSKKEKTGDLPENEKWLRG

SEQ ID NO: 3848 - protein, 504 aa, synthetic construct
MKAAIYARYSSDNQREESIDAQIRAIKDFASHNNIQIVKIYTDEARSATTDDRPQFLQMIKDSEFNIFNTVIVHKLDRFSRNRYDSAFYKKKLKDNHVKLISVLEHLDDSPESIILESVLEGMAEYYSINLSREVMKGMKETALQCKHTGGTPPLGYDVNPDKTYCINEKEANAIRLIFQMYASGTGYTPIIDKLNDLGYKSKTGKSFGKNSLYGILTNEKYRGVYIFNKSSKKINGKRNSHKIKSEDEIIKIEGGMPEIISEDLWKRVKIKMDSNKINKGANTAKAIYLLSGLIYCGKCGSAMTGNRRYAGRNKSLYETYECSNRKRTKQCDMKAINKDYVEQVVIDDLYNNIFSDSAIENIVPDIFAFISEQNKIINEDIKIYKKELADIQTKIDNMLDAIANGFYNSSMKEKSDQLETRKTTLLIRINEAEREAKLNSPTEDMIKKYLKKDSDIKQKSLENKKKVIQTHVQKITVYEDRITTDTIVSLIGGGDGCRTRVRK

SEQ ID NO: 3849 - protein, 561 aa, synthetic construct
MTKLYSYIRFSSMRQSDGSSYERQIRMAKEIADRHGLELVNDYQDLGVSAFKGANSKTGALSRFLEEIGRSVPVGSWLFIENLDRLSRQDIISAQELFLSIIRRGITIVTGMDNKIYSLDTVTANPMDLMFSILLFIRGNEESQTKRNRTNSSALLKIKAHQQNPQSPAVAIEEIGKNMWWTDTTSGYVLPHPVYFPILQKIVQMKQDGHSTGSVLAYLNENHEPPAPTSNKRHARWSMAMVSRLFQTKALIGIKTVNVDGIEYELKDYYPRVLSDSDFYFLKANISKKAWNYQKGSNEKVIPLLTGIGLLRCMHCGSTLIKQKAANGKKEHYRYCCDGTRSGRYECAYPNWGFRASTLEGAVLQLLADKIWIAEDKTNPIPEIQVKLDEISRKIDNLINLSAMTGATRELAEQITALNAQREELHGEIKRFEAELYSVDSQGWEKLAQFDLSDVENEERLKVRLKIKGALREIECSRLDKQKNLFVLVYLDGMRQRIVIENARGIRAGRVFVDVKTVNDRQILESSGLYLHDHIDVLIDEKAFYEGLPKEEAGLLQEFGI

SEQ ID NO: 3850 - protein, 559 aa, synthetic construct
MKTKLYSYIRFSSMRQNDGSSYERQIRMAREVAAKYDLELVNDYQDLGVSAFKGANSKTGALSRFLDAIGRSVPVGSWLFIENLDRLSRADIVSAQELFLSIIRRGITIVTGMDNKIYSLDTVTANPMDLMFSILLFIRGNEESQTKRNRTNSSALIKIKSHQENPQNPAVAIEEVGKNMWWTDTTSGYVLPHPTYFPVVQEIVELRKNGRSTAEILDHLNETYAPPPAVSNKKHSKWSRAMVERLFHTRALIGIKEVSVDGVNYELKDYYPRVIDDPTFYHLKKNIGARAWNFGDKEEVKPIPLLSGIGLLKCDHCGCAMVKVKGTNKRSDQYRYTCDATRSRRLDCEHPNWSFRGDQLEKAVLQLLADKIWIAEDKANPVPALKVQIDEISRKIDNLITLSAMTGATKELADQITTLNSERETLYNQIKMAEEEMYSVDSQGWEKLAEFDLEDVYNEERIKVRFKIKQALKRIGCSRIDRNKNLFVLEYIDGKTQRVVIENSRGTRKGRIFIDLKTINDRQILESNGLVLHPCLDMLTDKNWKPEEEIPGPLQEFGI

SEQ ID NO: 3851 - protein, 457 aa, synthetic construct
MKKAGLYIRVSTPHQEKEGYSIEAQKEKLAAYATAKDYEVYKTYIDGGFSGAKVDRPALKEMIEDIEDERLDVVIVYKLDRLSRSQKNTMYLIEDVFLKNNVDFISLQESFDTTTSFGRAMIGILAVFAQLERDNIKERTMLGRVERAKKGLYRGGNNTPVGYVYNNGELVRDENTAEIIETIFNDYVYSRKSMYEIFKDCHTRFGQILYNPNFVKRVLTNDVYIGKNTFAGITYEGKHEPLVSEDTFQAAQERISNQDDRYSSPKTNRSALLARKLYCGYCGASIVKLNHYKNNKAVYAYYTCNSHRKSRPSGIKDPNCPQKNRRTEYIDEAVIKELKNIDFDKTIKKLQSTKPVSLDTHKQLRQLEKQQSKLIDLYQFDMIEIEEYNKRLKSINKQKEKLAAKIPKKNRALIKVLESLKNFDWDNSSFEEKCLAIDSLVKRVICKDEDVEVILYD

SEQ ID NO: 3852 - protein, 416 aa, synthetic construct
MEICKLPPKPAALKLTRVAAYVRVSRESERLTHSFSAQVSYYNKLITNTPGWEYAGVYSDYATTGTSISGRGEFNQMIEQALAGSIDIILTKSISRFARNTVDLLTTVRALKAAGVSVRFERENIDTANAEGEVLLTLLASFAQAESESISANAKWGIRKKYKDGLLHSRHPYGYRYHHGQLDIIEEEAVIVRRVFAEFLDGISPEKTCKQMNQEGLRSRGGGKFSASVTRDWLENPTYIGTAILQQYFSAHAGDNTPTLNRGELDKYIVEDSHPPIIERSVFDAVQAELARRRATGGRGLTPTGGSSALTHRITCTICGRNYHRRTRRLAHSTYKYWWCETATKGKGNPCHAHQLREENLHTIIKRLLGLHAWDDQQVVDRIERIEVCPNWLLTIHLSSGNTATVDYLTGEEVTA

SEQ ID NO: 3853 - protein, 518 aa, synthetic construct
MPKAISYIRFSTKIQSVGDSTKRQSKYINDWLKRNPDYYLDESLRFQDLGISGFSGANAKSGAFGEFLAAVESGYIESGSVLLVESLDRVSRQDIDTAGEQLRKILRAGVEVVTLVDNEWYTKESLKDSLSMIKAMLVMERAHEESAMKSTRLRSVWAAKRERAANGEIMSKRCAAWLKVSEDRSHFEFIPENVKAVQRVFQLRLEGLSHVKIAKQMNDEGFSTLNQFKSVTGGWSQSSVTELLSNRSVIGFKVPSKSMAVKGVSEIPNYYPSIISDEQFYAVQQLKQGSGRKPSSDLPLLTNLFKGVLRCSECGFIVVVAGVSAKRSGIYKCSMKSEGRCNSVGFSRLQTDRALVQGLLYNTNRLSLNRRDGSAIGALQSELEQLQKQRERLIKLAMLADDTESMAKDLKALNSQIRDAEKAVSEVHQREQSSQLETISHLDLTVKKDRTEAQIIIKRIVKEIRLNTAGKKCDVFLHNGLKLYNFPLDRVVDGEIFLEVLPVLEADEFDFDAYRMIE

SEQ ID NO: 3854 - protein, 520 aa, synthetic construct
MKKITKIDELPQGQLPTTKLRVAAYARVSTDSDEQLESLKAQREHYERYIKSNPEWEFAGLYYDEGISGTKMEKRTELLRMIRDCKQGRIDFIITKSISRFARNTVDCLELVRKLIDIGVYIYFEKENLNTGDMESELMLSILSGFAAEESASISQNSTWSIQKRFQNGSYVGTPPYGYIKINGEMVIVPEEAEIIKRIFAECLSGKGGGTIARGLNKDKIPARRGNHWSAGTVIDMLRNEKYMGDILLQKTYTDSNYNRHPNTGEKDQYYYKDNHEPIISREDFAKAQDLIDERAKMKCKGVKKNVYLNRYALSGKIACGECGRNFRRKTNYSAGRSYIAWSCIGHIEDKESCSMLFLRDGEIKATFTTMMNKLAFSNKLILEPLFKSISQIDEESDRERMDAIDKRMEQLMEERNTLITLMAKGFLEPVLFNQERNVLDSEMKNLSTEKTYLVSNSTSGVLRANEIKDLIDYVSADNFIGDYTEELFEEFVENIIVNSREELTFNLKCGLSLKEKVVR

SEQ ID NO: 3855 - protein, 520 aa, synthetic construct
MTEKNIMVIPARKRVGSTAAKEKIKKLRVAAYCRVSTETEEQNSSYEVQVAHYTEFIKKNTEWEFAGIFADDGISGTNTKKRDEFNRMIAECMDGNIDMVITKSISRFARNTLDCLQYIRQLKDKNISVYFEKENINTMDAKGEVLLTIMASLAQQESQSLSQNVKLGLQYRYQQGKVQVNHKRFMGYTKDEDGNLIIVPEEAEIIKRIYREYLEGQSLVGIGRGLEKDGILTAAGKPRWRPESVKKILQNEKYIGDALLQKTVTVDFLTKKRVKNEGYLPQYYVENSHEAIIPKELFLQVQEEIHRRSNIYTGEGKNKRIYSSKYALSAITFCGDCGDIYRRTYWNIHGRKEFVWRCVTRIEQGPGVCKNRTVKEDELYGAVMTAINRLLAGGNNMIKTLEENIHAVIGETTEYQISEINNLLEEKQKELIKLANKGQDYEHLADEIDELRDKRQILLVEDASLSGENERINELIEFIRNNKYRTLRYDDTLVRKIIQNVSVYDDHFVICFKSGIEMEV

SEQ ID NO: 3856 - protein, 416 aa, synthetic construct
MAHISVVTPVRPPTPKLVNVAAYARVSTNGTEQLASLSAQVSYYSRLIQSTPGWAYVGVFTDEGITGTSTKSRQGLADLMDAARRGGVDIVLCKSISRLARNTVDLLATVRELKDLGVAVRFERERIDTLSADGELLLTLLASFAQEESRSLSHNVKWAIRNRYKNGGTNSFVVYGYHWTDGEFTIIDEEAKIVRLLFANYLDGISPEKTATMLNAEGKRSRGGGRFYGSVFRRMLENERYKGCQMLQKMYRPTIQAPTCSLNNGELPRYWVEQALPPIIDEAMFDAVQAEIAYRREVGPAATPSKNTGVFTGRICCAACGKNYQRKTRTYKSGTSYKFWRCWSACTGNGNPCRGHNLRETLLEQACADMLGTQSFDPAAVAEQVVMIEAFEHQLTFHLADGTIAPVGLTSEGRLA

SEQ ID NO: 3857 - protein, 523 aa, synthetic construct
MSRTVTAIPATKKLRSATASSGAPARRRVAAYARVSTEMEEQTSSYEAQIDYYTTYIHSRNDWQFAGMYCDEGISGTSMKHREGFQTMIDDALAGKIDLILTKSVSRFARNTVDSLTTVRKLKDAGVEVYFQKENIYTFDTKGELLITIMSSLAQEESRSISENVTWGHRKRFADGKIMVPYASLLGYKKGADGSLVIDETQAPTVRLIYQLFLDGMAISEIKTELAARKILTPRGKEVWSTSTVRSILSNEKYKGDALLQKTFTTDFLTKKMKVNEGEVPQYYVTGNHEPIIAPHIWDQVQYELSTRHGNISSAKVGLFSTRLKCFQCGAWYGRKTWASNTKYKYTVWQCNHKYAGQHPCSSATVKDEQIKDSFVQALNQLIARHRYESHLPQVLGDMFDTSRLEEQAAACQAKIVELTEQIEALIAENQQRALDQDAYQAHYTELDTAYRKTLARKASLEADIAANTAKHAAITTTLNDLTGEPVSEFHPAQWSALIDHAIVGEDTIRFVFRVGEVVRVQL

SEQ ID NO: 3858 - protein, 449 aa, synthetic construct
MKQVIGYLRQSTMKQQSLAAQKQAIEAIAEKHHIQHINFYSDKQSGRKDNRSGYRQITQLIQQGQCDILCCYRLNRLHRNLKNALKLIKLCQTYHVHILSVHDGYFDMDQAFDRLKLNIFISLAELESDNIGEQVRNGLQEKAKQGRLITTHAPFGYDYHHGTFIINQNESPTVKAVFNYYIKGHGYKKIAQLLEEDNTYINRQPYQVRNIIINPNYCGRVNNQYGQFDNMFPSIVSTSIYEQAQRLRSQKQTKQTSSDNQLKQKIKCPCCNATLTNMTIRKKNHTLRYYVCPKNMNASRFVCDFKGINAQTLEDKVLEVCRDFYQNQRIYTKIKSAIDKRIKRQRNIEKHHTLTQEQLIEKLAQGIIDAETFREQTQSLRQQPQRTTSINGHQIQHIIQNIIQKRFTLNILYPYIETIHITKDKNLIGIYFKNEPLNIVNQTMQSSIA

SEQ ID NO: 3859 - protein, 559 aa, synthetic construct
MKGKIALYSRVSTSEQSEHGYSVKEQEQVLIKEVVKNFPGYDYETYTDSGISGKNIEGRPAMKRLLQDVKDNKIEMVLSWKLNRISRSMRDVFNIIHEFKEHDVGYKSISENIDTSNASGEVLVTMFGLIGSIERQTLISNVKLSMNAKARSGEAITGRVLGYKLSLNPLTQKNDLVINENEAHIVREIFDLYLNHNKGLKAITTILNQKGYRTINQKPFSVFGVKYILNNPVYKGYVRFNNHQNWAVQRRSGKSDKNDVILVKGKHEAIISEDVFDQVHEKLASKSFKPGRPIGGDFYLRGLIKCPECGNNMVCRRTYYKTKKSKERTIKRYYICSLFNRSGSSACHSNSINAEVVERVINVHLNRILSQPNVIKQIASSVIEELKQKHSKQTEIKYDIDSLDKQKAKVKTQQERLLELFLDDEMDSEMLKAKQSKMNQQLEVLDQQIKEAKQANQSQDDIPNFDKLKARLILMITRFSVYLRKATPEAKNQLMKMLIDSIEITTDKQVKLVRYKIDESLIPQSLKKDWGSFFMPKFNFVINVTNENRIENLSLLPLF

SEQ ID NO: 3860 - protein, 457 aa, synthetic construct
MKKKDIATALRVALYIRVSGEEQKIKGLSLEAQQERLEAYAREQGWVIVGVFVDAAKTARKKLHKRTGFHRMLDLVRRNEVDMLLFTRLDRWFRSVPDYYKVMEVLEAHNCGWKTIDDGEGYDTTTASGRLYINLKLSIAQNEADLDSERIAVVFDSKINHGTVVSGSCPFWLRVNDQKRFEIIPEKAAILQDAFNHYEATVSQRGTVKYIRETYGLNWCDATFRRMLRDKLAIGVYDKNGRVNENFCEPAIDRAQFERVQKLLANNAKSSPSGRVYIFTSILVCDECRHNLAGIRTGGNYYYRCNQHFQRGRCPHKKEIREEVVEKWLFENLGEELKKYRLDWEIKEEKRRKAAASIDRAAVRRKLTRLKELYVNELIDLEEYRQDYDQLNALLEEKPEPAADQRPDFEKIERLLSQDFQTIYDSLGREEKRTLWRSVISEIRINNDQQITGISFL

SEQ ID NO: 3861 - protein, 488 aa, synthetic construct
MKKIAIYIRKSIKGDENSISLDAQIEVIKNYFKEDCNFTIYKDDGFSGGNTNRPAFKKLMIDASVNKFDAVACYKLDRIARNTLDFLTTFNTLNDYGIDLICVEDKYDPTTPSGRLMMTLLASLAEIERENIKQRVKDSMLKLAKEGRWTGGTAPFGYKIVTIDCGKYLELVDEANIKYIFNEFVSGKGILKLSKEFNCNKQNISRILRSITYLKSTEEANKYLEKFLNYEVIGVPNGCGYLPYGNYKNVNGKKVKNNDSKLATVSKHKAVIDLDTFIKVQNRLKTFEGNPSPRISSKTFLAQMVKCKCGSNMNVILGKKKKDGSRKIYFACPKKCGNTFCDVSKIENDVLNTLKDVDLFNKIIKSSNPINKDYSKIKEPLLKEIDEKKKILDGLVCKLALANDSLTKILLDKIESLDLDINSIKEKINEIEKEEISKKVNENDIKIREMNRVNLIKNFDKMDMKERQSSIKKVINKIVWLGDAVLIK

SEQ ID NO: 3862 - protein, 502 aa, synthetic construct
MNKKICIYLRKSRADEELEKTLGEGETLSKHRNALLKFAKENKLNVTDIKEEIVSGDSLFFRPKMLELLKEVENNMYYGVLVMDIDRLGRGGMKDQGIILDAFKESKTKIITPLKTYDLDNEMDEEITEFKTFFSRRELKTINRRMQGGRIRSIEEGNYIATNPPYGYDISFIKKNRTLKINEDEAPAINLIFKLYIEGNGASAIANELNNLGYKTKLGNNFSPSSVLTIIKNPIYIGKIPWKRKDIKKSKTPGKVKDTRTRDKSEWIIADGKHPAIVTNEIWESAQKVLKGRYHIPYQLSNAPVNPFAGIISCGICGKKMVMRKARGINRLMCIYKCGNKSTRFDNVESDCLEALKDYLSNYSAEIKNSIKKEDIDMYSIQITNLKKELTTLNNQRLKLFDLLERNLYDEDTFLERSKNINDRIENITHTLKSLEKKVKKNSYTSYEEDIKHFKNVLDAYNLTKDVSKKNNLLKSILYKIEYTKTEKGKDYEIKLFPKLRK

SEQ ID NO: 3863 - protein, 501 aa, synthetic construct
MKRIAIYSRKSVYIEGSISIETQINMCKEYMLKKFKDCEFKIFEDEGFSGGNTNRPAFQKMLKLAELKQIDVVVCYKIDRIARNTLDFLNILEMFKNSSVELISITEGFDPNTQMGKVMLTLLASFAEMERSNIQQRVKDSMFSLAQKGKWTGGAPPLGFKVKESGGIEIDNKNLILDVFNMKFKKYKNTEIIEYIESKYNHKFVNTTLASTLRKPIYVKSSKEVSIYLKSKGYKILREENNINSYHTYKNDNIDYAIVNNIEGFIEPNIWIAVNKSMDENSNGETNRFSENFWLTKTLRCKYCGKTYCGQTKIVKSKYTTKDGVIKEYTGNYEYYMCRDMLKGRLKTCENTKRIKRETLEVKIEELIYMLQDKKFFEKHYGNKQIDTNFELKEIESKICKINKTIDNLTNKISLLSNDAAMIFIDKIESLVEEKKILNNRIIELELQSLNNLNSKEDFIYENILKFNKNLSVEQKRNIAMNIFKKIIYDYKTDKFEVSFN

SEQ ID NO: 3864 - protein, 521 aa, synthetic construct
MNTIAIYTRKSKFTGKGESIENQIEKCKKFIEFKFNIDSENVNIFIDEGFSGKNENRPQYQLMMEKIKKKQINSIVIYQLNRLGRNARDIHNTMQLCDDLGVIIYSATEGFDSSTSFGRAVIGILASLAQLEREQLAERVKDNMYTLAKMGRWLGGQSPLGFDGSREYYIDETGKERSITKLKKNEEELKLVKLLYDKYLEEKSLSQVGKWALINHLTGKNGGNLNKNAINVILQNPVYVKSSKEVFEYLSNEGYEVCGEPNGNGLLRYGKDDEPIVATAKHKGVIPSDQWIEVQKILKDNAYKAPRMGKTNTALLTGLLRCKCGSTMRISYGQKRKDGTKPFYYICNMKINSGGARCNLKNLNGNLFEKNFIKFLKNYSKETLFAELQKLLNNSKDLESTISSNKIDVEIEKSNKAIKQILNKLKLTDDDELSKILLQEIKVENNKLKALSKQKEELLNDQSEVVITQSEVLAILDDLDNFQKTFDDLNLEDKQKALKSLIESITLTDDKFIVDFNIKKN

SEQ ID NO: 3865 - protein, 520 aa, synthetic construct
MKKITKIEGNQDYIFKPKTRVVAYCRVSTDSDEQLVSLQAQKAHYETYIKANPEWEYAGLYYDEGISGTKKENRSGLLRMLSDCETRSIDLIITKSISRFARNTTDCLEMVRKLMDLGVHIYFEKENINTGSMESELMLSILSGLAESESISISENTKWAIQRRFQNGTFKISYPPYGYQNIDGRMIVNPKQAEIVKYIFAEVLSGKGTQKIADDLNRKGIPSKRGGRWTATTIRGMLTNEKYTGDVILQKTYTDSRFNRHTNYGEKNMYLVENHHEAIISHEDFEAVEATLNQRAKEKGIEKRNSKYLNRYSFSGKIICSECGSTFKRRIHSSGRREYIAWCCSKHISQITECSMQFIRDEDIKTAFVTMMNKLIFGHKFILRPLLNGLRSQNNAESFRRIEELETKIENNMEQSQMLTGLMAKGYLEPALFNKEKNSLEAERESLFAEKEQLTHSVNGNFTKVEEVDRLLKFTTKSKMLTAYEDELFENYVEKIIVFSREVVGFVLKCGITLKERLVN

SEQ ID NO: 3866 - protein, 523 aa, synthetic construct
MAVSRNVTVIPAIKRIGNNKNRESKPKIRVAAYCRVSTDSEEQSSSYEIQIEHYTNYIKRNKEWELAGIFADDGITGTNTKKRDEFNRMIEECMAGNIDMIITKSISRFARNTLDCLKYIRQLKDKNIAVFFEKENINTMDSKGEVLLTIMASLAQQESQSLSQNVKLGIQYRYQQGEVQVNHKRFLGYTKDENKQLVIDPEGAEIVKRIYREYLEGASLLQIARGLEADGILTAAGKAKWRPETLKKILQNEKYIGDALLQKTYTVDFLSKKRVKNNGIVPQYYVENSHEPIIPRELFMQVQEEMVRRANLRGGKGGKKRVYSSKYALSSIVYCGQCGDIYRRVHWNNRGYKSIVWRCVSRLEEKGSECTAPTINEETLQAAVVKAINELLANKEPFLSVLQKNIATVLNEENDNTTDDIDRKLEELQQQLLIQAKSKNDYEDVADEIYRLRELKQNALVENADREGKRQRIAEMSDFLNEQSCELEEYDEQLVRRLIEKVTIHDDRIEVEFKSGVEIDIET

SEQ ID NO: 3867 - protein, 507 aa, synthetic construct
MKRVISYIRFSSEKQAKGDSLRRQSKMVTDWLKAHPEYYLDQDLSFRDLGVSGFTGKHLKGGLGDFLTAIEKGLVKAGDTLLIESLDRLSRQDVDQASELLRNILRSGVDVVTLSDGEHYTKESLRDPLSLIKSILIMQRAHEESLRKAERIQAAWDAKKEAAKAGIKISRRCPAWLKLNDDRKSFSVIPEKVETVKRCFQLRLEGKSIWEIVRTLNAEGHQTLNQYKAGKFGQTSVQDLLKNRSVIGYFTPKGCEEISSYYPSVIDETTFYKVQQLSHSRYGRKPVSDKPLSVNLFKGVIRCSECGHALIITGFSDTRNGIYRCPLRNENRCSAKGLSRKQTDGTLLTLLSRLDRFDSDMTNTIDTLKLHREHISSNIEKLVQLSLEIEDLSAITSKLKQLKGELSQVDADIEKETQRLKSIDVGCLSDCDLSTKAGRIEAQLIIKSAVKEVVLNTAKRRCKVTFHNGKVIDLPITENPSEDVTEAIQSLSEVTAKGLIDVDEVII

SEQ ID NO: 3868 - protein, 462 aa, synthetic construct
MPKAISYIRFSTKIQSVGDSTKRQSKYINDWLKRNPDYWLDESLRFQDLGISGFSGANAKSGAFGEFLAAVESGYIEAGSVLLVESLDRVSRQDIDTAGEQLRKILRSGVEVVTLVDNEWYTKESLKDSLSMIKAMLVMERAHEESAMKSTRLRSVWAAKRERAAKGEIMSKRCAAWLKVSEDRSHFEFIPENVKAVQRVFQLRLEGLSHVKIAKQMNDGGFSTLNQFKSVTGGWSQSSVTELLSNRSVIGFKVPSKSMAVKGVAEIPNYYPSIISEQQFYAVQQLKQGSGRKPSSDLPLLTNLFKGVLRCSECGFIVVVAGVSAKRSGIYKCSMKSEGRCNSVGFSRLQTDKALVQGLLYNSNRLSLNRDSGSAIGTLQSELEQLHKQRERLIKLAMLADDTESMAKDLKALNSQIKDAEKAVSEVHQREQSSQLETISHLDLKWSTKTGHRVRVFPVSVF

SEQ ID NO: 3869 - protein, 549 aa, synthetic construct
MTKAYSYIRFSSPEQARGDSLRRQTEGAQKWCAKRGITLDETLHDLGVSAYRGRNRMEGALRSFLDLVEQGEIEEGSYLIVESLDRLSRERVIDAALQLWALVKAGITVVTLSDNQEYSYSRLDNDWTPLIISLAVMARGHDESREKSKRVGEAWHKKKELARNEGRPLTPRCPEWLEVRDGAFVERPERVALIQRIFRETIEGFGRREIVRRLNVEAVPTFRGGEGWHTSSIAKVIQSRAVLGEYQPHSGTHKNRNRKPEGDPILDYYPRIIDDETFWRAQNATQGRRQSTAGRKGEKGAHILQGLARCASCDGPMHIQNKGKPPKGGIYLACSSNLRKTGCDNGRRVRVDRLERDLLTALLHVDVAALASLDDEMPQMLRQIEVLKAKLSDAKARRTRFLAVFAKTDDEEVEKQLIQAAEDVRELTKQLKDDEEAAASRQADPGVVVRLSTANELSGQLEEADLEKRRELRIKLSSVLRGLVERVECRPIGPVMILKPRLEVRMTAEPMPFAFRMDHGNVSMLLESPADKYALDQFFVGLGGASGMA

SEQ ID NO: 3870 - protein, 638 aa, synthetic construct
MKITVRPKAYSYIRMSTERQLSGDSLRRQLQDTRDYAAKNNLDLDESLRDIGVSAYTGENVENGALGRFLQLVKSNQIAQGSYLIIESLDRLSRKNVLEALPPFLAILQAGIIIVTLADKQVYSAQSIGDNPYQLMGSLVVMIRANEESATKSKRIKEAMSKMREAALRGEGRYNINLPTWIDVTKGPNGTVTYSLNEHAETVRLIYELAAEGVGQMEICRILHRREIPTFSKKAKGWHQSAVSHILSYPAVIGTYAKKDNLRGRYVVVGPEQRGFFPAAVDEDLYLRAQKAKRAPAHKGRKGNDFSNLFVGMITCRTCGGPMSLYYGRTHEYKYLRCYNRMRTFKRYGEEKKQFQCTNGVGISYPALEIAILDHVPEFKLHEVFRSQSGAVDLNAIAKNLIAIETDLQNLEAKNSSLIEELSATPKNLRHLFHQQLQRNSELQEQLEKQKDTYEAQRINALAADEASNDIERQVREERDSWPALAGEELYRSRSRIHTAFKHFIDGMSFDPDTKELLVYIANGFRAYKFKEGKLVATFDAVTMGHASDKPGAMRPEYFATDVRLQRDDEKSLLPESVNDLTAKMQVVTSLFDAKANRNIPNPVNPHLNDPDVIALKAKRQAAKEAAQREKASTNNAD

SEQ ID NO: 3871 - protein, 616 aa, synthetic construct
MAKSVLIYARYSTERQNEVSIETQVELCRDFAEQKGWATAEVFTDFAVSGTSYISRPGIQALMRRVEQGGVGVVLCVTVDRISRDSEHANGFLKRLKFNDIELWTVQGGVPVTDIEMGLRATLSQEMIEQVRYRTREGMKTAVRKGKASTCLAYGYRLAAVRDANGDRIPGYRDIDEDKANTVRWIFEQYAAGVSPRDIAQQLNERGIEGPRGAAWRDTAIRGHAERGTGILNNETYIGRLVWNKRNYRKNPDTERRVARANDAAQWVTSDVPAMRIVSDELWAKVKRRQKEVGELFSYTTTNALNASHRPSYLLSGLLECAECAGPYAIMGKDRYGCTNHKKRLPIDELGGACCTNSKTIKRQDVEDRVLSALPAAFFSMGIFDKLAEETKKKVEAKLRSGPSEHAKRADDLKLIEAKQKALIQQISERAMEGRPRLPALDDALDKLELERVAAEQLLATTKPDDDTLEEKLAEVRRQSTPENVELIINTVLYYMRDAADKDLKQRYITMIRMLVQKVVVGPTPGHQPAELAIHGRIASILAAMEATTILEREFELLKQHALLEGIDSGRLDTKQKQEEFLDACAEELSVRRLAWGNLQVSVVAGAGFEPAAFRL

SEQ ID NO: 3872 - protein, 547 aa, synthetic construct
MTKAYSYIRFSTPEQAQGDSLRRQTAKAEAWAKERGITLDNSLRDLGVSAYHGANRTTGALKSFLDMVEDGRIQRGSYLIVESLDRISREAVMDATSRLFDLIRAGIIVVTLSDGQEYSEERLRTDWTPLMFSLIVMARAHEESRIKSERVGEAWRQKKAAARREGKPLTPRCPEWLEVRDGAFIERPERIALVRRIFQETIDGFGRREIVRRLNAEGIPAFRGNNGWHTSSVAKIIQSRAVLGEYQPHTGTHRNRNRRPEGDPIQNYYPPIVDGGTFWQAQGAMQGRRQDAAGRKGMSGSHLFQGLAKCAHCGGSMHVQNKGPLPKGGIYLACSANMRKMGCENRRRWRIDALEPLLIAAIDMLDQTALSNENDEAGQLRAKAEALRTQIADFERRQRGLIPLVELGDETATARSLEIAKLIKRSKKELKATEDQQATAAAEPNLAARVSAAASISRQLEESADLSERRELRTRLREVIRGIVERVECHQRFGATAVFIPKDEFHINNRRSEYSFTFMTREGIPRILLDQNVPDDIIDEWVGPWPF

SEQ ID NO: 3873 - protein, 550 aa, synthetic construct
MQPSIRTDHTEAATGARVALYLRVSTGRQAEADLSIPDQRRQAMAFCAARGWQVAIEFVEPGASGMDDRRPELQRLLDMATADAPPFEIVLVHSFSRFARDHFALEYHVRRLRKAGVKLVSITQDLGDDPMSVMVRQVFALFDEYQSKENAKHTLRAMQENARQGFWNGSKAPYGYAVVAAEQRGAKTKKRLAVDPVEAEVVRLMFRLFLEGDGTSGPMGVKTMTAWLNAHGYRTRVGARWGIGPLHKIITNSAYKGENRFNRKVWKTGEAKPASEQIIVPVEPIIDPDRFDRVQAMLHAKNPRAMPPRVVTGPILLTGIATCASCGGGMTLRTGKSGRYRYYTCATCAQQGKVACKGRSIPMDKLDSLVTERLADRLLTTERVGELLAGLMRRQAAKAEDHASRLSALRERLGDTQGRLKRLYAAIEAGVADLEDETFRERVAAVKTERDLAQAAFDRATAELNPRARITEENIAAFVDVMRTNVLTGDTPFRRAYIRSVIDQVEVDDTEIRIIGRRTTLERLVMGGGAAPAGVPSFVRKWRTRRDSNS

SEQ ID NO: 3874 - protein, 624 aa, synthetic construct
MIKTFIYSRVSSQEQLSGGGLDRQETDVREYVTRNGLDQYEIVAMVDRGISGYGGSNMRDGELGKWYKDAITGMYWGSHLVLEAIDRFSRRDPMLAMEDFTVLVNKGGIKVHIVKFNTFINGDNLPMLSMMMNLAHSESKQKSDRISKGWQRRRRMALDNGTAITARTPYWIDVRDNEYRLNNSSIAVVEAFAMYKQGLSCGLIAKKLNELKHYFPYMWTKTAVQHIVDGLNTSGIIDAPRAIKTIKAFYKSGFSVEDIAKKMNAEFQFMKEWNAPAVHKLLQNKSVTGLVEIQKRKLIQEFDSDGKPLELRTKSEGEKYFESIYPQIISIDDFELIQKLLESNRKVDTKTGKGQTTGGTVTQNEDGELVKQFILSSLCRCYKCGGAMFNNIVRSKRKNGKVDTYSYLRCLNERDAHCDVKALNYPVIERAIIEHVKGLNFDTMFKGTNNSELELLKTREVELLRDIATYEDAIAARKAAGKNTSPVLVTSLVDAQDDLEALQKKIRAISGVTVNAEELTSLNESVFDVAEYELRNMVELELQKIIKRITFNCTEKNIYFITIQYNTGTVLQHGLKVDKKKGVIETYELHEGNKGYVSNGEVITPALIEAAESKNIGIFEGKVM

SEQ ID NO: 3875 - protein, 546 aa, synthetic construct
MTKAYSYIRFSTPEQAQGDSLRRQTAKAEAWAHQRGLVLDNSLRDLGVSAFHGANRTTGALKSFLQMVEDGRIQRGSYLIVESLDRISREAVMDAATRLFALIRAGITVVTLSDGQEYSEDRLLTDWTPLMFSLIVMARAHEESRIKSERVGEAWRQKKEKAREQGKPLTPRCPEWLEVRDGAFVERPERVTLVRRIFQETIDGFGRREIVRRLNSEGVPTFRGGKGWHTSSIAKIVQSRAVLGEYQPHTGTHRNRNRKPDGDPIPTYYPSIIDNDIFWQAQGATQGRRQNAGGRKGMSGSHLFQGLARCAHCAGSMHIINKGKPPKGGIYLACSTNIRKAGCDNDRRWRVDVFEPLLIAAIDMMDQTAFDNENQEVSQLRAKVDAIKIQIEDFEQRQRGLIPLVEIGDDTATARSVELAKSIKRLKKDLDATDDEVAIASTAPNLAAAIASAASISARLEESSDLKERRELRVRLRAIIRGIVAKVVCHQRFGATAFFIRSPSRIRKRQDLYVFDMVLEHGPPKILLDQNVPNQILDEWAEWCTQ

SEQ ID NO: 3876 - protein, 619 aa, synthetic construct
MTKNVLFYARYSTDRQDEQSIETQVALGREFARERGWTIVEIYEDRAISGTKLKSRPGIQNVLRRIKSGDIHVLLCVSVDRISRDMEHSTGILKQLRHEGVELWTVQAKAAVTDMELGLRSILSHEMIEQTRYRTREGMKTSVTKGRAAGGIAYGYRAKLVYDAKGNRIPGEREIDEEQAEIVRWIFEQYALGKSPKELAVELNSRIPAVPGPRGLKWRDTAIRGHRDRGAGILNNETYIGRLVFNRRNFRKNPETENREARMNDKSEWVVGEVPELRIVSDELWAKVKKRQLAVEASFSHTTTNRLNRTHRPQYLLSGLLECDRCCGPYAIMAKDRYGCTNRQKKLPIDDLGGIVCTNAKTISRQELEARVLDAIPTNLLTPARTTSIQEEINRQVQKAAAASAKAAETIEAKLKAISSKQKLIAEQMTERLLAGQMKIAAFDQMLDDLEKERARLVLELEAATPISLRRKKSDRAGLRSPGNPIVVNPAMFRCVLDAMTTALKGGVGDSNDTLAGYGQFVRSLVQKVVIAPSSDNRRADLTIHGRLASILASMEAFQDYSASIREHYHRDYSTRVKAGEFRDVKQKAYYLSRFQAILKEKEADWKRLQVSVVAGAGF

SEQ ID NO: 3877 - protein, 532 aa, synthetic construct
MRRAALYGRYSTDLQNDRSVDDQFRLCHGYAERVGAEVVKHFSDRAKSGASMFGRAGLADLMAASERGEFDILITEHTDRVSRDMADLGHIHKVLKFRGIEMHCVNGGLMDTVQIGMYGIVGQMQREEGARKVKRGMIGVVRSGRNAGGKAYGYRPVVGKPGELEIVEEEAAVVRRVFDMYAAGISPRTIAGILNREAIPAPRGRQWNASTINGSHQRNNGILRNSIYAGKIMWNRVRMVKDPATGKRLSRANEQDQIETIDAPHLRIVADALFQAVQGRKEANARLGAKAPRSKRLLSGLLRCGACGGGMVMIGPDRSGPRIQCSNHRESGTCQNTRRYYLERIEALVMNRLRSIFSDTKYIESYIAAYQEEQKKVRSTALRDRTNATRLLEEAKAEITKVISLMAKELIGEEEGVALLEPLRQQRDAQKAILDAVEEPTNVIELQPKAITRFRQNIESLAQIIEKEGDEPSPELVGPFREIVAAVVVHQSENGQPYDIGIKGRLASLVSPELSVIKVVAEEGFEPPTQGL

SEQ ID NO: 3878 - protein, 507 aa, synthetic construct
MKRVISYIRFSSEKQAKGDSLRRQSKMVTDWLKAHPEYYLDESLTFRDLGVSGFTGKHLKGGLGDFLTAIEKGLVKAGDTLLIESLDRLSRQDVDRASELLRNILRSGVDVVTLSDGEHYTRESLKDPLALIKSILIMQRAHEESLRKAERIQAAWDAKKEAAKAGIKISKRCPAWLKLNDDRKSFSVIPDKVETVKRCFQLRLEGKSIWEIVRTLNAEGHRSMNQYKPGKFGQTSVQDLLKNRSVIGYFTPKGCEEISGYYPAIIDETTFYKVQQLSHSRYGKRSVSDKPLSVNLFKGVIRCSECGHALIITGFSDTRNGIYRCPLRNENRCNAKGLSRKQTDGTLLALLSRLDRFDSDTTNTIDTLKLHREHLSSNIEKLVQLSLEIEDLNAITNKLKQLKNELSQVDADIEKETQRLKSIDVGCLSDCDLTTKAGRIEAQLIIKSAVKEVVLNTARRRCKVTFHNGKVIDLPITENPSEDVTEAIQSLSEVTAKGLIDVDVVEI

SEQ ID NO: 3879 - protein, 559 aa, synthetic construct
MKTKLYSYIRFSSMRQNDGSSYERQIRMAREVAAKYDLELVNDYQDLGVSAFKGANSKTGALSRFLDAIGRSVPVGSWLFIENLDRLSRADIVSAQELFLSIIRRGITIVTGMDNKIYSLDTVTANPMDLMFSILLFIRGNEESQTKRNRTNSSALIKIKSHQENPQNPAVAIEEVGKNMWWTDTTSGYVLPHPVYFPVVQEIVELRKNGRSTAEILDHLNETYTPPPAVSNKKHSKWSRAMVERLFHTRALIGIKEVSVDGVNYELKDYYPRVIDDATFYHLKKNIGARAWNFGDKEEAKPIPLLSGIGLLKCDHCGCAMVKVKGTNKRSDQYRYTCDATRSRRLDCEHPNWSFRGDQLEKAVLQLLADKIWIAEDKANPVPALKVQVDEISRKIDNLIALSAMTGATKELADQITTLNSERETLYNQIKMAEEEMYSVDSQGWEKLAEFDLEDVYNEERLKVRFKIKQALKRIGCSRIDRNKNLFVLEYIDGKTQRVVIENSRGTRKGRIFIDLKTINDRQILESNGLVLHPCLDMLTDKNWKPEEEIPGPLQEFGI

SEQ ID NO: 3880 - protein, 559 aa, synthetic construct
MKTKLYSYIRFSSMRQNDGSSYERQIRMAREIAVKYDLELVNDYQDLGVSAFKGANSKTGALSRFLDAIGRSVPVGSWLFIENLDRLSRADIVSAQELFLSIIRRGITIVTGMDNKIYSLDTVTANPMDLMFSILLFIRGNEESQTKRNRTNSSALIKIKAHQENPQNPAVAIEEIGKNMWWTDTTSGYVLPHPVFFPIVQEVVELRRNGRSTSEILDHLNATYTPPPAASHKRHSNWSRAMIERLFHTRALIGIKEISVDGVKYELKDYYPRVLDDAEFYHLKKSIGVRACNFGDKEEAKPIPLLSGVGLLKCEHCGSAMVKVKGTNRRPNQYRYSCDAMRSSRIECVHTNWSFRGDQLEKAVLQLLADKIWIAEDKANPVPALKVQIDEISRKIDNLITLSAMTGATKELADQITTLNSERETLYNQIKMAEEEMYSVDSQGWEKLAEFDLEDVYNEDRIKVRFKIKQALKRIGCSRIDKYKNLFVLEYIDGKTQRVVIENSRGPRKGRIFVDLKTINDRQILESNGLVLHPCLDMLTDKNWKPEEEIPGPLQEFGI

SEQ ID NO: 3881 - protein, 537 aa, synthetic construct
MSSQRAAIYARFSTDLQSERSVDDQIAICREFAVRNGYVVSKAYFDKARSGASILGRDGLLSLMDDARAGNFNVIIVEALDRLSRDQEDLPHLYKRLTHHGVEIIAVHDGRADPIQVGIRGLVSTLFLADLKNKIRRGMTGVVRDGRHAGGRAYGYRPTPGQPGILQIYEPEAAVVRRIFAEILAGRLPREIANGLNRDGIQPPRGVSWNASTINGSAQRGNGIIRNPLYAGKIVWNRVRMVRDPETGKRISRINEADEHREADAPHLALIESHVFEAAIEMVEGRARRAKGGEYVRRPKRLLSGLLRCSHCGGGMSMHDRQGDAIRIRCSRSIESGTCENKRRYRLDKIEAAVVAGLRTQMLHPDLLTEYVRVYREERRDEAAKAARERSSLERRLSDVSSQMDRLLQAMARGILPIEAVEAQFKPLEAEKAQLTAELAVVPQSTAVELHPHAVTQYRKAVEDLSGRLSELDQHADAEALASFRALVDRVVIHDTPTGGVEAEVISRLSALIGNHADMLGGRVVAEEGFEPPTQGL

SEQ ID NO: 3882 - protein, 506 aa, synthetic construct
MRTAITYLRYSSAIQGVEGADSTRRQNDLFKQWLKKNSDAQIVASFSDEGLSGYKGKHLTGQFGDMLARIESGEFPEGTILLVESIDRIGRLEHLETEALMNRILGNGIEIHTLQDGLIYTKDALADDLGISIIQRVKAYIAHQESKQKSFRVSQKWEQRAKLALAGEQRLTKMVPGWIDPETFKLNEHAETVRLIFKLLLDGESLHNIARHLQSNGIKSFSRRKDANGFSVHSVRTILRSETTIGTLPASQRNDRPAIPNYYEGVVDVSTFNKAQEILDKNRKGRTPASDNPLTINIFKGLFRCQCGASVHPTGTKNKYAGVYRCNNHLDGRCDVPQLKRKPFDRWMIDNFLGMIDVVSDGESERKIAALHYEVETVTARIKKATTLLLEMDDITELKAQVKELNQKRTELQTTIDTLKRKTSLTDKELPQLKDIDLTTKVGRVECQLILSKHLKGLTLGKDSVTVTLQNDTEIIIPTDPLPLNDGTSILEIAEKELLGIDVYQL

SEQ ID NO: 3883 - protein, 559 aa, synthetic construct
MKTKLYSYIRFSSMRQNDGSSYERQIRMAREIAAKYDLELVNDYQDLGVSAFKGANSKTGALSRFLDAIGRSVPVGSWLFIENLDRLSRADIVSAQELFLSIIRRGITIVTGMDNKIYSLDTVTANPMDLMFSILLFIRGNEESQTKRNRTNSSALIKIKSHQENPQNPAVAIEEVGKNMWWTDTTSGYVLPHPVFFPIVQEVVELRKNGRSTAEILDHLNETYAPPPAVSNKKHSKWSRAMVERLFHTRALIGIKEVSVDGVNYELNNYYPRVIDDATFYHLKKNIGARAWNFGDKEEVKPIPLLSGIGLLKCDHCGCAMVKVKGTNKRSDQYRYTCDAIRSRRLDCEHPNWSFRGDQLEKAVLQLLADKIWIAEDKANPVPALKVQIDEISRKIDNLITLSAMTGATKELADQITTLNSERETLYNQIKMAEEEMYSVDSQGWEKLAEFDLEDVYNEERLKVRFKIKQALRRIGCSRIDRNKNLFVLEYVDGKTQRVVIENSRGTRKGRIFVDLKTINDRQILESNGLVLHPCLDMLTDKNWKPEEEIPGPLQEFGI

SEQ ID NO: 3884 - protein, 549 aa, synthetic construct
MGTQDNNIFPIRAYSYVRMSTRKQLRGDSLRRQLDRSKAFADEHSLLLDDSLQDLGVSAWKGRNFKTGALGRFLSMVESGEVPKGSYLLIESLDRLSREAVPDALTLFMAIINAGIVIATLGEDRQIYSRDRLNGDWTKLIIGLAVMSRGHEESQTKSERISAVAKRKREQAREGKGHITSITPAWIDAKRIDANRYEFTLNHHAETVRAIYEMATRGLGATVIARKLNVDGVPAFKSKDGWYQSIIKALLSRQDVIGTFQPHRIVDGKRVPDGDPIAGYFPAAIDKDLFLRVQAMRSSPGKPGRKGNAFANLFTGLCHCAHCGGTMTMKMSRVKGNENGRYLVCANYVRGHRCADGNRHFRYEPLEVAILDHVKEINLAETLQAERFDDVRRERDETIAGLTLELEELRRKEQRLAQSIEDEGKPLDAIVALLRARQAERQLVEAELRHQQAERQRRTIRHEQPSETCDRIGKLRDAWERADDVTRYDLRSEAHAAIREIIAEVSFDSGDYSATLIVENGIAAYGIKEGCISGCFGRLRRDARAHHSL

SEQ ID NO: 3885 - protein, 546 aa, synthetic construct
MKQADGSSYERQKRTAAEIAAKYDLELVTSYQDFGVSAFKGANSKTGALSRFLDEIGRSVPVGSWLVVENLDRISRQSIIEAQELFLSIIRRGITIVTGMDGRVYSRESVNANPIDLLLSVMLFARANEESQTKRNRTNSSALIKIKAHQENPQNPAVAIEEVGKNMWWADTTSGYVLPHPVYFPVVQEIVELRKNGRSTAEILDHLNETYAPPPAVSNKKHSKWSRAMVERLFHTRALIGIKEVSVDGVNYELKDYYPRVIDDPTFYHLKKNIGARAWNFGDKEEVKPIPLLSGIGLLKCDHCGCAMVKVKGTNKRSDQYRYTCDATRSRRLDCEHPNWSFRGDQLEKAVLQLLADKIWIAEDKANPVPALKVQVDEISRKIDNLIALSAMTGATKELADQITTLNSERETLYNQIKMAEEEMYSVDSQGWEKLAEFDLEDVYNEERLKVRFKIKQALKRIGCSRIDRNKNLFVLEYIDGKTQRVVIENSRGTRKGQIFVDLKTINDRQILESNGLVLHPCLDMLTDKNWKPEEEIPGPLQEFGI

SEQ ID NO: 3886 - protein, 619 aa, synthetic construct
MTKNVLFYARYSTDRQDEQSIETQVALGREFARERGWTIVEIYEDRAISGTKLKSRPGIQNVLRRIKSGDIHVLLCVSVDRISRDMEHSSGILKQLRHEGVELWTVQAKAAVTDMELGLRSILSHEMIEQTRYRTREGMKTSVTKGRAAGGIAYGYRAKLVYDAKGNRIPGEREIDEEQAEIVRWIFEQYALGKSPKELAVELNSRIPAVPGPRGLKWRDTAIRGHRDRGAGILNNETYIGRLVFNRRNFRKNPETENREARMNDKSEWVVGEVPELRIVSDELWAKVKQRQLAVEASFSHTTTNRLNRAHRPQYLLSGLLECAHCCGPYAIMAKDRYGCTNRQKKLPIDDLGGIVCTNAKTISRQELEARVLDAIPTNLLTPARTTSFQEEINRQVQKAAAASAKATETIEAKLKAISSKQKLIAEQMTERMLAGQMKIAAFDQMLDDLEKERTRLTLELEAATPISLRRKKSDKAGLRNPGHPIVVNPAMFRCVLDAMTTALKGGVGNGNDTLAGYGQFVRSLVQKVVIAPSPDNRRADLTIHGRLASILASMEAFQDYSASVREHYHRDYSTRVKAGEFRDVKGKAYYLSRFQAILKEKEADWKRLQVSVVAGAGF

SEQ ID NO: 3887 - protein, 558 aa, synthetic construct
MARVALYARYSSDNQREASIEDQLRICREQAKREKWKIVGTYKDAGISGASMILRPGIQALLQDAQAGQFDIVLAEALDRISRDQADVATFYKHLKFAGVPIVTLSEGEISELHVGLKGTMNALFLKDLAAKTHRGIRGRVEDGKSGGGLCFGYNVVKQLDARGDPIRGDREINEAEANVVRRIFREFAVGVGPRTIARTLNEEGVPGPAGKLWSDTTIRGHVKRGTGLVNNELYIGRLIWNRLRYIKDPSTGKRVSRLNPEAEWIIKDVPELRIVDDELWHSVRVRQGEIAEKFANVTEAVRKHQKKNRLNGTRRPKSLLSGLVFCGCCGGPYSLRGADRFACSNHISKGACSNSRTIPREDLEARVLSGLKDRMMAPEIVEEAMRAYAEETNRLNRERRSSGDAWKAELVKIEMQIRGIIEAIKAGMFHESMKAEMDTLEARKTELNTLLADAPEDTPDILPSASAIYAKKVSALTKALNRKEERQEAAETLRGLIEKISLTPGPERGEIYATLHGELGTILNWTERQVIGKSVKTTKPASDAAGLSLSVVAGAGF

SEQ ID NO: 3888 - protein, 474 aa, synthetic construct
MEDARSGKFKTVIVEALDRLSRDQEDLAGLHKRLAFAGVEILAIHDGKTDAIQVGIRGLVSTLFLADLKNKIRRGMTGVVRDGRHAGGKAYGYQPTPGQPGVMQIFEPEADVVRRIYRETIEGKTSREIAAGLNRDKILPPRGAQWNASTINGSAQRGYGIVRNPLYAGEIVWNRVHMVRDPETGKRISRPNPESEHKRASAPHLAIVDRETYDRALSLLEGKSRRGQGGSNTRSPKRLLSGILRCGHCGGGMSIHDHSGNSVRIRCSRSTQSGVCGNDRRYRLDKIERAVINGLKEQLSAPEILVEYVRAYREERRLDADTAVRERASIERRVADIGGQLDRLMQAMTRGVLPIEAVEAQYGPLKAEKDALEKKLATIPAAPTVELHPATITRYKNSIDALAERLTSLDRITDSEVHIAFRDLVDHVTVIDREDGGVEAETVGHIAALVGSPAEMLGGRMVAGEGLEPPTRGL

SEQ ID NO: 3889 - protein, 536 aa, synthetic construct
MRNRAAIYARFSTDLQNPLSTEDQIDLCRAFARREGFQVVAAYQDAAKSGASLHGRDGVLELLDDAKKGRFDVIIVEQLDRLSRSMHDLAGIHDRLTFMGIKMVEVHGGEASTVTVGLRGLFGQIFREDGARKVRRGMSGLVARGKRAGGQVYGYTPNPADRGNPTIVEDEAEIIERIFKDYASGMSPRAICARLNAEHVQPPRGRLWAASALYGGAARGTGILRNHQYAGKIVWNKTMAVKDPDTGNRTHRANPQSEWQTADAEHLRIVSDDLFNLVQRQLAERAYEKHANPNVHRRPKHLLSGLMRCAQCGGTIAVQGTNKSGRTRLHCSARAYSGACNSPLFYKDDVEELFLDSLCCELAHPEQIEAYAAAWAHRVNASAGDDNRRRKQITKRLAEISKTNERMTEMLIAGEGDTLVLNKKIREQAYERDDLEAELRTLPEASNIVVHPSSISKVARKLQDSRAKRELVVYELKDNGQLHHMVRELVDHVTLSKDDKGHLSMEVTCRFEPLLAENAPTIQRGWGAVSIASVSG

SEQ ID NO: 3890 - protein, 463 aa, synthetic construct
MARSVTVIPARNRQVSGYRAAPQKKIRVAAYCRVSTDQEDQLHSFEAQVDYYTKYINDHENYEMAGIYADEGISGTNTKKREQFKRMIADCGKGKIDLVITKSISRFARNTQDCLMYSRKLKNLGIGIIFEKENINTLDSTGELLFTILSSLAQDESRNISENCKWGIRTKFKNGEMHLNTFKFLGYDKDENGKLIINREQAKTVRRIYRDFLWGLNPAQIAKELEEEQVPGCLGQTKWYASTVIGILKQEKHMGDALLQKTYTADFLTKRQVKNNGEVAQVYVRDSHKGIVDKETWNAVQEEFERREKFMQKHGTDRYSYGSECYPFCEKIFCGECGSLFTRHSWKSRGIIQWQCKNHRKDGKVACTNAYVDNANLEKGFIKAFNRLVGEREKHIERWNSMKLDGTPLEKIRAGQMMEATESGQLQQYVPEAAQLILEEITIFGAKKYEFAFLEGSRVKVSV

SEQ ID NO: 3891 - protein, 501 aa, synthetic construct
MEIQIREGSREQKRKLKVCAYCRVSTDADEQENSLENQVRHYEMVIKANPDYEYAGVYSDFAISGFKEKRPGLQKMLADAEKGKIDLILTKSVSRFARNTSIVLEATRKLKELNVGVFFELQNINTLSGEGELMLTILAAFAQAESESGSVGAKMVYQRKYEAGIPVQYLERSFGYTKDERGVFVADEAEAVWVRKIYEMAADGYTPASIKRYLNENGVKTVGGVQWVDSTVFRLLENEIYKGDYIMHKHFVNEERKLVRNRGEVDAWYIEDDHEAIVSPELWQKAQDALAVKRDYLAEGSVIEEFTEENYPYMNKIYCAKCGYPLYKRIYSKGNRLNWGCSGTKRYGKSFCDGINIPDGVLRSAWHFEENTYIDEKASDKGVKEFTYLKERSWKRRHKKKQPSAIPENTETEYPYREKIFCALCGSRLVRYVNPQNHKVTWVCNRRKRKGKEACDGTRVPDTVIKGWGEIKNDIYIQRKDDKNGKKRYSYTSKKPSGIRV

SEQ ID NO: 3892 - protein, 687 aa, synthetic construct
MQSAFFFIPFFGSWRKGLFMAYVRNKKKILKFWSKKKAALYVRVSTRYQVDKDSLPFQRKKLKEYCKFLGIEDFVIFEDDGYSAKNTDRPHFQEMMSRVRDGEFSHLIVWKVDRVSRNLLDFAAMYQELKDHKVTFISMNEQFDTSTAIGEAMLKIILIFAELERNMTSERVTGIMLDRAEQGLWNGARMPVGYRWNPEIKFPEPDPEETKIVQFIFDEYERVRSTTKIARYLNHNQIASKRGGQWTSKLIRDIIRSPFYIGTYRYNLRESGRGPLKPESEWIVRENNHPAIITKEQFDRCNAIMDENGTSRDTSELRARKYVHTFSGRLVCGKCGANMIASKDRARANGWRPSMYRCAQRSRMMDCDNSKTVNESYIGPFVFNYVANLARIQKNFKNIKTLEQLEKELLKGPEFENMKVSKESLRRTFDALVFQEVGKGAYLPDIGLSDGDDDYTAAEQLSILKRELDKCKTAIDRLTDLYLYDPDSMTKEEFAKKKRDLVNKIAGYEKQIEASQATGDKDDLADLEFIRKASAFLVAQRIVSKKHVDYIQMALDLDNEILKDFVDQVIDRIEILEGRVQSIRFVNGLVHEFTYSTPADLPVCQKCGGHIGSTCGCRTRTFDFAGKPYRRIKVGDPGDKFHGVAGAVCPECSAQAGRWHHWKCGIERCPICGEQLIACEHGPNGKD

SEQ ID NO: 3893 - protein, 682 aa, synthetic construct
MTKNVLFYARYSTDRQDEQSIETQVALGREFARERGWTIVEIYEDRAISGTRLKSRPGIQSVLRHIKRGGIHVLLCVSVDRISRDMEHSSGILKQLRHHGVELWTVQNSSAVNDMELGLRSIISHDMIQQTRYKTREGMKTAVRKGRAAGGIAYGYRAKLVYDAKGDRIPGEREIDGEQGEIVRWIFEQYALGKSPKELAVKLNSRIPTVPGPRGLKWRDTAIRGHRDRGAGILNNETYIGRLVFNRRNFRKNPETENREARMNDMSEWVVGEVPELRIVSDELWAKVKKRQLAVEASFSHTTTNRLNRAHRPQYLLSGLLECGHCCGPYAIMAKDRYGCTNRQKKLPIDDLGGIVCTNAKTISRQELESRVLDAIPTNLLTPERTTSFQEEINRQVQKAAAASFRAAETIEAKLNAISSKQKLIAEQMTHRMLAGQMKIAAFDQMLDDLEKERTRLTLELEAATPISLRRKKSDKAGLRNPGEPIVVNPAMFQSVLDAMKTALKSGAGDGNDTLAGYGQFVRSLVQKVVIAPSPDNRRADLTIHGRLASILASMEAFQDYSARMREHYQRDYITRVKAGEFRDVKGKAYYLSRFQAILKEKEAGWKRLQVSVVAGARLEPALTPGCHWLLSLPPIRTPQSTFSICSSQTTFTSSSKRAVRSPSQTSASSLISKCFEYRAFT

SEQ ID NO: 3894 - protein, 542 aa, synthetic construct
MMRRRAAIYARYSTDLQSDRSINDQFALCRTYAERNSFDVVKAYDDAAKSGSSMIERDGLLRLLADARSGSFDVVIVEALDRVSRDQEDMAAIYKRLKFLGIDIIAVHDGKADTIQIGIRGLIGAIYLEDLKHKVRRGMSGRVRDGLSAGGKAYGYKPVPGKPGELVIDEDEACIVRRIFREYAAGKTPRDIAIGLNRDSVPSPRGSVWNASTINGSNARNNGILRNPIYGGELIWNRVTMVRDPETGKRVSRNNPESEWQRKDVPELRLVDEETAARVQARLEGRAFKQSPERSPRRPRMLSGLLKCGKCGGGMTLDGYDKGRARIRCIRTREAGVCDHTRKYYIDTIEGGVVEMLRQQFDRPELLQAYLDQYLSDRKAKAAEINNTRAALEKRLARLEGELDRTIDFALKGTITEEKLLMRKQELDPQIAALKADLSMQPPPPKVDVHPKTIAALRGDMEELARLLTYKPLQMDAAAIQTLRSVVDSIVIYPSPGRQAPIIQIRGKLARLLADDYENGIIPKAAIRVVAEEGFEPPTQGL

SEQ ID NO: 3895 - protein, 547 aa, synthetic construct
MKLLVPYIRWSTKEQDSGDSLRRQTNLIDAFYAKHKDDYYLLPAHRYVDKGKSGFHQQHKNQGSDFRRMFENVMSGVIPEGSLIVVENFDRFSRADIDTAIDDVRQILRRGVSILTLGDGELYDKSALTDPVKLIKHIIIAERAHQESLVKQKRIAQVWNHKTQLARELKKPMGKQAPGWLELSEDGSHYIVDEDKASLVNIIYDKRLSGMSMFAICKWLNEQGYPTINQRKVRISKTKKPDGNWSALSVKHILTSRSVLGYLPAKISTEDRKTVLREEIESFYPQIVTDSKFYAVQQLLEETGKGKTSSGEHWLYVNILKGLIRCKCGLVMTPTGIRKPVYQGTYRCNGNKESRCSYGTVSRKLLDTQLCSRLFSKLSQLHDEATDTARLDELQRRLNTVDSELEKLTETLIQLPNITQIQEALRVKQEEKDELIVQLSREKARVKSVSSLDLSGLDMESVEGRTEAQIIIKRLVKEIVVSGNEKLVDIYLHNGNMIRGFPLDGKDDHTLTLEEATDEMQSLDDMLIFGEPVTRIYPAGDMEEVDA

SEQ ID NO: 3896 - protein, 547 aa, synthetic construct
MKLLVTYIRWSTKEQDSGDSLRRQTNLIDAFYAKHKDDYYLLPAHRYVDKGKSGFHQQHKNQGSDFRRMFENVMSGAIPEGSLIVVENFDRFSRADIDTAIDDVRQILRKGVSILTLGDGELYDKSALTDPVKLIKHIIIAERAHQESLVKQKRIAQVWNHKTQLARELKKPMGKQAPGWLELSDDGSHYIVDEDKASLVNIIYDKRLSGMSMFAICKWLNEQGYPTINQRKVRISKTKKPYGNWSALSVKHILTSRSVLGYLPAKISTEDRKTVLREEIESFYPQIVTDSKFYAVQQLLEETGKGKTSSGDHWLYVNILKGLIRCKCGLVMTPTGIRKPVYQGTYRCNGNKESRCSYGTVSRKLLDTQLCSRLFSKLSQLHDEATDTAKLDELQRRLNTVDSELEKLTETLIQLPNITQIQEALRVKQGEKDELIVQLSREKARVKSVSSLDLSGLDMESVEGRTEAQIIIKRLVKDIVVSGNEKLVDIYLHNGNMIRGFPLDGKDDHTLTLEEATDEMQSLDDMLIFGEPVTRIYPAGDMEEVDA

SEQ ID NO: 3897 - protein, 521 aa, synthetic construct
MKVPVWCYARISTLKQIDGFGIQRQINTINQFLQCVELDHRLPFTLDVDNVTQMVAEGKSAFRDKNWNEKTKLGQYRKMVMDGVISDSVLIVENIDRLTRLDPYMAIEIISGLVNRGTTILEIETGMTYSRYIPESITVLVMQCNRANGESKRKSIMMQKSHANRYGKVSKVRPRWFDVVEIDGIKQYRPNETAKAIQRMYNDYINGIGAAHIVRTYGNTDNGKAWTLVTVLRALSDKRVADDARYPPIIDKELYDSVQALKAATNKKGNTHQKNMLNIFSGMSRCPVCNQSIIVKRNSHGNLFTVCLGKRTNKTCEARSISYFALERPLLTAIRGLDFSEVYKHEDKNVLTLRDQWIQNERDIAAFRERLSKASRYEKFVILDELETMNREQEELTIRLKSVDVPKDIQLTFDDDKLDLDTNYRIELNNRIKKLIQYINIVREDVTKSSYTIYCTIKYWTDVISHLVIIDVNIKRTGTGGTNTLTTTLRSVSSLNMDGTVSGNPDSDAWEYWKSFLDNLK

SEQ ID NO: 3898 - protein, 549 aa, synthetic construct
MEYQTPLRVAAYARVSTEKEDQMHSLESQRSYFAQYINAKQNMQLTKIYYDEGISGTQIRNRIGFQQMIEDALQGRFNLILTKEVSRFARNTVDTLAYTRKLKEAGVGIIFTIDHIDTRDQDGELRLTIMASLAQEESRKTSERVKWGQKRRMEQGVVFGRDMLGYTVKNGILSIQEEEALIVKSIFHKYTNEGKGAFAIARELHEEGISPKRMEEWSGTVILRILHNEKYVGDLCQKKTFTPDYLTHKKKYNRGQEEKIYIKNHHEGIIARELWNRTQEELARRSSLYRSKERHSNRYWCSGKIRCGECGSRFISRTRKLQSGTYRAWWCFQKSRHGGAKILEGQQIGCSNRSINERALFSCMKYCNDLLCDQKDKERIREEILENVRKVRYTSELLIDMDKITQKIGAIEAKKRKAFDMMLDDKLSKDDLYRQIQWYDKEITHLQELISQSRQKQELYRIDQEKTDLLEKALDEILSFGDGDQNEMLYREILEEIVVYREEERGCNRLVVWLKSLPLGIQLRIHSTGNGANFRTEILETEFVNRNSK

SEQ ID NO: 3899 - protein, 452 aa, synthetic construct
MKAAIYIRVSTQEQVENYSIQAQTEKLTALCRSKDWDVYDTFIDGGYSGSNMNRPALNEMLSKLHEIDAVVVYRLDRLSRSQKDTITLIEEYFLKNNVEFVSLSETLDTSSPFGRAMIGILSVFAQLERETIRDRMVMGKIKRIEAGLPLTTAKGRTFGYDVIDTKLYINEEEAKQLRLIYDIFEEEQSITFLQKRLKKLGFKVRTYNRYNNWLTNDLYCGYVSYKDKVHVKGIHEPIISEEQFYRVQEIFSRMGKNPNMNKESASLLNNLVVCSKCGLGFVHRRKDTVSRGKKYHYRYYSCKTYKHTHELEKCGNKIWRADKLEELIIDRVNNYSFASRNIDKEDELDSLNEKLKIEHAKKKRLFDLYINGSYEVSELDSMMNDIDAQINYYEAQIEANEELKKNKKIQENLADLATVDFNSLEFREKQLYLKSLINKIYIDGEQVTIEWL

SEQ ID NO: 3900 - protein, 536 aa, synthetic construct
MRNRAAIYARFSTDLQNPLSTEDQIDLCRAFARREGFQVVAAYQDAAKSGASLHGRDGVLELLDDAKKGRFDVIIVEQLDRLSRSMHDLAGIHDRLTFMGIKMVEVHGGEASTVTVGLRGLFGQIFREDGARKVRRGMSGLVARGKRAGGQVYGYTPNPADRGNPTIVEDEAEIIERIFKDYASGMSPRAICARLNAEHVQPPRGRLWAASALYGGAARGTGILRNHQYAGKIVWNKTMAVKDPDTGNRTHRANPQSEWQTADAEHLRIVSDDLFNLVQRQLAERAYEKHANPNVHRRPKHLLSGLMRCAQCGGTIAVQGTNKSGRTRLHCSARAYSGACNSPLFYKDDVEELFLDSLCRELAHPEQIEAYAAAWAHRVNASAGDDNRRRKQITKRLAEISKTNERMTEMLIAGEGDTLVLNKKIREQAYERDDLEAELRTLPEASNIVVHPSSISKVARKLQDSRAKRELVVYELKDNGQLHHMVRELVDHVTLSKDDKGHLSMEVTCRFEPLLAENAPTIQRGWGAVSIASVSG

SEQ ID NO: 3901 - protein, 559 aa, synthetic construct
MKTKLYSYIRFSSMRQNDGSSYERQIRMAREVAAKYDLELVNDYQDLGVSAFKGANSKTGALSRFLDAIGRSVPVGSWLFIENLDRLSRADIVSAQELFLSIIRRGITIVTGMDNKIYSLDTVTANPMDLMFSILLFIRGNEESQTKRNRTNSSALIKIKAHQENPQNPAVAIEEVGKNMWWTDTTSGYVCPDPVYFPIVKEIVELRKNGRSTSEILNYLNETYTPPPAVSNKKHSKWPRAMIGRLFHTRALIGIKEVSVDGVKYELKDYYPRVIDDATFYHLKKNIGARAWNFGDKEEVKPIPLLSGIGLLKCEHCSSAMIKVKGTNKRADQYRYSCEGIRSHRFDCEHPNWSFRGDQLEKAVLQLLADKIWIAEDKANPVPALKVQIDEISRKIDNLIALSAMTGATKELADQITTLNSERETLYNQIKMAEEEMYSVDSQGWEKLAEFDLEDVYNEDRIKVRFKIKQALRRIGCRRIDRNKNLFVLEYVDGKTQRVVIENSRGTRKGRIFIDLKTINDRQILESNGLVLHPCLDMLTDKNWKPEEEIPGPLQEFGI

SEQ ID NO: 3902 - protein, 689 aa, synthetic construct
MKITAEHLARGAYVYVRQSTADQLVNNPESRRRQYGLAERARSLGWNDAIVIDEDLGRSGSGISRPGFEKLLAAICEGRVGAVLAIEASRLARNGRDWHTLIEFCGLVGTLIIDEDGIYEPRHPNDRLLLGMKGTMSELELSILRARSIEALKQKARRGELFLAVAIGYVKSGRDKIEKDPDQRVREAIDLVFRRFDDLQSIRQVHLWLRGEGIMLPAVNYAREAERTVVWKLPVYNTVHHILTNPIYAGAYAFGRTCSKVSIEAGRKRITRGFRRDRADWEVLLIDHHEGYLSWHDFERNQRLITDNATSKGMPPRGALRRGELLLGGLLRCGHCGRKLHVGYSGRNGNTGRYYCRGAQLNHGTDPCISFGSLRVDQAVGAEVLQRLQPLGIEAAIKAIETSTVQVRETRRHVELALEQARYEAAHARRQYDAVDPDNRLVVGELERRWNTALAAVRERQDELEALDRNKPEVLGEEERQSLLRMGADLELAWHHANATAATRKRIIRTVIHEIVVAIEDDQIKMLVHWQGGDHTALSVRKNKAGHHRWGAPPDIKELISALARQLPDKAIASLLNRLGKTTGRQNGWTQSRVCTFRNQHAIAVYRKDERSERGEYTLQETADKLALRPMTVLRMIRAGNLKAEQYCKGTPWIIRGEDIVQIDAQRHSRRDEQGPLSESLDQKIQLFQ

SEQ ID NO: 3903 - protein, 520 aa, synthetic construct
MKKAVYCYARVSSRGQAKDGYGMSRQQEMLRDYVAAYDDSQHNRGYELGDISWLYAEGVSAYSGKNIEDGSVLKTFIDDVLQKKITNSVLVIENLDRFSRAAPNRAAGLFLSLINAGCDIHEVETEMIHHQYSDLNIISGGLQRAHNESKRKARLSIKNWDERIKNTIDGTSVLTHRVPSWIEVKNNKYVLKKGESEKYNLIFKMYADGFGPAAIRDELKKRGMQINEREPTINHLMKIIKDQRLIGRFNSTGRKILDGMSIYPVVVEPELFEAVNDLRKQRNPLGKINVKANNLFAGLCICMNCGRYVQVNSVDKKGDTYFRCGGSLVKIDKCKERGFKYKIVENALLEHLRNFDFSMLRSDDNDMQVKINYLSMELVSNEKYSNEILADLEKEDIPDPNDRRILKNIQRRISEIRNEITILKQSNIGYETFNDLKDSYTDDLLDPKNTKLRLDFNVKVKRVIKNIKMKRYDNTIMLVVSYVGVNEKQAMVINSKTGEVVFMAVQNDDLKSIEYLINND

SEQ ID NO: 3904 - protein, 547 aa, synthetic construct
MKLLVTYIRWSTKEQDSGDSLRRQTNLIDAFYAKHKEEYYLLPAHRYVDKGKSGFHQQHKNQGSDFRRMFENVMSGVIPEGSLIVVENFDRFSRADIDTAIDDVRQILRKGVSILTLGDGELYDKSALTDPVKLIKHIIIAERAHQESLVKQKRIAQVWNHKTQLARELKKPMGKQAPGWLELSEDGSHYIVDEDKASLVNIIYDKRLSGMSMFAICKWLNEQGYPTINQRKVRISKTKKPDGNWSALSVKHILTSRSVLGYLPAKISTEDRKTVLREEIESFYPRIVTDSKFYAVQQLLEETGKGKTSSGEHWLYVNILKGLIRCKCGLVMTPTGIRKPVYQGTYRCNGNKESRCSYGTVSRKLLDTQLCSRLFSKLSQLHDEATDTAKLDELQRRLNTVDSELEKLTETLIQLPNITQIQEALRVKQEEKDELIVQLSREKARVKSVSSLDLSGLDMESVEGRTEAQIIIKRLVKEIVVSGNEKLVDIYLHNGNMIRGFPLDGKDDHTLTLEEATDEMQSLDDMLIFGEPVTRIYPAGDMEEVDA

SEQ ID NO: 3905 - protein, 506 aa, synthetic construct
MRTVITYLRFSSAIQGAEGADSTRRQNDLFKQWLKKNSDAQVVASFSDEGLSGYKGKHLTGQFGDMLARIESGEFPEGTILLVEAIDRIGRLEHLETEALMNRIIAHGIEIHTLQDGLIYTRDALSDDLGISIIQRVKSYVAHQESKQKSFRVSQKWKQRAKLALAGEQRLTKMVPGWIDPDTFKCNEHAETVRLIFKLLLDGESLHNIARHLQANNISSFSRRKDANGFSVHSVRTILRSETTRGTLPASQRNDRPAIPNYYEAAIDAATFNKAQEILDKNRKGRTPASDNPLTINIFKGLFRCQCGASVHPTGTKNKYAGVYRCNNNPDGRCDVPPLKRKPFDKWMIDNFLGMIDVGNDGEAEGKIAALQHEVEIVTARIKKATALLLEMDDITELKTQVKGLNQKRTELQTTIDNMRRKASLTDKELPQLKDIDLTTKAGRVECQLILSKHLKGLTLGKDSVTVTLQNDTEITIPTNPLPLNDGSPIFEIADKELLEIDAYQL

SEQ ID NO: 3906 - protein, 573 aa, synthetic construct
MAYNAQNKTGARVAIYVRVSTLHQIDRDSLPMQKQDLLAYAKLMLNTDDCVIFEDAGYSGKNTDRPKFQEMMSQMRAGAFTHLLVWKIDRISRNLLDFATMYNELKALGVTFVSKNEQFDTSTAMGEAMLKIILVFAELERNMTSERVTATMISRANNGLWNGGRIPFGYDYDYETHEFSVNEEESKVVILMHDMYEQEHSLVRVVRELNERGYRSRAGNLWSPVSLLIILRNVFYCGDYRYNMLKEGDRQKVKDESEWVTVENHHVAIIPKDQKERIMATLDSNSKLCKQRNIYKSSKHTHVFGGLIYCGSCGKPLGSTPGNLTRDGWHYSKYTCPTRRKSVTLCTGKSTSDPIIGEFVFNYILNMLNAQNDFEKISSPEELEKLLLIGDTFAYIDHIEPNGLNDLFNVLSSGAVKGAVFGKGASLQTKKATVEPEVARLRNEKQKTERALDRLRSLYLYADEAMSEAEYMIQKNKLEETLEDINDQIGMMNTDSWQQSVSDEEFIQRASEFIIAQKLSGRKYVNYKRLAMSVDSEVLKNFVVSIIDSITIQDGLVSNIVFKNGLCHTFIFR

SEQ ID NO: 3907 - protein, 547 aa, synthetic construct
MKLLVPYIRWSTKEQDSGDSLRRQTNLIDAFYAKHKDDYYLLPAHRYVDKGKSGFHQQHKNQGSDFRRMFENVMSGVIPEGSLIVVENFDRFSRADIDTAIDDVRQILRKGVSILTLGDGELYDKSALTDPVKLIKHIIIAERAHQESLVKQKRIAQVWNHKTQLARELKKPMGKQAPGWLELSEDGSHYIVDEDKASLVNIIYDKRLSGMSMFAICKWLNEQGYPTINQRKVRISKTKKPDGNWSALSVKHILTSRSVLGYLPAKISTEDRKTVLREEIESFYPQIVTDSKFYAVQQLLEETGKGKTSSGDHWLYVNILKGIIRCKCGLVMTPTGIRKPVYQGTYRCNGNKESRCSYGTVSRKLLDTQLCSRLFSKLSQLHDEATDTAKLDELQRRLNTVDSELEKLTETLIQLPNITQIQEALRVKQEEKDELIVQLSREKARVKSVSSLDLSGLDMESVEGRTEAQIIIKRLVKEIVVSGNEKLVDIYLHNGNMIRGFPLDGKDDHTLTLEEATDEMQSLDDMLIFGEPVTRIYPAGDMEEVDA

SEQ ID NO: 3908 - protein, 697 aa, synthetic construct
MHDFDQRPTAYSYIRMSSKRQIKGDSLRRQLELSKKYAEDHNLRLDESSMVADKGVSAWTGANLTEGAFGQFLAAAKAGHIKPGSYLLVESLDRLSRQQVRTALLPFMELINADITIVTLADNQVYSKATVDANFTQLIISLTIMARAHEESETKSKRLRAVAKNRRENAAKGVGRFSPMHVGWIDSERVGNDRWTFKLNDHANAVRRIFALADSGLGQVTITKRLNDEGVPTFRGKGLWYPANVGRIMRDETVVGTYQPTHVVEDVRQPFGQPIKDYYPAVVSEELFWRVQRGIKVGFAKGRHKGNRIANLFSGLITCAHCGSTLRLRTGTPHKYLYCDNLYRAGNCASGGGLYRYDRLEDIVFSKISELDPDQEAGGKADAQTRETLLQSVKSNEDQIQQQERAYKNYMASLALVDDDAMRREITAEMKSARTKVEQTKALVSEQKEELANIDTKRKEIASIAERMNLERLGWSTGSVEEVFDSRSRVAKMIKRFLTTMTINFDEKVLMVALAGGLRGYKFNYDGDIVDRYDMALHLGNGTSPNRLVDGALKAEHFATDIAADDFELREDRLKIIGSMSSSDQNERPSADAGGLIDTLQSIYAFRPPRHVIHKAVDGYPMWIEQIEESNFTVENIIEKMKLEGASEEDIARVVDATRQELLDRGVELRTKKPVNPRLNDPDVLALKALRKSKIVS

SEQ ID NO: 3909 - protein, 609 aa, synthetic construct
MTKNVLFYARYSTDRQHEVSIETQIELGKAFVARQGWKLVECYSDAAISGTSYQLRPGIQSLMTHVKRERIDVVLCVTVDRLSRDIEHSAKILKQLRYCDADIWTVHAGTPVTDLEMALRAALSHELVEQIRYRTREGMKMSVRKGKASTCLAYGYMLCQQRDANGDRIKGLREIDPAKAETVRHIFTLYADGMSPRDIAQLLNKELVPGSRGLKWRDTAIRGHVSRGTGILNNESYIGRMVWNKRNYRKNPETERRTARVNDASEWVLTDVPEMRIVSDDLWQRVKDRQKEIGELFDFGGNNRLNATQRPEYLLSRMLECAECGGPYAISGKDRYSCTNRKKRLPIDDLDGACCGNSKTITRHELEERVLNCLPVAFFSMDIFDRISEKMVAYEVSKLKSLPSRKDQLTAELAGIKSKQASLMQLIQDRHADGRPRLAILDDQLDELEVTREKLVLELTHSQAPAEDFQEKIAKLKAQFNPANTEISIRKLIFLARNNADEHAKQRLMPIVRDLIQTVVIGKTPGHQPASLQVHGSIANIMASMEVLDLMEQQFITAAQNDLMARIASGEIDTEQKRKKLLDAYAEELRRKYPEWANLQVSVVAGAGF

SEQ ID NO: 3910 - protein, 589 aa, synthetic construct
MSAHVTILRNTVLPVKFNTMNRPRLYSYIRYSSERQGKGSSIERQKSYIAEMAKQIATEYDLEIFEEYQDLGVSAYKGKNVQEGALSDFIDQVESDLIPKGSFLLIESLDRFSRQNAMQAVNLFTSLLLNGITVITGIDKQVYRQTEVNTETLQQLMFSVMLFSRANEESSTKSHRTIASALSKIRRHQERKPGDPVVAIKELGSDKWWTDSSTGYVNPHPVLFPIAKKIIQLKQDGWSNRMILQHLKNNYDGPVIGNKKSKGIWNMQHCSRILEPAIYGRKVITVNNAEYVLDDYYPAIISKDEYEALKLQVGNKGFAPNRESNPEIPLLSGIGILHCAHCSCYMVKAKSTLKNHPHAYRYQCASRDLHQDCNKWGFRASTLERTILQLIADRIFLQTKYQPSGLEGKIADIQSQIENYVLAIGSAKSPEIINSLTSQIDQLEQEKQSLIVEKRLYDESIVQMNTEGWDKFRKFDIDDALNPLRTKIRANIKTVIMRVDCSRIDKKHNLFTITYRDQHKQRIVIENNSGWKKGKIYVEAQTINDIQILESEGLILHDHIDILINRDKFMTEAKKRLDHPRTLIDELTE

SEQ ID NO: 3911 - protein, 564 aa, synthetic construct
MPTKAYSYIRISTKEQRKGRGEERQLEAAQAYAAQHGLDLDDSLRDLGKSGYHGDHVKSGALGRFIDLVATGQIAVGSYLLVENLDRLSRQTPIDAQAQFIALLQAGIKIVTLTDRQVYERGRDFTQMIISLTIMSRGHEESARKSYNSKKNADALRKDMIAGLPRFLPQCVGWIDQSRFQGSKDCKFTLNEHAKTVQKIFELADQGVGPLKIARLLNEANTAPLKASSSKWWETTVIRILKNETAIGTLQVHDTVDGKLVPMGDPIPKYYPAAVSEEIFWRVQRNRSQVARTGRKGLKYANLFQMITRCVHCDGGLGLVRSTRNDFQYYRCKTRYEDKTCPGPKKMFPYTNLENSILDHVTDFYLDSKLGVTKTSVQRDVLVEEAQGVDDDLLDLEKRRKNAMSMAELADDDQTRLEFVARIRQLRGQIEQLKAKSNELRAAIGSIDDQASKLHDVSETIAAERALWKTGTDEEIFVSRSKVAQSIKRFVSQIQVDFALQTATIYVAGYTRIYLFDRAGTRIITLNNIEQPWDEIREMLLTDGATESQITVAKEAHSKLRAAA

SEQ ID NO: 3912 - protein, 544 aa, synthetic construct
MSAYTGSNIKEGELGRFLADVNAGLIPTGSALICYSVDRLSRQNPWVGTHLISTLIGAGIEIHSVAENQILRSDDPVGAIMSTIYLMRANNESVIKSERAKKGYEKRLNESITNKKVLTRQMPRWLFDCDGKYAIDPNMQNVINFTFDSYIAGQSTGFIAKELNNRGLMYGNTSWRGSYVAKLIRDERLIGKHIRYSKQIKGVKRVVIETIPNFYPVVVDVEKFFLANNMLTSVAKNIRGRTRVTYGDDSILRNLFNGVIKCGVCGGETSVVQNTRKKIVNGEATYIPYKTFLRCRTRYELKNCVQSDIRYEVIERAILNHLMGLDISALLSVPVDNKIESYRTELELCKAEEVELHTLIEQREREGKRVRPRTIKAYEDVSDRIDELNKLIELYVEDTFVPDFNVDLNSVADVSNVSERSLIKKGIATIADSICYKRISDFILVEIKYRNLSVKHVLVIDNKQSKVVVNFSIEYHENSHDYTCNGLILKYVKSPEEFHLMGVNIEDYAHMMNFVDFISDNEAKKIKEYLVSNLSRVLISNVPE

SEQ ID NO: 3913 - protein, 506 aa, synthetic construct
MRHVITYLRYSSAIQGAEGADSTRRQNDLFKQWLKKNSDAQVVASFNDEGLSGYKGKHLSGQFGDMLSRIESGEFSEGTILLVEAIDRIGRLEHLETEALMNRILGNGIEIHTLQDGLIYTKDALADDLGISIIQRVKAYIAHQESKQKSFRVSQKWEQRAKLALAGEQRLTKMVPGWIDPDTFKCNEHAETVRLIFKLLLDGESLHNIARHLQANNISSFSRRKDANGFSVHSVRTILRSETTIGTLPASQRNDRPAIPNYYEAAIDAATFNKAQEILDKNRKGRTPASDNPLTINIFKGLFRCQCGASVHPTGTKNKYAGVYRCNNHLDGRCDVQPLKRKPFDKWMIDNFLGMIDVGNDGEAEGKIAALQHEVEIVTARIKKATALLLEMDDITELKTQVKGLNQKRTELQTTIDNMRRKASLTDKELPQLKDIDLTTKAGRVECQLILSKHLKGLTLGKDSVTVTLQNDTEITIPTDPLPLNDGTSIFEIAEKNLLNIDTFQL

SEQ ID NO: 3914 - protein, 532 aa, synthetic construct
MKRAALYGRYSTDLQNDRSVDDQFRLCHDYAERLGANVVKHFSDRAKSGASMFGRPGLAELMAASERGEFDILITEHTDRVSRDMADLGHIHKVLKFRGIEMHCVNGGLMDTVQIGMYGIVGQMQREEGARKVKRGMIGVVRSGRNAGGKAYGYRPVVGKPGELEIVEEEAAVVRRVFDMYAAGISPRTIAGILNREAIPAPRGRQWNASTINGSHQRNNGILRNSIYAGKIMWNRVHMVKDPATGKRLSRANEQDQIETIDAPHLRIVADELFQVVQGRKEANARLGAKAPRSKRLLSGLLRCGACGGGMVMIGPDRSGPRIQCSNHRESGTCQNTRRYYLERIEALVMNRLRSIFSDTKYIESYIAAYQEEQKKVRSTALRDRANATRLLEEAKAEITKVISLMAKELIGEEEGVALLEPLRQQRDAQKAILDAVEEPTNVIELQPKAITRFRQNIESLAQIIEKEGDEPSPELVGPFREIVAAVVVRQSENGQPYDIGIKGRLASLVSPELSVIKVVAEEGFEPPTQGL

SEQ ID NO: 3915 - protein, 544 aa, synthetic construct
MSAYTGSNIKEGELGRFLADVNAGLIPTGSALICYSVDRLSRQNPWVGTHLISTLIGAGIEIHSVAENQILRSDDPVGAIMSTIYLMRANNESVIKSERAKKGYEKRLNESITNKKVLTRQMPRWLFDCDGKYAIDPNMQNVINFTFDSYIAGQSTGFIAKELNNRGLMYGNTSWRGSYIAKLIRDERLIGKHIRYSKQIKGVKRVVIETIPNFYPVVVDVEKFFLANNMLTSVAKNIRGRTRVTYGDDSILRNLFNGVIKCGVCGGDTSVVQNTRKKIVNGEATYIPYKTFLRCRTRYELKNCVQSDIRYEVIERAILNHLMGLDISALLSVPVDNKIESYRTELELCKAEEVELHTLIEQREREGKRVRPRTIKAYEDVSDRIDELNKLIESYVEDTFVPDFNVDLNSIADVSNVSERSLIKKGIATIADSICYKRISDFILVEIKYRNLSVKHVLVIDNKQSKVVVNFSIEYHENSHDYTCNGLILKYVKSPEEFHLMGVNIEDYAHMMNFVDFISDNEAKKIKEYLVSNLSRVLISNVPE

SEQ ID NO: 3916 - protein, 630 aa, synthetic construct
MKKCFIYHRVSSELQLSGTGIERQEQNLNAYIERINLLAEMDDPEATIISDQGISAFKGLNMSEGELGRWMDQVRAGMWDDSHLVLESIDRFSRQNPFQVVGYLAELDRHNITIHDVSLNMLINRGNSAMLPIVAMSAQRAYEESKIKSDRIRDGWRRKREQAFKQGTIVTNKRPQWIDIVEDRYELNDKVAIVREIFRLYQTGIGTPTIAKMLNERGSEWLFVSGRLWRGESIHKLLRNKRVTGSIFISEIIRDYSSISNPVDQKRYEMDVYPIAISKEEFDLVQELLKSRRPGAKVTGGKVLKKFYDPNTDKPYIDRDGNVIELEVDTGKEIIQSNIFNGICRCARCGEAMYHNVVVAKRDSKKKGKFNEEYRYIRCIAERDGLCDNKALKYEVVEQFVIEHIKNLDFTQILKPNEINPEIELVRLKIEEEEAHIEDYKLNIERIRNTGKKIPFAVLVELEESEDRLKELKERQTTFTEVQVDTDYLKTVDPSVLFDVKNIEVRARMAAELSKIVDSIQLYRTGKHYVITINYKKVEVLKHVLFVEAKKEPVLVSGVAIERFGDTVAYSTPSFSIVVEGVTSPRLINIEEEPLSIIDYSLLMNYVDAVDPHNAVGVWMRNQFNFLTSN

SEQ ID NO: 3917 - protein, 589 aa, synthetic construct
MSAHVTILRNTVLPVKFNTMNRPRLYSYIRYSSERQGKGSSIERQKSYIAEMAKQIATEYDLEIFEEYQDLGVSAYKGKNVQEGALSDFIDQVESGLIPKGSFLLIESLDRFSRQNAMQAVNLFTSLLLNGITVITGIDKQVYRQTEVNTETLQQLMFSVMLFSRANEESSTKSHRTIASALSKIRRHQERKPGDPVVAIKELGSDKWWTDSSTGYVNPHPVLFPIAKKIIQLKQDGWSNRMILQHLKNNYDGPVIGNKKSKGIWNMQHCSRILEPAIYGRKVITVNNAEYVLDDYYPAIISKDEYEALKLQVGNKGFAPNRESNPEIPLLSGIGILHCAHCSCYMVKAKSTLKNHPHAYRYQCASRDLHQDCNKWGFRASTLERTILQLIADRIFLQTKYQPSGLEGKIADIQSQIENYVLAIGSAKSPEIINSLTSQIDQLEQEKQSLIVEKRLYDESIVQMNTEGWEKFRKFDIDDALNPLRTKIRANIKTVIMRVDCSRIDKKHNLFTITYRDQHKQRIVIENNSGWKKGKIYVEAQTINDIQILESEGLILHDHIDILINRDKFMTEAKKRLDHPRTLIDELTE

SEQ ID NO: 3918 - protein, 627 aa, synthetic construct
MKKIFLYHRVSTEQQAEDGSGMARQADLLQSYIDRTRIVESMDDPVPVVLEDGGLSAFKGHNFLHGQLGLWMKEVRAGMWDGSILVVENIDRFSRQNPFNVMGYLHDLINHSVAIHDVNMNMVISRENSAMLPMVMMQAQRAYDESKFKSNRIRAGWAKKRNNAFNNGTIITNKRPKWIDIVDNQYVLNAKARIVTEIFRLYQTGIGCPTIAKTLREMGDDWKFDRIWTGEAVHKVLRNRRVTGVIFISELIRDYNSTDNTIDQKRYEMNVYPPVIGEDEFNLVQQLLSNRRSGKATGGKRITKKRNDDGSVVTDVNGYPTYDFIDDGKITKSNIFNAVCRCAKCGSPMYHNIVVSKRTPAKATSPVEQEYRYIRCLNERDGLCDNKSLRYDVIERFIMEHVKGLDFSTIIQENRINPELELVRLKLEQEREHIREYEHGIKRLRYSGKKVPFDVLVELEDAHERLKALEDKQATFADVHIDLDVLKNVDLDALYDVTNIELRGRVENELSKVLEKVELNRDGKNYVITFKYRRVDVLKHVLMITASKSPVLVSGVCIETVGDTVAYSTPSFDIIVRDGGDLRFQPIDDEPLSVIDYSFLMNYVDGTEGADVVAAWMKHNMNFLFTR

SEQ ID NO: 3919 - protein, 550 aa, synthetic construct
MLCYSYVRFSTPDQAKGDSYRRQMEFASNYCKLHNLTLVEDLSFKDLGVSAYKGNNLKSGALGKFLELVVSGQIPSGSTLVIESFDRLSRQTAIKAQAVFFEIISAGITIVTAMDNRSYNLQSVADNPFDLMYSLMIMIRANEESETKSKRVKEAIKSKIDNKKIIPSKLPYWIKHNKNEDVLELIPERAQIISYIIERYLSGFGINKLTRHLNETIPPFAGKSWYPLYLQKLLRSVSLYGERQFNMNDTLYIMDDYYPAIIDKSKFAVIQENLDSRAPTRGGKIPSAITGIRKAYCGYCHGVLVSQSTKRNGKIVDGLRRARCGTNNNAGSCITSSFRISIVESAIAEYCSQHFDLSLLAPESNSSKLDLAKYRLELKQLDTKIANYVKFISDGNISPAIISALDEAEKNKKKLQQKIQKSELNTLTKSKSEITAKWKTIKTNLSVYDEENILKLRELIRGSIKRILVFQYGLWANTGQITTPSGKIIQPHKGNFTIQITFNNGVRKTLELGENVKDQEVDTINRRILKNGNTYTPDEYILMIQKTLTK

SEQ ID NO: 3920 - protein, 534 aa, synthetic construct
MEQVRNGMWDSSILVVESIDRFSRQNPFDVMGYINALMAHNVAIHDVMANIVISRSNSKDLPFVMMNAQQAYDESKYKSDRIRKGWAKKREQAFNKGTIVTNKRPQWIEVENDKYVLNHKAAVVKEIFALYQTGMGCPTIAKQLQTKEGEQYKFNRPWTGELVHKILTNRRVTGKIFISEIIRNHDDIENPVTQKKYDMDVYPVVINEEEFELVQELLKSRRPNAGRVTVKKDGQEEVLIKSNLFSGIARCTECGGPMYHNVVRAKRTPKKGDPKIEEYRYIRCLNERDGLCENKAMTYETVERFVVEHLLGMDLNTVIKEQEFNPEIEVIRIQIDQVKDHITNYENGIERRKSAGKAVSFEMREELDDAKLELEQLLARQASLATVQVDLPVLQDVNVTELYNVNNVDIRTRYENELNKIVSNIRLKRNGNFYTIDIIYKQNELKRHVLFIENKKKEQKLISEVIIENVDGAKFYYTPSFVISVKDGEIRFQQTKEDLTIIDYSLLLNYVDAVDRCDAVGVWMRNNMSFLFTK

SEQ ID NO: 3921 - protein, 647 aa, synthetic construct
MLRPISYERVSTFQQVEMGKGLVDQRSSLTAFLDKNADKFTNERIFITDEGVSAFKNANISPESNLGKFLQDVRDRKYGKGDALIVTSLDRLSRRSSWSENTIQFIVAAGIVIYDISTDVVLRDDDSFSKILMEIILQRSHNESVMKSVRAKVAWQNKVMRAAANGEVVSNRMPFWLENIDNKYSVKEDQAALIVKCFELYKSGFSTGEIVKRIDDPKWQMVRVSRLIRDRRLLGEHKRYNDEVISNVYPKIIDDELFLTANRMMDTVMTDKKKPAEDLLLEPSVVKQIFSLSESGLGSGAIVKRLPKGWSTVNVLRVLRDKKVVEMKIIDNLTFERVNAKLTANGVANRIRKDVTIAQDDYITNLFPRILKCGCCGGNIAIHYNHVRTKYVICRTREEKKRCDAKSIQYTRIEKNILSVVMNVDFGKVLSEDSTKKDKVLEALKVELSALRKEENTYQLKIDERKKSGKKTSLPLMEGLTDVQDRIEETFEQISRSSTINELPTFDYDINCLLDPMNVELRAKVRKELKHVISKVTYQVIDKYILVRLHYYTDVLSHVLIIDNKRGGGDIISQIAIYTKDSTTIYTTPSFALTTSNNEIPRIHFMGNVPLNQIDYELLLISADYGECSDSVTSWMRHNHNFLFANN

SEQ ID NO: 3922 - protein, 506 aa, synthetic construct
MRTVITYLRFSSATQGAEGADSTRRQNELFKQWLRKNSDAQVVASFSDEGLSGYKGKHLTGQFGDMLARIEAGEFPAGAILLVESIDRIGRLEHLETEALMNRIIAHGIEIHTLQDGLIYTRDALSDDLGISIIQRVKSYLAHQESKQKSFRVSEKWKQRAKLALAGEQHLTRNVPGWIDPDTFKCNEHAETVRLIFKLLLDGESLHNIARHLQSNDIKSFSRRKDANGFSVHSVRTVLRSESVIGTLPASQRNDRPAIPNYYEAAIDAATFNKAQEILDKNRKGRTPASDNPLTINIFKGLFRCQCGASVHPTGTKNKYQGVYRCNSHLDGRCDVPPLKRKPFDRWMIDNFLGMIDVGNDGEAEKEIASLQHEVETVTARIKKATALLLEMDDITELKTQVKELNQKRTELQTTINTMKRKTSLSDKGLPQLKDIDLMTKAGRVECQLILSKHLKGLTLGKDSVIVTLQNDTEITIPTNPLPLNDGTSIFEIAEKNLLNIDTFQL

SEQ ID NO: 3923 - protein, 547 aa, synthetic construct
MKLLVTYIRWSTKEQDSGDSLRRQTNLIDAFYSKHKNDYYLLPAHRYVDKGKSGFHQQHKAQGSDFRRMFENVMSGVIPEGSLIVVENFDRFSRADIDTAIDDVRQILRKGVSILTLGDGELYDKSALTDPVKLIKHIIIAERAHQESLVKQKRIAQVWNHKTQLARELKKPMGKQAPGWLELSEDGSHYIVDEDKASLVNIIYDKRLSGMSMFAICKWLNEQGYPTINQRKVRISKTKKPDGNWSALSVKHILTSRSVLGYLPAKISTEDRKTVLREEIESFYPQIVTDSKFYAVQQLLEETGKGKTSSGEHWLYVNILKGLIRCKCGLVMTPTGIRKPVYQGTYRCNGNKESRCNYGTVSRKLLDTQLCSRLFSKLSQLHDEATDTAKLDELQRRLNTVDSELEKLTETLIQLPNITQIQEALRVKQEEKDELIVQLSREKARVKSVSSLDLSGLDMESVEGRTEAQIIIKRLVKEIVVSGNEKLVDIYLHNGNMIRGFPLDGKDDHTLTLEEATDEMQSLDDMLIFGEPVTRIYPAGDMEEVDA

SEQ ID NO: 3924 - protein, 508 aa, synthetic construct
MKKAIAYMRFSSLGQMSGDSLNRQRRLIAEWLKVNSDYYLDTITYEDLGLSAFKGKHAQSGAFSEFLDAIEHGYILPGTTLLVESLDRLSREKVGEAIERLKLILNHGIDVITLCDNTVYNIDSLNDPYSLIKAILIAQRANEESEIKSSRVKLSWKKKRQDALESGTIMTASCPRWLSLDDKRTAFIPDPDRVKTIELIFKLRMERRSLNAIAKYLNDHAVKNFSGKESAWGPSVIEKLLANKALIGICVPSYRARGKGISEIAGYYPRVISDDLFYAVQEIRLAPFGISNSSKNPMLINLLRTVMKCEACGNTMIVHAVSGSLHGYYVCPMRRLHRCDRPSIKRDLVDYNIINELLFNCSKIQPVENKKDANETLELKIIELQMKINNLIVALSVAPEVTAIAEKIRLLDKELRRASVSLKTLKSKGVNSFSDFYAIDLTSKNGRELCRTLAYKTFEKIIINTDNKTCDIYFMNGIVFKHYPLMKVISAQQAISALKYMVDGEVYF

SEQ ID NO: 3925 - protein, 559 aa, synthetic construct
MKTKLYSYIRFSSMKQADGSSYERQKRTAAEIAAKYDLELVTSYQDFGVSAFKGANSRTGALSRFLDEIGRSVPVGSWLVVENLDRISRQSIIEAQELFLSIIRRGITIVTGMDGKVYSKESVNANPIDLLLSVMLFARANEESQTKRNRTNSSALIKIKAHQENPQNPAVAIEEIGKNMWWTDTTSGYVLPHPVFFPIVQEVVELRRNGRSTAEILDHLNATYTPPPAASHKRHSNWSRAMIERLFHTRALIGIKEISVDGVKYELKDYYPRVLDDAEFYHLKKSIGVRACNYGDKEEVKPIPLLSGVGLLKCEHCGSAMVKVKGTNRRPNQYRYSCDAMRSSRIECVHTNWSFRGDQLEKAVLQLLADKIWIAEDKANPVPALKVQIDEISRKIDNLITLSAMTGATKELADQITTLNSERETLYNQIKMAEEEMYSVDSQGWEKLAEFDLEDVYNEDRIKVRFKIKQALKRIGCSRIDKYKNLFVLEYIDGKTQRVVIENSRGPRKGRIFVDLKTINDRQILESNGLVLHPCLDMLTDKNWKPEEEIPGPLQEFGI

SEQ ID NO: 3926 - protein, 508 aa, synthetic construct
MKKAIAYMRFSSPGQMSGDSLNRQRRLIAEWLKVNSDYYLDTITYEDLGLSAFKGKYAQSGAFSEFLDAIEHGYILPGTTLLVESLDRLSREKVGEAIERLKLILNHGIDVITLCDNTVYNIDSLNEPYSLIKAILIAQRANEESEIKSSRVKLSWKKKRQDALESGTIMTASCPRWLSLDDKRTAFVPDPDRVKTIELIFKLRMERRSLNAIAKYLNDHAVKNFSGKESAWGPSVIEKLLANKALIGICVPSYRARGKGISEIAGYYPRVISDDLFYAVQEIRLAPFGISNSSKNPMLINLLRTVMKCEACGNTMIVHAVSGSLHGYYVCPMRRLHRCDRPSIKRDLVDYNIINELLFNCSKIQPVENKKDANETLELKIIELQMKINNLIVALSVAPEVTAIAEKIRLLDKELRRASVSLKTLKSKGVNSFSDFYAIDLTSKNGRELCRTLAYKTFEKIIINTDNKTCDIYFMNGIVFKHYPLMKVISAQQAISALKYMVDGEVYF

SEQ ID NO: 3927 - protein, 596 aa, synthetic construct
MMSKIIPYGYLRVSSLEQVKSGGGLDSQDEAVRRYINERSDLFDIEQMVMMSDMASAYSGKQLSEGQLGGFLADVEAGKVPSGSALIAYSIDRLSRQNPWIGTKLISTLIGAGIQIHSVAENQILKSSDPVGAIMSTIYLMRANNESEIKSDRAKTGYQKRLKESIQNKKVLTRQMPRWLFDNDGKYAVEPKMKRVIEFVFDSYIAGQSSGYIANELNNKGWLYGNTYWRGSYVAKLIRDERLIGKHLRYSKQIKGVKREVIETIPDFYPNAVDVEKYHLANNMLTNVAENIRGRTRITYGDTSILRNIFSNVIKCGLCGGDTSVVQNTRKKVVGDKFVYIPYKMFLRCRNKYELKTCTHGDIRYEIIERAILVHLMGLDIANLLATPIDNSIELYKTELERCIADESQYREIIELRRKAGKRVRPETVEVLEDVLDRIDELNRLIESHVVENFVPDFNVDLGNIADVSNVEERSLIKKGIAAIAKRIFYKRVGGYILVEVMYRNLSIKHILVIDNKSSNTVVNFSIKYEEEKHIYTCNSFNMNYLIKSGDFEIHEETTMEDYAQMMNFIDIVSEDEAKKAKEFLVKNFNQNFISK

SEQ ID NO: 3928 - protein, 506 aa, synthetic construct
MRHVITYLRYSSATQGAEGADSTRRQNELFKQWLRKNSDAQVVASFNDEGLSGYKGKHLSGQFGDMLSRIESGEFSKGTILLVEAIDRIGRLEHLETEALMNRIIAHGIEIHTLQDGLIYTRDALSDDLGISIIQRVKSYLAHQESKQKSFRVSQKWKQRAKLALAGEQRLTKMVPGWIDPDTFKCNEHAETVRLIFKLLLDGESLHNIARHLQANNISSFSRRKDANGFSVHSVRTVLRSESVIGTLPASQRNDRPAIPNYYEAAIDASTFNKAQEILDKNRKGRTPASDNPLTINIFKGLFRCQCGASVHPTGTKNKYAGVYRCNNNPDGRCDVPPLKRKPFDKWMLENFLGMIDVGNDGEAEGKIASLQHEVEIVTTRIKKATALLLEMDDITELKAQVKELNQKRTELQTTIDSMRRKTSLTDKELPQLKDIDLTTKAGRVECQLILSKHLKGLTLGKDSVTVTLQNDTEIIVPTDPLPLNDGTSIFEIAEKELLEIDAYQL

SEQ ID NO: 3929 - protein, 508 aa, synthetic construct
MKKAIAYMRFSSPGQMSGDSLNRQRRLIAEWLKVNSDYYLDTITYEDLGLSAFKGKHAQSGAFSEFLDAIEHGYILPGTTLLVESLDRLSREKVGEAIERLKLILNHGIDVITLCDNTVYNIDSLNEPYSLIKAILIAQRANEKSEIKSSRVKLSWKKKRQDALESGTIMTASCPRWLSLDDKRTAFVPDPDRVKTIELIFKLRMERRSLNAIAKYLNDHAVKNFSGKESAWGPSVIEKLLANKALIGICVPSYRARGKGISEIAGYYPRVISDDLFYAVQEIRLAPFGISNSSKNPMLINLLRTVMKCEACGNTMIVHAVSGSLHGYYVCPVRRLHRCDRPSIKRDLVDYNIINELLFNCSKIQPVENKKDANETLELKIIELQMKINNLIVALSVAPEVTAIAEKIRLLDKELRRVSVSLKTLKSKGVNSFSDFYAIDLTSKNGRELCRTLAYKTFEKIIINTDNKTCDIYFMNGIVFKHYPLMKVISAQQAISALKYMVDGEIYF

SEQ ID NO: 3930 - protein, 508 aa, synthetic construct
MKKAIAYMRFSSPGQMSGDSLNRQRRLIAEWLKVNSDYYLDTITYEDLGLSAFRGKHAQSGAFSEFLDAIEHGYILPGTTLLVESLDRLSREKVGEAIERLKLILNHGIDVITLCDNTVYNIDSLNEPYSLIKAILIAQRANEESEIKSSRVKLSWKKKRQDALESGTIMTASCPRWLSLDDKRTAFVPDPDRVKTIELIFKLRMERRSLNAIAKYLNDHAVKNFSGKESAWGPSVIEKLLANKALIGICVPSYRARGKGISEIAGYYPRVISDDLFYAVQEIRLAPFGISNSSKNPMLINLLRTVMKCEACGNTMIVHAVSGSLHGYYVCPMRRLHRCDRPSIKRDLVDYNIINELLFNCSKIQPVENKKDANETLELKIIELQMKINNLIVALSVAPEVTAIAEKIRLLDKELRRASVSLKTLKSKGVNSFSDFYAIDLTSKNGRELCRTLAYKTFEKIIINTDNKTCDIYFMNGIVFKHYPLMKVISAQQAISALKYMVDGEIYF

SEQ ID NO: 3931 - protein, 547 aa, synthetic construct
MKLLVTYIRWSTKEQDSGDSLRRQTNLIDAFYSKHKNDYYLLPAHRYVDKGKSGFHQQHKAQGSDFRRMFENVMSGAIPEGSLIVVENFDRFSRADIDTAIDDVRQILRKGVSILTLGDGELYDKSALTDPVKLIKHIIIAERAHQESLVKQKRIAQVWNHKTQLARELKKPMGKQAPGWLELSEDGSHYIVDEDKASLVNIIYDKRLSGMSMFAICKWLNEQGYPTINQRKVRISKTKKPDGNWSALSVKHILTSRSVLGYLPAKISTEDRKTVLREEIEGFYPQIVTDSKFYAVQQLLEETGKGKTSSGDHWLYVNILKGLIRCKCGLVMTPTGIRKPVYQGTYRCNGNKESRCSYGTVSRKLLDTQLCSRLFSKLSQLHDEATDTAKLDELQRRLNTVDSELEKLTETLIQLPNITQIQEALRVKQEEKDELIVQLSREKARVKSVSSLDLSGLDMESVEGRTEAQIIIKRLVKEIVVSGNEKLVDIYLHNGNMIRGFPLDGKDDHTLTLEEATDEMQSLDDMLIFGEPVTRIYPAGDMEEVDA

SEQ ID NO: 3932 - protein, 509 aa, synthetic construct
MRRAISYIRFSSERQLKGDSVRRQSKLVTDWLDKNPEFYLDSSLSFKDLGKSAFSGKHLKGGLGDFLTAIEKGLVKAGDTLLIESLDRLSRQDIDIASELLRRILRAGVDVVTLSDGEHYTKESLKDPLSLIKSILIMQRAHEESLRKSERVQAAWNRKKELISEGIKVSRRCPAWLRLNDDRRTFTIIPDKVEVVKRAFDLRLQGLSFWAITRTLNDEGHLSLNQYTPKQKGWSDTAVKKLLRNRAVIGCFTPAGREEVQGYYPAIISESLFYRVQQLNTGQYGRASVSSNPLSVNLFRGIIKCSECGATIVLGGYALKRFGMYRCPNRSANRCSAKAISRKQTDATILYMLALCDRFETENTDTIDGIKIQREDLQRKISKMAELAIELDDMTIITEKLRDMKNALSKLNHDIEEETKRIKAITTGSLKDIDRTTKEGMIETQLLIKGVLKEIVIDAAKRRCKVTFHNGKLIDLPITENPSEDVTEAIQSLSEVTERGLIDVDEVII

SEQ ID NO: 3933 - protein, 506 aa, synthetic construct
MRSVITYLRFSSAIQGAEGADSTRRQNDLFKQWLKKNSDAQVVASFSDEGLSGYKGKHLTGQFGDMLARIESGEFPEGTILLVESIDRIGRLEHLETEALMNRILGNGLEIHTLQDGLIYTKDALADDLGISIIQRVKAYIAHQESKQKSFRVSEKWKQRAKLALAGEQRLTKMVPGWIDPDTLKLNEHAETVRLIFKLLLSGESLHNIARHLQSNGIKSFSRRKDANGFSVHSVRTILRSETTIGTLPASQRNDRPAIPNYYEAAIDAATFNKAQEILDKNRKGRTPASDNPLTINIFKGLFRCQCGASVHPTGTKNKYAGVYRCNNHLDGRCDVPPLKRKPFDKWMLENFLGMIDVGNDGEAEGKIASLQYEVEIVTTRIKKATALLLEMDDIDELKIQLKELNQRRTELQTTIDNMRRKASLTDKELPQLKDIDLTTKAGRVECQLILSKHLKGLTLGKDSVIVTLQNDTEITIPTNPLPLNDGTSIFEIAEKELLEIDAYQL

SEQ ID NO: 3934 - protein, 508 aa, synthetic construct
MKKAIAYMRFSSPGQMSGDSLNRQRRLIAEWLKVNSDYYLDTITYEDLGLSAFKGKHAQSGAFSEFLDAIEHGYILPGTTLLVESLDRLSREKVGEAIERLKLILNHGIDVITLCDNTVYNIDSLNEPYSLIKAILIAQRANEESEIKSSRVKLSWKKKRQDALESGTIMTASCPRWLSLDDKRTAFVPDPDRVKTIELIFKLRMERRSLNAIARYLNDHAVKNFSGKESAWGPSVIEKLLANKALIGICVPSYRARGKGISEIAGYYPRVISDDLFYAVQEIRLAPFGISNSSKNPMLINLLRTVMKCEACGNTMIVHAVSGSLHGYYVCPMRRLHRCDRPSIKRDLVDYNIINELLFNCSKIQPVENKKDANETLELKIIELQMKINNLIAALSVAPEVTAIAEKIRVLDKELRRASVSLKTLKSKAVSSLGDFHAIDLTSKNGRELCRTLAYKTFEKIIINTDNKTCDIYFMNGIVFKHYPLMKTISAQQAISTLKYMVDGEVYF

SEQ ID NO: 3935 - protein, 589 aa, synthetic construct
MSAHVTILRNTVLPVKFNTMNRPRLYSYIRYSSERQGKGSSIERQKSYIAEMAKQIATEYDLEIFEEYQDLGVSAYKGKNVQEGALSDFIAQVESGLIPKGSFLLIESLDRFSRQNAMQAVNLFTSLLLNGITVITGIDKQVYRQTEVNTETLQQLMFSVMLFSRANEESSTKSHRTIASALSKIRRHQERKPGDPVVAIKELGSDKWWTDSSTGYVNPHPVLFPIAKKIIQLKQDGWSNRMILQHLKNNYDGPVIGNKKSKGIWNMQHCSRILEPAIYGRKVITVNNAEYVLDDYYPAIISKDEYEALKLQVGNKGFAPNRESNPEIPLLSGIGILHCAHCSCYMVKAKSTLKNHPHAYRYQCASRDLHQDCNKWGFRASTLERTILQLIADRIFLRTKYQPSGLEGKIADIQSQIENYVLAIGSAKSPAIINSLTSQIDQLEQEKQSLIVEKRLYDESIVQMNTEGWDKFRKFDIDDALNPLRTKIRANIKTVIMRVDCSRIDKKHNLFTITYRDQHKQRIVIENNSGWKKGKIYVEAQTINDIQILESEGLILHDHIDILINRDKFMTEAKKRLEHPRTLLDELTE

SEQ ID NO: 3936 - protein, 553 aa, synthetic construct
MLCYSYVRFSTPDQAKGDSYRRQMEFASNYCKLHNLTLVEDLSFKDLGVSAYKGNNLKNGALGKFLELVVSGQIPSGSTLVIESFDRLSRQTAIKAQAVFFEIISAGITIVTAMDNRSYNLQSIADNPFDLMYSLMIMIRANEESETKSKRVKEAIKSKIDNKKIVPSKLPYWIRHNKDEDVLELIPERVKTISYIIEKYLSGFGINKLTRHLNEKIPPFAGKSWYPLYLQKLLRSVSLYGERQYNMNNTLYIMDDYYPAVIDKSKFALIQENLDARAPTRGGKIPSAITGIRKAYCGYCNGVLVSQSTKRNGRIVDGLRRVRCGTNNNAGSCITSSFRISIVESAIAEYCSQHFDLSLLAPVSNSSKLDLANYRLELKKLDIKISNYVKFISEGNISPAIISALDETEKSKKDLQQKIQKSELNTLTNNSNEIAEKWKLIKTNLSEYDEENILKLRELIRSSIKRILVFQYGPWANAEPITTPSGKKIKPHRGNFSIQITFNNGVRKILELGDKVKVHEVDTINKRITENGITYTSDEYILMIQNTLKNKKV

SEQ ID NO: 3937 - protein, 558 aa, synthetic construct
MTKLYSYIRFSSTRQADSSSFERQKRTAKEIAEKYGLELVTSYQDLGVSAFKGANSKTGALSRFMEQIGKSVPVGSWLVVENLDRLSRQSIIEAQELFLSIIRRGITIVTGMDGKVYSKESVNANPLDLLLSVMMFARANEESQTKRNRTNSSALLKIKAHQQNPQSPAVAIEEIGKNMWWTDTTSGRVLPHPVYFPVLQKIVKMRQDGHSAGSILDYLNEHHEPPAPTSNKKHGKWSRAMVSRLFNTKALIGVKTVNVDGVEYELRDYYPRVLSDSEFYFLRKNIIKKAWDYGHDKEKVIPLLSGIGVLRCVHCGATMVKQTAANGKREQYRYCCDGRKSGRTDCPYPNWGFRAATLERAVLQLLADKIWIAEDKTNPIPEIQVKIDDISRKIDNLINLSAMMGATKELANQITDLNTQREALHEEIRLFEREMYSVDSQGWEKLAEFDLSDVQNEERLKVRMKIKGALHEIECSRLDSKKNLFVLVYLDGLRQRLVIENNRGLKKGQIIVDLKTINDKQILESAGMVLHPCIEMIVDKNWKAPEEIPGLLSEEFGI

SEQ ID NO: 3938 - protein, 507 aa, synthetic construct
MKRVISYIRFSSERQAKGDSLRRQSKMVTDWLKAHPEYYLDQDLSFRDLGVSGFTGKHLKGGLGDFLTAIEKGLVKAGDTLLIESLDRLSRQDIDIASELLRRILRAGVDVVTLSDGEHYTKESLRDPLSLIKSILIMQRAHEESLRKAERIQAAWDAKKEAAKAGIKVSKRCPAWLKLNDDRKTFSVIPEKVETVKRCFQLRLEGKSIWAIVKALNDEDRQSMNQYKPGKFGQTSVQDLLKNRSVIGYFTPKGCEGISGYYPAIIDETTFYKVQQLSHSRYGRKPASAKPLSVNLFKGVIRCSECGHALIITGFSDTRNGIYRCPLRNENRCSAKGLSRKQTDGTLLALLSRLDRFDSDTTNIIDTLKLHREHISSNIEKLVQLSLEIEDLSAITSKLKQLKGELSQVDADIEKETQRLKSIDVGCLSDCDLTTKAGRIEAQLIIKSAVKEVVLNTAKRRCKVTFHNGKAITLPITENPSEDVTEAIQSLSEVTERGLIDVDEVIV

SEQ ID NO: 3939 - protein, 508 aa, synthetic construct
MKKAIAYMRFSSPGQMSGDSLNRQRRLIDEWLKVNSDYYLDTITYEDLGLSAFKGKHAQSGAFSEFLDAIEHGYILPGTTLLVESLDRLSREKVGEAIERLKLILNHGIDVITLCDNTVYNIDSLNEPYSLIKAILIAQRANEESEIKSSRVKLSWKKKRQDALESGTIMTASCPRWLSLDDKRTAFVPDPDRVKTIELIFKLRMERRSLNAIAKYLNDHAVKNFSGKESAWGPSVIEKLLANKALIGICVPSYRARGKGISEIAGYYPRVISDDLFYAVQEIRLAPFGISNSSKNPMLINLLRTVMKCEACGNTMIVHAVSGSLHGYYVCPMRRLHRCDRPSIKRDLVDYNIINELLFNCSKIQPVENKKDANETLELKIIELQMKINNLIVALSVAPEVTAIAEKIRLFDKELRRASVSLKTLKSKGVNSFSDFYAIDLTSKNGRELCRTLAYKTFEKIIINTDNKTCDIYFMNGIVFKHYPLMKVISAQQAISALKYMVDGEIYF

SEQ ID NO: 3940 - protein, 508 aa, synthetic construct
MKKAIAYMRFSSPGQMSGDSLNRQRRLIAEWLKVNSDYYLDTITYEDLGLSAFKGKHAQSGAFSEFLDAIEHGYILPGTTLLVESLDRLSREKVGEAIERLKLILNHGIDVITLCDNTVYNIDSLNEPYSLIKAILIAQRANEESEIKSSRVKLSWKKKRQDALESGTIMTASCPRWLSLDDKRTAFVPDPDRVKTIELIFKLRMERRSLNAIAKYLNDHAVKNFSGKESAWGPSVIEKLLANKALIGICVPSYRARGKGISEIAGYYPRVISDDLFYAVQEIRLAPFGISNSSKNPMLINLLRTVMKCEACGNTMIVHAVSGSLHGYYVCPMRRLHRCDRPSIKRDLVDYNIINELLFNCSKIQPVENKKDANETLELKIIELQMKINNLIAALSVAPEVTAIAEKIRVLDKELLRASVSLKTLKSKAVSSLGDFHAIDLTSKNGRELCRTLAYKTFEKIIINTDNKTCDIYFMNGIVFKHYPLMKTISAQQAISTLKYMVDGEVYF

SEQ ID NO: 3941 - protein, 507 aa, synthetic construct
MKRVISYIRFSSEKQAKGDSLRRQSKMVTDWLKAHPEYYLDQDLSFRDLGVSGFTGKHLKGGLGDFLTAIEKGLVKAGDTLLIESLDRLSRQAVDRASELLRNILRSGVDIVTLSDGEHYTSESLKDPLALIKSILIMQRAHEESLRKSERIQAAWDAKKEAAKAGIKVSKRCPAWLRLNDDRKSFSVIPEKVETVKRCFQLRLEGKSIWEIVRTLNAEGHQTLNQYKAGKFGQTSVQDLLKNRSVIGYFTPKGCEEISGYYPAIIDETTFYKVQQLSHSRYGKRSVSDKPLSVNLFKGVIRCSECGHALIITGFSDTRNGIYRCPLRNENRCSAKGLSRKQTDGTLLALLSRLDRFDSDTTNTIDTLKLHREHISSNIEKLVQLSLEIEDLSAITSKLKQLKNELSQVDADIEKETQRLKSIDVGCLSDCDLTTKAGRIEAQLIIKSAVKEVVLNTAKRRCKVTFHNSKSITLPITENPSEDVTEAIQSLSEVTERGLIDVDEVII

SEQ ID NO: 3942 - protein, 560 aa, synthetic construct
MTKLYSYIRFSSMRQGEGSSYERQIRMAKEIADRYDLELVNDYQDLGVSAFKGANSKTGALSRFLDEIGRSIPVGSWLFIENLDRLSRQDIISAQELFLSIIRRGITIVTGMDNKIYSIETVTANPMDLMFSILLFIRGNEESQTKRNRTNSSALLKIKAHQQNPQSPAVAIEEIGKNMWWTDTTSGYVLPHPVYFPILQKIVKMKQEGHSTGSVLDYLNEHHTPPAPTSNKQHRKWSIAMVSRLFKTKALIGVKEVTVDGVQYELKDYYPRVLSDSEYYFLKNNLIKKAWSFGHAQEKTIPLLSGIGLLKCAHCGSPMVKRKAANGKVEQYRYTCDGEGSGRTDCLYPNWGFRASSLEGAVLQLLADKVWIAEDKANPIPEIQVQIDEISRKIDNLINLSAMTGATKELANQITDLNTQREALHEEIRLFEREMYSVDSQGWEKLAQFDLSDVQNEERLQIRLKIKGALRSIECARIDRNKNLFTLVYLDGLRQRIVIENNRGIRKGQIFVDLKTINDRQILESAGMVLHDHIDILIDEKAFYDGLPKEEDGPLSKFGI

SEQ ID NO: 3943 - protein, 507 aa, synthetic construct
MKRVISYIRFSSERQAKGDSLRRQSKMVNDWLKAHPEYYLDQDLSFRDLGVSGFTGKHLKGGLGDFLTAIEKGLVKAGDTLLIESLDRLSRQDVDQASELLRNILRSGVDVVTLSDGEHYTRESLKDPLALIKSILIMQRSHEESLRKSERIQAAWNRKKELISEGIKISKRCPAWLKLNDDRKSFSVIPEKVETVKRCFQLRLEGKSIWEIVRTLNDEGHQTLNQYKAGSFGQTSVQDLLKNRSVIGYFTPKGCEEISGYYPAIIDETTFYKVQQLSYARYGRKPASDKPMAVNLFKGVIRCSECGHALIITGFSDTRNGIYRCPLRNENRCSAKGLSRKQTDGTLLALLSRLDRFDSDMTNTIDTLKLHREHISSNIEKLVQLSLEIEDLSAITSKLRQLKNELSQVDADIEKETQRLKSIDVGCLSDCDLTTKAGRIEAQLIIKSAVKEVVLNTAKRRCKVTFHNGKAITLPITENPSDNVTEAIQSLSEVTERGLIDVDEVII

SEQ ID NO: 3944 - protein, 508 aa, synthetic construct
MKKAIAYMRFSSPGQMSGDSLNRQRRLIAEWLKVNSDYYLDTITYEDLGLSAFKGKHAQSGAFSEFLDAIEHGYILPGTTLLVESLDRLSREKVGEAIERLKLILNHGIDVITLCDNTVYNIDSLNDPYSLIKAILIAQRANEESEIKSSRVKLSWKKKRQDALESGTIMTASCPRWLSLDDKRTAFVPDPDRVKTIELIFKLRMERRSLNAIAKYLNDHAVKNFSGKESAWGPSVIEKLLANKALIGICVPSYRARGKGISEIAGYYPRVISDDLFYAVQEIRLAPFGISNSSKNPMLINLLRTVMKCEACGNTMIVHAVSGSLHGYYVCPMRRLHRCDRPSIKRDLVDYNIINELLFNCSKIQPVENKKDANETLELKIIELQMKINNLIAALSVAPEVTAIAEKIRVLDKELRRASVSLKTLKSKAVSSLGDFHAIDLTSKNGRELCRTLAYKTFEKIIINTDNKTCDIYFMNGIVFKHYPLMKTISAQQAISTLKYMVDGEVYC

SEQ ID NO: 3945 - protein, 506 aa, synthetic construct
MRTVITYLRFSSATQGAEGADSTRRQNDLFKQWLKKNSDAQVVASFSDEGLSGYKGKHLTGQFGDMLARIEAGEFPGGTILLVESIDRIGRLEHLETEALMNRIIAHGIEIHTLQDGLIYTRDALSDDLGISIIQRVKSYLAHQESKQKSFRVSEKWKQRAKLALAGKQRLTKMVPGWIDPDTLKLNEHAETVRLIFKLLLSGESLHNIARHLQSNGIKSFSRRKDANGFSVHSVRTILRSETTIGTLPASQRNDRPAIPNYYEAAIDAATFNKAQEILDKNRKGRTPASDNPLTINIFKGLFRCQCGASVHPTGTKNKYAGVYRCNNHLDGRCDVPPLKRKPFDKWMIDNFLGMIDVGNDGEAEKEIASLQHEVETVTARIKKATALLLEMDDIDELKIQLKELNQKRTELQTTIDSMRRKASLTDKELPQLKDIDLTTKAGRVECQLILSKHLESLTLGRGQVTVKLSNGTEIIVPTDPLPLTDGAAIFEIAEKNLLNIDTFQL

SEQ ID NO: 3946 - protein, 559 aa, synthetic construct
MKTKLYSYIRFSSMRQNDGSSYERQIRMAREIAVKYDLELVNDYQDLGVSAFKGANSKTGALSRFLDAIGRSVPVGSWLFIENLDRLSRADIVSAQELFLSIIRRGITIVTGMDNKIYSLDTVTANPMDLMFSILLFIRGNEESQTKRNRTNSSALIKIKAHQENPQNPAVAIEEIGKNMWWTDTTSGYVLPHPVFFPIVQEVVELRRNGRSTAEILDHLNATYTPPPAASHKRHSNWSRAMIERLFHTRALIGIKEISVDGVKYELKDYYPRVLDDAEFYHLKKSIGVRACNFGDKEEVKPIPLLSGVGLLKCEHCGSAMVKVKGTNRRPNQYRYSCDAMRSSRIECVHTNWSFRGDQLEKAVLQLLADKIWIAEDKANPVPALKVQIDEISRKIDNLITLSAMTGATKELADQITTLNSERETLYNQLKMAEEEMYSVDSQGWEKLAEFDLENVYNEDRIKVRFKIKQALKRIGCSRIDKYKNLFVLEYIDGKTQRVVIENSRGPRKGRIFVDLKTINDRQILESNGLVLHPCLDMLTDKNWKPEEEIPGPLQEFGI

SEQ ID NO: 3947 - protein, 507 aa, synthetic construct
MKRVISYIRFSSEKQAKGDSLRRQSKMVTDWLKAHPEYYLDQDLSFRDLGVSGFTGKHLKGGLGDFLTAIEKGLVKAGDTLLIESLDRLSRQDVDQASELLRNILRSGVDVVTLSDGEHYTSESLKDPLALIKSILIMQRAHEESLRKSERIQAAWDAKKEAAKAGIKVSKRCPAWLRLNDDRKSFSVIPEKVETVKRCFQLRLEGKSIWEIVRTLNAEGHRSMNQYKPGKFGQTSVQDLLKNRSVIGYFTPKGCEEISGYYPAIIDETTFYKVQQLSYARYGRKPASDKPMAVNLFKGVIRCSECGHALIITGFSDTRNGIYRCPLRNENRCNAKGLSRKQTDGTLLALLSRLDRFDSDMTNVIDALKLHREHISNNIEKLVQLSLEIEDLSAITIKLKQLKGELSQVDADIEKETQRLKSIDVGCLSDCDLTTKAGRIEAQLIIKSAVKEVVLNTAKRRCKVTFHNGKVIDLSITENPSEDVTEAIQSLSEVTERGLLDVDEVII

SEQ ID NO: 3948 - protein, 558 aa, synthetic construct
MTKLYSYIRFSSMRQSDGSSYERQIRMAKEIADRYNLELVNDYQDLGVSAFKGANSKTGALSRFLDEIGRSIPVGSWLFIENLDRLSRQDIISAQELFLSIIRRGITIVTGMDNKIYSIETVTANPMDLMFSILLFIRGNEESQTKRNRTNSSALLKIKAHQQNPQSPAVAIEEIGKNMWWTDTTSGRVLPHPVYFPVLQKIVQLRQEGHSAGAILDYLNEHHEPPAPTSNKKHGKWSRAMVSRLFTTKALIGVKTVNVDGVEYELRDYYPRVLSDSEFYFLRKNIIKKAWDYNHDKEKVIPLLSGIGVLRCVHCGATMVKQTAANGKREQYRYCCDGRKSGRTDCPYPNWGFRAVTLEGAVLQLLADKIWIAEDKTNPIPEIQVKIDEISRKIDNLINLSAMMGATKELANQITDLNSQREALHEEIRLFEREMYSVDSQGWDKLAQFDLSDVQNEERLKVRMKIKGALHEIECSRIDSKKNLFVLVYLDGLRQRLVIENNRGLKKGQIFVDLKTINDRQILESAGMVLHPCIEMIIDSDWKAPEEIPSLLSEEFGI

SEQ ID NO: 3949 - protein, 648 aa, synthetic construct
MLRPICYERVSSIQQIEGGGGLDDQRSALEGYLEINSDIFTKDRLFIQDRGVSAFKNSNISSESQLGIFLQDVQNRKYGEGDALIVMSLDRISRRSSWAEDTIRFIVNSGIEVHDISASTVLRKDDPHSKLIMELIQMRSHNESLMKSVRAKAAWDRKIMEAVKNGTVISNKMPIWLKNVDNKYQRIEEKVNLIRHCFEWYKHGLSTGEIIKKIGDPTLQMVTVSRWIRDRRLLGEHVRYNGEVVHNAYPKVIDEDLFITANRMMDRVMLEKRKPADDLLFEPAVVQEIFRLYESGIGTGAIVKHLSKGWSTVNVLRVLRDKGVVKQKIIDNLTFERVNQKLSQNGVANRIRKDITIAQDDYITNLFPKILKCGCCGGNIAIHYNHVRVKYIICRNREEKKICDAKSIQYLRVEKNILQLVKNIAFNKLMSEGILDSGSIIDGIREELATLRKEEQKYIDKIKKRKSEGKLTGIHLNEGLTEIQDRIEELEKEIIKSQDIKEIPKLDFNIEEVLDPLNVELRAKVRKELRLVLKSVKYRVVSKSIFVSLEYYTDVLAHVIVINNQRGGGEVQTEFAIEEHDGCRVYRTDSFVLSYKIGNEVPQFHTYEGVPINNFEYLKLRDLIEEVEGNGIVSSWMYKNYDFVFMNH

SEQ ID NO: 3950 - protein, 506 aa, synthetic construct
MRTVITYLRFSSATQGAEGADSTRRQNELFKQWLRKNSDAQVVASFSDEGLSGYKGKHLTGQFGDMLARIEAGEFPASTILLVESIDRIGRLEHLETEALMNRILGNGIEIHTLQDGLIYTKDALADDLGISIIQRVKAYIAHQESKQKSFRVSQKWEQRAKLALAGEQRLTKMVPGWIDPDTFKCNEHAETVRLIFKLLLSGESLHNIARHLQANNISSFSRRKDANGFSVHSVRTVLRSESVIGTLPASQRNDRPAIPNYYEAAIDAATFNKAQEILDKNRKGRTPASDNPLTINIFKGLFRCQCGASVHPTGTKNKYAGVYRCNNHLDGRCDVPPLKRKPFDKWMIDNFLGMIDVGNDGEAEGKIASLQHEVEIVTTRIKKSTALLLEMDDITELKTQVKELNQKRTELQTTIDNMRRKASLTDKELPQLKDIDLTTKAGRVECQLILSKHLKGLTLGKDSVTVTLQNDTEIIVPTDPLPLNDGSPIFEIADKELLDIDAFRL

SEQ ID NO: 3951 - protein, 507 aa, synthetic construct
MKRVISYIRFSSEKQAKGDSLRRQSKMVTDWLKAHPEYYLDQDLSFRDLGVSGFTGKHLKGGLGDFLTAIEKGLVKAGDTLLIESLDRLSRQDVDQASELLRNILRSGVDVVTLSDGEHYTRESLKDPLALIKSILIMQRSHEESLRKSERIQAAWDAKKEAAKAGIKISRRCPAWLKLNDDRKSFSVIPEKVETVRRCFQLRLEGKSIWEIVRILNDEGHQTLNQYKAGKFGQTSVQDLLKNRSVIGYFTPKGCEEIAGYYPAIIDETTFYKVQQLSYARYGRKPASDKPLSVNLFKGVIRCSECGHALIITGFSDTRSGIYRCPLRNENRCNAKGLSRKQTDSTLLALLSRLDRFDSDMTNTVDTLKLHREHISNNIEKLVQLSLEIEDLSAITSKLKQLKGELSQVDADIEKETQRLKSIDVGCLSDCDLTTKAGRIEAQLIIKSAVKEVVLNTAKRRCKVTFHNGKVIDLPITENPSEDVTEAIQSLSEVTERGLIDVDEVII

SEQ ID NO: 3952 - protein, 508 aa, synthetic construct
MKKAIAYMRFSSPGQMSGDSLNRQRRLIAEWLKVNSDYYLDTITYEDLGLSAFKGKHAQSGAFSEFLDAIEHGYILPGTTLLVESLDRLSREKVGEAIERLKLILNHGIDVITLCDNTVYNIDSLNEPYSLIKAILIAQRANEESEIKSSRVKLSWKKKRQDALESGTIMTASCPRWLSLDDKRTAFVPDPDRVKTIELIFKLRMERRSLNAIAKYLNDHAVKNFSGKESAWGPSVIEKLLANKALIGICVPSYRARGKGISEIAGYYPRVISDDLFYAVQEIRLAPFGISNSSKNPMLINLLRTVMKCEVCGNTMIVHAVSGSLHGYYVCPMRRLHRCDRPSIKRDLVDYNIINELLFNCSKIQPVENKKDANETLELKIIELQMKINNLIVALSVAPEVTAIAEKIRLLDKELRRASVSLKTLKSKGVNSFSDFYAIDLTSKNGRELCRTLAYKTFEKIIINTDNKTCDIYFMNGIVFKHYPLMKVISAQQAISALKYMVDGEIYF

SEQ ID NO: 3953 - protein, 559 aa, synthetic construct
MKTKLYSYIRFSSMRQSDGSSYERQIRMAREIAAKYDLELVNDYQDLGVSAFKGANSKTGALSRFLDAIGRSVPVGSWLFIENLDRLSRADIVSAQELFLSIIRRGITIVTGMDNKIYSLDTVTANPMDLMFSILLFIRGNEESQTKRNRTNSSALIKIKSHQENPQNPAVAIEEVGKNMWWTDTTSGYVLPHPVYFPVVQEIVELRKNGRSTAEILDHLNETYTPPPAVSNKKHSKWSRAMVERLFHTRALIGIKEISVDGVNYELKDYYPRVIDDPTFYHLKKNIGARAWNFGDKEEVKPIPLLSGIGLLKCDHCGCAMVKVKGTNKRSDQYRYTCDATRSRRLDCEHPNWSFRGDQLEKAVLQLLADKIWIAEDKANPVPALKVQVDEISRKIDNLIALSAMTGATKELADQITTLNSERETLYNQIKMAEEEMYSVDSQGWEKLAEFDLEDVYNEERLKVRFKIKQALKRIGCSRIDRNKNLFVLEYIDGKTQRVVIENSRGTRKGQIFVDLKTINDRQILESNGLVLHPCLDMLTDKNWKPEEEIPGPLQEFGI

SEQ ID NO: 3954 - protein, 547 aa, synthetic construct
MKLLATYIRWSTKEQDSGDSLRRQTNLIDAFYAKHKDDYYLLPAHRYVDKGKSGFHQQHKAQGSDFRRMFENVMSGAIPEGSLIVVENFDRFSRADIDTAIDDVRQILRKGVSILTLGDGELYDKSALTDPVKLIKHIIIAERAHQESLVKQKRIAQVWNHKTQLARELKKPMGKQAPGWLELSEDGSHYIVDEDKASLVNIIYDKRLSGMSMFAICKWLNEQGYPTINQRKVRISKTKKPDGNWSALSVKHILTSRSVLGYLPAKISTEDRKTVLREEIESFYPQIVTDSKFYAVQQLLEETGKGKTSSGDHWLYVNILKGLIRCKCGLVMTPTGIRKPVYQGTYRCNGNKESRCSYGTVSRKLLDTQLCSRLFSKLSQLHDEATDTAKLDELQRRLNTVDSELEKLTETLIQLPNITQIQEALRVKQEEKDELIVQLSREKARVKSVSSLDLSGLDMESVEGRTEAQIIIKRLVKEIVVSGNEKLVDIYLHNGNMIRGFPLDGKDDHTLTLEEATDEMQPLDDMLIFGEPVTRIYPAGDMEEVDA

SEQ ID NO: 3955 - protein, 547 aa, synthetic construct
MKLLVPYIRWSTKEQDSGDSLRRQTNLIDAFYAKHKDDYYLLPAHRYVDKGKSGFHQQHKAQGSDFRRMFENVMSGAIPEGSLIVVENFDRFSRADIDTAIDDVRQILRKGVSILTLGDGELYDKSALTDPVKLIKHIIIAERAHQESLVKQKRIAQVWNHKTQLARELKKPMGKQAPGWLELSDDGSHYIVDEDKASLVNIIYDKRLSGMSMFAICKWLNEQGYPTINQRKVRISKTKKPDGNWSALSVKHILTSRSVLGYLPAKISSEDRKTVLREEIESLYPQIVTDSKFYAVQQLLEETGKGKTSSGDHWLYVNILKGLIRCKCGLVMTPTGIRKPVYQGTYRCNGNKESRCSYGTVSRKLLDTQLCSRLFSKLSQLHDEATDTAKLDELQRRLNTVDGELEKLTETLIQLPNITQIQEALRVKQGEKDELIVQLSREKARVKSVSSLDLSGLDMESVEGRTEAQIIIKRLVKEIVVSGNEKLVDIYLHNGNMIRGFPLDGKDDHTLTLEEATDEMQSLDDMLIFGEPVTRIYPAGDMEEVDA

SEQ ID NO: 3956 - protein, 530 aa, synthetic construct
MEQYLIYLRKSRSDLEAEAHGEGETLSRHEHTLLELAKRQHLNVTDIYREVVSGDTIAARPMMQRVLSEVEQGVWSGVLVMEVERLARGDTIDQGIIAQTFKFSGTKIITPIKTYDPDNEFDEEYFEFGLFMSRREYKIINRRLQRGRLASAKEGKWPSGLAPFGYRRVKLKNEKGCSLEPIEEQAAIVRMIFDLYTVGLQDEDGSARPLSLGSIAARLNDMHISSPSGSQWARITIRGIIKNPTYIGMVRWGSRETKKKVVDGKVVSVRGPADPEKECVFKGIHPPLIPKETFELANDKLTRSENTSTHKEKVVRNPLAGLLVCSECGRQMMRMINPVHPDMPVVRCPRRGCPNCSSYLPIVEERVIQGLSEWMKGYELEWSSAAASSSVSSVGVREKALASAEAELRKLQQQLERTHDFLEQGIYDTDTFLSRSRMLSDKIAAAKESVARCSRELTEEKLRETSRRDIIPKVKNLLDVYPLLETAEEKNALLKEVLEKVVYQKLNEKRKKSPDGFTIEIYPRIPKSEK

SEQ ID NO: 3957 - protein, 559 aa, synthetic construct
MKTKLYSYIRFSSMRQNDGSSYERQIRMAREIAVKYDLELVNDYQDLGVSAFKGANSKTGALSRFLDAIGRSVPVGSWLFIENLDRLSRADIVSAQELFLSIIRRGITIVTGMDNKIYSLDTVTANPMDLMFSILLFIRGNEESQTKRNRTNSSALIKIKAHQENPQNPAVAIEEIGKNMWWTDTTSGYVLPHPVFFPIVQEVVELRRNGRSTAEILDHLNATYTPPPAASHKRHSNWSRAMIERLFHTRALIGIKEISVDGVKYELKDYYPRVLDDAEFYHLKKSIGVRACNYGDKEEVKPIPLLSGVGLLKCEHCGSAMVKVKGTNKRPNQYRYSCDAMRSSRIACVHTNWSFRGDQLEKAVLQLLADKIWIAEDKANPVPALKVQIDEISRKIDNLIALSAMTGATKELADQITTLNSERETLYNQIKMAEEEMYSVDSQGWEKLAEFDLEDVYNEDRIKVRFKIKQALKRIGCSRIDKYKNLFVLEYIDGKTQRVVIENSRGPRKGRIFVDLKTINDRQILESNGLVLHPCLDMLTDKNWKPEEEIPGPLQEFGI

SEQ ID NO: 3958 - protein, 547 aa, synthetic construct
MKLLVTYIRWSTKEQDSGDSLRRQTNLIDAFYAKHKDDYYLLPAHRYVDKGKSGFHQQHKNQGSDFRRMFENVMSGAIPEGSLIVVENFDRFSRADIDTAIDDVRQILRKGVSILTLGDGELYDKSALTDPVKLIKHIIIAERAHQESLVKQKRIAQVWNHKTQLARELKKPMGKQAPGWLELSEDGSHYIVDEDKASLVNIIYDKRLSGMSMFAICKWLNEQGYPTINQRKVRISKTKKPDGNWSALSVKHILTSRSVLGYLPAKISSEDRKTVLREEIEGFYPQIVTDSKFYAVQQLLEETGKGKTSSGEHWLYVNILKGLIRCKCGLVMTPTGIRKPVYQGTYRCNGNKESRCSYGTVSRKLLDTQLCSRLFSKLSQLHDEATDTAKLDELQRRLNTVDSELEKLTETLIQLPNITQIQEALRVKQGEKDELIVQLSREKARVKSVSSLNLSGLDMESVEGRTEAQIIIKRLVKEIVVSGNEKLVDIYLHNGNMIRGFPLDGKDDHTLTLEEATDEMQSLDDMLIFGEPVTRIYPAGDMEEVDA

SEQ ID NO: 3959 - protein, 559 aa, synthetic construct
MKTKLYSYIRFSSMRQSDGSSYERQIRMAREIAAKYDLELVNDYQDLGVSAFKGANSKTGALSRFLDAIGRSVPVGSWLFIENLDRLSRADIVSAQELFLSIIRRGITIVTGMDNKIYSLDTVTANPMDLMFSILLFIRGNEESQTKRNRTNSSALIKIKAHQENPQNPAVAIEEVGKNMWWTDTTSGYVLPHPVYFPVVQEIVELRKNGRSTAEILDHLNETYAPPPAVSNKKHSKWSRAMVERLFHTRALIGIKEISVDGVNYELKDYYPRVIDDATFYHLKKNIGARAWNFGDKEEVKPIPLLSGIGLLKCDHCGCAMVKVKGTNKRSDQYRYTCDATRSRRLDCEHPNWSFRGDQLEKAVLQLLADKIWIAEDKANPVPALKVQVDEISRKIDNLIALSAMTGATKELADQITTLNSERETLYNQIKMAEEEMYSVDSQGWEKLAEFDLEDVYNEERLKVRFKIKQALKRIGCSRIDRNKNLFVLEYIDGKTQRVVIENSRGTRKGQIFVDLKTINDRQILESNGLVLHPCLDMLTDKDWKPEEEIPGPLQEFGI

SEQ ID NO: 3960 - protein, 507 aa, synthetic construct
MKRVISYIRFSSERQAKGDSLRRQSKMVNDWLKAHPEYYLDQDLSFRDLGVSGFTGKHLKGGLGDFLTAIEKGLVKAGDTLLIESLDRLSRQNVDRASELLRNILRSGVDVVTLSDGEHYTRESLKDPLSLIKSILIMQRSHEESLRKSERIQAAWNRKKELISEGIKISKRCPAWLKLNDDRKSFSVIPEKVETVKRCFQLRLEGKSIWEIVRTMNAEGYQTLHQHKAGSFGQSSVQDLLKNRSVIGYFTPKGCEEIAGYYPAIIDETTFYKVQQLSYARYGRKPASDKPLSVNLFKGVIRCSECGHALIITGFSDTRSGIYRCPLRNENRCSAKGLSRKQTDGTLLALLSRLDRFDSDMTNVIDTLKLHREHISSNIEKLVQLSLEIEDLSAITSKLKQLKNELSQVDADIEKETQRLKSIDVGCLSDCDLSTKAGRIEAQLIIRSAVKEVVLNTAKRRCKVTFHNGKEIDLPITETPSEDVTEAIQSLSEVTERGLIDVDEVIV

SEQ ID NO: 3961 - protein, 506 aa, synthetic construct
MRSVITYLRFSSAIQGAEGADSTRRQNELFKQWLRKNSDAQVVASFSDEGLSGYKGKHLTGQFGDMLARIESGEFSEGTVLLVEAIDRIGRLEHLETEALMNRIIAHGIEIHTLQDGLIYTRDALSDDLGISIIQRVKSYVAHQESKQKSFRVSQKWKQRAKLALAGEQRLTKMVPGWIDPDTFKCNEHAETVRLIFKLLLDGESLHNIARHLQANNISSFSRRKDANGFSVHSVRTILRSETTIGTLPASQRNDRPAIPNYYEAAIDAATFNKAQEILDKNRKGRTPASDNPLTINIFKGLFRCQCGASVHPTGTKNKYAGVYRCNNNPDGRCDVPPLKRKPFDKWMIDNFLGMIDVGNDGEAEGKIASLQHEVEIVTARIKKATALLLEMDDIDELKIQLKELNQKRTELQTMIDNMRRKASLTDKELPQLKDIDLMTKAGRVECQLILSKHLKGLTLGKDSVTVTLQNDTEIIVPTDPLPLNDGTSIFEIAEKELLEIDAYQL

SEQ ID NO: 3962 - protein, 559 aa, synthetic construct
MKTKLYSYIRFSSMRQSDGSSYERQIRMAREIAAKYDLELVNDYQDLGVSAFKGANSKTGALSRFLDAIGRSVPVGSWLFIENLDRLSRADIVSAQELFLSIIRRGITIVTGMDNKIYSLDTVTANPMDLMFSILLFIRGNEESQTKRNRTNSSALIKIKAHQENPQNPAVAIEEVGKNMWWTDTTSGYVLPHQVFFPVVQEIVELRKNGRSTAEILDHLNETYAPPPAVSNKKHSKWSRAMVERLFHTRALIGIKEVSVDGVNYELKDYYPRVIDDPTFYHLKKNIGARAWNFGDKEEAKPIPLLSGIGLLKCDHCGCAMVKVKGTNKRSDQYRYTCDATRSRRLDCEHPNWSFRGDQLEKAVLQLLADKIWIAEDKANPVPALKVQVDEISRKIDNLIALSAMTGATKELADQITTLNSERETLYNQIKMAEEEMYSVDSQGWEKLAEFDLEDVYNEERLKVRFKIKQALKRIGCSRIDRNKNLFVLEYIDGKTQRVVIENSRGTRKGRIFIDLKTINDRQILESNGLVLHPCLDMLTDKNWKPEEEIPGPLQEFGI

SEQ ID NO: 3963 - protein, 506 aa, synthetic construct
MRSVITYLRYSSAIQGAEGADSTRRQNDLFKQWLKKNSDAQVVASFSDEGLSGYKGKHLTGQFGDMLARIESGEFPEGTILLVESIDRIGRLEHLETEALMNRILGNGLEIHTLQDGLIYTKDALADDLGISIIQRVKAYIAHQESKQKSFRVSQKWEQRAKLALAGKQRLTKMVPGWIDPDTFKLNEHAETVRLIFKLLLSGESLHNIARHLQANNISSFSRRKDANGFSVHSVRTILRSVTTIGTLPASQRNDRPAIPNYYEAAIDAATFNKAQEILDKNRKGRTPASDNPLTINIFKGLFRCQCGASVHPTGTKNKYAGVYRCNNHLDGRCDVPPLKRKPFDRWMIDNFLGMIDVGNDGESERKIAALQHEVEIVTSRIKKATALLLEMDDITELKTQVKGLNQKRTALQTTIDNMRRKTSLTDKELPQLKDIDLTTKAGRVECQLILSKHLKGLTLGKDSVIVTLQNDTEITIPTNPLPLNDGTSIFEIAEKELLEIDAYQL

SEQ ID NO: 3964 - protein, 506 aa, synthetic construct
MRTVITYLRFSSATQGAEGADSTRRQNELFKQWLRKNSDAQVVASFSDEGLSGYKGKHLTGQFGDMLARIEAGEFPAGTVLLVEAIDRIGRLEHLETEALMNRIIAHGIEIHTLQDGLIYTRDALSDDLGISIIQRVKSYLAHQESKQKSFRVSQKWKQRAKLALAGEQRLTRNVPGWIDPDTFKCNEHAETVRLIFKLLLDGESLHNIARHLQANNISSFSRRKDANGFSVHSVRTVLRSESVIGTLPASQRNDRPAIPNYYEAAIDAATFNKAQEILDKNRKGRTPASDNPLTINIFKGLFRCQCGASVHPTGTKNKYAGVYRCNSHLDGRCDVPPLKRKPFDKWMIDNFLGMIDVGNDGEAEGKIASLQHEVEIVTARIKKATALLLEMDDITELKTQVKELNQKRTELQTTIDSMRRKTSLSDKGLPQLKDIDLMTKEGRVECQLILSKHLKGLTLGKDSVTVTLQNDTEITIPTNPLPLNDGTSIFEIADKELLDIDAYQL

SEQ ID NO: 3965 - protein, 506 aa, synthetic construct
MRSVITYLRYSSAIQGAEGADSTRRQNDLFRQWLKKNIDAQVVASFSDEGLSGYKGKHLSGQFGDMLSRIESGEFPEGTILLVESIDRIGRLEHLETEALMNRILGNGLEIHTLQDGLIYTKDALADDLGISIIQRVKAYIAHQESKQKSFRVSQKWGQRAKLALAGEQRLTKMVPGWIDPETFKLNEHAETVRLIFKLLLDGESLHNIARHLQSNGIKSFSRRKDANGFSVHSVRTILRSETTIGTLPASQRNDRPAIPNYYEAAIDASTFNKAQEILDKNRTGRTPASDNPLTINIFKGLFRCQCGASVHPTGTKNKYAGVYRCNNHLDGRCDVPPLKRKPFDRWMIDNFLGMIDVGNDGEAEGKIASLQHEVEIVTARIKKATALLLEMDDIDELKIQLKELNQRRTELQTTIDSMRRKTSLSDKGLPQLKDIDLMTKAGRVECQLILSKHLKGLTLGKDSVTVTLQNDTEITIPTNPLPLNDGSPIFEIADKELLDVDTYRL

SEQ ID NO: 3966 - protein, 596 aa, synthetic construct
MSKIIPYGYLRVSSLEQVKHTRGLDSQDDAVRTYINNHSDIFDTEKTVMMSDAAMSAYSGKQISDGELGRFLGDVEAGKIPTNSALVCFSIDRLSRQNPWIGTKLISTLIGAGIEIHSVAERQVLKSDDPVGAIMSTIYLMRANNESVIKSERAKSGYAKRLNESIEGKKILTRQMPRWLYELDGLYTIDAEMKRVIDFTFDSYIAGQSTGYIASDLNNKGWLYGDTKWRGSYVAKLIRDERLIGTHIRYSKQTKGVKREIIEKIPNFYPVAVDVEKFHLANNMLTNVAENIRGRTRVTYGDKTTLKNIFNTVLKCGVCGGDTSVVQNTRLKIVDGVKKYIPYKMFLRCRNKYELRRCKQGDIRYEIIEQAVLNHMKDLDIASLLTKPVDNTVELYRSELAQCIADESQFREIIEQRKSAGKRVRPDTTNALEEILDRIDELNRLIESHVEENFIPNFDVDLNKIADVKNVAERSLIKKGISTVAKSIVYKRIDNFILLEIKYSNLNTKHILVIDNKSSRVVVNFSIDYGEKINIYTCNTFTMIYNKKKSTFKIKRSTMIDYGHMLNFIDYVSDAECRSAKDFLEVNFKNISFKKI

SEQ ID NO: 3967 - protein, 507 aa, synthetic construct
MKRVISYIRFSSERQAKGDSLRRQSKMVNDWLKAHPEYYLDQDLSFRDLGVSGFTGKHLKGGLGDFLTAIEKGLVKAGDTLLIESLDRLSRQDIDIASELLRRILRAGVDIVTLSDGEHYTRESLKDPLALIKSILIMQRAHEESLRKAERIQAAWDAKKEAAKAGIKISKRCPAWLKLNDDRKTFSVIPEKVETVRRCFQLRLEGKSIWEIVRTLNDEGHQTLNQYKAGKFGQTSVQDLLKNRSVIGYFTPKGCEEIAGYFPPIIPETDFYKVQQLSYSRYGRKPASDKPLSVNLFKGVIRCYECGHALIITGFSDTRNGIYRCPLRNENRCSAKGLSRKQTDGTLLALLSRIDRFDSDMTNTIDTLKLHREHISSNIEKLVQLSLEIEDLSAITSKLKQLKGELSQVNADIEKETQRLKSIDVGCLSDCDLTTKAGRIEAQLIIKSAVKEVILNTAKRRCKVTFHNGKVIDLPITEDPSENVTEAIQSLSEVTERGLIDVDEVII

SEQ ID NO: 3968 - protein, 532 aa, synthetic construct
MKRAVIYARYSTDLQNDKSVEDQISLCRDYARRQGFEVVGQFYDRAKSGASMFGRPGLADIMQAAERGEFDVLLSEATDRISRDIADLAHVHKQLTFRNISMNCVNGGEMSTVQIGMFGIVGQLQREEGAKKVKRGMIGVVRSGRNAGGKAYGYSPVAGKKGELEIVEEEAAIVRRIFDLYSAGVAPRTIAGILNREGIRAPRGKKWNASTINGSGQRGNGILRNPIYAGRIVWNRVRMVKDPSTGRRLSRANDESEYETTDAPHLRIIPADIFEAVQLRKQQTTRAGAKAPRSKRILSGLLRCGECGGGMVMIGPDRSGQRIQCSTVRESGTCGNKRRYYLERIEALVMNRLRVQFADTSIIEAYVSAYQEEQKKARSTALRDRAAATRALEEAKAEITEIIRMMSKGLVDDDEGTALLAPLRLRRDQQKAILDTVEEPTNVIEIQPKAVTRFRENIEKLSQILAEEQGDPPPELIAPFRHVVAAVVVQPTENGQPYEINLKGYLSSLIGSGLSVIKLVAEEGFEPPTQGL

SEQ ID NO: 3969 - protein, 594 aa, synthetic construct
MHDFDQRPTAYSYIRMSSKRQIKGDSLRRQLELSKKYAEDHNLRLDESSMVADKGVSAWTGANLTEGAFGQFLAAAKAGQIKPGSYLLVESLDRLSRQQVRTALLPFMELINADITIVTLADNQVYSKATVDANFTQLIISLTIMARAHEESETKSKRLRAVAKNRRENASKGVGRFSPMHVGWIDSERAGNDRWTFKLNDHANAVRRIFALADSGLGQVTITKRLNDEGVPTFRGKGLWYPANVGRIMRDETVVGTYQPTHVVEDVRQPFGQPIKDYYPAVVSEELFWRVQRGIKVGFAKGRHKGNRIANLFSGLITCAHCGSTLRLRTGTPHKYLYCDNLYRAGNCASGGGLYRYDRLEDIVFSKISELDPDQEAGGKADAQTRETLLQSVKSNEDQIQQQERAYKNYMASLALVDDDAMRREITAEMKSARTTIEQTKALVSEQKEELANIDTKRKEIASIAERMNLERLGWSTGSAEEVFDSRSRVAKMIKRFLTTMTINFDDKILMVALAGGLRAYKFNYAGDIVDRYDMSPLLNKPITPVIYNDGDGHARLITGGVLKPEHFTTDISVDDFDLKEDRLKIIRSMSQPK

SEQ ID NO: 3970 - protein, 500 aa, synthetic construct
MPQDNNGIAYSYVRFSSKKQASGDSLRRQMEMAEEYASRHMLRLSSKNFQDLGISAFREGKRPSLADMLTAIDEGQITAGSTIIIEALDRLSRRGIDATLETVKEILRKDVQIVSLSDGLVLTKSSPNELESVIRIALAADLAYKESERKAQRLRETKGQQRQDALNGIPINKILPFWLKRTETGYAFSDKVETARQIVTLKQEGKGSNMIAKFLNKQGIAGIRTAQWNHASITKMLKNPALYGAYQTGETNKEREMIQLEIVEGYYPALINKDEWLLLQSDQSKSTRGRRSTDNPYSGLLRCGCGGALIKRKSTVRGKLYVYHGCLNAKDGRCSQNLSIKGLDGALATMLGRLEFKKAVTVDQSIYLEKQQIENRIANLNKTLQEVDHVPASVIQTIITMEARIKEITQQIETGEREQRGIDAVNNAKLSSITDSLELNLLLKRVLKSITVTRSGLGWAVRIFHLSGHSQSFLLVNGQLRLVSDSIALKNLLNEYLKDD

SEQ ID NO: 3971 - protein, 508 aa, synthetic construct
MKKAIAYMRFSSPSQMSGDSLNRQRRLITEWLKVNSDYYLDTVTYEDLGLSAFNGKHAQSGAFSEFLDAIEHGYILPGTTLLVESLDRLSREKVGEAIERLKLILNHGIDVITLCDNTVYNIDSLNEPYSLIKAILIAQRANEESEIKSSRVKLSWKKKRQDALESGTIMTASCPRWLSLDDKRTAFVPDPDRVKTIELIFKLRMERRSLNAIAKYLNDHAVKNFSGKESAWGPSVIEKLLANKALIGICVPSYRARGKGISEIAGYYPRVISDDLFYAVQEIRLAPFGISNSSKNPMLINLLRTVMKCEACGNTMIVHAVSGSLHGYYVCPMRRLHRCDRPSIKRDLVDYNIINELLFNCSKIQPVENKKDANETLELKIIELQMKINNLIAALSVAPEVTAIAEKIRVLDKELRRASVSLKTLKSKAVSSLGDFHAIDLTSKNGRELCRTLAYKTFEKIIINTDNKTCDIYFMNGIVFKHDPLMKTISAQQAISTLKYMVDGEVYF

SEQ ID NO: 3972 - protein, 499 aa, synthetic construct
MSKAVIYARYSSTNQREESIEGQIRECTDFAKRQDITIVGSYIDRALTGKTDARPQFQKMIADSGKQLFDIVIVYTLDRFARNRYDSATYKAKLKKNGVKVISAKENITDDPSGIILESVLEGMAEYYSVELAQKVLRGMTENALECKWLSGIIPLGYKLDDDKHLIIDDHAAPIVRKIFEMYAAGDRIVDIAKYANSTHLKTAKENNFSRCSFTHMLKNETYIGTYKWRDIVKTKVIPQFIPDDLFHSVQKRIKSRKETNVRGKSENFLLSSKLKCGKCGQFMTGVSGTSKQKRRYYYYQCYASKSKKCDMPLFPREKLEDIILAETIKLLSEPQTIEFIANTVANLPIDENTQISILETEITEIKNKLKNCIKAIESGLISDTISKNISEYEKKLSVLEKDLSIEKVLNEPFKITSDHVKFFLYNILQIKNAAERRDMIISTFVRDIVLTKDDIGYTVKITYNYNENPSTSLDNSVQKGSQKSSLVAPTRIELVISP

SEQ ID NO: 3973 - protein, 508 aa, synthetic construct
MKKAIAYMRFSSPGQMSGDSLNRQRRLITEWLKVNSDYYLDTVTYEDLGLSAFNGKHAQSGAFSEFLDAIEHGYILPGTTLLVESLDRLSREKVGEAIERLKLILNHGIDVITLCDNTVYNIDSLNEPYSLIKAILIAQRANEESEIKSSRVKLSWKKKRQDALESGTIMTASCPRWLSLDDKRTAFVPDPDRVKTIELIFKLRMERRSLNAIAKYLNDHAVKNFSGKESAWGPSVIEKLLANKALIGICVPSYRARGKGISEIAGYYPRVISDDLFYAVQEIRLAPFGISNSSKNPMLINLLRTVMKCEACGNTMIVHAVSGSLHGYYVCPMRRLHRCDRPSIKRDLVDYNIINELLFNCSKIQPVENKKDANETLELKIIELQMKINNLIAALSVAPEVTAIAEKIRVLDKELRRASVSLKTLKSKAVSSLGDFHAIDLTSKNGRELCRTLAYKTFEKIIINTDNKTCDIYFMNGIVFKHYPLMKIISAQQAISTLKYMVDGEVYF

SEQ ID NO: 3974 - protein, 427 aa, synthetic construct
MGNVMLIPARRQVGSNARKKEEEKPKLRVTAYCRVSTDSDEQATSYEAQVEHYTEYIQKNPDWEFTGIYADDGISGTNTKKREEFNRMIDDCKAGKIDMIITKSISRFARNTLDCLKYIRELKDMNIPVIFEKESINTMDAKGEILITIMASLAQQESQSLSQNVKMGIQFRYQQGKVQINHNRFLGYTKDADGNLIIDPEQAEIVKRIYREYLEGLSMDKIAAGLERDGILTGAGGKRWHTSTINKILRNEKYIGDALLQKTYTTDFLNKTRVKNNGLVPQYYVEGNHEAIIPKDIYLQVQEELVRRRVVKTSANGKKRSYSCNHCFSQIIICGECGEMFRRLHWNNRGVKSIVWRCISRLESTGLECHARTINELVLQDAVVKAINQMLGNKSSYQAQLQLNIASVIRASQATSVENIDEKLMAL

SEQ ID NO: 3975 - protein, 521 aa, synthetic construct
MKKVTKIEGAQNNITIKKKLRVAAYCRVSTGSDAQLESLEAQKAHYERYINSREDWQFAGLYFDEGITGTKAEKRPELLRLISDCEAKKIDFVITKSISRFSRNTTDCLALVRKLQSLDIPLSFEKENINTGSMESELFLAILSSMAEGESTSISENAKWSIKRRFQNGTFKLSYTPYGYDWDGENMVVNPAQAEIVKKIFADVLSGKGTQAIADELNADGIASKKNSKWTATTIRAILANEKYTGDVIFQKTYTDENFNRHINYGEVDQYMAPDHHEAIISHEDFDAANALVAQRASEKGIEKGNSKYQQRYAFSGKIICGECGDTFKRRIHTCTTYKYVAWACNTHLKDKATCGMKYARDDEIKAAFITMLNKLIYGHRLVLAPYLKALENSSGDEAVQRIQHLELLLAQNSEQRETLTKLMAQGYIDQILYNQETNALLLQAETYRSDIEAITICMTGDSVKVTETNLLLHFVSHTEMLTAYNEELFESYADHIEITGRNEIKFVLKCGLTFTERIGD

SEQ ID NO: 3976 - protein, 504 aa, synthetic construct
MSDKYLMYLRKSRADGEHETVEEVLAKHYKILQDYAAAKLGGVIPEDMIYREVVSGETIQDRPEIKKLLDRIQTEEVKGVLVVDPQRLSRGDLSDCGTIIRAFRYTDTLIVTPPKTYDLGDKFDRKFFEMELMRGNDYLEYVKEIMMRGRIASVNEGNFIGSVAPYGYDKVKVGKAYTLVPNSEADTVRLMYELWTKDGLGTTTIANRLNELHIKPRKSEIWNNASIRDMLRNPVYIGKIRWNCRKTVKHYEGGELISSRPKANKEDWILVDGKHEPIISEETFNASLARFGSLPKVKAKSGLKNPFAGIMHCSCGRPMIYQPHKKCEARLHCAYQMRCGNRSATYREVEEEVIRALRQLVAELSEQLAEGTQNTHDAHKAIAEALRKELNALETQQERLYEFLEQGIYTSEVFVKRNAALAQRRQELQEAIETAKSYQVSEVDYRQKIIALHDAIAILEDPTASAEEKNNLLRTVIKDITYHRETEVRDKWHPVPFFLDISLI

SEQ ID NO: 3977 - protein, 506 aa, synthetic construct
MRSVITYLRYSSAIQGAEGADSTRRQNDLFKQWLKKNSDAQVVASFSDEGLSGYKGKHLTGQFGDMLARIESGEFPEGTILLVESIDRIGRLEHLETEALMNRILGNGLEIHTLQDGLIYTKDALADDLGISIIQRVKAYIAHQESKQKSFRVSQKWEQRAKLALAGEQRLTKMVPGWIDPDTFKLNEHAETVRLIFKLLLSGESLHNIARHLQSNGIKSFSRRKDANGFSVHSVRTILRSETTIGTLPASQRNDRPAIPNYYEAAIDASTFNKAQEILDKNRKGRTPASDNPLTINIFKGLFRCQCGASVHPTGTKNKYAGVYRCNNHLDGRCDVQPLKRKPFDRWMIDNFLGMIDVGNDGKSKRKIASLQHEVEIVTARIKKATALLLEMDDITELKTQVRELNQKRTELQTTIDTLKRKTSLTDKELTQLKDIDLMTKAGRVECQLILSKHLKGLILGKDSVTVTLQNDTEITIPTNPLPLNDGSPIFEIADKELLDIDAYQL

SEQ ID NO: 3978 - protein, 507 aa, synthetic construct
MKRVISYIRFSSERQAKGDSLRRQSKMVNDWLKAHPEYYLDQDLSFRDLGVSGFTGKHLKGGLGDFLTAIEKGLVKAGDTLLIESLDRLSRQAVDRASELLRNILRSGVDVVTLSDGEHYTRESLRDPLALIKSILIMQRAHEESLRKSERIQAAWDAKKEAAKAGIKVSKRCPAWLKLNDDRKSFSVIPEKVETVKRCFQLRLEGKSIWEIVRTLNDECHQSMNQYKPGKFGQTSVQDLLKNRSVIGYFTPKGREEIAGYFPSIIHETDFYKVQQLSYARHGRKPASAKPLSVNLFKGVIRCSECGHALIITGFSDTRNGIYRCPLRNENRCSAKGLSRKQTDGTLLTLLSRLDRFDSDTTNTIDTLKLHREHISSNIEKLVQLSLEIEDLSAITSKLKQLKGELSQVDADIEKETQRLKSIDVGCLSDCDLTTKAGRIEAQLIIKSAVKEVVLNTAKRRCKVTFHNGKSITLPITENPSEDVTEAIQSLSEVTERGLIDVDEVII

SEQ ID NO: 3979 - protein, 531 aa, synthetic construct
MKAVIYARYSSDNQREESIEGQLRECTAYCEKNDITILRTYIDRALSAKTDNRPDFQRMVKDSAKGLFDVVIVWKLDRFARNRYDSAHYKAQLRKYGVKVLSATENISEGPEGIILESMLEGMAEYYSAELSEKVIRGHTENALKCKYNGGTPTFGYVIDKDMQYQLDPRTAPVVLEIFTRYDQGATMKEIMEEMRQKGVTTVRGKKIDLNFMARLLKNRKYIGEYSYREIVTPGGIPAIVPQDLFDRVQKRLAANRKAPARHKAEDDYLLTTKLFCGTCGAMMVGESGTSASKGRKYHYYRCVNTKKQKSCNAKHKSIRKTPIENAVVNAVMAKVMDDNFVEYIADTVMDIQTRESSVLPALRHQLEETERGITNMLNAIQMGIINASTKQRLDELEDRKADIELQIIQEEMKHPMLTREDVTYWICRFRTLDVSKLEERRRLIDSFVNSVTVFDDYILITFNYKEGEERLDFTDIESSDLQSVGGPSWSRCCTSAPAFFCNGRSGLSLRTRCSEPNGCRWAPDGVSALF

SEQ ID NO: 3980 - protein, 506 aa, synthetic construct
MRSVITYLRFSSAIQGAEGADSTRRQNDLFKQWLKKNSDAQVVASFSDEGLSGYKGKHLTGQFGDMLARIESGEFPEGTLLLVEAIDRIGRLEHLETEALMNRIIAHGIEIHTLQDGLIYTRDALSDDLGISIIQRVKSYVAHQESKQKSFRVSQKWKQRAKLALAGEQRLTKMVPGWIDPDTFKCNEHAETVRLIFKLLLDGESLHNIARHLQSNDIKSFSRRKDANGFSVHSVRTVLRSESVIGTLPASQRNDRPAIPNYYEAAIDASTFNKAQEILDKNRKGRTPASDNPLTINIFKGLFRCQCGASVHPTGTKNKYAGVYRCNNNPDGRCDVPPLKRKPFDKWMIDNFLGMIDVGNDGESERKIAALQHEVEIVTARIKKATALLLEMDDITELKAQVKGLNQKRTEIQTTIDTLKRKTSLTDKELPQLKDIDLTTKAGRVECQLILSKHLKGLTLGKDSVTVTLQNDTEIIVPTDPLPLNDGTSIFEIAEKELLEIDAYQL

SEQ ID NO: 3981 - protein, 522 aa, synthetic construct
MGNVMLIPARRQVGSNARKQEEEKPKLRVAAYCRVSTDSDEQSTSYEAQVEHYTEYIQKNPDWEFAGIYADDGISGTNTKKREEFNRMIDDCKAGNIDMIITKSISRFARNTLDCLKYIRQLKDMNIPVLFEKESINTMDAKGEVLITIMASLAQQESQSLSQNVKMGLQYRYQQGKVQINHNRFLGYTKDADGNLVIDPEQAETVKRIYREYLEGISMDKIAAGLERDGILTGAGGKKWHTSTINKILRNEKYIGDALLQKTYTTDFLNKTRVKNNGLVPQYYVEGDHEAIIPKDIYLQVQEELVRRRVVKTSANGKKRSYSCNHCFSQIVICGECGEMFRRLHWNNRGVKSIVWRCISRLESTGLECHARTINELVLQDAVVKAINQMLGDKSNYQAQLQLNIAAVIRASQATAIDSIDEKLMALQQELIQKTNSKEDYDEIADDIFRLRELRQKTTVDTAARDEQIKRINDLQDYISHQTALLTEFDESLVRRWIKQITIWDDRITVELKSGVSIDVDA

SEQ ID NO: 3982 - protein, 521 aa, synthetic construct
MKKVTKIDGVQKNTAINSRLRVAAYCRVSTGSDAQLESLEAQKSHYEQYINSREDWQFAGLYFDEGITGTKAEKRPELLRLITDCEAGSIDFVITKSISRFSRNTTDCLALVRKLQSLEIPIYFEKENINTGSMESELFLAILSSMAEGESASISENAKWSVKRRFQNGTYKLGYTPYGYDWDGKNMIINPDQAAVVKRIFADILSGKSTNAIADELNAEKVPSKKNANWTSSTIRGILANEKYTGDVIFQKTYTDENFNRHTNYGEVDQYMAPDHHEAIISHSDFDAANALVNQRAAEKGIEKGSDKYQQRYAFSGKIICGECGDTFKRRIHSCTTYKYVAWACNTHLKNKESCHMKYVRDDEIKAAFITMLNKLIYGYRLILTPYLKVLENSSGDEAIHRIQHLEQLIAQNSEQREALTKLMAQGYIDQILYNQETNALLLQAETYRSDTEVITIGMTGDAAKVTEANLLLHFVSHTDMLTAYSEELFENYADHIEVMSRNEIRFVMKCGLTFTERIDD

SEQ ID NO: 3983 - protein, 627 aa, synthetic construct
MKKIFLYHRVSTEQQAEDGSGMARQADLLQSYIDRTRIVESMDDPVPVVLEDGGLSAFKGHNFLHGQLGRWMEEVRAGMWDGSILVVENIDRFSRQNPFNVMGYLHDLINHSVAIHDVNMNMVISRENSAMLPMVMMQAQRAYDESKFKSNRIRAGWAKKRDNAFNNGTIVTNKRPKWIDIVDNQYVLNAKARIVTEIFRLYQTGIGCPTIAKTLREMGDDWRFDRIWTGEAVHKVLRNRRVTGVIFISELIRDYNSTDNPIDQKRYEMNVYPPVIGEDEFNLVQQLLSSRRSGKATGGKRITKKRNDDGSVVTDVNGYPTYDFIDGGKITKSNIFNAVCRCAKCGSPMYHNIVVSKRTPAKATSPVVQEYRYIRCLNERDGLCDNKSLRYDVIERFIMEHIKGLDFNTIIQENRINPEVELIRLKLEQEREHIREYEHGIKRLRNSGKKVPFDVLVELEDAQERLKALEDKQATFADVHVDLDILKHVDLDALYDVTNIELRGRVENELSKVLEKVELHRDGKNYVITFKYRRVDVLKHVLMITASKTPVLVSGVCIETVGDTVAYSTPSFDIIVVDGGDLCFQPIDDEPLSIIDYSFLMNYVDGTEGADVVAAWMKHNMNFLFTR

SEQ ID NO: 3984 - protein, 507 aa, synthetic construct
MKRVISYIRFSSEKQAKGDSLRRQSKMVTDWLKAHPEYYLDQDLSFRDLGVSGFTGKHLKGGLGDFLTAIEKGLVKAGDTLLIESLDRLSRQAVDRASELLRNILRSGVDVVTLSDGEHYTSESLKDPLALIKSILIMQRAHEESLRKSERIQAAWNRKKELISEGIKISKRCPAWLKLNDDRKSFSVIPDKVETVKRCFQLRLEGKSIWEIVRTLNAEGHRSMNQHKPGKFGQTSVQDLLKNRSVIGYFTPKGCEEIAGYYPSVIDETTFYKVQQLSHSRYGRKPASAKPLSVNLFKGVIRCSECGHALIITGFSDTRSGIYRCPLRNENRCSAKGLSRKQTDGTLLTLLSRLDRFDSDMTNTIDTLKLHREHISSNIEKLVQLSLEIEDLSAITIKLKQLKNELSQVDADIEKETQRLKSIDVGCLSDCDLTTKAGRIEAQLIIKSAVKEVVLNTAKRRCKVTFHNGRAITLPITENPSEDVTEAIQSLSEVTERGLIDVDEVII

SEQ ID NO: 3985 - protein, 540 aa, synthetic construct
MPKAISYIRFSTKIQSVGDSTKRQSKYINDWLKRNPDYYLDETLRFQDLGISGFSGANAKSGAFGEFLAAVESGYIEAGSVLLVESLDRVSRQDIDTAGEQLRKILRSGVEVVTLVDNEWYTKESLKDSLSMIKAMLVMERAHEESAMKSTRLRSVWAAKRERAAKGEIMSKRCAAWLKVSEDRSRFEFIPENVKAVQRVFQLRLEGLSHVKIAKQMNDEGFSTLNQFKSVTGGWSQSSVTELLSNRSVIGFKVPSKSMAVKGVSEIPNYYPSIITDEQFYAVQQLKQGSGRKPSSDLPLLTNLFKGVLRCSECGFIVVVAGVSAKRSGIYKCSMKSEGRCNSVGFSRLQTDRALVQGLLYNANRLFLNRDNGSAIGALQGELEQLQKQRERLIKLAMLADDTESMAKDLKALNSQIKDAEKAVSEVHQREQSSQLETISHLDLTVKKDRIEAQIIIKRIVKEIRLNTAEKKCDVLLHNGLRLLNFPLDMVVDGAQWLEILPLIDGDEFDFEGFSTKPRHLAFEEAPEWVKELEFNSKIQ

SEQ ID NO: 3986 - protein, 559 aa, synthetic construct
MKTKLYSYIRFSSMRQNDGSSYERQIRMAREIAAKYDLELVNDYQDLGVSAFKGANSKTGALSRFLDAIGRSVPVGSWLFIENLDRLSRADIVSAQELFLSIIRRGITIVTGMDNKIYSLDTVTANPMDLMFSILLFIRGNEESQTKRNRTNSSALIKIKAHQENPQNPAVAIEEVGKNMWWTDTTSGYVLPHPTYFPVVQEIVELRKNGRSTAEILDHLNETYTPPPAVSNKKHSKWSRAMVERLFHTRALIGIKEVSVDGVNYELNNYYPRVIDDPTFYHLKKNIGARAWNFGDKEEVKPIPLLSGIGLLKCDHCGCAMVKVKGTNKRSDQYRYTCDAIRSRRLDCEHPNWSFRGDQLEKAVLQLLADKIWIAEDKANPVPALKVQIDEISRKIDNLIALSAMTGATKELADQITTLNSERETLYNQIKMAEEEMYSVDSQGWEKLAEFDLEDVYNEERLKVRFKIKQALRRIGCSRIDRNKNLFVLEYIDGKTQRVVIENSRGTRKGRIFIDLKTINDRQILESNGLVLHPCLDMLTDKNWKPEEEIPGPLQEFGI

SEQ ID NO: 3987 - protein, 558 aa, synthetic construct
MTKLYSYIRFSSMRQSDGSSYERQIRMAKEIAARYNLELVNDYQDLGVSAFKGANSKTGALSRFLDEIGRSIPVGSWLFIENLDRLSRQDIISAQELFLSIIRRGITIVTGMDNKIYSIETVTANPMDLMFSILLFIRGNEESQTKRNRTNSSALLKIKAHQQNPQSPAVAIEEIGKNMWWTDTTSGRVLPHPVYFPVLQKIVQLRQEGHSAGVILDYLNEHHEPPAPTSNKKHGKWSRAMVSRLFNTKALIGVKTVNVDGVEYELRDYYPRVLSDSEFYFLRKNIVKKAWDYSHVKEKVIPLLSGIGVLRCVHCGATMVKQTAANGKREQYRYCCDGRKSGRTDCPYPNWGFRAVTLEGAVLQLLADKIWIAEDKTNPIPEIQVKIDEISRKIDNLINLSAMTGATKELANQITDLNSQREALHEEIRLFEREMYSVDSQGWDKLAQFDLSDVQNEERLKVRLKIKGALHEIECSRIDSKKNLFVLVYLDGLRQRLVIENNRGLKKGQIFVDLKTINDRQILESAGMVLHPCIEMIIDADWKAPEEIPGLLSEEFGI

SEQ ID NO: 3988 - protein, 559 aa, synthetic construct
MKTKLYSYIRFSSMRQNDGSSYERQIRMAREIAAKYDLELVNDYQDLGVSAFKGANSKTGALSRFLDAIGRSVPVGSWLFIENLDRLSRADIVSAQELFLSIIRRGITIVTGMDNKIYSLDTVTANPMDLMFSILLFIRGNEESQTKRNRTNSSALIKIKAHQENPQNPAVAIEEVGKNMWWTDTTSGYVLPHPVYFPVVQEIVELRKNGRSTAEILDHLNETYAPPPAVSNKKHSKWSRAMVERLFHTRALIGIKEVSVDGVNYELKDYYPRVIDDATFYHLKKNIGARAWNFGDKEEVKPIPLLSGIGLLKCDHCGCAMVKVKGTNKRSDQYRYTCDATRSRRLDCEHPNWSFRGDQLEKAVLQLLADKIWIAEDKANPVPALKVQVDEISRKIDNLIALSAMTGATKELADQITTLNSERETLYNQIKMAEEEMYSVDSQGWEKLAEFDLEDVYNEERLKVRFKIKQALKRIGCSRIDRNKNLFVLEYIDGKTQRVVIENSRGTRKGQIFVDLKTINDRQILESNGLVLHPCLDMLTDKNWKPEEEIPGPLQEFGI

SEQ ID NO: 3989 - protein, 547 aa, synthetic construct
MKLLVTYIRWSTKEQDSGDSLRRQTNLIDAFYSKHKNDYYLLPAHRYVDKGKSGFHQQHKNQGSDFRRMFENVMSGAIPEGSLIVVENFDRFSRADIDTAIDDVRQILRKGVSILTLGDGELYDKSALTDPVKLIKHIIIAERAHQESLVKQKRIAQVWNHKTQLARELKKPMGKQAPGWLELSEDGSHYIVDEDKASLVNIIYDKRLSGMSMFAICKWLNEQGYPTINQRKVRISKTKKPDGNWSALSVKHILTSRSVLGYLPAKISTEDRKTVLREEIEGFYPQIVTDSKFYAVQQLLEETGKGKTSSGEHWLYVNILKGLIRCKCGLVMTPTGIRKPVYQGTYRCNGNKESRCSYGTVSRKLLDTQLCSRLFSKLSQLHDEATDTAKLDELQRRLNTVDSELEKLTETLIQLPNITQIQEALRVKQEEKDELTFQLSREKARVKSVSSLDLSGLDMESVEGRTEAQIIIKRLVKEIVVSGNEKLVDIYLHNGNMIRGFPLDGKDDHTLTLEEATDEMQSLDDMLIFGEPVTRIYPAGDMEEVDA

SEQ ID NO: 3990 - protein, 506 aa, synthetic construct
MRSVITYLRYSSAIQGAEGADSTRRQNDLFKQWLKKNSDAQVVASFSDEGLSGYKGKHLTGQFGDMLARIESGEFTAGTILLVESIDRIGRLEHLETEALMNRILGNGIEIHTLQDGLIYTKDALADDLGISIIQRVKAYIAHQESKQKSFRVSQKWEQRAKLALAGEQRLTRNVPGWIDPDTFKCNEHAETVRLIFKLLLDGESLHNIARHLQSNDIKSFSRRKDANGFSVHSVRTVLRSESVIGTLPASQRNDRPAIPNYYEAAIDAATFNKAQEILDKNRKGRTPASDNPLTINIFKGLFRCQCGASVHPTGTKNKYAGVYRCNNHLDGRCDVPPLKRKPFDRWMIDNFLGMIDVGNDGESERKIAALQHEVEIVTARIKKATALLLEMDDITELKAQVKGLNQKRTEIQTTIDTLKRKTSLTDKELPQLKDIDLTTKAGRVECQLILSKHLKGLTLGKDSVTVTLQNDTEITIPTNPLPLNDGSPIFEIADKELLDIDAYQL

SEQ ID NO: 3991 - protein, 506 aa, synthetic construct
MRTVITYLRFSSATQGAEGADSTRRQNELFKQWLRKNSDAQVVASFNDEGLSGYKGKHLSGQFGDMLSRIESGEFPEGTILLVEAIDRIGRLEHLETEALMNRIIAHGIEIHTLQDGLIYTRDALSDDLGISIIQRVKSYLAHQESKQKSFRVSQKWEQRAKLALAGEQRLTKMVPGWIDPETFKLNEHAETVRLIFKLLLDGESLHNIARHLQSNGIKSFSRRKDANGFSVHSVRTILRSETTIGTLPASQRNDRPAIPNYYEAAIDASTFNKAQEILGKNRIGRTPASDNPLTINIFKGLFRCQCGASVHPTGTKNKYAGVYRCNNHLDGRCDVPPLKRKPFDKWMIDNFLGMIDVGNDGESERKIAALQHEVEIVTSRIKKATALLLEMDDITELKAQVKELNQKRTELQTTIDTLKRKTSLTDKELPQLKDIDLTTKAGRVECQLILSKHLKGLTLGKDSVTVTLQNDTEITIPTNPLPLNDGSPIFEIADKELLDIDAYQL

SEQ ID NO: 3992 - protein, 559 aa, synthetic construct
MKTKLYSYIRFSSMRQNDGSSYERQIRMAREIAVKYDLELVNDYQDLGVSAFKGANSKTGALSRFLDAIGRSVPVGSWLFIENLDRLSRADIVSAQELFLSIIRRGITIVTGMDNKIYSLDTVTANPMDLMFSILLFIRGNEESQTKRNRTNSSALIKIKAHQENPQNPAVAIEEVGKNMWWADTTSGYVLPHPVFFPIVQEVVELRRNGRSTAEILDHLNATYTPPPAASHKRHSNWSRAMIERLFHTRALIGIKEISVDGVKYELKDYYPRVLDDAEFYHLKKSIGVRACNYGDKEEAKPIPLLSGVGLLKCEHCGSAMVKVKGTNRRPNQYRYSCDAMRSSRIECVHTNWSFRGDQLEKAVLQLLADKIWIAEDKANPVPALKVQVDEISRKIDNLIALSAMTGATKELADQITTLNSERETLYNQIKMAEEEMYSVDSQGWEKLAEFDLEDVYNEERLKVRFKIKQALKRIGCSRIDRNKNLFVLEYIDGKTQRVVIENSRGTRKGRIFIDLKTINDRQILESNGLVLHPCLDMLTDKNWKPEEEIPGPLQEFGI

SEQ ID NO: 3993 - protein, 556 aa, synthetic construct
MSNMKRTGQTALYERLSRDDEMQGESNSITNQKQLLESYAKRNGFVNIYHYTDDGVSGTTFDREGFQKMIKAVEENKVSTVIVKDMSRFGRDYLKVGFYTEILFKEKGVRFIAINNGIDSEKQAESDFTPFLNIMNEWYARDTSRKIQSIFRARMEEGKRVSPSVPYGYYRNPKNKQELLVDKESSKVVKRIYRLVIEGYGVTQIADILTKDKVLIPSAYAEIHYPENNHSSKKRGIEDPYFWTPTTVGYILEKQEYMGHTVLGKTICLDYKTKKRRKAKEDELIIFKNTHEAIIDEETWNNAQRLRKTVRRSPKYGTTSHPFTGLLICSDCGGKLSYREPAEHKEKKYDSDYSFVCQHYRHRKGTCSMHYIKVKTVNEILLKSIKEITDFAKEEKQEFLKVMNRLSDEKKEEKYQGDKEKLEKLSSRNAELTTLITKLYEDHALGKIPVKHFDRLFNTYDMEQQDLEKQIQYFEQEIESYHQRKVDTDKFLKMIEKYTDIEELTVPMINEYIEKVVVHEATGGRKGKNRKQQVDVYFNFIGNCQVPQKEEIEKLA

SEQ ID NO: 3994 - protein, 559 aa, synthetic construct
MKTKLYSYIRFSSMRQSDGSSYERQIRMAREVAAKYDLELVNDYQDLGVSAFKGANSKTGALSRFLDAIGRSVPVGSWLFIENLDRLSRADIVSAQELFLSIIRRGITIVTGMDNKIYSLDTVTANPMDLMFSILLFIRGNEESQTKRNRTNSSALIKIKAHQENPQNPAVAIEEVGKNMWWTDTTSGYVLPHPVFFPIVQEVVELRRNGRSTAEILDHLNATYTPPPAASHKRHSNWSRAMIERLFHTRALIGIKEISVDGVKYELKDYYPRVLDDAEFYHLKKSIGVRACNYGDKEEAKPIPLLSGVNLLKCEHCGSAMVKVKGTNKRPNQYRYSCDAMRSSRIACVHTNWSFRGDQLEKAVLQLLADKIWIAEDKANPVPALKVQIDEISRKIDNLITLSAMTGATKELADQITTLNSERETLYNQIKMAEEEMYSVDSQGWEKLAEFDLEDVYNEDRIKVRFKIKQALKRIGCSRIDKYKNLFVLEYIDGKTQRVVIENSRGPRKGQIFVDLKTINDRQILESNGLVLHPCLDMLTDKDWKPEEEIPGPLQEFGI

SEQ ID NO: 3995 - protein, 608 aa, synthetic construct
MYDILLENAIVYNRVSTQKEAQTTSIEFQEEEGYKVAKELGCKNIRVLTERYTATYVEKRKEYLEMIEAIKNEEVDIIIAKDTDRLNRNEKEWYTIRDLALEHNVKIYFYLDKKFYREEDNLIFGIKATLDAEYSRKLSKNINKAHRKRQLEGNKVTLDSSTFGYIYENGKIVVESEEAKLILYMYDLALQGHGVRTIANILTKEGYTNRNGKRFGTKTVYNILRNPLRTGTMVMNKEHYNFYSKKREKVDQSEWIIRDGMVPQIVSKEIWKKVNELIDGRRSEARGDRKIGKHLGTCLLSNKLFCAYCDSVFYRASRYTKKKGQVFFWTCKKQYEEGRLNSEAIYQERKKVKGLGCDNVRLEEEVIYEFIKAFYKEHFIINADLILQETISVLKQALYNINGKLDINKEIEKIHRQLSELEEKETTLYESMLVYKNVKQDIADRLLKSYEVEREALNNKILELEKQEKNKQSIEQRIINIEQVLKETLIEEASLQTIISYIDKIVVYTDRMDIKFNLAKVLSLDIENIEQTYTIPLGEYAMKYKTENIKHTRELVYSIIKKNPQIAFKNLVEQTGLASTTLSIRIKDLKKEGKIARNRGESAYRILE

SEQ ID NO: 3996 - protein, 509 aa, synthetic construct
MRRAISYIRFSSERQLKGDSVRRQSKLVTDWLDKNPEFYLDSSLSFKDLGKSAFSGKHLKGGLGDFLTAIEKGLVKAGDTLLIESLDRLSRQDIDIASELLRRILRAGVDVVTLSDGEHYTRESLKDPLSLIKSILIMQRAHEESLRKSERVQAAWNRKKELISEGIKVSRRCPAWLRLNDDRRTFTIIPDKVEVVKRAFDLRLQGLSFWAITRTLNDEGHLSLNQYTPKQKGWSDTAVKKLLRNRAVIGCFTPAGREEVQGYYPAIISESLFYRVQQLNTGQYGRASVSSNPLSVNLFRGIIKCSECGATIVLGGYALKRFGMYRCPNRSANRCSAKAISRKQTDATILYMLALCDRFETENTDTIDSLRLQREDLQRKISKMAELAIELDDMTIITEKLRDMKNALSKLNHDIEEETQRIKAITTGSLKDIDRTTKEGMIETQLLIKGVLKEIVIDTAKRRCKVTFHNGRAITLPITENPSEDVTEAIQSLSEVTERGLIAVDEVII

SEQ ID NO: 3997 - protein, 483 aa, synthetic construct
MRTAVYVRVSTEEQAKEGYSIRAQTERLKAYCLSQGWEIVDFYIDDGQSAKDMERTNLKRMIQHIEQGLIECVLVYKLDRLTRSVLDLYKLLEIFDAHGCKFKSATEVYDTTTAMGRMFITIVAALAQWERENLSERVRMGMEQKAREGQWVINMAPFGYELDKKNKSLIINDKEAAIVTRIFNMYLSGKGMKKIATELNAVNIPTKTGKTWSDNKIGYILKNPTYVGTIRYNYRVHNDQYFEVENAVPAIIDRVTFEKVQSVATARKKVHPKAATSEFIFSGTIKCAKCGAPFSGKYGYSKRGEKIHRPRSYYCSKQILGLCTQRNISERFIEHHFLKYLQDIEIDQDQIKNVEPTNEQKDIQQQIMLLEKDLRAIEQRRKKWQYAWVNNMIDDDDFAARMEEENQTEVKIQEELNNIQPVANSMDPVEFKTILKDIRTNWNSLTAIEKKMMLQMLVKKMVVDKISPKPKVDSVEIVEIEFN

SEQ ID NO: 3998 - protein, 517 aa, synthetic construct
MKTIHKLARPQLPEPPKLKVAAYARVSTSSNEQLASLQTQITHYENHIQNNDQWEYVGVYYDEGISGTKVEKRDGLHRLIKDAELGKIDLILTKSISRFSRNTVDCLNLVRKLTDIGVTIFFEKENINTGDMESELLLSILSSLAESESYSHSENMKWANRKRMVKGIFKTVPPYGYQRRGADFYLIPNEAKVIEQIFKWALEGVSAYQVAKRLNEKNIFTRKGSKWQASGINNILHNIVYTGTMIHQRYFNDDQFRKKKNNGELPMYRIDNNHPPIISWEDYERVQELITLRANAKGTSKGSQKYSQRYAFTKRIICDKCGCNYKRVHTAGKGNTKVVKWSCTGHLKNKDGCDALPITDESLKTAYLTMLNKLILGHTIVLEPLINTPVEGKASKQELEKLSIEITKIDEKLEVLASLNASGVVSTKTALEEQGRLQMELNKLQEKQHKIMESVNGTSTQRIQLEQLHQFTKRSEMLTEWDEDLFLRFAERIVVYSRQEVSFELKCGLLLKERLEA

SEQ ID NO: 3999 - protein, 506 aa, synthetic construct
MRTVITYLRFSSATQGAEGADSTRRQNELFKQWLRKNSDAQVVASFSDEGLSGYKGKHLTGQFGDMLARIEAGEFPAGAILLVESIDRIGRLEHLETEALMNRIIAHGIEIHTLQDGLIYTRDALSDDLGISIIQRVKSYLAHQESKQKSFRVSEKWKQRAKLALAGEQHLTRNVPGWIDPDTFKCNEHAETVRLIFKLLLDGESLHNIARHLQSNDIKSFSRRKDANGFSVHSVRTVLRSESVIGTLPASQRNDRPAIPNYYEAAIDASTFNKAQEILDKNRKGRTPASDNPLTINIFKGLFRCQCGASVHPTGTKNKYQGVYRCNSHLDGRCDVPPLKRKPFDRWMIDNFLGMIDVGNDGEAEKEIASLQHEVETVTARIKKATALLLEMDDITELKTQVKELNQKRTELQTTINTMKRKTSLSDKGLPQLKDIDLMTKAGRVECQLILSKHLKGLTLGKDSVIVMLQNDTEITIPTDPLPLNDGTSIFEIAEKNLLNIDTFQL

SEQ ID NO: 4000 - protein, 492 aa, synthetic construct
MDQVKVYSYLRFSDPRQSTGTSIDRQTQYARQWAEKNGLQVDDTLSLRDEGLSAYHQKHIKQGALGTFLEAVKDGLIAEGSFLIVESLDRLSRAEPILAQSQLALIINSGITVVTASDNKEYNREHLRNNPMDLVYSLLVMIRAHEESDIKSKRVKAALKTRLKEWINGTYRGRIAAGSTPQWLSWSNDHWETIEDRAKAYQIAVKLYRQGKTSKSIIHHLKNLGLVMNGNGLPKPNNLATLLRNPALTGVKIVSVDGERFELDGYYPALISNRDRKALFLPRHKKHRKPEDIASVVTGSNLLRCGYCDSAVVGGNSLQRNKRPNGAPQNGHRRLHCCGNNKPKRRKCTTRASCSVVPVENAIIDYCSHSQNLQPSLEKPHTILAEDLTKLMDGVNALDFDAREMAQHLIKETFQKIIIYMNGFTPTKANGPTHTLPPIDLTLIPKHGEPQALHVNRKTGEWAIDDSRTHRPRLVKVFDQAIENSDPTDNKQ

SEQ ID NO: 4001 - protein, 521 aa, synthetic construct
MQIADLYIRVSTDEQADKGYSQRDQEERLRKHCSTLNITIDRIIYEDHSAKTFDRPQWQKYLLSFRRGKVGKDKRLILFTKWDRFSRNTSEAYQMISTLSKLNILPQAIEQPLDLRVPENKLLLAIYLSTPEVENDRRALNVTYGMRRAIKEGRMMGTAPYGYINKCTEDGRKYVAIKEPEASNIVWAFNQVSKGHLPSAKVREQMNKREGRKLTRNSFLDALRNIVYCGNVILRANDDEEEKIIKGKHEALISEELFMKVQKVLRRKSNKDIFLPGGRIINEDRYPLRGLLLCPKCGKNLTGSSAKGRSKHYYYYHCTTDCGFRHNSEIVNNLFEDELTKFEFVPTFEKLLKTILVKNFSIVTNGLEDERKSISEKVSKIEQKIAKARDLYLEDRLDEDDFREVKRKNKVELDELIFKLNALKETKKNNNVEHKLGEALRAVTNISERYKNADSLDKRAIIGLIYPEKLTFNGEYFQTTKINSFAETIFLIKKEIGKQKNRQRSEKTSNVGFVTSTELFP

SEQ ID NO: 4002 - protein, 548 aa, synthetic construct
MKVADLYIRVSTDEQADKGYSQRDQEERLRKHCSSLNITIDKIIYEDHSAKTFERPEWKKYLFSIRKGRGSRQNKFLFFTKWDRFSRNTSEAYQMISNLNKLCITPQAIEQPLDLRVPENKLLLAIYLSTPEVENDRRALNVTYGMRRAIKEGRMMGIAPYGYINRCTQDGRKYVAVKEPEATNMIWAFKQVAKGHLPTAVILKEMNRREGRKLTKNSFMDGLRNIAYCGKLFLKAYNDEEEKIVEGKHEALISEELFMKVQRVLHRKSNKDAFLPAGRIINEERYPLRGLLLCPQCNKTLTASSAKGRSKHYYYYHCTTSCGFRHNSEIVNDLFVEELSKFRFSIGAEKILKTILEQNFSIVSNGLNDERKVLQNKLNAIEGRIDKARDMYLEDKLDEEDFKRIKMKYKVEIEDINFKLNSLKNSGHTDDIEKKMTQALNAIVNISERYNNASTIDKRAIVGLIYPEKLTFDGEYFQTTKINSLADNIALINKELGSKKNRQRSEKTSNVGLVTSTSVSSNTFIDDLIRLSQIKNELHPHILSNKFF

SEQ ID NO: 4003 - protein, 546 aa, synthetic construct
MGNRVRAAAYGRVSTEKEDQANSLNSQRNYFTEYIHQHEGWELTGIYYDEGISGTQTANRKGFNRMIRDAMAGKIDLILTKEVSRFARNTVDTLSYIRKLKAKGVRVIFTIDNIDTMDGDGELRLSIMATLAQDESRKISERVKWGQKRRMEQGVVFGRDLLGYTVKAGRLYVNEEEAEVVRAIFHKYTNEQKGTYVIARELMEEGIQPKRGDTWSNTMILKVLKNEKYAGDLCQKKTITPDFLSHRKKKNEGEEEMVYLKEHHISIIDRELWDRTQRELKRRSLSKNSKSLQGTRYWCSGKVKCGECGGSFVVRSKKRGDGSNYRTWRCYNHANHGKVKKEGEGNRPCCDNTAVSDLALRSCVCYALKQVNFDRETVITEILQRIKRLDQKDIYMEDISFIERKIEEIEGKKKKCVDLVLEGMLDTKELAEQKNWYDGQKEKLEKRLLKAKKEKAAEEERKSCFENYKESVDRILNFHGAEDALFRELIDKIVVYQGQMVCVWIKYVPFGIKMRIHSSGKRDNYNTEILEAAIVEDGPEDILEIL

SEQ ID NO: 4004 - protein, 521 aa, synthetic construct
MNTLERDCIYLRKSRADREAEARGEEETLARHERILLDLAKRRGCHIGAIYREVVSGETISARPVMQRLLQEVESGMWDGVLVVEVERLARGDSIDQGVVARAFQYSDTKIITPAKTYDPNNEFDEEYFEFGLFMSRREYKTIKRRLNAGRLSSVQEGKYCGNKPPYGYERVKLQGKGFSLRPVPAQAQIVRLMYNWYAYGVSGERLGMQKIARKLNEMGIPTLSGKPWSPATVVNILDNPVYTGKIRWNRRKAVNKIEDGAVVKTRPRSNDYIISDGLHEPIISQELYDLAQCYRQQNPPRPIGVMNAVKNPLSGLVHCGKCGHSMVRRPYANRKQEDTLLCPYTSCDNVSSRLSLVEKAVIAGLAELVQSYKVNDTLNDNNGVDIIAAKEKILVEKRAELDNLTAQKTRQYDLLEQGVYTTEIFLERSGATAKQIRDCSAAIERISSELDHDRELLAQKFNFIPKCEHLLSNYWDWDIPTRNSVLKELIERIDYTKDSKNGFKHGDEITFTLDIYPKIQ

SEQ ID NO: 4005 - protein, 534 aa, synthetic construct
MKQQQYNTALYMRLSRDDELEGESASISTQKQILRDYANEQGFLVVDEYVDDGFSGTNFERPSFKRMIEDIEDGKINCVVTKDLSRLGRNYILTGQYTELYFPSKGVRYIAIHDGVDTIREDNDIAPFKNIVNEWQAKETSRKVKNAMKAKFKNGEYIAPVVPIGYKINPAEKNRLVVDEETKWIVEKIFALAAHGYGANKICRTLAAEKVPIPAWWASQKNGYKANIFEGQPEGKKYLWNIVTVSKILQNEIYLGNTVHYQIQKLSYKSKKNVRRPKEDWMRIENTHEPLVDRETWDLVQGHINSRKRSRKDDEPQIFAGLLKCGECGWSLSAANTKNKSRYYRCTQYSAHGKEACSLHFITYNLLYAFVLGRLQYWLMAVKENEDAILERLLQSSKKQRRTENARDEKELKKAQKRRQELNNLFAKMYEDRVKGLLDEENYSMLSVKYRTEQQQLDETIKTVSARLEDAKAETDDAKRWVDLIQKYSAIDELTAPLLNELIEKIVVHQWRKDENGKKVWDIEIYYRFVGKID

SEQ ID NO: 4006 - protein, 540 aa, synthetic construct
MSRQTTQTLITALYPRLSHEDELQGESNSISNQKRILENYAKQNGFGNLKWYTDDGYSGANFQRPGFQSMLADIEAGLVGTVIVKDMSRLGRNYLQVGMYTEMIFPQKNVRFIAINDGVDSAQGDNDFAPLRNIFNEWLVRDTSKKIRAVKRSKGMSGKPVTSKPVYGYLMDEDENFIIDEEAAPVVKQIYSLCLAGNGPTKIARMLTEQQTPTPGTLEYRRTGSTRRYHPGYECKWATNTVAHILENREYTGCLVNFKTEKVSYKVKQSKENPEEKQVIFENHHEPIIDHDTWERVQELRKQRKRPNRYDEVGLFSGILFCADCGSVMYQQRYQTDKRRQDCYICGSYKKRTRDCTAHFIRTDLLTEGVTENLRKVTSYAAKHEARFMKLLTEQTEDGSKRRNAAKKKELEAAEKRIAELSAIFKRLYEDSVTGRISDERFTELSADYEAEQKELKEKAAVLQGELSRTLEATANAEKFMKVVRKYTSFEELTPTLLREFVEKIVIHESEALDGKRRGKLRRQEIEIYYSFVGKVELPD

SEQ ID NO: 4007 - protein, 452 aa, synthetic construct
MLRVALYIRVSTEEQALNGDSIRTQIEALEQYSKENDFNIVGKYIDEGCSATNLKRPNLQRLLRDVEKDKVDLVLMTKIDRLSRGVKNYYKIMETLEKHKCDWKTILENYDSSTAAGRLHINIMLSVAENEAAQTSERIKFVFQDKLRRKEVISGTIPIGYKIENKHLVIDKEKIYIVKAIFDEYEKSGSVRTLIETINNLHGELYSYNKIKNILRNELYIGIYNKRGFYVEDYCEPIISKKQFKQIQRILEKNKKTTPNKNIHYHIFSGLLKCKECGYTLKGNSSNVGEKLYLSYRCSTFYLNKNCVHNVTHNEKHIENYLLTNLKPQLHKHMVKLEAQNEKIRRNKKSNKKDEKKKIMKKLDKIKDLYLEDLIDKETYRKDYEKLQSQLDNITEEQESQIIDTSHIKKFLDIDINEMYSDLSRVERRRFWLSIIDYIEIDNNKNITINFI

SEQ ID NO: 4008 - protein, 498 aa, synthetic construct
MKRIAIYSRKSVYVENSESIETQINMCKAYFTRQFKDCEFEIFEDEGFSGKNTDRPAFKRLMKLCSIKSFDAVAVYKIDRLARNIVDFMNIYNELEKLEIKLISITEGFDPTTPIGKMMMVMLAGFADMERMNIAQRVKDNMISLAKKGCWTGGAINRGYTAERKADGKKYLKLENEEFIKFTFENFLNGYSMHTLSKMQKEVYGSYGLKGAISIRNMLRSPVYVKSSKDVSDYLKNKGFEVVGKEDNKHGYLTYGLVSKEPFAIVSKHEAVIDPIVWLKVNNKLDNIKSTALTKESKCYWLTGVLKCPYCKANYVLANTKGKTYYTCSTRLKRGANKPNTCQNRTYVNAVEIETLIEDLIKKLYSKKYFDSFFCKSEKVYEDNTLELEKKLKKNEKSIMNLVEKLALIDNSNSATKFITNKIEELSKEISDIKIKIEENKFNKLEIELNKSTPDIIYNNISNFSKCKTLEEKRLRLKLIFKSVYYDPKTKAIEVEFI

SEQ ID NO: 4009 - protein, 545 aa, synthetic construct
MIAAIYSRKSKFTEKGESVENQIEMCKDYLKRNFTSIEDIKIYEDEGFSGKDTNRPEFKKMMEDAKNKKFSILICYRLDRISRNVADFSNTIEELQKYSIDFISLKEQFDTSSPMGRAMMNIAAVFAQLERETIAERIKDNMLELAKTGRWLGGTAPLGYKSEVIEYWNEDGKNKKMYKLATAENEIDIVKLIYKLYFKKRGFSSVATHLCKNKYKGKNGGEFSRETVRQIVINPVYCTADNKIFKWFKSKGATVYGTPDGIHGLMVYNKREGGKKEKPISEWVIAIGKHAGIISSDIWLKCQNIIEENKSKISPRSGTGEKFLLSGMIICGECGSGMSSWSHFNKKTNFMERYYRCNLRNRASNRCSNKMLNAYKAEEYISDYLKELDIDTLKEKYLKNKKSMATYDSSKQELAKLKNVLEDNNKLIKGLIRKLALLDDDIEIVTMLKNEIENIKKENNEINNNINKIKSSLEESDRENKFLKELEQSLLNFKKFYDFVDTSEKRALIKSLISTLVWYSKDEILELNPIGIKPNISQGVIKRRT

SEQ ID NO: 4010 - protein, 412 aa, synthetic construct
MSPDFKTITPRRTPTSRIRVAAYCRVSTMSETQAGSLAAQVSAYSKLICANPAWQFAGIYTDQGISGTTRRRPGFADMMDHARAGDFQILLVKSISRLARNTVDLLSCVRELSALGVAVRFERENIDTSSAEGELMLTLLASFAQEESRSLSQNVKWAIRKRYKSGVTNSHRIYGYTWVGGSLHINDDEAQVVRRVFDEYLAGVSPEAIADRLNAEGLRARGGGNFLGSVIRTWLENPRYVGNEMLQATYTDGPGGKLVVNDGALPKYWVQGANPPIIDPDTWKRVQDELARRRQSGGRALTPSGGTCALTHRVVCSQCGRRFHRRTKTRKHVSYKYWWCETATRGQGNPCRAPQIREAQLKSAITAHLGLGEWDDQQVIERLEQVTVYPSGKVTVMKRGAHAAEPVMAGKE

SEQ ID NO: 4011 - protein, 522 aa, synthetic construct
MATVTTIPARPAKTFTPTTVRARRKVAAYARVSTDLEEQQSSYQAQIDYYTNYIQGRADWEFVGMYADEGISGTSTKHRQGFQTMITDALAGRIDLIVTKSVSRFARNTVDSLTSVRSLKEAGVEVYFEKENIWTLDSKGELLITIMSSLAQEESRSISENVTWGHRRRFAEGKVMVPYASLLGYKKGDDGGLAVDEDQARIVRRIYREYLAGHSPKTIAAHLTTDGIPTPLGKKTWSVSTINSILRNEKYKGDALLQKTFTVDFLTKTTKRNEGEIPQYYVTGNHEAIIAPTVWDQVQSELARRSGRSRSFSHPFASKIECGCCGGWFGPKTWHAGSRYERRIWRCNRKYDPAIGQPCSTKHVTEDELIAAFEQATHQLAPPPSPEVLEAALDQLGNPHALEAKLAQAITARDVVVDEINALIRSAANTDFDPVAFEADHARLEGDYQHHLNAVEAIEKQLHELEAKRAAITAFHKYRSENPAISYAPEAWRALVDHATIHPDGTITITFNDGTTNRKGSN

SEQ ID NO: 4012 - protein, 430 aa, synthetic construct
MAGNTDMIITKYISRFASNTLDCLKYIRLLKEKNIPVYFEKENINSLDSKGEILLTIMASLAQQESESLSKNVKLGLQFRYQNGEVQVNHNRFMGYTKNDEGHLIIEPTEAEIIKRIYLEYLQGESLKQIGEILESDGTLTVAGKAKWRPETIKKILKNEKYIGDALLQKTYTVDVLTKKRVKNNGIVPQYYVENNHEAIIPRELYMQVQEEMLRKTNLHSGENRKKRVYSSKYALSSIVYCPKCGDIYRRIAWNNRGKRSFVWRCVTRVEHGPERCDAPTVQEMELQAAVIKAINMALGGKDDMLIALEQNIASVLALEDEGSMERINAKLEELQKELLKRANAKKDYNDLADEIDRLRELKQNTMAENAEREGLKQRIAEMQEFLAEQMEQIEEYDESLVRRMVEKITVYEKKFSVEFKSGTSVDVER

SEQ ID NO: 4013 - protein, 521 aa, synthetic construct
MNKSVTVIPARRRVGNNVKKEDKQKLRVAAYCRVSTDSDEQATSYEAQIEHYTNFIQKNEEWEFAKIFADDGISGTNTKKREEFNRMIEECMAGNIDMIITKSISRFARNTLDCLKYIRLLKEKNIPVYFEKENINSLDSKGEILLTIMASLAQQESESLSKNVKLGLQFRYQNGEVQVNHNRFMGYTKDEEGHLIIEPTEAEIIKRIYLEYLQGSSLKQIGEGLESDGILTAAGKAKWRPETIKKILKNEKYIGDALLQKTYTVDVLTKKRVKNNGIVPQYYVENNHEAIIPRELYMQVQEEMVRRGNIRSGKGRKKRVYSSKYALSSIVYCGECGDIYRRVHWNNRGCKSIVWRCVSRLEGKGATCNSPTIKEEVLQQIVVDAINQTLSSKDDFLSTLQDNIDRVISEADHGATADMDAKLKDLQNELLRLANGKADYEGVAEEIYRVRELKQKTLIANAEREEKRQRIDEMAQFLKEQPYELEEYDEQLVRTLVEKVTIHEEKISIEFKSGVEVNVEM

SEQ ID NO: 4014 - protein, 519 aa, synthetic construct
MKRITKIEDNKVLSVKKKIRVAAYCRVSTASDEQLISLEAQKVHYENYIKANDEWEYAGLYYDEGITGTKKEKRRGLLSMIADCERGKIDLVITKSISRFCRNTTDCLELVRKLLELNVYINFEKENLNTGSMESELMLSILSGLAESESVSISENEKWSIKKRFQNGTFIISYPPYGYANINGEMVIVPEQAEVVRKIFVDTLAGKSTHAIAKELSECGVISKKGGKWTLGTINAIIRNEKYTGDVIFQKTYTDSSFNRHINYGEHDQYLCTNHHEAILSHEVFNKANEVMSQRGKEKGNGENTQRYQNRYGFSGKIRCGECGGIFKRRKHYKPSGNYVAWCCTGHIENKDACSMKYITDDSLKVTFLTMMNKLIFAHQMVLRPLLRSLQGLDDKDRLLEIQEYESKLEKNMEQRQVLTSLMASGLLEPALFNSENNTLIQEEEMLKAEKNKLMYSVSGDRTRFDALEKLIKFVSGSEMITDYDDEVFIAHVDRIKVVSREEIIFILKCGLELKERMA

SEQ ID NO: 4015 - protein, 549 aa, synthetic construct
MKNKLKSSLNIESPKIAIYMRVSTSKQADNQSLDTQEKTINSYIASRHDWINPICYKYVESHSASLKPKASNNLKESSFDSLKRPKLRELFLDATIGKFDYVLCASHDRLTRNTNEGIILKHLFSRLNITLIYCRPGETISSENEALNKFFENLLVNIAALESNITGGRVALANKHKIQNNFWAGGPPPFGYNLVSQPNNKRNSFLEINFEEARIVKKIFELYNLGCSYNEILTRLNRDFTLPPKRLWTHNTLKEILRNPVYTGFLVWNKRGGARKPNRHSSNDFVKSNLVEKNIIIPENEFLETQKLRNILSRDSKFLSTDFLLRDFLYCNKCNKKLLAKNYGNNKRFYYCSSHNSMEINKKCRSIKASKIESTILSNINDLINSSLQSEVQIEKFYDKYIENFNAELLDNKKSLEITINQLKSSTDLLELCVNEINISKDNLTVDYEDLSSSSTEFSFINALLEFQVVTQTEIKSLKARKEYLTYKINSSPKSFDDFKSNLNKSFKLFKYDEEKQKLISSPRSFRLFLFKVVKKIILSDHEITIIFK

SEQ ID NO: 4016 - protein, 537 aa, synthetic construct
MKKAAIYTRKSKFTEKGDSIESQIKLCSKYLDNINIKDYCIYTDEGFSGKNTDRPEFQKMLSDAKAKKFDVIICYKFDRISRNVSDFSNLINKLNELNISFISVVEQFDTNSAIGRAMMYLCTVFSQLERETISQRITDNMYSLATKGYWLGGETPTGFRSEKKFFNSNNKQKMYSSLVPIKEELDLVKLIFNKYLEFNSISKIEKYLLSNNIKTKRNKDWSKASISLILRNPAYVKADEETFKYIESTGSKVYGNPDGKHGLLIYKKNKGRKGAKHDISEWIYAVSEHEGIIDSDIWVAIQKQIKKNAILAPALGTSNIALLTGLIRCAKCNSPMRVAYGKRNPKTNKKNYYYVCTLKTKSGKTRCDSKNLPGLDLDNLILDKLKEMSLDKNTLLKELNKYKDTIESNFHNDVLKNIQNNISKNNSMIDNLLNNVALSTDSEVTAILLEKISKLKDENKLLTQKIDDLKSELEAQETLLNDCNSLITKLKYFSKFIDNSSIEEQKQLVSSVIEKVIADGDTGSIEIKFRPLLDFKI

SEQ ID NO: 4017 - protein, 522 aa, synthetic construct
MYAIYLRKSRADQEAETRGEGETLARHEQELTKLSIKMKLPIGAVYKEIVSGETISARPWMQQLLLEVMQGKWEGVLVMEVERLARGDTKDQGTVAEAFKFSHTKIITPTKVFDPDNEYDEEYFEFNLFMSRREYKTINRRIQRGRVSAFEEGWYIAGTAPYGYEKVKKKENKGYVLEVVPDEAKIVQLIYELYTTSQEDGTSFGSYQICERLNLMQVPSRTGRKWSASSIMDILRNPVYAGYQRWGWRKPEKQLIDGRIIESRPKNDDCKKVRGKFKPIISEELYEQAQLIRKCKPVPKTGITMLQNPLSGLIYCAKCGTMMTRAGSNTKTNYPVLRCPNSRCDNVSAPLLLVEQKLLTSLSDWLRKYELDWPKEEREEYASVISFKEAAYKSVRSAYGQTEKQLSNTYDLLEQGIYDIETFQERRRVLEEKRCTLRVELDELKRDYEDAIESDSAQRDYIPKVKNVVSVYWTINDVSVRNEMLKSVLIKADYLKTERNRKGQGATANFTLNIYPKTPKEP

SEQ ID NO: 4018 - protein, 559 aa, synthetic construct
MKTKLYSYIRFSSMRQNDGSSYERQIRMAREVAAKYDLELVNDYQDLGVSAFKGANSKTGALSRFLDAIGRSVPVGSWLFIENLDRLSRADIVSAQELFLSIIRRGITIVTGMDNKIYSLDTVTANPMDLMFSILLFIRGNEESQTKRNRTNSSALIKIKAHQENPQNPAVAIEEVGKNMWWTDTTSGYVLPHPTYFPVVQEIVELRKNGRSTAEILDHLNETYAPPPAVSNKKHSKWSRAMVERLFHTRALIGIKEVSVDGVNYELKDYYPRVIDDATFYHLKKNIGARAWNFGDKEEAKPIPLLSGIGLLKCDHCGCAMVKVKGTNKRSDQYRYTCDATRSRRLDCEHPNWSFRGDQLEKAVLQLLADKIWIAEDKANPVPALKVQVDEISRKIDNLIALSAMTGATKELADQITTLNSERETLYNQIKMAEEEMYSVDSQGWEKLAEFDLEDVYNEERLKVRFKIKQALKRIGCSRIDRNKNLFVLEYIDGKTQRVVIENSRGTRKGRIFIDLKTINDRQILESNGLVLHPCLDMLTDKNWKPEEEIPGPLQEFGI

SEQ ID NO: 4019 - protein, 506 aa, synthetic construct
MRTVITYLRFSSATQGAEGADSTRRQNELFKQWLRKNSDAQVVASFSDEGLSGYKGKHLTGQFGDMLARIESGEFSEGTVLLVEAIDRIGRLEHLETEALMNRIIAHGIEIHTLQDGLIYTRDALSDDLGISIIQRVKSYVAHQESKQKSFRVSQKWKQRAKLALAGEQRLTRNVPGWIDPDTFKCNEHAETVRLIFKLLLDGESLHNIARHLQSNDIKSFSRRKDANGFSVHSVRTILRSETTIGTLPASQRNDRPAIPNYYEAAIDASTFNKAQEILDKNRKGRTPASDNPLTINIFKGLFRCQCGASVHPTGTKNKYAGVYRCNSHLDGRCGVPPLKRKPFDKWMIDNFLGMIDVGNDGEAEKEIASLQHEVEIVTARIKKATALLLEMDDIDELKIQLKELNQKRTELQTTIDNMRRKASLTDKELPQLKDIDLTTKAGRVECQLILSKHLKGLTLGKDSVTVTLQNDTEITIPTNPLPLNDGSPIFEIADKELLDIDAYQL

SEQ ID NO: 4020 - protein, 508 aa, synthetic construct
MKKAIAYMRFSSPGQMSGDSLNRQRRLIAEWLKVNSDYYLDTITYEDLGLSAFKGKHAQSGAFSEFLDAIEHGYILPGTTLLVESLDRLSREKVGEAIERLKLILNHGIDVITLCDNTVYNIDSLNEPYSLIKAILIAQRANEESEIKSSRVKLSWKKKRQDALESGTIMTASCPRWLSLDDKRTAFIPDPDRVKTIELIFKLRMERRSLNAIAKYLNDHAVKNFSGKESAWGPSVIEKLLANKALIGICVPSYRARGKGISEIAGYYPRVISDDLFYAVQEIRLAPFGISNSSKNPMLINLLRTVMKCEACGNTMIVHAVSGSLHGYYVCPMRRLHRCDRPSIKRDLVDYNIINELLFNCSKIQPVENKKDANETLELKIIELQMKINNLIAALSVAPEVTAIAEKIRVLDKELRRASVSLKTLKSKAVSSLGDFHAIDLTSKNGRELCRTLAYKTFEKIIINTDNKTCDIYFMNGIVFKHYPLMKTISAQQAISTLKYMVDGEVYF

SEQ ID NO: 4021 - protein, 644 aa, synthetic construct
MLRPICYERVSSIQQIEGGGGLDDQRSALEGYLDKNAGLFENDRLFIQDRGVSAFKNSNISSESQLGIFLQDVQNRKYGEGDALIVMSLDRISRRSSWAEDTIRFIVNSGIEVHDISASTVLRKDDPHSKLIMELIQMRSHNESLMKSVRAKAAWDRKIIEAVQNGTVISNKMPMWLKNVDNRYQVIQEKADLIIRCFEWYRDGFSTGDIVKRIADPKWQMVTVSRLVRDRRLLGEHKRYNDEVIHNVYPKVIDDDLFLTANRMMDRVMLEKNKPAEDLLLESDVVQEIFQLYESGLGSGAIVKRLPKGWSTVNVLRVLRDKNVVTQKIIDNLTFERVNQKLSMNGVANRIRKDITIAQDDYITNLFPKILKCGYCGGNVAIHYNHVRTKYVICRNREERKICDAKSIQYIRIEKNILKCVKNVDFQKLMIESTGSETSVLDGLHEELSSLRREENSYSDKINERKLAGKRVGIHLNDGLTEVQDRIEEIEKEIINAQTVREIPKFDFDMDEVLDPMNIELRAKVRKQLRLVLKAVKYWMFDKRIFIQLEYFNDVLSHMLVIDNKRGGGDVIYEMSIEERKGERIYTVHENGHAVFIASVTIGTDIWSLALSRTRTIDSIGNYLSLLAREGFEIFVNEDQIDWF

SEQ ID NO: 4022 - protein, 508 aa, synthetic construct
MKKAIAYMRFSSPGQMSGDSLNRQRRLIAEWLKVNSDYYLDTITYEDLGLSAFKGKHAQSGAFSEFLDAIEHGYILPGTTLLVESLDRLSREKVGEAIERLKLILNHGIDVITLCDNTVYNIDSLNEPYSLIKAILIAQRANEESEIKSSRVKLSWKKKRQDAMESGTIMTASCPRWLSLDDKRTAFVPDPDRVKTIELIFKLRMERRSLNAIAKYLNDHAVKNFSGKESAWGPSVIEKLLANKALIGICVPSYRARGKGISEIAGYYPRVISDDLFYAVQEIRLAPFGISNSSKNPMLINLLRTVMKCEACGNTMIVHAVSGSLQGYYVCPMRRLHRCDRPSIKRDLVDYNIINELLFNCSKIQPVENKKDANETLELKIIELQMKINNLIVALSVAPEVTAIAEKIRLLDKELRRASVSLKTLKSKGVNSFSDFYAIDLTSKNGRELCRTLAYKTFEKIIINTDNKTCDIYFMNGIVFKHYPLMKVISAQQAISALKYMVDGEIYF

SEQ ID NO: 4023 - protein, 506 aa, synthetic construct
MRSVITYLRYSSAIQGAEGADSTRRQNDLFKQWLKKNSDAQVVASFSDEGLSGYKGKHLTGQFGDMLARIESGEFPEGTILLVESIDRIGRLEHLETEALMNRILGNGIEIHTLQDGLIYTKDALADDLGISIIQRVKAYIAHQESKQKSFRVSQKWEQRAKLALAGEQRLTKMVPGWIDPDTFKLNEHAETVRLIFKLLLDGESLHNIARHLQSNGIKSFSRRKDANGFSVHSVRTILRSETTIGTLPASQRNDRPAIPNYYEAAIDAATFNKAQEVLDKNRKGRTPASDNPLTINIFKGLFRCQCGASVHPTGTKNKYAGVYRCNNHLDGRCDVPPLKRKPFDKWVLENFLGMIDVGNDGESERKIAALQHEVEIVTARIKKATALLLEMDDIDELKIQLKELNQKRTELQTTIDSMRRKASLTDKELPQLKDIDLTTKAGRVECQLILSKHLKGLTLGKDSVTVTLQNDTEITIPTNPLPLNDGSPIFEIADKELLDIDAYQL

SEQ ID NO: 4024 - protein, 508 aa, synthetic construct
MKKAIAYMRFSSPGQMSGDSLNRQRRLIAEWLKVNSDYYLDTITYEDLGLSAFKGKHAQSGAFSEFLDAIEHGYILPGTTLLVESLDRLSREKVGEAIERLKLILNHGIDVITLCDNTVYNIDSLNEPYSLIKAILIAQRANEESEIKSSRVKLSWKKKRQDALESGTIMTASCPRWLSLDDKRTAFVPDPDRVKTIELIFKLRMERRSLNAIAKYLNDHAVKNFSGKESAWGPSVIEKLLANKALIGICVPSYRARGKGISEIAGYYPRVISDDLFYAVQEIRLAPFGISNSSKNPMLINLLRTVMKCEACGNTMIVHAVSGSLHGYYVCPMRRLHRCDRPSIKRDLVDYNIINELLFNCSKIQPVENKKDANETLELKIIELQMKINNLIVALSVAPEVTAIAEKIRLLDKELRRASVSLKTLKSKGVNSFSDFYAIDLTSKNGRELCRTHAYKTFEKIIINTDNKTCDIYFMNGIVFKHYPLMKVISAQQAISALKYMVDGEIYF

SEQ ID NO: 4025 - protein, 547 aa, synthetic construct
MKLLVPYIRWSTKEQDSGDSLRRQTNLIDAFYAKHKDDYYLLPAHRYVDKGKSGFHQQHKAQGSDFRRMFENVMSGAIPEGSLIVVENFDRFSRADIDTAIDDVRQILRKGVSILTLGDGELYDKSALTDPVKLIKHIIIAERAHQESLVKQKRIAQVWNHKTQLARELKKPMGKQAPGWLELSEDGSHYIVDEDKASLVNIIYDKRLSGMSMFAICKWLNEQGYPTINQRKVRISKTKKPDGNWSALSVKHILTSRSVLGYLPAKISTEDRKTVLREEIESFYPQIVTDSKFYAVQQLLEETGKGKTSSGEHWLYVNILKGLIRCKCGLVMTPTGIRKPVYQGTYRCNGNKESRCSYGTVSRKLLDTQLCSRLFSKLSQLHDEATDTAKLDELQRRLNTVDSELEKLTETLIQLPNITQIQEALRVKQGEKDELIVQLSREKARVKSVSSLDLSGLDMESVEGRTEAQIIIKRLVKEIVVSGNEKLVDIYLHNGNMIRGFPLDGKDDHTLTLEEATDEMQSLDDMLIFGEPVTRIYPAGDMEEVDA

SEQ ID NO: 4026 - protein, 507 aa, synthetic construct
MKRVISYIRFSSERQAKGDSLRRQSKMVTDWLKAHPEYYLDQDLSFRDLGVSGFTGKHLKGGLGDFLTAIEKGLVKAGDTLLIESLDRLSRQAVDRASELLRNILRSGVDIVTLSDGEHYTSESLKDPLALIKSILIMQRAHEESLRKSERIQAAWDAKKEAAKAGIKVSKRCPAWLRLNDDRKSFSVIPEKVETVKRCFQLRLEGKSIWEIVRTLNAEGHRSMNQYKPGKFGQTSVQDLLKNRSVIGYFTPKGCEEISGYYPAIIDETTFYKVQQLSHSRYGKRSVSDKPLSVNLFKGVIRCSECGHALIITGFSDTRNGIYRCPLRNENRCNAKGLSRKQTDGTLLALLSRLDRFDSDMTNVIDALKLHREHISNNIEKLVQLSLEIEDLSAITIKLKQLKGELSQVDADIEKETQRLKSIDVGCLSDCDLSTKAGRIEAQLIIKSAVKEVVLNTAKRRCKVTFHNGRAITLPITENPSEDVTEAIQSLSEVTERGLIDVDVVEI

SEQ ID NO: 4027 - protein, 506 aa, synthetic construct
MRHVITYLRYSSAIQGAEGADSTRRQNELFKQWLRKNSDAQVVASFSDEGLSGYKGKHLTGQFGDMLARIEAGEFPAGTILLVESIDRIGRLEHLETEALMNRILGNGIEIHTLQDGLIYTRDALSDDLGISIIQRVKAYIAHQESKQKSFRVSQKWEQRAKLALAGEQRLTKMVPGWIDPDTFKCNEHAETVRLIFKLLLDGESLHNIARHLQANNISSFSRRKDANGFSVHSVRTILRSETTRGTLPASQRNDRPAIPNYYEAAIDAATFNKAQEILDKNRKGRTPASDNPLTINIFKGLFRCQCGASVHPTGTKNKYAGVYRCNNHLDGRCDVPPLKRKPFDRWMIDNFLGMIDVGNDGESERKIAALQHEVEIVTARIKKATALLLEMDDIDELKIQLKELNQKRTELQTTIDSMRRKTSLSDKGLPQLKDIDLMTKAGRVECQLILSKHLKGLTLGKDSVTVTLQNDTEITIPTNPLPLNDGTSIFEIADKELLDIDAYQL

SEQ ID NO: 4028 - protein, 547 aa, synthetic construct
MKLLVPYIRWSTKEQDSGDSLRRQTNLIDAFYAKHKDDYYLLPAHRYVDKGKSGFHQQHKAQGSDFRRMFENVMSGVIPEGSLIVVENFDRFSRADIDTAIDDVRQILRKGVSILTLGDGELYDKSALTDPVKLIKHIIIAERAHQESLVKQKRIAQVWNHKTQLARELKKPMGKQAPGWLELSEDGSHYIVDEDKASLVNIIYDKRLSGMSMFAICKWLNEQGYPTINQRKVRISKTKKPDGNWSALSVKHILTSRSVLGYLPAKISTEDRKTVLREEIESFYPQIVTDSKFYAVQQLLEETGKGKTSSGEHWLYVNILKGLIRCKCGLVMTPTGIRKPVYQGTYRCNGNKESRCNYGTVSRKLLDTQLCSRLFSKLSQLHDEATDTAKLDELQRRLNTVDSELEKLTETLIQLPNITQIQEALRVKQEEKDELIVQLSREKARVKSVSSLDLSGLDMESVEGRTEAQIIIKRLVKEIVVSGNEKLVDIYLHNGNMIRGFPLDGKDDHTLTLEEATDEMQSLDDMLIFGEPVTRIYPAGDMEEVDA

SEQ ID NO: 4029 - protein, 507 aa, synthetic construct
MKRVISYIRFSSERQAKGDSLRRQSKMVTDWLKAHPEYYLDQDLSFRDLGVSGFTGKHLKGGLGDFLTAIEKGLVKAGDTLLIESLDRLSRQAVDRASELLRNILRSGVDVVTLSDGEHYTSESLKDPLALIKSILIMQRAHEESLRKSERIQAAWNRKKELISEGIKISKRCPAWLKLNDDRKSFSVIPEKVETVKRCFQLRLEGKSIWEIVRTLNDEGHQSMSQYKPGKFGQTSVQDLLKNRSVIGYFTPKGCEEISGYFPPIIPETDFYKVQQLSYSRYGRKPASAKPLSVNLFKGVIRCSECGHALIITGFSDTRNGIYRCPLRNENRCSAKGLSRKQTDGTLLALLSRLDRFDSDTTNTVDTLKLHREHISSNIEKLVQLSLEIEDLSAITSKLKQLKGELSQVDADIEKETQRLKSIDVGCLSDCDLTTKAGRIEAQLIIKSAVKEVVLNTAKRRCKVTFHNGKVIDLPITENPSEDVTEAIQSLSEVTEKGLIDVDVVEI

SEQ ID NO: 4030 - protein, 508 aa, synthetic construct
MKKAIAYMRFSSPGQMSGDSLNRQRRLIAEWLKVNSDYYLDAITYEDLGLSAFKGKHAQSGAFSEFLDAIEHGYILPGTTLLVESLDRLSREKVGEAIERLKLILNHGIDVITLCDNTVYNIGSLNEPYSLIKAILIAQRANEESEIKSSRVKLSWKKKRQDALESGTIMTASCPRWLSLDDKRTAFVPDPDRVKTIELIFKLRMERRSLNAIAKYLNDHAVKNFSGKESAWGPSVIEKLLANKALIGICVPSYRARGKGISEIAGYYPRVISDDLFYAVQEIRLAPFGISNSSKNPMLINLLRTVMKCEACGNTMIVHAVSGSLHGYYVCPMRRLHRCDRPSIKRDLVDYNIINELLFNCSKIQPVENKKDANETLELKIIELQMKINNLIVALSVAPEVTAIAEKIRLLDKELRRASVSLKTLKSKGVNSFSDFYAIDLTSKNGRELCRTLAYKTFEKIIINTDNKTCDIYFMNGIVFKHYPLMKVISAQQAISALKYMVDGEIYF

SEQ ID NO: 4031 - protein, 508 aa, synthetic construct
MKKAIAYMRFSSPGQMSGDSLNRQRRLIAEWLKVNSDYYLDTITYEDLGLSAFKGKHAQSGAFSEFLDAIEHGYILPGTTLLVESLDRLSREKVGEAIERLKLILNHGIDVITLCDNTVYNIDSLNDPYSLIKAILIAQRANEESEIKSSRVKLSWKKKRQDALESGTIMTASCPRWLSLDDKRTAFIPDPDRVKTIELIFKLRMERRSLNAIAKYLNDHAVKNFSGKESAWGPSVIEKLLANKALIGICVPSYRARGKGISEIAGYYPRVISDDLFYAVQEIRLAPFGISNSSKNPMLINLLRTVMKCEACGNTMIVHAVSGSLHGYYVCPMRRLHRCGRPSIKRDLVDYNIINELLFNCSKIQPVENKKDANETLELKIIELHMKINNLIAALSVAPEVTAIAEKIRVLDKELRRASVSLKTLKCKAVSSLGDFHAIDLTSKNGRELCRTLAYKTFEKIIINTDNKTCDIYFMNGIVFKHYPLMKTISAQQAISTLKYMVDGEVYF

SEQ ID NO: 4032 - protein, 508 aa, synthetic construct
MKKAIAYMRFSSPGQMSGDSLNRQRRLIAEWLKVNSDYYLDTITYEDLGLSAFKGKHAQSGAFSEFLDAIEHGYILPGTTLLVESLDRLSREKVGEAIERLKLILNHGIDVITLCDNTVYNIDSLNDPYSLIKAILIAQRANEESEIKSSRVKLSWKKKRQDALESGTIMTASCPRWLSLDDKRTAFVPDPGRVKTIELIFKLRMERRSLNAIAKYLNDHAVKNFSGKESAWGPSVIEKLLANKALIGICVPSYRARGKGISEIAGYYPRVISDDLFYAVQEIRLAPFGISNSSKNPMLINLLRTVMKCEACGNTMIVHAVSGSLHGYYVCPMRRLHRCDRPSIKRDLVDYNIINELLFNCSKIQPVENKKDANETLELKIIELQMKINNLIAALSVAPEVTAIAEKIRVLDKELRRASVSLKTLKSKAVSSLGDFHAIDLTSKNGRELCRTLAYKTFEKIIINTDNKTCDIYFMNGIVFKHYPLMKTISAQQAISTLKYMVDGEVYF

SEQ ID NO: 4033 - protein, 450 aa, synthetic construct
MESGYIEAGSVLLVESLDRVSRQDIDTAGEQLRKILRSGVEVVTLVDNEWYTKESLKDSLSMIKAMLVMERAHEESAMKSTRLRSMWAAKRERAANGEIMSKRCAAWLKVSDDRSHFEFIPENVKAVQRVFQLRLEGLSHVKIAKQMNDEGFSTLNQFKSVTGGWSQSSVTELLSNRSVIGFKVPSKSMAVKGVSEIPNYYPSIITDEQFYAVQQLKQGSGRKPSSDLPLLTNLFKGVLRCSECGFIVVVAGVSAKRSGIYKCSMKSEGRCNSVGFSRLQTDRALVQGLLYNTNRLSLNRDNGSAIGTLQSELEQLQKQRERLIKLAMLADDTESMAKDLKALNSQIKDAEKAVSEVHQREQSSQLETISHLDLTVKKDRIEAQIIIKRIVKEIRLNTAQKKCDVFLHNGLKLLNFPLDRVVDGAQWLEVLPLIDGDEFDFAEFTAKPRH

SEQ ID NO: 4034 - protein, 507 aa, synthetic construct
MKRVISYIRFSSERQAKGDSLRRQSKMVNDWLKAHPEYYLDQDLSFRDLGVSGFTGKHLKGGLGDFLTAIEKGLVKAGDTLLIESLDRLSRQDVDRASELLRNILRSGVDVVTLSDGEHYTKESLKDPLSLIKSILIMQRAHEESLRKSERIQAAWDAKKEAAKAGIKVSKRCPAWLKLNDDRKSFSVIPDKVETVKRCFQLRLEGKSIWEIVRTLNAEGRQTLNQHKAGSFGQTSVQDLLKNRSVIGYFTPKGCEEISGYYPAIIDETTFYKVQQLSYARHGRKPASAKPLSVNLFKGVIRCSECGHALIITGFSDTRNGIYRCPLRNENRCSAKGLSRKQTDGTLLTLLSRLDRFDSDTTNTIDTLKLHREHISSNIEKLVQLSLEIEDLSAITIKLKQLKGELSQVDADIEKETQRLKSIDVGCLSDCDLTTKAGRIEAQLIIKSAVKEVVLNTAKRRCKVTFHNSKSITLPITENPSEDVTEAIQSLSEVTERGLIDVDVVEI

SEQ ID NO: 4035 - protein, 644 aa, synthetic construct
MLRPICYERVSSIQQIEGGGGLDDQRSALEGYLDKNAGLFENDRLFIQDRGVSAFKNSNISSESQLGIFLQDVQNRKYGEGDALIVMSLDRISRRSSWAEDTIRFIVNSGIEVHDISASTVLRKDDPHSKLIMELIQMRSHNESLMKSVRAKAAWDRKIIEAVQNGTVISNKMPMWLKNVDNRYQVIQEKADLIIRCFEWYRDGFSTGEIVKRIADPKWQMVTVSRLVRDRRLLGEHKCYNDEVIHNVYPKVIDDDLFLTANRMMDRVMLEKNKPAEDLLLESDVVQEIFQLYESGLGSGAIVKRLPKGWSTVNVLRVLRDKNVVTQKIIDNLTFERVNQKLSMNGVANRIRKDITIAQDDYITNLFPKILKCGYCGGNVAIHYNHVRTKYVICRNREERKICDAKSIQYIRIEKNILKCVKNVDFQKLMIESTGSETSVLDGLHEELSSLRREENSYSDKINERKLAGKRVGIHLNDGLTEVQDRIEEIEKEIINAQTVREIPKFDFDMDEVLDPMNIELRAKVRKQLRLVLKAVKYWMFDKRIFIQLEYFNDVLSHMLVIDNKRGGGDVIYEMSIEERKGERIYTVHENGHAVFIASVTIGTDIWSLALSRTRTIDSIGNYLSLLAREGFEIFVNEDQIDWF

SEQ ID NO: 4036 - protein, 552 aa, synthetic construct
MSNMKRTGQTALYERLSRDDEMQGESNSITNQKQLLESYAKRNGFINIYHYTDDGVSGTTFDREGFQKMIKAVEENKVSTVIVKDMSRFGRDYLKVGFYTEILFKEKGVRFIAINNGIDSEKQVESDFTPFLNIMNEWYARDTSRKIQSIFRARMEEGKRVSPSVPYGYYRNPKNKQELLVDKESAKVVKRIYRLVIEGYGVTQIAEILTKDKVLIPSAYAEIHYPENNHSSKKRGIDDPYFWTPTTVGYILEKREYMGHTVLGKTICLDYKTKKRRKAKEDELIIFKNTHEAIIDEETWNNAQRLRKTVRRSPKYGTTSNPLTGLLICADCDGKLSYREPAEHKEKKYDCDYCFVCQHYRHRKGTCSIHYIKLKTVNEILLKSIKEITNFAKEDKQEFLKVMNKLSDEKREEKYQGDKEKLEKISSRNAELTTLITKLYEDHALGKIPVKHFDRLFNIYDTEQQDLEKQIQYFEQEIESYHQRKVDTDKFLKMIEKYTDIEELTVPMINEYIEKVVVHEATGGRKGKDRKQQVDVYFNFIGKFEVSQEEPK

SEQ ID NO: 4037 - protein, 612 aa, synthetic construct
MRNFEKITALYERLSRDDELQGESNSIINQKKILEEYASKNNLSNIIHFTDDGISGTQFDRPGFMAMMNGVNQGNIGCIIVKDMSRLGRDYLKVGQCMEILRQKGVRLIAINDNVDSFYREDDFTPFRNIMNEWYARDTSRKIQSTFRSKGESGKHTASTPPYGYIKDEKDKNKWIVDEKAAEIVRRIFNLTMQGNGPYRIAKILESEKVDIPAYHQQKLGYGLYQSKNFEHPYRWCSSTIASILKKQEYLGHTVNFKTRKHFKDKKSKYVSEDNWLIFENTHEPIIDQETFDNVQRIRGNVKRYPDGWGEYHPLTGLMYCADCGSKMYVHRTSNYKNIPYYTCSAYTKTPCGMLCPSAHRIKAEVVLNLIQDTLKDIKKYLDEDNEAFICSIQNEMEEKEKIEIEKKKVRLTESQNRLRELERLMCRIYEDMILNKIPNSRYEILNNQYETEQITLSKEIKDLEQQVSRYEKETDRARKFISLISRYENFDELTTTMINEFVEKIIVHERDRKGSQTSKQKIEIYFNFIGNYELPQAELSEEKKQKLEEEERKIEERKDKLHQNYLKRKASGKQKEYEDKYKARREQKKQEKIKVLKRVGIPVSEYIKTNI

SEQ ID NO: 4038 - protein, 577 aa, synthetic construct
MGKSRPRALIVVRLSRVTDATTSPERQLEACRELCDQRGYEVVGVAEDLDVSAGATTPFDRPQLGPWLANRHNEIDVIVMYRMDRLVRRLLDLADVIRWGQERDVAIVSATEAFLDLTAPFGDIIAMLVAKTAEMELAAISARNASASTHNIRSGKWRGGVPPWGYVPERGDDKVWRLVQDPQQVEVIQEVAERVLAGERLRPIAADLTKRGVLTPKDRFAQVKGREVKGYAWSSQRMKESLLSRTLLGQIVTRDPVLDAKGEIQRDAKGQRILGPEFVVTDETGAPVVRAEPILTRAVFDRLGAALRSREVDRTATVTSGLLLQVLFCGECGRPAYRLTGGPGRKPRYRCAFAQDRSGAAGALGPCDNRSVPLDWADHEVEAHVLERLGSMERMTRVWFSGNDSRSELAEVDELLGDLTDQLGTGAFRRGTPQRERLDGRIRALTERQEELRVRPVEAPSWRYEGTGETVRAWWERSDSATRTAWLREHGIRATWLSSTEGGRTKIDSFEIDMGAPNLESGALPGWVASAAELKARGGWAWSVDDPVLKRAEESLPDVLAQIHWTQGDPDEGDSVE

SEQ ID NO: 4039 - protein, 558 aa, synthetic construct
MTKLYSYIRFSSMRQSDGSSYERQIRMAKEIADRYNLELVNDYQDLGVSAFKGANSKTGALSRFLDEIGRSIPVGSWLFIENLDRLSRQDIISAQELFLSIIRRGITIVTGMDNKIYSIETVTANPMDLMFSILLFIRGNEESQTKRNRTNSSALLKIKAHQQNPQSPAVAIEEIGKNMWWTDTTSGRVLPHPVYFPVLQKIVQLRQEGHSAGAILDYLNEHHEPPAPTSNKKHGKWSRAMVSRLFATKALIGVKTVNVDGVEYELRDYYPRVLSDSEFYFLRKNIIKKAWDYSHDKEKVIPLLSGIGVLRCVHCGATMVKQTAANGKREQYRYCCDGRKSGRTDCPYPNWGFRAVTLEGAVLQLLADKIWIAEDKTNPIPEIQVKIDDISRKIDNLINLSAMMGATKELANQITDLNSQREALHEEIRLFEREMYSVDSQGWDKLAQFDLSDVQNEERLKVRMKIKGALHEIECSRIDSKKNLFVLVYLDGLRQRLVIENNRGLKKGQIFVDLKTINDRQILESAGMVLHPCIEMIIDADWKAPEEIPGLLSEEFGI

SEQ ID NO: 4040 - protein, 470 aa, synthetic construct
MKGESELDKKAAIYIRVSTQEQATEGYSIQAQTDRLTKYVEAKDFILYKKYIDAGYSASKLERPAMQELIQDVQSKKVDVVIVYKLDRLSRSQKDTMYLIEDIFRPNDVELISMQESFDTSTAFGSATVGMLSVFAQLERKSISERMITGRVERAKKGFYHTGGQDRPPAGYQFNSDNQLIINEYEAAAIKDLFRLYNDGLGKSSISEYLKKNYPGKNKWLPSSIDRMLKNSLYIGKVKFSGAEYDGIHEPIIDEVTFYKTQKEIARRKQSNTKRYNYVALLGGLCECGICGAKMANRRAVGRKGKVYRYYRCYSKKGSPKHMMKTDGCSSKAQQQFIIDEAVINNLKNIDVEAELKRRSAPQTNTSLISSQIESIDKQINKLIDLFQVDSMPLDVISEKIDKLNKEKQSMEKLLERKNKLDKTELQHRFDVLKSFDWDNSSIESKRVVIEMLVQKVIIHDNSIEIILVE

SEQ ID NO: 4041 - protein, 523 aa, synthetic construct
MSKDITLIPARRKIGQSKSQNNENPKLKVAAYCRVSTDSEEQSTSYEAQVQHYREFISNNTDWQFAGIFADDGISGTNTKRRDGFNEMIEACLNGKVDMIVTKSISRFARNTIDCLKYVRLLRDKRVPIIFEKENINTMDASGELLLTIMASLAQQESESISKNVKMGYQFRFQQGKIQVNHKRFLGYDKDEEGNLVINEQQANVVKRIFKEYLEGLSFHEIKKGLERDGILNGANHKKWHASNIKGILQNEKYMGDALLQKTITTDFIEKTRKKNDGTEPQYYVKNSHPAIISRETFIRTQEELLRRSNLANGSSEGRKRNYSSKYALSGMCTCEKCGDVYRRIAWNNRGKKSIVWRCCTRVKYGPKACDAATIGEEVLQEAVVSAINQVVQISDKTIHILLQNIQKVISKDYANEIKEIQVLLTSKQELLLELIQSNQNYDNLLNEIDLLKAKENELLVNQANNETHKKRIYEMKQFIENQDHLLTHYDEVLVRKYIQEIKIFDDKFEVRFKSGINVNIEK

SEQ ID NO: 4042 - protein, 506 aa, synthetic construct
MRSVITYLRFSSAIQGAEGADSTRRQNDLFKQWLKKNSDAQIVASFSDEGLSGYKGKHLTGQFGDMLARIESGEFPEGTILLVEAIDRIGRLEHLETEALMNRILGNGIEIHTLQDGLIYTKDALADDLGISIIQRVKSYVAHQESKQKSFRVSQKWKQRAKLALAGEQRLTRNVPGWIDPDTFKCNEHAETVRLIFKLLLSGESLHNIARHLQANNISSFSRRKDANGFSVHSVRTVLRSESVIGTLPASQRNDRPAIPNYYEAAIDAATFNKAQEILDKNRKGRTPASDNPLTINIFKGLFRCQCGASVHPTGTKNKYAGVYRCNNNPDGRCDVPPLKRKPFDKWMLENFLGMIDVGNDGEAEGKIASLQHEVEIVTTRIKKATALLLEMDDITELKAQVKELNQKRTELQTTIDSMRRKTSLTDKELPQLKDIDLTTKAGRVECQLILSKHLKGLTLGKDSVIVTLQNDTEITIPTNPLPLNDGTSIFEIAEKELLEIDAYQL

SEQ ID NO: 4043 - protein, 519 aa, synthetic construct
MKKVTKIDKIQPAKKAEDKLRVAAYCRVSTATDAQLESLEAQKSHYENYINSRDDWCFAGVYYDEGITGTKASKRPELMRLLADCKAKKIDFVITKSISRFSRNTMDCLEIVRTLLNLNIPVYFEKENINTGSMESELFLSVLSTMAEGESASISSNNKWSIKKRFKNGTYRLSSAPYGYKLESGGLQVVSEQADIVKRIFRELLSGKGMYSIAKELNAEQVPTQKGGRWTSTSVHNILTNEKYTGDCIFQKTYADSNFNRHTNNGELNRYLIQNHHEAIISHEDFNATAALIKQRATERRIESGSDKYQQRYAFSEKLICGECGNTFRRRIHKGKYNSYVAWVCNTHLSDTNRCSMLFVRDDALNLAFATMLNKLIFSYRLLLKPYLAAMQSNTADEALLRIQYLEKQLDQNAEQRSTLHKLMAQGYIDQILYTQESNELLLQARDFRSEIEALNNTVAGDTTKVYETERLINYCKRGEMLTDFNESLFELFVDHILIYSRQKIGFVLRCGLTFEEMI

SEQ ID NO: 4044 - protein, 585 aa, synthetic construct
MPTAYAYIRYSSKAQGVAGKDSVDRQMASIQAITKHHDVELLPENIFSDTGVSAHDGSNKKKGKLKDLIDMINDVHIKPGDYIFVESIDRLSRQRLLQAKELVNGILEKGVILITTIDGQRYEKPNENNRIDDLQQDILLSVIAKRAHEESKTKSVRRRSAWNRAKKLADDEKIIFNGHNPPYGISYNKEENQFEIVENEAQEIRDIFESLKYVGVSLTIRKINAYAKRKWTNKNIHLLFQTKYVLGSYMAQRRDENKNKVFERFIENYYPQIVSYEQFNEALEAMKLRAHRKHYGNQTVGSLNIFRHSIKCDCCNASMLFEKQTNPKGVCYGYFHCFTRKELKTNCNQPRFRFDLAYGLFLELVYQATTKEDFDVHPWQTMELEEEKRDRDYVTIGESTRLYMATPEDNEIEEKIESFRELLISLLSNRKRQAADNKRLVELRNALLEQKSYKDNLLKSFAGFTNGVIPQEFLAVVSSTELKINDIDGELSKLQAEINTRKTSINIYSENDIIDLYNTEEGRLKINQFFIANDIVFRFKFEKETRTLYCKINYQGVMIDKIAKQFSLHNPLSEFGIKNLNEYFN

SEQ ID NO: 4045 - protein, 506 aa, synthetic construct
MRSVITYLRYSSAIQGAEGADSTRRQNDLFKQWLKKNSDAQVVASFSDEGLSGYKGKHLTGQFGDMLARIEAGEFPGGAILLVESIDRIGRLEHLETEALMNRILGNGIEIHTLQDGLIYTKDALSDDLGISIIQRVKSYIAHQESKQKSFRVSQKWEQRAKLALAGKQRLTKMVPGWIDPDTFKCNEHAETVRLIFKLLLDGESLHNIARHLQSNGIRSFSRRKDANGFSVHSVRTILRSETTIGTLPASQRNDRPAIPNYYEAAIDASTFNKAQEILDKNRKGRTPASDNPLTINIFKGLFRCQCGASVHPTGTKRTYQGVYRCNNHLDGRCDVQPLKRKPFDRWMIDNFLGMIDVGNDGESERKIAALQHEVEIVTARIKKATALLLEMDDIDELKIQLKELNQKRTELQTTIDNMRRKASLTDKELPQLKDIDLTTKAGRVECQLILSKHLKGLTLGKDSVTVTLQNDTEITIPTNPLPLNDGTSIFEIAEKELLEIDAYQL

SEQ ID NO: 4046 - protein, 558 aa, synthetic construct
MNKKIALYSRVSTSEQSEHGYSIHEQEQVLIKEVLKHFPGYEYQTYTDSGISGKNIEDRPAMKRLLDDVKANKIEMVLSWKLNRISRSMRDVFNIIHDFKEHGVGYKSISENIDTSEYSGEILVTMFGLIGSIERQTLISNVKMSMNAKARQGEAITGRVLGYKLSLNPVTQKNDLVIDEHEANIVKEIFDLYLNHNKGLKAITTILNQKGYRTINHKPFSVFGVKYILNNPVYKGFVRFNNYQNWSAKRRSGKSGENEVILVKGKHEAIISEEMFDQVHEKLVSKSFKPGRPIGGDFYLRGLIKCPECGNNMVCRRTYYNTKKSKERTIKRYYICSLFNRSGSAACHSNSIKAEVVEAVIHKHLNIILSQPEVVGKICEDVIENIKHKQTAPIEAVDDIDTLKRQKHKIKTQQERLLELFLDDQMDSTLLSEKQKELNAQLATIEEKIKTAHNQQVNQPVTINYKVLKVRLIMLMNRFSASLKKADPEAKNQLMKMLIDSIEITKDKQVKLIRYKIDETLIPQSLKKDWGTFFMPQFHFVIDDKNKCYISKFTTFTT

SEQ ID NO: 4047 - protein, 558 aa, synthetic construct
MTKLYSYIRFSSMRQSDGSSYERQIRMAKEIADRYNLELVNDYQDLGVSAFKGANSKTGALSRFLDEIGRSIPVGSWLFIENLDRLSRQDIISAQELFLSIIRRGITIVTGMDNKIYSIETVTANPMDLMFSILLFIRGNEESQTKRNRTNSSALLKIKAHQQNPQSPAVAIEEIGKNMWWTDTTSGRVLPHPVYFPVLQKIVQLRQEGHSAGVILDYLNEHHEPPAPTSNKKHGKWSRAMVSRLFNTKALIGVKTVNVDGVEYELRDYYPRVLSDSEFYFLRKNIVKKAWDYSHDKEKVIPLLSGIGVLRCVHCGATMVKQTAANGKREQYRYCCDGRKSGRTDCPYPNWGFRAVTLEGAVLQLLADKIWIAEDKTNPIPEIQVKIDEISRKIDNLINLSAMMGATKELANQITDLNSQREALHEEIRLFEREMYSVDSQGWDKLAQFDLSDVQNEERLKVRLKIKGALHEIECSRIDSKKNLFVLVYLDGLRQRLVIENNRGLKKGQIFVDLKTINDRQILESAGMVLHPCIEMIIDADWKAPEEIPGLLSEEFGI

SEQ ID NO: 4048 - protein, 618 aa, synthetic construct
MTIEEVEALRPRKAVLYLRVSSKKQTQTASDIDKDGNSIATQRDICEQKAEAVNADIIEEFVEPGVSAQTIEKRPVFQALLRFLQNNRDVDYVIVYARSRAFRNFTDAAITRRHLDKLGVRLLSAREDFGEGTYAVAMEAVTDIMNQVQNQLSGEDISIKMRNKAINGGTLGKARLGYLNIRKDIDGRMINSVGLDEVRAPLVLKAFELYATNLYSIEQLEATMADLGLTNRQTARFPEGPVSASKLHQMLKDPYYVGYVVYKGDAYPGRHEPIIGQDLFDQVQDILNSRSGAGSRDRIHNHFLKGMLYCGKCFKLGRQSRVIYTEVKGRGGTPHEYFFCRARQEGECDLPYLPAYLVEDSVADSYGRLVLDEDFKRDVRRRLKEALLGEQKDIKEMYARYTNQLKEIEAKESRLVDVAADGILPVSKVREKMHELRVQRSRIEDSLANIGEEIAVGGQLLTNALDQLADPKAYYEKATDKVRRLLNESFFLRFFVHHDGAVGADLNEPFDDIFAAQIAFRASKTPQAVSGPGSSRSSQIGPFLDDSGVLAAQFRGTKNGADFSTPSLLFKLKSVYSNHGSNKATLVGMTGFEPATSSSRTKRATKLRYIPIRCESNC

SEQ ID NO: 4049 - protein, 507 aa, synthetic construct
MKRVISYIRFSSEKQSRGDSLRRQSKMVTDWLKAHPEYYLDQDLSFRDLGVSGFTGKHLKGGLGDFLTAIEKGLVKAGDTLLIESLDRLSRQAVDRASELLRNILRSGVDIVTLSDGEHYTRESLKDPLSLIKSILIMQRAHEESLRKSERIQAAWNRKKELISEGIKVSRRCPAWLRLNDDRKSFSVIPEKVETVKRCFQLRLEGKSIWEIVRTLNDEGHQSMSQYKPGKFGQTSVQDLLKNRSVIGYFTPKGCEEISGYYPAIIDETTFYKVQQLSYARHGRKPASAKPLSVNLFKGVIRCSECGHALIITGFSDTRNGIYRCPLRNENRCSAKGLSRKQTDGTLLALLSRLDRFDSDTTNIIDTLKLHREHISSNIEKLVQLSLEIEDLSAITSKLKQLKGELSQVDADIEKETQRLKSIDVGCLSDCDLTTKAGRIEAQLIIKSAVKEVVLNTAKRRCKVTFHNGRIIDLPITETPSEDVTEAIQSLSEVTERGLIDVDVVEI

SEQ ID NO: 4050 - protein, 550 aa, synthetic construct
MVMMERVTPPPQRAGTRKVAAYARISMETDRTPKSLSAQISHYSELIQSTPGWEYAGVFADSGISGTTTNRPQFQSMLDCARTGEIDLILTKSISRFARNTVDLLETIRELKTLGVEVRFEKENISTFSADGELVLTLLASFAQAESEQISQNVKWRVRKGFEQGKANGFHLYGYTDSADATDVEIVEAEAEVVRLVYRNYLANISCEQTAAQLEADGVRSRAGEPIRPETLRSWLRMETYTGTLTLGRWVKGRLGEHSKPNTGEADMYRVENAIPAIIDHETFQAVQEERTRRRSLGARANKAIPTTTFTHMVYCLACEKYYRSSVNVAYDGSRRRKWVCATNREKGHGCASKRIPQPSLEQVVCEALNLEAFNEDVFAKLVQRIDVPDSDTAIVVLKNGTTSTHTLHYPSYRKDHWNTPGYRERHSQKLRAYWANLTDEERATISKQRSKTRQAEPAEKKTSRSNRAKAAWTPERRARQSEIAKRVNAQLGEEGRRERSRKAQQAIAADPSVAERKRRKMLDHWANPDYRASTTEAMKGSRRTTKVGE

SEQ ID NO: 4051 - protein, 525 aa, synthetic construct
MVRTITTIPATRKLYSGASLNAPAIKRVAGYARVSTDHEDQVTSYAAQVDYYTRYITEHAGWKLAGIYTDEGITGTSTKRRVGFQTMIADALAGKIDLIITKSVSRFARNTVDSLTTVRQLKDAGVEVYFEKENIWTFDAKGELLITIMSSLAQEEARSISENVTWGHRKRFADGKVTVPFSRFLGYDRGEDGNLVINEEQAKLVRYIYTLYLDGGSLTGIAKQLQAEGHKTASGNPNWSARQVRSILTNEKYKGDALLQKSYIADFLTKKLVKNEGEVPQYYVTGNHEPIIAPAVWDFVQAELTAPATGRRSTSRQRTFSGKIRCGQCGAWYGSKTWHAGSKYEKRIWRCNHKYAGRIPCATPHVSDEQITTAFLDAVHHLLANRDQVDELVDKAVRAELDTTDLHIEADQLFARVGAAAEAIDALIARNARVAQDQTEYQRRFDKLNTEHARLLADYDKLLTQISDLESRQAAYRHYREELDKLDIDHIEFTPYLWHTLLDHAEMGTAGAIMFTFRDGTTTHC

SEQ ID NO: 4052 - protein, 416 aa, synthetic construct
MAHISVVTPVRPPVPKLVNVAAYARVSTNGAEQLASLSAQVSYYSRLIQSTPGWAYAGVFTDEGITGTSTKSRQGLADLLKGARSGGVDIVLCKSISRLARNTVDLLATVRELKDLGVAVRFERERIDTLSADGELLLTLLASFAQEESRSLSQNVKWAIRNRYKSGGTNSFVVYGYHWTDGEFTIIDEEAKIVRLLFANYLDGISPEKTATMLNEQGKRSRGGGRFYGSVFRRMLENERYKGCQMLQKMYRPTIQAPTRSFNDGELPRYWVEQALPAIIDEAMFDAVQAEIAYRREVGPAATPSKNTGVFTGRICCAVCGKNYQRKTRTYKSGTSYKFWRCWSACTGNGNPCGGHNLRETLLEQVCADMLGTQGFDPVSVGEQVVMIEAFEHQLTFHLADGTMTPVGLTSEGRLA

SEQ ID NO: 4053 - protein, 523 aa, synthetic construct
MNRTVTAIPATKKLRSAAASSGVPARRRVAAYARVSTEMEEQTSSYEAQIDYYTTYIRSRNDWQFAGMYCDEGISGTSMKRREGFQTMIDDALTGNIDLILTKSVSRFARNTVDSLTTVRKLKDAGVEVYFQKENIYTFDAKGELLITIMSSLAQEESRSISENVTWGHRKRFADGKIMVPYASLLGYKKGEDGSLVIDETQAPTVRLIYQLFLDGMAISEIKTELAARKILTPRGKEVWSTSTVRSILSNEKYKGDALLQKTFTTDFLTKKMKVNEGEVPQYYVSGNHEPIIAPRIWDQVQYELATRHGNISSAKVGLFSTRLKCAQCGAWYGRKTWASNTKYKYTVWQCNHKYTDEHPCSSATVKDEQIKDSFVQALNQLIARQPRQSRLPQVLGDMFDTSRLEEQAAACQTKIVELTEQIEALIAENQQRALDQDAYQNKYTELDTTYRKTLARKTSLEADIAANTAKHAAITTTLDDLAGEPVSEFHPSQWSALIDHAIVTEDGIRFIFRTGKEITVGL

SEQ ID NO: 4054 - protein, 551 aa, synthetic construct
MKVAIYARYSSDNQRDASIADQFRMCRLHAEKQGWHIVEEYSDHAISGASLIRPGIQALMADAMGGRFDLILAEAMDRLSRDQEDIAGIFKRMSYADVKMFTLSEGEVTHLHVGLKGTMNALFLKDLADKTRRGQRGRVEAGKSGGGNAYGYDVVKKFDANGEPIRGDRTINEFQAEVVRRIFRDYAAGKSAKTIAFALNKEGIPAPSGGDWGFSTINGNPKRGNGILNNEMYVGKIVWNRQRFVKDPSTGKRQARPNPEEEWVIQEAPELRILDDDLWSAVKARQEKNKIARKENGEADLSRINTRRRPKYLFSGLTKCSCCGGGYSAISATLIGCATARNKGTCNNRVNIRRDELESRVLNALRTKLVDPELFAHFCEVFTQEMNRLRMEGRAGIASAEAELAKVNRELEKILDLYLSDALSVDMVKERSKKLEARKTELEQFLAEADEPPPLLHPSMALQYRKRVQQLYDALQDEDEGKRIEAADTLRSLVDQIVLTPVDGKVEIDVQGDLAGILTISTQSKNPAAGATGSQVKMVAGAGFEPAAFRL

SEQ ID NO: 4055 - protein, 561 aa, synthetic construct
MVHTVIDPEEKKLYDQYKNEFFSLVAQHKLDMSEEFCIYLRKSRADIEAEARGEGETFIRHLRNLLDLALRQKIYVAEIYKELVSGETIEARPVIQHVISEVEDERWQGVLVMEIERLARGDTIDQGTIAQTFKYSGTKIITPTKTYDPNNEFDEEYFEFGLYMSRREYKTINRRQQRGRVDSAKEGKYTGNINPYGYNRVKLVKTKGYTLEIVPEEARIVRLIYEWYTKGEPDQDGVYHRLGTGLIARKLNNLGIPSAKGGVWTVPTVRDILRNPVYNGKIKFKSRPLIKKKQNGKIIKSRPRAKKEDMILVDGLHPAIIDETTWNLAQEIMSKNPRKPVSLRLKISNPLAGLVVCGVCGRKMIRRPHKGRPATLMCQLPSCGNVSSFLDLVEQRILAGLKEWLKNYKAEWDKNVPVNNDAKNKVMELKIESKINQEKKLAELEQQLENAFDLVEQKVYDVDTFRIRSQQLKSKINDCKEALSKIEQEIALEKERTTARVRVIPQVEHVLDAYYKTDDPEIKNELLKSVLETSIYLKTKKARWNGSLDDFKVTLFPKLPQ

SEQ ID NO: 4056 - protein, 531 aa, synthetic construct
MKVPVWSYARVSTVTQVDGFGIQRQINTINQFLQYLTLDHRLPFTIDTDNITQMVAEGRSAFKGKNWNDKTKLGQYRKMVMDGVLPDSVLIVENVDRLVRIDPYKAVEIISGMINRGTTILEIETGMTYSRYIPESITVLTMQINRANGESKRKSIMMKKSHENRYGNVSRVRPRWFDVVEIDGIKQYRINETAKAIQRMFGDYVNGIGAAQIVRTYGKTDNGKGWTLVTVLRTLSDKRVADDPRYPPIIDKVLYERVQAMKLATNKSGNTHQRNMLNIFSGMSRCPVCNKAIIVKRNSHGGLFTVCLGKRTDKVCKAKAMAYNAIERPLLEAIRGLDFSEVYNHEESTVLTLRDQWIQNERDITAFRERLAKASRHEKFAILDELETISKEQEELSIRLKSMDAPKDVQISYNDDKLDLDVEYRIELNNRMKKLIQEINIGRVDTSKSAYTIYCTIKYWTDKVKHLVIIDTESTRIGKGGANTLTTSLRSVSSINADGTFYGNPDEEAVRYWQQAINKVFVEAGEPAPFK

SEQ ID NO: 4057 - protein, 538 aa, synthetic construct
MPKINARVYSYLRFSDPRQATGSSADRQLQYAQRWAADRGLLLDESLSLRDEGLSAYHQLHVKQGALGAFLKAVDEGRIPEGSVLIVEGLDRLSRAEPIQAQAQLAQIINAGITVVTASDGREYNRAGLKAQPMDLVYSLLVMIRAHEESDTKSKRVKAAIRRQCEGWKAGTYRGLIRNGKDPQWLRWDGQAWQLIPERVEAVRYAIELYKQGEGATRAVRKLAERGHVLSDWGIAGQQIYRLVKLPALWGAKRISVDGEDYLLEGYYPPVLSEAEYAELQAAAGTRHGRRGASDIVGLVTGIGITYCGYCGTAVVAQNLLSRAREDGTLVDGHRRLHCTSYSNSLGCKAASCSVVPVEKALLAYCSDQMNLSRLLQPTDDGQALRQRLLACQRRQADVERQLARVTEALLADDQGAAPLAFVRKARELEADLRQLQAEAEQLEREQAAKAQVQTPAAAELWRRLAVDAKDIYSPAREQLRQLVLDTFSRITVYMRGVVPDPKSRVIHLVLVSRAGRRVALDIDRRSGDWKASRDRQG

SEQ ID NO: 4058 - protein, 611 aa, synthetic construct
MRTVKAYIYSRVSSLQQVDAFGLDRQISTVLDFLENAKLPAELGYQLDPSNHEVLDSDKGLSGYAGHNFTKGSLGRFKERVRSGEITEGCLLIESVDRFSRKQGYDAIDEFTFLIKRNIDIVEVETGQIYSYKLDHKLSTLSTSIERAYQESKRKARISKKSWQKRKKDSVDTGIALNNNTPDWLSLSQDKKSYELDVQKVQTITKIFELYRDGYGVTQIVNLLNKEGERYNGKGWNTVTVYNKLRDRRLNGYLVGKYTTIPKKDNESTNDAEKRIIENIKIKKEANDNAKRIYPVVIEDDLFSRVQSMMDRNVSSKKQKSTTTKQRNLFNGLTKCNECGSPMIVQSMSNGGQYLRCYRQRTKDEKCNSKMLRYFETEKVLLQHIKNLNLDEIYGDEKSNQSLDTLKRLLSDVNGKIALLNEKVQSANDESELFAIMEFKRKRILEKDELIAKINSLENRCEAVTLNYTYDIEQLTNQDNTVLRRKANEHIAKVISSIKCRRIDSSYIGAYYLYDITYHREVLKHILITDNSGKLISEIAISEKDNERTYQVREGGKTVFKVESNGNAWVLYASRTKTIDDLLYYITTMMVGREPDEFVYQLHEDQIEWID

SEQ ID NO: 4059 - protein, 589 aa, synthetic construct
MSAHVTILRNTVLPVKFNTMNRPRLYSYIRYSSERQGKGSSIERQKSYIAEMAKQIATEYDLEIFEEYQDLGVSAYKGKNVQEGALSDFIDQVESGLIPKGSFLLIESLDRFSRQNAMQAVNLFTSLLLNGITVITGIDKQVYRQTEVNTETLQQLMFSVMLFSRANEESSTKSHRTIASALSKIRRHQERKPGDPVVAIKELGSDKWWTDSSTGYVNPHPVLFPIAKKIIQLKHDGWSNRMILQHLKNNYDGPVIGNKKSKGIWNMQHCSRILEPAIYGRKVITVNNAEYVLDDYYPAIISKDEYEALKLQVGNKGFAPNRESNPEIPLLSGIGILHCAHCSCYMVKAKSTLKNHPHAYRYQCASRDLHQDCNKWGFRASTLERTILQLIADRIFLQTKYQPSGLEGKIADIQSQIENYVLAIGSAKSPEIINSLTSQIDQLEQEKQSLIVEKRLYDESIVQMNTEGWDKFRKFDIDDALNPLRTKIRANIKTVIMRVDCSRIDKKHNLFTITYRDQHKQRIVIENNSGWKKGKIYVEAQTINDIQILESEGLILHDHIDILINRDKFMTEAKKRLDHPRTLIDELTE

SEQ ID NO: 4060 - protein, 547 aa, synthetic construct
MKLLVTYIRWSTKEQDSGDSLRRQTNLIDAFYSKHKNDYYLLPAHRYVDKGKSGFHQQHKAQGSDFRRMFENVMSGAIPEGSLIVVENFDRFSRADIDTAIDDVRQILRKGVSILTLGDGELYDKSALTDPVKLIKHIIIAERAHQESLVKQKRIAQVWNHKTQLARELKKPMGKQAPGWLELSEDGSHYIVDEDKASLVNIIYDKRLSGMSMFAICKWLNEQGYPTINQRKVRISKTKKPDGNWSALSVKHILTSRSVLGYLPAKISTEDRKTVLREEIESFYPQIVTDSKFYAVQQLLEETGKGKTSSGEHWLYVNILKGLIRCKCGLVMTPTGIRKPVYQGTYRCNGNKESRCSYGTVSRKLLDTQLCSRLFSKLSQLHDEATDTAKLDELQRRLNTVDGELEKLTETLIQLPNITQIQEALRVKQEEKDELIVQLSREKARVKSVSSLDLSGLDMESVEGRTEAQIIIKRLVKEIVVSGNEKLVDIYLHNGNMIRGFPLDGKDDHTLTLEEATDEMQSLDDMLIFGEPVTRIYPAGDMEEVDA

SEQ ID NO: 4061 - protein, 413 aa, synthetic construct
MRSVITYLRFSSAIQGAEGADSTRRQNDLFKQWLKKNNDAQVVASFSDEGLSGYKGKHLSGQFGDMLSRIESGEFPEGTILLVEAIDRIGRLEHLETEALMNRIIAHGIEIHTLQDGLIYTRDALSDDLGISIIQRVKSYVAHQESKQKSFRVSQKWKQRAKLALAGEQRLTRNVPGWIDPDTLKINEHAETVRLIFKLLLDGESLHNIARHLQSNGIKSFSRRKDANGFSVHSVRTVLRSESVIGTLPASQRNDRPAIPNYYEAAIDASTFNKAQEILGKNRTGRTPASDNPLTINIFKGLFRCQCGASVHPTGTKNKYAGVYRCNNYLDGRCDVPPLKRKPFDKWMIDNFLGMIDVGNDGESERKIAALQHEVEIVTSRIKKATALLLEMDDITELKAQVKECSGLLNLAT

SEQ ID NO: 4062 - protein, 584 aa, synthetic construct
MSAHVTILRNTVLPVKFNTMNRPRLYSYIRYSSERQGKGSSIERQKSYIAEMAKQIATEYDLEIFEEYQDLGVSAYKGKNVQEGALSDFIDQVESGLIPKGSFLLIESLDRFSRQNAMQAVNLFTSLLLNGITVITGIDKQVYRQTEVNTETLQQLMFSVMLFSRANEESSTKSHRTIASALSKIRRHQERKPGDPVVAIKELGSDKWWTDSSTGYVNPHPVLFPIAKKIIQLKQDGWSNRMILQHLKNNYDGPVIGNKKSKGIWNMQHCSRILEPAIYGRKVITVNNAEYVLDDYYPAIISKDEYEALKLQVGNKGFAPNRESNPEIPLLSGIGILHCAHCSCYMVKAKSTLKNHPHAYRYQCASRDLHQDCNKWGFRASTLERTILQLIADRIFLQTKYQPSGLEGKIADIQSQIENYVLAIGSAKSPEIINSLTSQIDQLEQEKQSLIVEKRLYDESIVQMNTEGWDKFRKFDIDDALNPLRTKIRANIKTVIMRVDCSRIDKKHNLFTITYRDQHKQRIVIENNSGWKKGKIYVEAQTINDIQILESEGLILHDHIDILINRDKFMTEAKKRLGKVRTSP

SEQ ID NO: 4063 - protein, 441 aa, synthetic construct
MLARIESGEFSEGTVLLVEAIDRIGRLEHLETEALMNRIIAHGIEIHTLQDGLIYTRDALSDDLGISIIQRVKSYVAHQESKQKSFRVSQKWKQRAKLALAGEQRLTKMVPGWIDPDTFKCNEHAETVRLIFKLLLDGESLHNIARHLQANNISSFSRRKDANGFSVHSVRTILRSETTIGTLPASQRNDRPAIPNYYEAAIDAATFNKAQEILDKNRKGRTPASDNPLTINIFKGLFRCQCGASVHPTGTKNKYAGVYRCNNNPDGRCDVPPLKRKPFDKWMIDNFLGMIDVGNDGEAEGKIASLQHEVEIVTTRIKKATALLLEMDDIDELKIQLKELNQKRTELQTTIDNMRRKASLTDKELPQLKDIDLMTKAGRVECQLILSKHLESLTLGRGQVTVKLSNGTEIIVPTDPLPLTDGAAIFEIAEKNLLNIDTFQL

SEQ ID NO: 4064 - protein, 505 aa, synthetic construct
MSNPSLRAICGARVSVLTGPQKVSHLAQHETAAAWVAREGHTVVGTFTDLDVSASIPPEKRPDLGPWLTPEKSWEWDVLVFSKIDRAFRSTRHMVKLAEWCEQNRKMLVFAEDGLVLNYRNPQAGLEHMMAELFVYIGSFFAQLELGRFKSRAEDSHRILRFTERWPGGVPPFGYTTVPAEDGKGRVLAVDPEAKAVLEEMANHLVEDGWSLLQIAKWLNDQGIKSNMGKVKTNGSGWTPTSVRQVLSNLSTQGVKISAPGKTEGCKACEPTKGGCKAHRERVPVLDKEGRMIRMAEPIFSEERWGEIQDALSRRKINRTVKTRSDNPMRDGVGICGKCGLGLTIHRSPRPGGGYYLYTRCGSGCRGVSMKMDEAVDLLGQTFLENYGHKEAVEKVFVPGSDNSAELERVSKSIERLRAESDAGLITDDSEYLSRLTGLTARKRELEANPITPPHTVDLPTGETYAQTWERSDPEGRRQLLVKWKIQFILYGKNNFELRVPSETH

SEQ ID NO: 4065 - protein, 507 aa, synthetic construct
MKRVISYIRFSSERQAKGDSLRRQSKMVNDWLKAHPEYYLDQDLSFRDLGVSGFTGKHLKGGLGDFLTAIEKGLVKAGDTLLIESLDRLSRQDIDIASELLRNILRSGVDVVTLSDGEHYTKESLRDPLSLIKSILIMQRAHEESLRKAERIQAAWDAKKEAAKAGIKISRRCPAWLKLNDDRKSFSVIPEKVETVKRCFQLRLEGKSIWEIVRTMNAEGHQTLNQYKAGSFGQSSVQDLLKNRSVIGYFTPKGCEEIAGYYPAIIDETTFYKVQQLSYARHGRKPASAKPLSVNLFKGVIRCSECGHALIITGFSDTRNGIYRCPLRNENRCSAKGLSRKQTDGTLLTLLSRLDRFDSDTTNVIDMLRLHREHISSNIEKLVQLSLEIEDLSAITIKLKQLKGELSQVDADIEKETQRLKSIDVGCLSDCDLSTKAGRIEAQLIIKSAVKEVVLNTAKRRCKVTFHNGRAITLPITENPSEDVTEAIQSLSEVTERGLIDVDVVEI

SEQ ID NO: 4066 - protein, 507 aa, synthetic construct
MKRVISYIRFSSEKQAKGDSLRRQSKMVNDWLKAHPEYYLDESLTFRDLGVSGFTGKHLKGGLGDFLTAIEKGLVKAGDTLLIESLDRLSRQAVDRASELLRNILRSGVDVVTLSDGEHYTSESLKDPLALIKSILIMQRAHEESLRKSERIQAAWDAKKEAAKAGIKVSKRCPAWLRLNDDRKSFSVIPEKVETVKRCFQLRLEGKSIWEIVRTLNDEGHQSMSQYKPGSFGQTSVQDLLKNRSVIGYFTPKGCEEISGYYPAIIDETTFYKVQQLSHSRYGKRSVSDKPLSVNLFKGVIRCSECGHALIITGFSDTRNGIYRCPLRNENRCNAKGLSRKQTDGTLLALLSRLDRFDSDTTNIIDMLRLHREHISSNIEKLVQLSLEIEDLSAITSKLKQLKNELSQVDADIEKETQRLKSIDVGCLSDCDLTTKAGRIEAQLIIKSAVKEVVLNTAKRRCKVTFHNGKVIDLSITENPSEDVTEAIQSLSEVTERGLIDVDVVEI

SEQ ID NO: 4067 - protein, 507 aa, synthetic construct
MKRVISYIRFSSEKQAKGDSLRRQSKMVTDWLKAHPEYYLDQDLSFRDLGVSGFTGKHLKGGLGDFLTAIEKGLVKAGDTLLIESLDRLSRQAVDRASELLRNILRSGVDVVTLSDGEHYTSESLKDPLALIKSILIMQRAHEESLRKSERIQAAWDAKKEAAKAGIKVSKRCPAWLKLNDDRKSFSVIPEKVATVKRCFQLRLEGKSIWEIVRTLNDEGHQTLNQYKPGKFGQTSVQDLLKNRSVIGYFTPKGREEIAGYFPPIIPETDFYKVQQLSYSRYGRKPASDKPLSVNLFKGVIRCSECGHALIITGFSDTRSGIYRCPLRNENRCNAKGLSRKQTDSTLLALLSRLDRFDSDMTNTIDTLKLHREHISSNIEKLVQLSLEIEDLSAITSKLKQLKNELSQVDADIEKETQRLKSIDVGCLSDCDLTTKAGRVEAQLIIKSAVKEVVLNTAKRRCKVTFHNGKVIDLPITENPSDNVTEAIQSLSEVTERGLIDVDEVII

SEQ ID NO: 4068 - protein, 604 aa, synthetic construct
MKKVFVYHRVSSDQQLDGSGIARQAELLEGYLERTGICAEMDDPAPVVLSDQGVSAFKGLNISEGELGAWMEQVRNGMWDSSILVVESIDRFSRQNPFDVMGYINALMAHNVAIHDVMANIVISRSNSKDLPFVMMNAQRAYDESKYKSDRIRKGWAKKREHAFNKGTIVTNKRPQWIEVENDKYVLNHKAAVVKEIFALYQTGMGCPTIAKQLQTKEGEQYKFNRPWTGELVHKILTNRRVTGKIFISEIIRNHDDIENPVTQKKYDMDVYPVVINEEEFELVQELLKSRRPNAGRVTVKKDGQEEVLIKSNLFSGIARCTECGGPMYHNVVRAKRTPKKGDPKIEEYRYIRCLNERDGLCKNKALTYETVERFVVEHLLGMDLNTVIKEQEFNPEIEVIRIQIDQMKDQVTNYENGIERRKSAGKAVSFEMREELDDAKLELEQLLARQASLATVQVDVPVLQDVNVTELYDVNNVDIRTRYENELNKIVSNIRLKRNGKSYTIDINYKQKELKRHVLFVENKKKEQTLISEVIIEVVDGAKFYYTPAFMIMLKDGEISFQQTKEDLSIIDYSLLLNYVDAVDREDAVGVWMRNQFNFLTSN

SEQ ID NO: 4069 - protein, 567 aa, synthetic construct
MSRSPKAYSYVRFSTPKQAQGDSYRRQLKSAIDYCAEHNLQLDAKTIEDFGVSAFRGSNRTDGALGRFIDAVKDGEIEEGSYLLVESVDRLSRQAIEKALSQFLEILNAGVVIVTLSDNQVFRKGEVDFTKLIVSIVYMARANDESEMKSRRSRAAWSNGRKEARENNKVMKNSRLPSWLTREGDQIVPIPERAAIVNKMFEMAKSGCGYEQIAKAFLEKGYKTFGKEADWRPAGIQAVIKSQAVIGVFQPHVIDGGERVPDGEPILGYYPTIVSPALFEEVQHLIGTRSKHSGSYRKGTYSNLFSGVLRCQCGELLRYHNKGKAGNPRNYLVCPKQNITGCNLPNMLYDKVAPQLLQAVSLLSAVMGQRGAASEKTLALKDELAILQRKLELEAKKRNKAAQSMLELDDDAVFRELFTQCKANCQALEVQIHQLEDDIMGRELSEKTLGKMIVPDDLKNTEQRQRFNSQLKAAVKEISIISTGDSVAAVFKDLDGQFMLEQAFKPKLAGSSIRDISGEELLRTTAEDPYIDADWVKGEIDEYESFQKQPDSDYDDDFEDFSSEESK

SEQ ID NO: 4070 - protein, 469 aa, synthetic construct
MKYVAIYARISRDDLSDEEMKLSREKVLSLSKIKDRIKTLTTEFEENREPDWILENVYWDIESGYSSEREDLIKMFNKVERGLINVVFIKEIGRVARDPLISIPLINLAEAQKIELYSLRLGKYETKTRQMWMFDVFYNDAEYHMTKDRYKIETLSKAKQGFKLTGVPLGYKMIDKIPIVQEKEADIVKEMFQLALKGESLNNIAKKHNMGYTTVKQILMNKTYIGINVYGKYIYFQGKRIKTNDDIIEVPGNWESIIDHDTFYSVQEIIEKRSFKKIRITDNEKYLLGGVVFCYCGWKLYGTTLRNNQYYVCSNKKICRCKMKRADVLEKEVIKKIEDEISNLDHDVYDPNSKIRIRLNQLLNDNIKLENDKNDLAHKFIKVKNNDFMIDKILEEQSKIDNSILSNTEEIKRLQYILSSEQATENKKDILKKVIDFYYEKDRIKLKKLLQLAIEVRFENNYRFEIYFL

SEQ ID NO: 4071 - protein, 496 aa, synthetic construct
MKKAVIYARFSSDNQRSVSIDAQIRAIRDYCSKNNILVTDTYIDEAISGTSANSRVHFLKMIEDSSKNNFDYVVVHKLDRFARNSYDQAYYEKKLNDNRVKIISVLEQFNDSPEHVILKGVITSMNEYYSLNLSRETKKGLYENFYNCQHASGMPPLGLDVDKETRKYVINEEEAKIVRLIFRLSLEGNGYAFISNFLNKKGYLNKRKRPFGKGGIRDMLLNEKYIGNYILGKKNKKGQLTGREKIQEGVIPAIIDKETFYAVQDIFKNRIASKKSNAKVDYLLTGFCKCGECGGSYSGAGKIKGRSKQYDSYGCTSRKSKKTDCINPKIRKEVLEHIVFKAIKDEIFSPDRLNIFIQELTKKIDDQNKNIDVLTKKNDQAIQNIKNKKEKLLSLFLDSHLNEDEFKPKNDELELQLIEKIRERENLNRGNGIDVNKIKAYVRKLVEGLENKNVSIKKQILQTFVEEILVFKGHITIRLKFFGLPDGGNDGGSGGN

SEQ ID NO: 4072 - protein, 547 aa, synthetic construct
MKLLVTYIRWSTREQDSGDSLRRQTNLIDAFYSKHKNDYYLLPAHRYVDKGKSGFHQQHKNQGSDFRRMFENVMSGAIPEGSLIVVENFDRFSRADIDTAIDDVRQILRKGVSILTLGDGELYDKSALTDPVKLIKHIIIAERAHQESLVKQKRIAQVWNHKTQLARELKKPMGKQAPGWLELSEDGSHYIVDEDKASLVNIIYDKRLSGMSMFAICKWLNEQGYPTINQRKVRISKTKKPDGNWSALSVKHILTSRSVLGYLPAKISTEDRKTVLREEIESFYPQIVTDSKFYAVQQLLEETGKGKTSSGEHWLYVNILKGLIRCRCGLVMTPTGIRKPVYQGTYRCNGNKESRCSYGTVSRKLLDTQLCSRLFSKLSQLHDEATDTAKLDELQRRLNTVDGELEKLTETLIQLPNITQIQEALRVKQEEKDELIVQLSREKARVKSVSSLDLSGLDMESVEGRTEAQIIIKRLVKEIVVSGNEKLVDIYLHNGNMIRGFPLDGKDDHTLTLEEATDEMQPLDDMLIFGEPVTRIYPAGDMEEVDA

SEQ ID NO: 4073 - protein, 561 aa, synthetic construct
MKGKIALYSRVSTSEQSEHGYSVKEQEQVLIKEVVKNFPGYDYETYTDSGISGKNIEGRPAMKRLLQDVKDNKIEMVLSWKLNRISRSMRDVFNIIHEFKEHDVGYKSISENIDTSNASGEVLVTMFGLIGSIERQTLISNVKLSMNAKARSGEAITGRVLGYKLSLNPLTQKNDLVINENEAHIVREIFDLYLNHNKGLKAITTILNQKGYRTINQKPFSVFGVKYILNNPVYKGYVRFNNHQNWAVQRRSGKSDKNDVILVKGKHEAIISEDVFDQVHEKLASKSFKPGRPIGGDFYLRGLIKCPECGNNMVCRRTYYKTKKSKERTIKRYYICSLFNRSGSSACHSNSINAEVVERVINVHLNRILSQPNVIKQIASSVIEELKQKHSKQTEIKYDIDSLDKQKAKVKTQQERLLELFLDDEMDSEMLKAKQSKMNQQLEVLDQQIKEAKQANQSQDDIPNFDKLKARLILMITRFSVYLRKATPEAKNQLMKMLIDSIEITTDKQVKLVRYKIDESLIPQSLKKDWGSFCKKKTIRYAYGSEKVLPLSQKMHLYVLE

SEQ ID NO: 4074 - protein, 542 aa, synthetic construct
MQQLKQKRVGIYVRVSTEIQSTEGYSIDGQINQIREYCDFNNFVVVDVYADRGISGKSMNRPELQRLLKDANEGQIDSVMVYKTNRLARNTSDLLKIVEDLHRQNVEFFSLSERMEVNTSSGKLMLQILASFSEFERNNIVENVFMGQTRRAQEGYYQGNLPLGYDKIPDSKHELMINQHEANIVKYIFESYAKGHGYRKIANALNHKGYVTKKGKPFSIGSVTYILSNPFYVGKIQFAKYKDWNEKRRKGLNDKPIIAEGKHSPIIIQDLWDKVQLRKKQVSQKPQVHGKGTNLLTGIVHCPQCGAPMAASNTTNTLKDGTKKRIRYYSCSNFRNKGSKVCSANSVRADVIEKYVMDQILEIVKSDKVINQVLERVNQENKVDIGALNHDIAYKQQQYDEVSGKLHNLVKTIEDNPDLTSALKATIHQYETQLNDITNQMNQLKQQQNQEKLSYDTKQIAALLQRIFQNIESMDKAQLKALYLTVIDRIDIRKDGNHKKQFYVTLKLNNEIIKQLFNNTPLDEVLLSTSSLFLPQTLFLQI

SEQ ID NO: 4075 - protein, 448 aa, synthetic construct
MKRAIGYLRQSTTKQQSLPAQKQAIELLAPKHNIQNIQYISDKQSGRTDNRTGYQQVTERIQQRQCDVLCCYRLNRLHRNLKNALKLMKLCQKYHVHILSVHDGYFDMDKAFDRLKLNIFMSLAELESDNIGEQVKNGLREKAKQGKLITTHAPFGYHYQNGTFIINNDESPTVKAVFNYYLQGYGYKKIAQYLEDDNKLITRKPYQVRNIIMNPNYCGRVINQYGQYNNMVPPIVSATKYEHAQAIRNKKQLHCIPSENQLKQKIKCPCCDSTLTNMTIRKKHTLRYYICPKNMNESRFVCSFKGINAQKLEVQVLATCQNFFQNQQLYSKINNAIHQRLKKQRVIEAKSTLTQEQLIDKLAKGMIDAESFRKQTHLMNQKHKTISSISDNQLQTSLQKVIQKSFTLNMLHPYIDEIRITKNKALVGIYFKNEPLNIVNQTSQSSIA

SEQ ID NO: 4076 - protein, 558 aa, synthetic construct
MKGKIALYSRVSTSEQSEHGYSVKEQEQVLIKEVVKNFPGYDYETYTDSGISGKNIEGRPAMKRLLQDVKDNKIEMVLSWKLNRISRSMRDVFNIIHEFKEHDVGYKSISENIDTSNASGEVLVTMFGLIGSIERQTLISNVKLSMNAKARSGEAITGRVLGYKLSLNPLTQKNDLVINENEAHIVREIFDLYLNHNKGLKAITTILNQKGYRTINQKPFSVFGVKYILNNPVYKGYVRFNNHQNWAVQRRSGKSDKNDVILVKGKHEAIISEDVFDQVHEKLASKSFKPGRPIGGDFYLRGLIKCPECGNNMVCRRTYYKTKKSKERTIKRYYICSLFNRSGSSACHSNSINAEVVERVINVHLNRILSQPDIIKQIASNVIEELKQKHSNQTEIKYDIDSLEKQKAKLKRQQERLLELFLDDQMDSGMLKAKQSEMNQQLEVLDQQIKEAKQANQSQDEIPNFDKLKGRLILMITRFSVYLRKATPEAKNQLMKMLIDSIEITTDKQVKLVRYKIDESLIPQSLKKDWGSFFMPKFQFEIYGQNDYFIDQITTFTT

SEQ ID NO: 4077 - protein, 542 aa, synthetic construct
MQQLKQKRIGIYVRVSTEIQSTEGYSINGQINQIREYCDFNNFVVVDVYADRGISGKSMNRPELQRLLKDANEGHIDCVMVYKTNRLARNTSDLLKIVEDLHRQNVEFFSLSERMEVNTSSGKLMLQILASFSEFERNNIVENVFMGQTRRAQEGYYQGNLPLGYDKIPDSKHELMINQHEANIIKYIFESYAKGHGYRKMANALNHKGYVTKKGNPFSTSAIAYILSNPFYIGKIQFAKYKDWNEKRRKGLNDNPVVADGKHSPIISQELWDKVHSRMKQVSEKPQVHGKGTNLLTGIIRCPQCGAPMAASNTTNTLKDGTKKRIRYYSCSNFRNKGSKVCSANSVRAEVIEKYVMDQIFEIVKSDKVLKQVVERVNQDSQIDMAALNHDIAYKQQQFDEINTKLKNLIQTIEDNPDLTSALKPTIHQYETQLIDIANQMNQLKHQQNQEKPSYDTKQIAALLQRIFQNIESMDKSQLKALYLTVIERIDIRKDENHKKQFYVTLKLNNEIIKQLFNDTPLNEVLLSTSSLFLPQTLYFQI

SEQ ID NO: 4078 - protein, 449 aa, synthetic construct
MKQAIGYLRQSTTKQQSLVAQKQAIKTLAEKHNIQHITFYSDKQSGRTDKRNGYQQITELIQQGQCDVLCCYRLNRLHRNLKNALKLMKLCQKYHVHILSIHDGYFDMDKAFDRLKLNIFISLAELESDNIGEQVKNGLREKAKQGKLITTHAPFGYTYRNGTFTINQDEAPTVKAIFHYYLQDYGYKKIAQYLETDDKCINRKPYQVRAIITNPNYCGRVINQYGQYDNMFPSIVSTSIYEQAQAIRSQKHTKRTPSSNQLKQKIKCPCCGSTLTNMTIRKKNHTLRYYVCPQNLNASRFVCEFKGINAQALEASVLSTCQDFFQNQQLYSKINRTIQQQLKRQRDIETKTTLNHEQLIEKLANGKIDAETFREQTQSLHQQSKPISSISAYQIQRAFQNIIQQRFTLNMLYPYIDQIHITKKKMLVGIYFKNEPLNIVNQKTQSSIA

SEQ ID NO: 4079 - protein, 523 aa, synthetic construct
MAVSRNVTVIPAIKRVGNNKTSESKPKIRVAAYCRVSTDSEEQASSYEIQIEHYTNYIKKNKEWELAGIFADDGITGTNTKKREEFNRMIEECMSGKIDMIITKSISRFARNTLDCLKYIRQLKDKNIAVFFEKENINTMDSKGEIMLTIMASLAQQESQSLSQNVKLGIQYRYQQGEVQVNHKRFLGYTKDENKQLVIDPEGAEVVKRIYREYLEGASLLQISRGLEADGILTAAGKAKWRPETLKKILQNEKYIGDALLQKTYTVDFLSKKRVKNNGIVPQYYVENSHEPIIPRELFMQVQEEMVRRANLRGRKGGKKRVYSSKYALSSIVYCGHCGDIYRRVHWNNRGYKSIVWRCVSRLEEKGSECTAPTINEETLQTAVVKAINELLANKEPFLSTLQKNIATVFNEENDNATDDIDGKLEELQQQLLIQAKSKNDYEDVADEIYRLRELKQNALAENAEREGKRQRIAEMTDFLNEQSCELEEYDEQLVRRLIEKVTVFDDKLTVEFKSGVEIDIEI

SEQ ID NO: 4080 - protein, 422 aa, synthetic construct
MKKITKIEGNTANSFIKPKTRVVAYCRVSTGSDEQLVSLQAQKAHYESYIKANPEWEYAGLYYDEGISGTKKENRSDLLRMLSDCETGRIDLIITKSISRFARNTTDCLEMVRKLIDLGVHIYFEKENINTSSMESELMLSILSGLAESESISISENTKWAIQRRFQNGTFKISYPPYGYQNIDGQMIINPKQAEIVKYIFAEVLSGKGTQKVANDLNQKGIPSKRGGRWTATTIRGILTNEKYTGDVILQKTYTDSHFNRHTNYGEKNMYLVENHHEAIISPEDFEAVDAILNQRAKEKGIEKRNSKYLNRYSFSSKIICSECGSTFKRRIHSSGTRKYIAWCCSKHISNITECSMQFIRDEDIKTAFVTMMNKLIFGQKFILRPLFHGLRNQNNAASFRRIEELETKIENNMEQSQVLTG

SEQ ID NO: 4081 - protein, 542 aa, synthetic construct
MQQLKTKRVGIYVRVSTEMQSTEGYSIDGQINQIKEYCDFHHFEVKDIYADRGISGKSMNRPELQRILKDAKDGYIDCVMVYKTNRLARNTSDLLKIVEDLHKQNVEFFSLSERMEVNTSSGKLMLQILASFSEFERNNIVENVFMGQTRRAQEGYYQGNLPLGYDKIPNSKHELMINQHEANIVKYIFESYAKGHGYRKIANALNHKGYVTKKGKPFSISSITYILANPFYIGKIQFAKYKDWSEKRRKGLNDKPVIAEGKHSPIINQDLWDKVQMRKKQVSQKPQVHGKGTNLLTGIIHCPQCGAPMAASNTTNTLKDGTKKRIRYYSCSNFRNKGSKVCSANSVRADVIEDYVMKQILEIVKSDKVIQRVVTHVNQENQVDGAALHHDIAYKQQQYDEVQIKLNNLIKTIEDNPDLTSVIRPSIQKYEKQLNDITNQINQLKNQQNEDKPLFDAKEISKLLQHIFHDIKHIEKSRLKALYLSVIDRIDIKKDGNHKKQFYVTLKLNNEIIKQLFNNKQLDEVHLSTSSLFLPQTLYLTI

SEQ ID NO: 4082 - protein, 449 aa, synthetic construct
MKQVIGYLRQSTMKQQSLAAQKQAIEAITEKHHIQHINFYSDKQSGRKDNRSGYRQITQLIQQGQCDILCCYRLNRLHRNLKNALKLIKLCQTYRVHILSVHDGYFDMDQAFDRFKLNIFISLAELESDNIGEQVRNGLQEKAKQGRLITTHAPFGYEYHNGTFIINQNESPTVKAVFNYYIKGHGYKKIAQLLEEDNTYINRQPYQVRNIIINPNYCGRVNNQYGQFDNMFPSIVSTSIYEQAQRLRLQKQTKQTPSDNQLKQKIKCPCCNATLTNMTIRKKNHTLRYYVCPKNMNASRFVCDFKGINAQTLEDKVLEVCRDFYQNQRIYTKIKSAIDKRIKRQRNIEKHHTLTQKQLIEKLAQGIIDAETFREQTQSLRQQPQRTTSINGHQIQNTIQNIIQKRFTLNMLYPYIDEILITKSKTLMGIYFKNEPLNIVNQTTQSSIA

SEQ ID NO: 4083 - protein, 558 aa, synthetic construct
MERKIALYSRVSTTEQSERGYSIHEQEQVLIKEVVKNYPGYDYETYIDSGISGKNIEDRPAMKRLLKDVKDNKVEMVLSWKLNRISRSMRDVFNIIYELKEHGVGYKSISENIDTSNASGEVLVTMFGLIGSIERQSLISNVKMSMNAKARSGEAITGRVLGYKLSLNPLTQKNDLVIDENEANIVREIFDLYLNHNKGLKAITTILNQKGHRTINQKPFSVFGVKYILNNPVYKGFVRFNNYQNWSVERRSGKSDEKDMILVKGKHEAIISEEMFDQVHDKLVSKSFKPGRPIGGDFYLRGLIKCPECGNNMVCRRSYYNTKKSKERTIKRYYICSLFNRSGSSACHSNAINAEVVEHVINVHLNRILSQPKVIKQIATNVIEELKRKHNNKSNIIIDINSLEKQKAKLKGQQERLLELFLDDQMNSEMLKEKQHQLNHRLQALEEQIKTSQQSNLEETKVPDFDRLKSRLTLIISRFSVYLKEANPEAKNQLMKLLIDSVEITTDKKVKLIRYKIDESLIPQSLKKDWGSFFMPKIHFVIDGSQEYSIDQISTFAT

SEQ ID NO: 4084 - protein, 559 aa, synthetic construct
MKGKIALYSRVSTSEQSEHGYSIHEQEQVLIKEVVKNFPGYDYETYTDSGISGKNIEGRPAMKRLLQDVKDNKIEMVLSWKLNRISRSMRDVFNIIHEFKEHDVGYKSISENIDTSNVSGEVLVTMFGLIGSIERQTLISNVKLSMNAKARSGEAITGRVLGYKLSLNPLTQKNDLVIDENEAHIVREIFDLYLNHNKGLKAITTILNQKGYRTINQKPFSVFGVKYILNNPVYKGYVRFNNHQNWAVQRRSGKSDKNDVILVKGKHEAIISEDVFDQVHEKLASKSFKPGRPIGGDFYLRGLIKCPECGNNMVCRRTYYKTKKSKERTIKRYYICSLFNRSGSSACHSNAINAEVVERVINVHLNRILSQPNVIKQIASSVIEELKQKHSKQTEIKYDIDSLEKQKAKVKTQQERLLELFLDDEMDSEMLKAKQSEMNQQLEVLDRQIKEAKQANQSQDDIPNFDKLKARLILMITRFSLYLRKATPEAKNQLMKMLIDSIEITTDKQVKLVRYKIDESLIPQSLKKDWGFFFMPKFNFVINVANENRIENLSLLPLF

SEQ ID NO: 4085 - protein, 489 aa, synthetic construct
MTQLKKKRIGLYARVSTEMQTDGYSIHGQLNQLTEYCQFQGYEVVDEYTDRGISGKTTQRPELQRMLKDANEGKLDGIMVYNTTRLARNTSDLLNIVEELYEINVEFFSLTEKIEIASSTGKLMLQILASFAEFERNVIVENVFNGQRQRAIEGYYQGNLPLGYDKVPDSKKELMINQHEANIVKYIFESYAKGHGYRKIANALNHKGYVTKKGKPFSISSITYIISNPFYIGKIQFAKYRHWSDKRRKGLNEEPIIADGKHAPIIDRNLWDKVQFKRQESRKKPQVHGKGTNLLTGIVKCPKCGAAMAASNTTNTLKDGTKKRIRYYSCSNFRNKGSKVCSANSVRADVLEKYVIDQILEIIKSKKVLKQLVEKVNEKSQIDVSSLNHDIAYKQSQCEEIKVKMHTLTKTIEDSPDLDSVLKPTILSYQDELNQINNQIHQLEQDKQAEAPHYDADMIANILQTIFKDIDKFRKIAVEIIVSDGHRSY

SEQ ID NO: 4086 - protein, 449 aa, synthetic construct
MKQAMGYLRQSTTKQQSLAAQKQTIKVLAEKHNIQHITFYSDKQSGRTDKRNGYQQITELIQQGQCDVLCCYRLNRLHRNLKNALKLMKLCQTYHVHILSVRDGYFDMNKAFDRLKLNIFISLAELESDNIGEQVKNGLREKAKQGKLITTHAPFGYHYHNGTFTIDTVKSPTVKAVFNYYLQGYGYKKIAQYLEADNKFINRKPYQVRNIILNPNYCGRVINQYGQYENMFPAIVSTTIYEEAQVTRTQKQVKRKPSENQLKQKIKCPYCHSTLTNMTVRKPDHSLRYYVCPQNMNNARFVCEFKGINAQELETSVLATCQDFFQNQQLYSKINHTIQQRLKKQKDIEAKNTLTQEQLIEKLAQGKIDAESFRKQTQSSRQHSKPILSINAYQIQKAFQNIIQQRFTLNMLYPYIDEIHINKNKTLTGIYFKNEPLNIVNQTTQSTIA

SEQ ID NO: 4087 - protein, 560 aa, synthetic construct
MSGKIALYSRVSTSEQSEHGYSVKEQEQVLIKEVVKNFPGYDYETYIDSGISGKNIEGRPAMKRLLQDVKDNKIEMVLSWKLNRISRSMRDVFNIIHEFKEHGVGYKSISENIDTSNASGEVLVTMFGLIGSIERSTLISNVKMSMNAKARSGEAITGRLQGYRLSLNPLTQKNDLVIDENEANIVREIFDLYLNHNKGLKAITTVLNQKGYRTINQKPFSVYGVKYILNNPVYKGYVRFNNHQNWAVQRRSGKSDKNDVILVKGKHEAIISEEVFDQVHEKLASKSFKPGRPIGGDFYLRSLIKCPECGNNMVCRRTYYKTKKSKERTIKRYYICSLFNRSGSSACHSNAINAEVVERVINVHLNRILSQPDIIKQIASNVIEELKQKHSNQTEIKYDIDSLEKQKAKLKTQQERLLELFLDDQMDSEMLKAKQSQMNGQLKMLDKQIKEAQQATESQDEVPNFDKLKSRLTMMISRFSVYLREATPEAKNQLMKMLIDSIEITTDKKVKLVRYKIDESLIPQSLKKDWGSFFMPKIHFIIYGTQKYSIDKITTFATLS

SEQ ID NO: 4088 - protein, 520 aa, synthetic construct
MKKVITIEATPSIIRSSSDDFSLKKRRVAGYARVSTDHEDQATSYESQMRYYSEYINGRDDWEFVKMYSDEGISGTNTKLRTGFKAMVEDALNGKIDLIITKSVSRFARNTVDSLTTVRQLKEVGVEIYFEKENIWTLDSKGELLITIMSSLAQEESRSISENVTWGLRKQFAEGKVHFPYTNVLGFKAGEDGAIVVDQDEAKTVRYIFQQALIGKSPYHIAKDLTEQGIPSPSGKSHWNATTIKRMLRNEKYKGDALLQKTYTIDFLTKKKNINRGELPQYYVENNHEAIVDRETFDAVQQVLDNKGRKSTTTIFSSKLVCGDCGHFFGSKVWHSTSKYRRVIYRCNEKYNGSSKCSTPHVTEEEVKQWFVLAVNQVIDNRLEVIDNLSVLLSIGSLEVIDEQIKVLETEAEVVSQLVANLVSENAIIRQDQDKYLKKYNQLTSKYEGIVQDIESLELQRMKKSKRNKELQDFIGTLEKLGKVLTDFDELLWESLVESVMINEDKVAKFKFKNGAVVAI

SEQ ID NO: 4089 - protein, 411 aa, synthetic construct
MRTVRRIQPIKSPCKPRFKVAAYARVSDSRLHHSLSTQISYYNRLIQAHPDWELVGIYYDEGISGKEQSNRQGFLNLIKDCEDGKIDRIITKSIARFGRNTVELLTTVRQLRLKNIGVTFEKENIDSLSSEGELMLTLLASVAQEESQNLSENIRWRIQKKFEKGIPHTPQDMYGYRWNGEQYQIEPNETKVIRKVFKWYLDGDSVQQIVDKLNQEQVLTRLGNPFTVASIREFFKQEAYFGRLVLQKTYREAFSRNPKRNKGQRNKYIIENAHEPIVTKEYFDLVLHEKERRYQLMHQESHLNKGIFRDKISCSECGCLMIVKVDSKQVNKTVRYYCRTRNRFGASSCSCRTLGEKRLLASFKSKLGIVPDKEWVENNIKYIDYDFGQRIIWVIPVKGRKYPIEIREGRY

SEQ ID NO: 4090 - protein, 402 aa, synthetic construct
MKQIKTIQAQKVTTIKRLKVAAYTRVSHTSLLQSLSNQVSHYSQMIQANPKWDYVGVYSDSAISGRSQAHRRDFQQLLEDCRKGKIDIILTKSISRFGRNTVELLETVRELKRLGISVRFEKEKIDTLTAEGELLLTLLASMAQEESQSISQNIRWRVKKRFEEGKSYIPQDIFGYRWNGEEYVIEPHEASIVRQVFEWYMEGLSAPKIAKKLDDRGERTRLGNRFTKRIIYNMFDQEAYCGRLILQKTFRDHFGSRSIPNDGQMAKYIVENAHEAIVTPEYFQQVNQEKKRRARRRVSKHDALAKLQGKVYCEHCGLDMILTLETKSNQEKRVRYYCRTRDAKGVEACLGRTVTEEQLFQAFGERINTEDIHHISFNSVTNEAKATYRNGEEKHVIIQKGR

SEQ ID NO: 4091 - protein, 413 aa, synthetic construct
MAVRLIKTKSNRKKQRVCAYTRVSTTNSSQLDSLENQKAYFETFYVNREDVDFLGVYYDKGISGSKEKRPSFQAMLEACRQGQIDLIHTKSISRFARNTMTVLEVSRELKALGVGIYFEEQNINTLSNEGEGMLSVLASLAEEELQSMSDNQRWAFQRKFQRGEMVINTKRFMGYDVDDKGELVINEAEAQIVRRIFQLYLDGMGMHRIAKLLNQENVPTVTDAKWHDTTVRNILKNEKYKGTVLLQKYFHVGINGPKRLNQGQVEQYLIEDNHEPIVSKEVWQAVQDKLASKTWKQGVNKHYRFTSMLKCEYCGSTLKRQVTYKKQIVWCCSKYIKEGKASCRGMRVPEKAIEEWKLRTPVTVIERNEYGQKHYSYSSQESAADGHPSASNQNKSGSLLSGVHRPRRTAIKL

SEQ ID NO: 4092 - protein, 428 aa, synthetic construct
MSTDQDEQLSSYENQVSYYRDYILKHEDYELVDIYADEGISATNTKKREAFNRLIQDCRAGKVDRILVKSISRFARNTLDCIKYVRELKELGIGVTFEKENIDSLDSKGEVLLTILSSLAQDESRSISENATWGIRKKFERGEVRVNTTKFMGYDKDENGKLVINPEQAEVVKHIYHQFLKGYSPESIAKELNTNGIKGWSGKANWYPSSILKMLQNEKYKGDALLQKTYTVDFLTKKRTENDGQVNQYYVTNNHEAIIDTEMWDTVQEELARRKDFREKHKLKTYIMQSDDNPFTTKVFCAECGSAFGRKNWTTSRGKRKVWQCNNRYKVKGQIGCQNNHIDEEMLEKAFMKAVELLQEHRADVVVKWQKLEKGTNLLHKHYAKQMYQLLDLEKFDGTIMNKVLDHISISEVGQIIVIFLEGTEVEL

SEQ ID NO: 4093 - protein, 472 aa, synthetic construct
MNSKRKVAIYSRVSTLHQAEEGYSISQQIEALTKYCQAMDWVIYDNYSDGGFSGGKLERPAMRKMIQDAESGKFDTVIVYKLDRLSRNVRDTLYLVKDVFNANNVDFVSLQENIDTKSAMGNLFITLLSAIAEFEREQIKERMQLGVKGRAKSGKTTAWATPPFGYKYDTNTQLMTVDHYQAEIVRDMFNKIISGWSIMGITTYMRENYDGKWTHVKVKRILENITYIGKVKYRNEIFEGEHTPILPEELFYKAQEALEERTNKKDNTRPFQGLYMLSHIAKCGYCGTPLKIDTYKPRKDGTRKRTYTCINKNPRRTKTMIYNNGEECKESGRYDVKDVENYVLNEINKFQLNPESIEALYKDKPEENLKAYEEQLKQLEKKLSKLNDLYINELISMDALKQKSAELLKEKSSLELFINRSKTQTNNKQSFEKLVKMDDILKMSYDDQKKVVKTLIKRVEVKRDEINVIFKL

SEQ ID NO: 4094 - protein, 482 aa, synthetic construct
MITTNKVAIYVRVSTTNQAEEGYSIEEQKDKLSSYCNIKDWSVYKIYTDGGFSGSNTKRPALEQLIKDAKKKLFDTVLVYKLDRLSRSQKDTLYLIEDVFLENKIDFVSLLENFDTSTPFGKAVVGILSVFAQLEREQIKERMQLGKLGRAKSGKSMMWARTSYGYDYHRETGTMTINPVQSLAIKFIFEQYLSGRSITKLRDDLNDKYPKDIDWNYRAVRMILANPVYCGYNQYKGQVYPGNHEPIITEEIYNKTQEELKIRQIAAAEFSNNSRPFRAKYMLSGIAQCGYCGAPLTITLGTRRKDGSRNIRYQCKNRFPRTTRGVTTYNDNKKCDSRFYEKADVEENVLNQISKLQNDTSYLDELFSSTEDNGIDRDSYQKQIEELTAKLSRLNDLYIDDRITLEELQRRSAEFTLMRGMLEAELENDQALKQQERKDDMRQILTRGDVLGMDYEGQKVVVRALINKVQVTSEEIVIKWKI

SEQ ID NO: 4095 - protein, 562 aa, synthetic construct
MSKEKIKVYLYTRVSTSIQIEGYSLEAQKSRMKAFAIYNDYEIVGEYEDAGKSGKSIEGRIQFNRMMEDIKSGKDGVSFVLVFKLSRFARNAADVLSTLQIMQDYGVNLICVEDGIDSSKDAGKLMISVLSAVAEIERENIRIQTMEGRIQKAREGKWNGGFAPYGYKLEDGKLFINEEEAVAIRTIFDQYVNTTIGANGLSKYLENHGIRKIPRQNGKNPLFDAGLIRKILKNPVYNGKIAFGRRTLEKVHGTRNEYKQVEQDEYLISEGIHEAIVSDEVWQAAQVKLKSQAKKYEHVNKGKDTRTHLLSGIVKCPICGVGMFGNKCTKKKKDGTKYKDFYYYGCKHRQMIRGHKCTFRKQIREELLDDAVAEVIVKIVSNPKFASKMQEKINMKVDTSEIEKEIDNYQKELRKSHSTKFKLIEEIDNLDVEDKHYKRRKQDLDDRLYRMYDKIDELESSLIDAKAKKQTIEAEKLTGDNIYKVLIYFDKLYKVMNDVERRQLITALISEIQVYEEKQPNGQWLKSITFKLPIIDDDLNISLDNNKQVECVVLMSKVAPTK

SEQ ID NO: 4096 - protein, 545 aa, synthetic construct
MSKEKIKVYLYTRVSTSIQIEGYSLEAQKSRMKAFAIYNDYEIVGEYEDAGKSGKSIEGRIQFNRMMEDIKSGKDGVSFVLVFKLSRFARNAADVLSTLQIMQDYGVNLICVEDGIDSSKDAGKLMISVLSAVAEIERENIRIQTMEGRIQKAREGKWNGGFAPYGYKLEDGKLFINEEEAVAIRTIFDQYVNTTIGANGISKYLENHGIRKIPRQNGKNPVYNGKIAFGRRTLEKVHGTRNEYKQVEQDEYLISEGIHEAIVSDEVWQAAQVKLKSQAKKYEHVNKGKDTRTHLLSGIVKCPICGVGMFGNKCIKKKKDGTKYKDFYYYGCKHRQMIRGHKCTFSKQIREELLDDAVAEVIVKIVSNPKFASMMQEKINMKVDTSEIEKEIDNYQKELRKSHSTKFKLIEEIDNLDVEDKHYKRRKQDLDDRLYRMYDKIDELESSLIDAKAKKQTIEAEKLTGDNIYKILIYFDKLYKVMNDVERRQLISALISEIQVYEEKQSNGQWLKSITFKLPIIEENLNIGLDNDEQVECVSLLEKRS

SEQ ID NO: 4097 - protein, 597 aa, synthetic construct
MKKNNVEIIKADSLVRRRGDNVERHLKRVAAYCRVSSDSEDQKNSYDSQVRHYKEYISQRSDWELADIYADEGISGTQVGKRQDFQRLINDCANGEIDYIVTKAIARFARNTLDTLKYVRMLKDMQIGVYFEEENIDTLTMDGELLLTILSSVAQQEVENTSAHVKKGLKMKMQRGELVGFQGCLGYDYDVETKQISINKKEAKIVRYIFERYLEGIGGKVIARELDELGYKSPRGLEHWNDTTVLGIIKNEKYKGDILMGKTFTVDPISKRRLSNFGEEDKYYIKDNHEPIISKEDFEKAQEIRLRRAGNKKTAANVNGKRERYSKMYAFSSMLECGFCGSILSRRSWHCRSDYRKVVWHCVTSIKKGKKFCKHSKGLEEIAIEGAFLEAYRQVYHSNENLMTDLLETIESELNDNSLNKELKRITNKLRILLKKEENLVNLRLEGKVSDSIYNEKYNEISSEKEFLAEEKVNIETTLKSEIDVKKRLTEFKHLLSSQKMLTEFDRAVFESIVEKIIVGGVNSNGEIDPAMLTIIFKTGEIQNKDGKQFKSKRKNAKLETDKLCPQNSDEDKKLYSQGTDNTRGVCSVAGSILASQ

SEQ ID NO: 4098 - protein, 546 aa, synthetic construct
MSKEKIKVYLYTRVSTSIQIEGYSLEAQKSRMKAFAIYNDYEIVGEYEDAGKSGKSIEGRIQFNRMMEDIKSGKDGVSFVLVFKLSRFARNAADVLSTLQIMQDYGVNLICVEDDGIDSSKDAGKLMISVLSAVAEIERENIRIQTMEGRIQKAREGKWNGGFAPYGYKLEDGKLFINEEEAVAIRTIFDQYVNTTIGANGISKYLENHGIRKIPRQNGKNPVYNGKIAFGRRTLEKVHGTRNEYKQVEQDEYLISEGIHEAIVSDEVWQAAQVKLKSQAKKYEHVNKGKDTRTHLLSGIVKCPICGVGMFGNKCIKKKKDGTKYKDFYYYGCKHRQMIRGHKCTFSKQIREELLDDAVAEVIVKIVSNPKFASMMQEKINMKVDTSEIEKEIDNYQKELRKSHSTKFKLIEEIDNLDVEDKHYKRRKQDLDDRLYRMYDKIDELESSLIDAKAKKQTIEAEKLTGDNIYKILIYFDKLYKVMNDVERRQLISALISEIQVYEEKQSNGQWLKSITFKLPIIEENLNIGLDNDEQVECVSLLEKRS

SEQ ID NO: 4099 - protein, 472 aa, synthetic construct
METNKVAIYARVSTLNQAEEGYSINEQIDSLTKYCDAMSWEVVHQYVDAGYSGGKLERPDITKLISDAKNKKFDTVLVFKLDRLSRSVRDTLYLVKDVFTENKIGFVSLKENIDTSTAMGNLFLTMLSAIAEFEREQIKERMQFGLAGRAKSGKPTSWKTPPYGYTYDKNLQEMVVNEYEANNVREMFDMIISGHSLMQITHYARDHYPGNTWTHVKVKRILENEAYIGLVKLRNERYKGNHERIISDEIFIKAQNAIEERTNASDNTRPFQGKYMLSHIAKCGYCGAPLKIDTSKPRKDGTRRQTYTCVNKFKARSTNGATIYNNGKICKSGRYDAKTIEKFVIEEIRKIQIDEDFFKSKKQKSNINNDIAKKEISKIENKIEKLNDLYINDLIALDDLKKKTSDLKKEISKINKSINEEIIDSVKQNALNELESNIDISKSSYEVQKRIVKLIVDRVEVTNDNINIILKF

SEQ ID NO: 4100 - protein, 543 aa, synthetic construct
MAMLRGMALKAAIYARFSDKEKQTDKSIEDQVALCRTMCERDGLLVVEVYSDHGISGASTVNRLGLQRMMRDAKAGKFAVVVAESLDRISRDQEDLAGIHKRLNFARVEIRTFVDNTVGEIHVGVKGLVGALFLKDLAQKTRRGQAGVVRDGRHNGGRSFGYRPVLGKPGVLEIDEAEAEIVREIFDLYLDGYTARDIAARLNKRGAPGPRGGHWNASTINGSRTRRNGILQNDLYAGKIIWNRQSFVKDPETGKRISRPNPRDQWMTAEAEQLRIIDSDTWVLAQSRVGDRAGTPHKARPQHLLSGLVKCGKCGSGMIACGTDKRGVRLMCSRRRETGLCDNGIGVPRSTVEDRVLAGIEEHLADPELVAEYVAEYHRIMRELNSKAAVQIRAIEKRLTTVNTQIGRLVDAIVGGSLARALQDRLAALEAEREEIEREKAAVGADPVEFHPNAANAYRLKIRSLKKWLAGTGDEARQAAFAGIRQIVEKVTIHPRGPGEPVGIEIDGQLAAILRLSDTVTGAGESQGAMVAGIGFEPMTFRL

SEQ ID NO: 4101 - protein, 678 aa, synthetic construct
MRTTPKIYNYARVSTTKQTKGVGLETQQQRSVLENLSQEHNLPIHDENFVDQGLSAYHGKHKDGAFGVVLSRIESGEIASGSILVVFSLDRLSRETVNVAMEQFLSIINRGVRVYTHIDCKMFDSESQNQTADLIGSLITMQRANEESETKSKRIIAAQKIALKRWKDTGKPQGALGRSPFWIDQPTNTLNINAEGVKKAVEMKLAGYGDLKIKQYLDANFEYKQTRTKGTVKQSNTWDYTAISQLWANRSLIGEKNFHIEGVSHVFENYYPPIIDEATFRKLKMCKSEKRGRNTSTGKIPLLKGIARCGICGGAMVFVDKGDNRVNYVCNLAMKGEHDREVYNVNMLDLLTLEICKDAYLAESDKANNTFVENEKIKIETELVEEREVLDELVARFKAKKSNTILDLIGDSENQIDVLEAKLDAINNADVVLNADELVSLPEIFTDDVRTDYLHPERYTIRNNLYRFISSITLNRVVEHCSDAKIKSANCIDITWHFKNGQKRRLAMLPYQYLKADDGRKSLYLPFVYMYGSKSNIKVDDGGQFLPSIFEKLHAFDLTKCLYPSRGCYQWSKLSLECGKTYWAPLDKAMFMEKGMEVIADTVRDNGGTNKVDGVTTNYLSLMFNYPSSEEFSYDYPDSTFVELACKFGFVADRDFSLFLQDNNFNRELYSSLDFLMS

SEQ ID NO: 4102 - protein, 539 aa, synthetic construct
MPESAVRKVTVIPADPKHNQKDIRKQRLRVAPYCRVSTSSEEQLDSYQAQIEYYTEKIAAQQEWTMVDMFADEGKTATSTKKRKDFLRMIKACEKGKVDLIITKSVSRFCRNTLDGLDYVRRLKRMGVGVFFEKENVNTLYMDNEMILTFMMSQAQAESESMSGNIRWGHRKNFKDGKVYFHYAGFLGYRRGENDLPEIDPEEAEIVRRIFSRYLIGHSVAKIIADLEADGIKTARGHKKWNDGVIRGMLQNEKYMGDALLQKTYIADLFTRQTKKNTGELPQYYVENSHPAIIDRLTFQRVQEEMARRSSLKKVSTAAKTELAKYSGKYVLTELLSCGNCGSPYRRVTWTRPEGKKIVWRCINRLENGKKFCKDAPTLEENRIHTAVVSAMNEMFSQKSLKAILQDSIRTALLPGNGETSLAAIDSRLSQLREQQYRLLQLAAAVGADSTQYDEDLKKVSMEFSALVAKRSELEKNKQDTEQADERAEQLAAELESADTGITAFDEVTVRQLISAITVLSEEKLLIRFKDGTEIEQII

SEQ ID NO: 4103 - protein, 526 aa, synthetic construct
MYQSNSTSAVAPKITLIQARKPEIAKLRVAAYARVSSDSEDQQNSYIAQVDYYTRHIAAQDSWELADIYADEGISGLVASKRDEFNRMIQDCRDGKIDRVLVKSISRFARNTKEYIQYVRELLRLGISIHFEKENIDTGKMTSEQIATIYGAFSQMESQNHSNNMRISVRIRMEKGDYLSPSEPYGYRLEGRTLMIIPEQAEVVRRIYAAYLSGQGKDDIADKLNKAGIPRTKGRTVWHPSTVAYILTNIAYTGDMLWQKSFATNEIPFRQVRNKGEKPKYFVENCHEAIISKEDFQRVQALMESRRRQTNGTVSSALLAKKIRCEGCGTLFRRKIVNNKVYWTCRRHDRDKDLCPTSQIPEEQIVTAILRMYHKLKRHRAQILSPVLSQLTELREKELRSNRRINDIDKEIAQLTEQNLVLVRLKSKGYVDSALYLSQTGEIDFKLRELRRQRRRIMEANGEDSQIKATQAMLDYLEDSPEYLEALTEEVFETLVESIFISSETAMNISLHNGLMLKETMERTVR

SEQ ID NO: 4104 - protein, 571 aa, synthetic construct
MGRLPKAYSYIRFSTPKQAQGDSYRRQIQQAIDYCAKHNLELDEKAIEDFGVSGFRGSNWTDGALGRFIEAVKSGAIAKGSYLLVESMDRLSRQTVLKAFSQFIEILNAGIAVVTLSDGEIFRATDDGNNFDFAKLIISIVYMARANDESEMKSRRSRAAWSNGRKEARESNKVMTNSRLPTWLTREGERIVPIPERAAIVNEMFEMAKSGCGYEQIAKAFLEKGYKTFGKEADWRPAGIQAVIKSQAVIGVFQPHVIENGERVPDGEPILGYYPTIVSPALFEEVQHLIGTRSKHSGSYRKGTYSNLFSGVLRCQCGELLRYHNKGKAGNPRNYLVCPKQNITGCNLPNMLYDKVEPQLLQAVSLLSAVMGQRGAASEKTLALKDELAILQRKLELEAKKRNKAAQSMLELDDDAVFRELFTQCKANCQALEVQIHQLEDDITGRELSEKTLGKMIVPDDLNNTEQRQQFNSQLKAAVKEISIISTGDSVAAVFKDLDGQFMLEQAFKPKLAGSSIRDISGEELLRTTAEAPYIDADWVKAESNEFESIHHKSDSEFDDDFEDLSSEASK

SEQ ID NO: 4105 - protein, 523 aa, synthetic construct
MRQVITYLRFSSKPQERGDSIRRQKGLFERWLKDNPDAKVVDEFSDEGASAYHGHHLKGDFGRMLQNIQDGKYLSGQTVLLVESETRLNRQKARNTENLVDLITGKGVDVICLESGKIYTSTNIDDLDTSIQLKIAAHIAHQQSKEKSIKVSAAWEHRAQLALEGKQQLTKNVPGWIDPDTRKLNEHSSTVVTIFDLLLSGESLHNIARYLQANNIKSFSRREKANGFSVHSVRTILRSESTVGTLAASKRNDRPAIPNYYEPAIDVATFNKAQEILSKNRVGRAPASDNPITINLFKGIIRCQCGASVHPTGVKATYQGVYRCNNVPDGRCNVPTIKRKPFDKWMLDNIVGFLERSDGNNTDKRKAEIEYQISLVTSKLKKATPLLLELDDVTELKEQVKELNIQRSNMQSELDELNQRETLSDKPLHHLSEIDLTTKAGRVEAQLILSKFVQSIELQREMIIITLRNGTVIGKSRDLSPVLSQDLMKQVVSSSSPRDIDMFSVITSDEEFRKSGKQVTKRS

SEQ ID NO: 4106 - protein, 527 aa, synthetic construct
MRVSVNLNAQKPDTTTNAVIYARYSSHGQTEQSIEGQLAKGHEYAAAQGYTVVHEYIDRAMTGRNDNREAFQKMLSDTGKHQFQVVIVWKVDRFGRNREEIAFNKHTCKKNGVRVEYVAESLPNSPEAVILESVLEGMAEYYSIQLSQNIRRGQLESAKKCQCVGGSVPLGYTLDSDKHFVIDPQTAPVVKKIFDLYAEGATISEITEQLNEQGIRTIRKQLFTKNSLTKLLKNEKYIGVYTYKDIVRVEGGVPAIVDKSTFDRVQELLKINRRAPSHTWTKVEYLLTDKLFCGHCGSPMVGESGFSHTGAKYSYYGCIKRRREKACDKKPVRQDWIEALVLDETVKLLHDDELMEYIIDRTWEYYQVTDKVQEEKAVLEAQLAEVDKAINNLVRAIEAGIFNAATKSRMDELDAQKAALTTSLADLELTSGIRITRDHIEYFLLRLRDLDVKDRECQKRLVQTFVNAVFVYDDGRVKITYNYSGQSSTITLNQIASAEKGKGFVCCLPCSTSSPRFPRGVAAFFVF

SEQ ID NO: 4107 - protein, 540 aa, synthetic construct
MPKAISYIRFSTKIQSVGDSTKRQSKYINDWLKRNPDYYLDESLRFQDLGISGFSGANARSGAFGEFLAAVESGYIEAGSVLLVESLDRVSRQDIDTAGEQLRKILRSGVEVVTLVDNEWYTKESLKDSLSMIKAMLVMERAHEESAMKSTRLRSVWAAKRERAAKGEIMSKRCAAWLKVSEDRSHFEFIPENVKAVQRVFQLRLEGLSHVKIAKQMNDEGFSTLNQFKSVTGGWSQSSVTELLSNRSVIGFKVPSKSMAVKGVSEIPNYYPSIITDEQFYAVQQLKQGSGRKPSSDLPLLTNLFKGVLRCSECGFIVVVAGVSAKRSGIYKCSMKSEGRCNSVGFSRLQTDRALVQGLLYNANRLFLNRDNGSAIGALQGELEQLQKQRERLIKLAMLADDTESMAKDLKALNSQIKDAEKAVSEVHQREQSSQLETISHLDLTVKKDRIEAQIIIKRIVKEIRLNTAEKKCDVLLHNGLRLLNFPLDRVVDGAQWLEILPLIDGDEFDFEGFSTKPRHLAFEEAPEWVKELEFNSKIQ

SEQ ID NO: 4108 - protein, 475 aa, synthetic construct
MKDYADANDIQVAREFVDVETAKKSGRTSFNEMLQYVRRHPTVRTLLVEKTDRLYRNLKDWVTVDDLDIEIHFVKEGVVLSQDSRSSEKFMHGIKVLMAKNYIDNLSEETRKGMLEKAEQGLWPTVAPIGYLNVEGPNGKKIITIDPALGPLVQRLYEWYSTGQYSLKEVSKKARQAGLTYRKSGAPIGVSTVHTILRNRIYTGAFEWLDKVYQGSHAPLVSEDLWGAVQDVLDGRKAANIRASVNDFPFTGMMTCGHCGCAMVGEIKKQRYIYYHCTGFKGKCGEPYVREEVLEQRFAGLLRQLRFDDAAFELIQRALRESLQDETRERRAAIERLRGEADRLQARIERMYEDKLDGVVSDDFYRRMQIVWREERDRCLKDIERHHSADDEYIDNGIALIRLGREAHDLFEQASASEKRRVLNLVLSNCSWAHGELTAKFRQPFDLLSETIAQSTFSKKEKTGDLPENEKWLRG

SEQ ID NO: 4109 - protein, 507 aa, synthetic construct
MKRVISYIRFSSEKQAKGDSLRRQSKMVTDWLKAHPEYYLDQDLSFRDLGVSGFTGKHLKGGLGDFLTAIEKGLVKAGDTLLIESLDRLSRQDIDIASELLRNILRSGVDVVTLSDGEHYTRESLRDPLALIKSILIMQRAHEESLRKAERIQAAWDAKKEAAKAGIKVSKRCPAWLKLNDDRKSFSVIPEKVETVKRCFQLRLEGKSIWEIVRTLNDEGHQSMSQYKPGSFGQSSVQDLLKNRSVIGYFTPKGCEEISGYYPAIIDETTFYKVQQLSHYRYGRKPVSDKPLSVNLFKGVIRCSECGHALIITGFSDTRNGIYRCPLRNENRCSAKGLSRKQTDGTLLTLLSRLDRFDSDTTNTIDMLRLHREHISSNIEKLVQLSLEIEDLSAITIKLKQLKGELSQVDADIEKETQRLKSIDVGCLSDCDLTTKAGRIEAQLIIKSAVKEVVLNTAKRRCKVTFHNGRIINLPITENPSEDVTEAIQSLSEVTERGLIDVDEVII

SEQ ID NO: 4110 - protein, 554 aa, synthetic construct
MGHAIENGLVYSYLRFSDPKQSAGGSTDRQLAYAAKWAAEHGLKLDTNLSLRDEGLSAYHQQHIKSGALGVFLRAVEDGRVPSGSVLIVEGLDRLSRAEPIQAQAQLAQIVNAGITVVTASDGKTYSRQRLKDNPMDLVYSLLVMIRAHEESDTKSKRVKASIRRLCEHWIDGTYKGRIRQGKDPHWVRELDEGWELVPERVAVIRRVLAMYQDGIGGLKIMESLEREGLQLLPGAVNNSQQVYRLIKQHALAGSKEVSVDGELFLLPDYYPAILTAEEWSELQRVAADSGRRRVKGELPHLITGLGITTCGYCARPMAGQNLATKPRLPDGRIRDGYRRLLCASAAAYGGGCPVPGSTSVAPVERAIMSYCSDIVNLQALYGTDRSEGPRKRVHAARQAVKELRDQLDKLTDAMLATASEGTPLVFARRARQLEADLEHAEKAAAQAERELANLARQDITGADARWAELAAGVEAQKVAPRLKARQLIADTFEKIVVYHHGLRPDPDSLQRDYHIDLLLVAKGGNTRMLRVDREGNWMAGEETSTIQSIHERK

SEQ ID NO: 4111 - protein, 508 aa, synthetic construct
MKKAIAYMRFSSPGQMSGDSLNRQRRLIAEWLKVNSDYYLDTITYEDLGLSAFKGKHAQSGAFSEFLDAIEHGYILPGTTLLVESLDKLSREKVGEAIERLKLILNHGIDVITLCDNTVYNIDSLNEPYSLIKAILIAQRANEESEIKSSRVKLSWKKKRQDALESGTIMTASCPRCLSLDDKRTAFVPDPDRVKTIELIFKLRMERRSLNAIAKYLNDHAVKNFSGKESAWGPSVIEKLLANKALIGICVPSYRARGKGISEIAGYYPRVISDDLFYAVQEIRLAPFGISNSSKNPMLINLLRTVMKCEACGNTMIVHAVSGSLHGYYVCPMRRLHRCDRPSIKRDLVDYNIINELLFNCSKIQPVENKKDANETLELKIIELQMKINNLIAALSVAPEVTAIAEKIRVLDKELRRASVSLKTLKSKAVSSLGDFHAIDLTSKNGRELCRTLAYKTFEKIIINTDNKTCDIYFMNGIVFKHYPLMKTISAQQAISTLKYMVDGEVYF

SEQ ID NO: 4112 - protein, 506 aa, synthetic construct
MRSVITYLRYSSAIQGAEGADSTRRQNDLFKQWLKKNSDAQVVASFSDEGLSGYKGKHLTGQFGDMLARIESGEFPEGTILLVESIDRIGRLEHLETEALMNRILGNGLEIHTLQDGLIYTKDALADDLGISIIQRVKAYIAHQESKQKSFRVSQKWEQRAKLALAGEQRLTKMVPGWIDPDTFKLNEHAETVRLIFKLLLSGESLHNIARHLQSNGIKSFSRRKDANGFSVHSVRTILRSETTIGTLPASQRNDRPAIPNYYEAAIDASTFNKAQEILGKNRIGRTPASDNPLTINIFKGLFRCQCGASVHPTGTKNKYQGVYRCNNHLDGRCDVPPLKRKPFDKWMIDNFLGMIDVGNDGEAEGKIASLQHEVEIVTTRIKKATALLLEMDDIDELKIQLKELNQKRTELQTTIDNMRRKASLTDKELPQLKDIDLTTKAGRVECQLILSKHLKGLTLGKDSVTVTLQNDTEITIPTNPLPLNDGSPIFEIADKELLDIDAYQL

SEQ ID NO: 4113 - protein, 506 aa, synthetic construct
MRSVITYLRFSSATQGAEGADSTRRQNELFKQWLRKNSDAQVVASFNDEGLSGYKGKHLSGQFGDMLSRIESGEFPEGTILLVEAIDRIGRLEHLETEALMNRIIAHGIEIHTLQDGLIYTRDALSDDLGISIIQRVKSYIAHQESKQKSFRVSQKWEQRAKLALAGEQRLTKMVPGWIDPDTFKLNEHAETVRLIFKLLLSGESLHNIARHLQSNGIKSFSRRKDANGFSVHSVRTILRSETTIGTLPASQRNDRPAIPNYYEAAIDAATFNKAQEILDKNRKGRTPASDNPLTINIFKGLFRCQCGASVHPTGTKNKYAGVYRCNNHLDGRCDVPPLKRKPFDRWMIDNFLGMIDVGNDGESERKIAALQHEVEIVTARIKKATALLLEMDDIDELKIQLKELNQKRTELQSTIDNMRRKASLTDKELPQLKDIDLTTKAGRVECQLILSKHLKGLTLGKDSVTVTLQNDTEITIPTNPLPLNDGSPIFEIADKELLDIDAYQL

SEQ ID NO: 4114 - protein, 506 aa, synthetic construct
MRTVITYLRFSSATQGAEGADSTRRQNELFKQWLRKNSDAQVVASFSDEGLSGYKGKHLTGQFGDMLARIEAGEFPAGTVLLVEAIDRIGRLEHLETEALMNRIIAHGIEIHTLQDGLIYTRDALSDDLGISIIQRVKSYLAHQESKQKSFRVSQKWKQRAKLALAGEQRLTRNVPGWIDPDTFKCNEHAETVRLIFKLLLDGESLHNIARHLQANNISSFSRRKDANGFSVHSVRTVLRSESVIGTLPASQRNDRPAIPNYYEAAIDAATFNKAQEILDKNRKGRTPASDNPLTINIFKGLFRCQCGASVHPTGTKNKYAGVYRCNNNPDGRCDVPPLKRKPFDKWMIDNFLGMIDVGNDGEAEGKIASLQHEVEIVTARIKKATALLLEMDDIDELKIQLKELNQKRTELQTTIDNMRRKASLTDKELPQLKDIDLTTKAGRVECQLILSKHLKGLTLGKDSVIVTLQNDTEITIPTNPLPLNDGSPIFEIADKELLDIDAYQL

SEQ ID NO: 4115 - protein, 532 aa, synthetic construct
MKVPVWSYARISTLKQVDGFGIQRQVNTINQFLQYVVLDHRLPFTLDTENITQMVAEGKSAFRGKNWNEKTKLGQYRKMVMDGVINDSVLIVENIDRLTRLDPFQAVEIISGLINRGTTILEIETGMTYSRYIPESITVLTMQINRANGESKRKSIMMQKSHANRYGKVSKVRPRWFDVVEIDGVKQYRPNETAKAIQRMYNDYINGIGAAQIVRTYGNTDNGKPWTLVTVLRALSDKRVADDARYPPIIDKDLYDRVQALKASTNKKGNTHQKNMLNIFSGMSRCPVCNQSIIVKRNSHGNLFTVCLGKRTNKTCEARSIAYNALERPLLTAIRGLDFSEVYKHEDNNVLTLRDQWIQNERDIAAFRERLNKASRHEKFAILDELEIMNREQEELTIRLKSVDVPKDIQLTFDDDKLDLDTNYRIELNNRIKKLIQHINIVREDVSKSKYTIYCTIKYWSDALSHLVIIDVDIQRTGTGGTNTLTTTLRSVSSLSLDGTLSGDLDDDALEYWKNVVDGAIALATTMIDSRK

SEQ ID NO: 4116 - protein, 506 aa, synthetic construct
MRSVITYLRYSSAIQGAEGADSTRRQNDLFKQWLKKNSDAQVVASFSDEGLSGYKGKHLTGQFGDMLARIESGEFPEGTILLVESIDRIGRLEHLETEALMNRILGNGLEIHTLQDGLIYTKDALADDLGISIIQRVKAYIAHQESKQKSFRVSQKWEQRAKLALAGKQRLTKMVPGWIDPDTFKLNEHAETVRLIFKLLLSGESLHNIARHLQANNISSFSRRKDANGFSVHSVRTILRSETTRGTLPASQRNDRPAIPNYYEAAIDASTFNKAQEILDKNRKGRTPASDNPLTINIFKGLFRCQCGASVHPTGTKNKYAGVYRCNNHLDGRCDVPPLKRKPFDRWMIDNFLGMIDVGNDGEAEGKIASLQHEVEIVTARIKKATALLLEMDDIDELKIQIKELNQRRTELQTTIDNMRRKASLTDKELPQLKDIDLTTKAGRVECQLILSKHLKGLTLGKDSVIVTLQNDTEITIPTNPLPLNDGSPIFEIADKELLDIDAYQL

SEQ ID NO: 4117 - protein, 547 aa, synthetic construct
MKLLVTYIRWSTKEQDSGDSLRRQTNLIDAFYSKHREEYYLLPAHRYVDKGKSGFHQQHKNQGSDFRRMFENVMSGGIPEGSLIVVENFDRFSRADIDTAIDDVRQILRKGVSILTLGDGELYDKSALTDPVKLIKHIIIAERAHQESLVKQKRIAQVWNHKTQLARELKKPMGKQAPGWLELSDDGSHYIVDEDKASLVNLIFDKRLSGLSMFAICKWLNEQGYPTINQRKVRISKTQKPDGNWSALSVKHILTSRSVLGYLPAKISTEDRKTVLREEIEGFYPQIVTDSKFYAVQQLLEETGKGKTSSGEHWLYVNILKGLIRCRCGLVMTPTGIRKPVYQGTYRCNGNKESRCNYGTVSRKLLDTQLCSRLFSKLSQLHDEATDTDRLDELQRRLTTVDIELEKLTETLIQLPNITQIQEALRVKQEEKDELIAQLSREKARVKSVSSLDLSGLDMESVEGRTEAQIIIKRLVKEIVVSGNEKLVDIYLHNGNMIRGFPLDGKDDHTLTLEEATDEMQSLDDMLIFGEPVTRVYPASDMEEVDA

SEQ ID NO: 4118 - protein, 690 aa, synthetic construct
MSSTDLIPAELLARKAVVYVRQSTQSQVMTNLESQRRQYDLVDIARQRGFGDIEVIDDDLGRSASGTVARPGFDRLVALLCAGKVGAVLCFDASRFARNGRDWHHLLELCGLVEARVIDHDGVYNPCRPNDRLLLGMKGSISEFELGVLRARMLDAVRSKARRGELRLSVPFGYIWHREAGLGLDPDLRLQEVIRSIFTRFHELGSARQVLLSMTKDQVHFPRPSDEGRMTSFVWTPVRYRNVIGILKNPFYAGVYVYGKSEKRTAIVDGRARRTYGHGKPAGTWEVMIRDHHEGYITWDEYERNQQQLALNNYGRSGGTKSGRGGKALLSGLLTCGRCGRRLSVAYTGNPQSRPVYRCDKPNLMMGLPRCMTFGGPRVDAAVARELLRAVEPLAIEATFEAERMHRERQEDQRHIHDLELRQARYEASLAERRYAACDPDNRLIAAQLEKNWETALCRVRDLEVRKPADSPSTIEVDPDTFTNLADNLQAARGSPDVTMRARQQLLRTLIADIVVDVDDAVREVVLTIHWKGGQHSELKVRKPQSGEHGCATTEDALAVMRSMAGRWSDEHIAASLNRMGMPTGQGKTWTAHRVASVRRVRAIHAYKSADKDGEWMTMTEAAAALGVTNHRIRHLIKTKVLSAEQVVPGAPYQIRASDLASATVQAAIARKARPCRIADAETLPMFTDT

SEQ ID NO: 4119 - protein, 687 aa, synthetic construct
MMHEKIGAHHLERKAILYVRQSSAHQVLHNRESSALQYAMRDRLAALGWSHIETVDDDLGRSAAGGVARAGFDRMVAEVCLGKVGAVAAREVSRFARNSRDWQQLIEMCRVVDTVLIDQEAVYAPRQGNDRLLLGLKGSLNEYELDLLRQRSLSARYEKARRGELVVTVPIGFLKAGDRIEKDPDRRIQEAIALVFDKVAELGSARQALLWFLEQGLDLPVRYANGDVTWRRPNYATIHRMIANPIYGGAYAYGKSRSVRGYDGRSGICRKARDEWLALIPDAHEGYVSWERAEEIRKMVSDNVPTSRHHGAPKHGDALLAGLFRCKRCGRKLTVRYTGSNHNIPRYSCWRGLLDNGEPRCIAFGGPRVDDAIEEALLGVVGPGAIAAAVEADRNMASQRDQVQDALLRDLEAARYAADRAFRQYDAADPENRLVTSELEARWNKALARVGEIEAKIAKHRTVAPQPIPMSASQLVALAGNLRAVWKAPSTDARLKKRIVRTLIHEVVADLDDVASQIVLVIHWVGGVHTELRLPKRRRGQRNATPDDIVEAVRQLVLIANDDVIAGVLNRNGLTTGNGNRWTRERVTALRSYRRIPVFRPQIDGFEPWLNLGGAAKLLGVTPKTLRLAAEAGEIEGTHPLPEGPWIFSRSKLASPEARQILDRARQNPRHPIGSPPNQESLFSSIT

SEQ ID NO: 4120 - protein, 550 aa, synthetic construct
MISKARVYSYLRFSDPKQAAGSSADRQLEYATRWAAEHEMQLDSALSLRDEGLSAYHQRHVKQGALGVFLRAVEGGQIPPGSVLVVEGLDRLSRAEPIQAQAQLAQIINAGITVVTASDGREYNRARLKAQPMDLVYSLLVMIRAHEESETKSKRVKAAIRRQCQGWVAGTWRGIIRNGKDPQWVREESNAFVLVPERAEAILAAVRMFKAGHGAIRTVRALSGMGLAMTAGGNPAQQIYRTIRNPALVGTRVLEVDGEEYKLEGYYPPLISPEEFSELQHLADQRGRRKGKGEIPGVVTGLGITYCGYCGTALVGQNLMYRKRMDDGRLAPGHRRLICVGYSHNTGCPVGGSCSVVPVEQAVMSFCADQMNLTRLMEGDNSATSTSARLALARQRAADIEAQIDRITQALLADDGNAPAAFARKARELEAKLEEKNKGVAALEHELAATASATPPAAAAAWAELVAGVEELDYDARMKARQLVADTFARIVVYHRGFRPDESDGRSIDVMLIAKRGSTRMLHIDRRSGGWRAAEDLSLPAEGGLPWPPG

SEQ ID NO: 4121 - protein, 707 aa, synthetic construct
MSRTSRITALYERLSRDDDLTGESNSITNQKKYLEDYARKNGFENIRHFTDDGFSGVNFNRPGFQSLIKEVEAGNVETLIVKDMSRLGRNYLQVGFYTEVLFPQKNVRFLAINNSIDSNNASDNDFAPFLNIMNEWYAKDTSNKIKAIFDARMKDGKRCSGSIPYGYNRLPSDKQTLVVDPVASEVVKRIFALANEGKSTRAIAEILTEEKVLTPAAYAKEYHPEQYNGNKFTDPYLWAMSTIRNILDRQEYLGHTVLRKSVSTNFKLHKRKNTDKEEQYVFPNTHEPIISQELWDSVQKRRSRVNRASAWGTHTHRLSGYLYCADCGRRMTLQTHYSKKDGSVQYSYRCGGYASRVNGCTAHSISANNVEALILSAVKRFSKFVLNDEKAFALELQSLWNEKQEEKPKYNQSELQRCQKRYDELSALVRGLYENLISGLLPERQYKQLMKQYDDEQAELETKMEMMKSELAEEKVSSVDIKHFISLIRKCKNPTKISDTMFNELVDKIVVYEAEGVGKARTQKVDIYFNYVGQVDIAYTEEELAEIETQKEQEEQQRLARQRKREKAYREKRKAQKIAENGGETVKTKVCPHCNKEFIPTSNRQVFCSKECCYQSRQEEKKADREAERGNHYYRQRECAVCGNSYWPTHSQQKYCSEECQKESHNKKSLEFYHHKREKEKLQCKDLSQTRERVSDMNLSGTITTPA

SEQ ID NO: 4122 - protein, 413 aa, synthetic construct
MSVKKIRVNKQKHRKKVCAYIRVSTTNGSQLESLENQKQYFENLYSNRDDIDFVGVYHDRGISGSKDNRPNFQAMIENCRKGMIDIIHTKSIARFARNTVTVLEISRELKAIGVDIFFEEQNIHTLSSDGEVMLSVLASIAEDELRSMSGNQRWAFQKKFQRGELVINTKRFLGYDIDENGELIINPEEALIVRQIFALYLEGYGTHRIAKLLNEKGVATVTGAKWHDTTIRQMLSNEKYNGSVLLQKYFHDGVNGPKKLNQGELEQYFIEDNHEPIISMEDWQAVQDKLNSRRWQQGRNKTYKFTGLLKCQHCGSTLKRQVSYKKKIVWCCSKYIKEGKSACKGMRVPEVDISNWTVTSPVTVIERDRDGEKYYSYSSQESADQYSSSGQEENQSSRILSSVHRPRRTAIKL

SEQ ID NO: 4123 - protein, 548 aa, synthetic construct
MIQTNSNDFSFKAAIYCRLSKDDEQKGESASIQNQKELLENYVKSRGWSIYDVYIDDGYTGLNTNRPSFQRLIRDIENKKVDIVITKDLSRLGRNYLQTGYYTENFFPKNNVRYIALNDGVDTFQENNEIVPFKNVLNEFYSRDVSKKMKSAYMTRARQGKFIGCLAPIGYRKDNDDPHKLVIDDETSWIVEKIFDLAFSGYGVQAIRRRLFEEKIPTPTWWNRKKGLRNKKTKLEMTVDGGEYWWDCTTLKEIIENPVYIGHIASQKVNYKFKVGWLSDKPKEEWIIVENTHEPIISEDIYNIANEKLKSRRRPFKNGEESIFAGIVKCPDCGKSLNLGRNKSKKREKLLTCNTYRRYGKSLCSQHRIYYDTLYEIVLKDIRKNAEIALKDEKEIIKALEKSREIDNEEEQKFIMDKIYEDQIRVEDLTKKIERLYDDWLDNKISESNFQKILEKSQNEQDYLNQRIEDNQKLIVKEDLEDINVKKWIELIKKHRNIKKLDKETLNELISKIYVHEKEVVNGEITQTIDIYYNFIGNTDTLQVFYNL

SEQ ID NO: 4124 - protein, 551 aa, synthetic construct
MSNMNRTGQTALYERLSRDDEMQGESNSITNQKQLLENYAKRNGFVNIYHYTDDGVSGTTFDRDGFQKMIKAVEENKISTVIVKDMSRFGRDYLKVGFYTEILFKEKGVRFIAINNGIDSEKQAESDFTPFLNIMNEWYARDTSRKIQSIFRARMEEGKRVSPSVPYGYYRNPKNKQELLVDKESSKVVKRIYRLVIEGYGVTQIAEILTKDKVLIPSAYAEIHYPENNHSSKKRGIDDPYFWTPTTVGYILEKREYMGHTVLGKTICLDYKTKKRRKAKEDELIIFKNTHEAIIDEETWNNAQRLRKTVRRSPKYGTTSNPLTGLLICADCGGKLSYREPAEHKEKKYDCDYCFVCQHYRHRKGTCSIHYIKLKTVNEILLKSIKEITNFAKEEKQEFLKVMNKLSDEKREEKYQGDKEKLEKLSSRNEELTTLITKLYEDHALGKIPVKHFDRLFNTYDTEQQDLEKQIQYFEQEIESYHQRKVDTDKFLKMIEKYTNIEKLTVTMINEYIEKVVVHESTGGRKGKYRKQQVDVYFNFIGNCQVPQSEE

SEQ ID NO: 4125 - protein, 615 aa, synthetic construct
MTKTVLFYARYSTDRQNEVSIETQIELGKTFVADRGWKLVETYADSAISGTSFTSRPGIQQLLAHVKRERIDVVLCVTVDRLSRDVEHSSKILKELNYHDTAIWTVQAGQEISHIELHMRSTLSHELVEQIRYRTREGMKTAARKGIATTRLSYGYRLGQQRDANGDRIRGLREIEPAEAETVRWIFEQYADGVSPAAIAQSLNARGVPAPQHKYWRDDTIRGDGKRQTGILHNELYVGRIVWNKQNYRKNPETERRTARLNDKSDWVVTEVPAMRIVSDALWARVKERQLTTLENFSRTTTNRLNRAHRPSYLLSGMLECAECGGSYAIMAKERYGCSNHKSKLPVDGLGGACCTNQKTILRKNLEDRVLSCLPAAFFGMGVFDDIAEEVRRTIAASIRDEPDERQQIAGALKAAEQEQRQIIQQISDRAAEGRPRLAALDDMLDTLEERRAGLEARLKPAPAEEDFGGRIRKLKAEVSPEAVERIINSAFYYMREHADTETKQPFINLVRQFIQKVVIGKTPGHQPASLEVHGRIASILAAMEAATILEKQFEALKQHDYLEKLRAGELETEEKRKKLLDAYAEELSERRLEWQNIQVSVVAGAGFEPAAFRL

SEQ ID NO: 4126 - protein, 507 aa, synthetic construct
MKRVISYIRFSSERQAKGDSLRRQSKMVNDWLKAHPEYYLDQDLSFRDLGVSGFTGKHLKGGLGDFLTAIEKGLVKAGDTLLIESLDRLSRQDVDQASELLRNILRSGVDVVTLSDGEHYTRESLKDPLALIKSILIMQRSHEESLRKSERIQAAWNRKKELISEGIKISKRCPAWLKLNDDRKSFSVIPEKVETVKRCFQLRLEGKSIWEIVRTLNDEGHQTLNQYKAGSFGQTSVQDLLKNRSVIGYFTPKGCEEIAGYYPAIIDETTFYKVQQLSYSRYGRKPASDKPMAVNLFKGVIRCSECGHALIITGFSDTRSGIYRCPLRNENRCSAKGLSRKQTDGTLLTLLSRLDRFDSDMTNTIDTLKLHREHISSNIEKLVQLSLEIEDLSAITIKLKQLKGELSQVDADIEKETQRLKSIDVGCLSDCDLTTKAGRIEAQLIIKSAVKEVVLNTAKRRCKVSFHNGKVIDLSITENPSEDVTEAIQSLSEVTERGLIDVDEVII

SEQ ID NO: 4127 - protein, 507 aa, synthetic construct
MKRVISYIRFSSEKQAKGDSLRRQSKMVTDWLKAHPEYYLDQDLSFRDLGVSGFTGKHLKGGLGDFLTAIEKGLVKAGDTLLIESLDRLSRQDVDQASELLRNILRSGVDVVTLSDGEHYTSESLKDPLALIKSILIMQRAHEESLRKSERIQAAWNRKKELISEGIKISKRCPAWLRLNDDRKSFSVIPDKVETVKRCFQLRLEGKSIWEIVRTMNAEGRQTLHQYKAGSFGQTSVQDLLKNRSVIGYFTPKGCCEIAGYYPSIIPESDFYKVQQLSHSRHGRKPVSAKPLSVNLFKGVIRCSECGHALIITGFSDTRNGIYRCPLRNENRCSAKGLSRKQTDGTLLALLSRLDRFDSDTTNTIDMLRLHREHISSNIEKLVQLSLEIEDLNAITSKLKQLKNELSQVDADIEKETQRLKSIDVGCLSDCDLTTKAGRIEAQLIIKSAVKEVVLNTAKRRCKVTFHNGKSITLPITENPSEDVTEAIQSLSEVTERGLIDVDEVII

SEQ ID NO: 4128 - protein, 577 aa, synthetic construct
MTTRRPHVYTRISKTTQTEGSGLDEQTTRIEQYLESKKHLFEGEVTYWQDIGLSAYKNKNIQDGQLAEFIKQVDEGKIGEGDALIIYSLDRLSRRSSWDETTIQHLVKKGVEIHDVSTPVVLNREDSMSKIIMELIVTRGNNESKIKSERSIAGWEKRLNDTLNDGRVFTKKVPRWLGSNDDEYIVLKEEAEIIQRIFREYTNGMSSPMIARRLNDEGIKNSGESLWRPTTITKLIKDERLRGNLVRERITLIPNIFPRIIDDELFVLANRILSTNAVGKKGRPRENNKTREVDNIITGLVRCGKCGSKVTTSKNGRGMKYIVCLARLNYLVCGQKSIRLDEVEKIVINHVKQVDMNKVLSISNVDTTSEAQLQAELIELENEEQKCNDKIEERKIQKQRTSLPLATALTDIQDRIEEVKSELLNLQVQEPLPDIIDVDLSVLMDARNVELRMSLRKYLIQTVETITFRYLAEHILIELNYKNGVYKHVIVTTKKLEVLHDIGIERTGDVVIYSTGSFSITEDESAGVCTFSGLNNVETQSYFLLANYMSVLEGKQWIVDLMYEKENMECVIGSTQH

SEQ ID NO: 4129 - protein, 506 aa, synthetic construct
MRHVITYLRYSSAIQGAEGADSTRRQNDLFKQWLKKNSDAQVVASFNDEGLSGYKGKHLSGQFGDMLSRIESGEFSEGTILLVEAIDRIGRLEHLETEALMNRILGNGIEIHTLQDGLIYTKDALADDLGISIIQRVKAYIAHQESKQKSFRVSQKWGQRAKLALAGKQRLTKMVPGWIDPETFEVNEHAETVRLIFKLLLDGESLHNIARHLQANNISSFSRRKDANGFSVHSVRTILRSETTIGTLPASQRNDRPAIPNYYEAAIDAATFNKAQEILDKNRKGRTPASDNPLTINIFKGLFRCQCGASVHPTGTKNKYQGVYRCNNHLDGRCDVPPLKRKPFDRWMIDNFLGMIDVGNDGESERKIAALQHEVEIVTSRIKKATALLLEMDDITELKAQVKELNQKRTELQTTINTMKRKTSLSDKGLPQLKDIDLMTKAGRVECQLILSKHLKGLTLGKDSVTVTLQNDTEITIPTNPLPLNDGSPIFEIADKELLDVDAYQL

SEQ ID NO: 4130 - protein, 511 aa, synthetic construct
MSRADARLRAVPERAERALLLIRVSKEREGMIAPELQRDATREHCARRGYEVVDTIEGIDESGSRARSAWWPRLDAAIARVVAGEVDVIVVWELSRTARNRLRWAVALDQVEAAGGRIESATEPIDQTTAAGRFQRGMLAEMHAYRAEAIGEGWKATIARRRRAGLPHSGGQRFGYRPGDDGRFEPDPETAPILAEAYRRYSAGAGLRALCTWLTALGIRTSRGGLYSHDTLGRMLDSGFGAGLLRVHDPDCTDRHPAGTDVGRCPQRTYLPGAHTAVIDTATWDAYLDARADRTTIAPRHRRASTPLSGVARCGACGYTLTYEREKTRKRGTQAPRFSCLRAGCRRSSVRYSVAEAAVVAWLSTVEAQMGAASASAEQSSAAAQVQAERAARAVTDAARALAQLTVDHARRIVPTSAYEAARDALVAEQSAAQATLERLIRRASASADHAMAAARLLETWGSAPAEDLAPMLRGLCTVWVVRREGARGCDVRIVGAWEPSPEPTRPIPRD

SEQ ID NO: 4131 - protein, 501 aa, synthetic construct
MGREERTKDKSIAYSYIRLSSKQQIKGDGARRQIEAAELYCKQHGLTLSSKTFRDLGISAYKEVDRPSLSDLHQCIANGTIKAGDVVILEKLDRLSRQGIVKTQAMLQEILSQGVVVVSLMDGLVLDRDSLNDLTLVIRIAVASDIAYKESLAKSQRIQANKDAAREKAKQGVAIPRKLPFWLSLIDGKYQFNDRLAVLKTIIDMKGDGASLAKIAGHLNSSGIPTANHNGVWNPSTLRDVIANPCLYGAHQVRVKVQGKYQPSELINDYYPAVISFSEYQELNSPAVQRPAGRSETNHISGLVYCEHCGKKMAAKSRKNKTGKVTYYYCRYALLESCEHKAHVRDLHSHVIDNANRLEIKQTIKDDKRANEILIELSQIDNRVRELSESLASMTSTIATTAVISALSSLEEQKKALLAEQKQSMPIAADAVKTLLTLVDDPKQFNIQLKKIISEIRVRQSGKGHIVSVKRHDGHKIVFHTNGAFTTDTKQFLDEIRELNQ

SEQ ID NO: 4132 - protein, 515 aa, synthetic construct
MYRPQELDVFIYLRKSRKDLEEEKKAMEHGQHYDTLERHRTQLLELAHKEHHNIIDILEEVVSGEYISERPMMQKLLREVESGIANAVLVMDLDRLGRGDMVDQGTIYRVFRYSETFIITPTEIIDPNDENQELTFSIKSLIAREELKTIVKRMQRGRRVSAKEGKSISRVPAYGYLRDNNLKLYPDPEKSWVIPKIFELMANGMGRQAIAQELDRLGISPPEGEYWNPSTISSITKNEVYLGHIIWGKIRYTKQNGKYIRKKVPKERWQRHDHAHTPLVSEALFQKANMAHSKRWRPPTIKTKKLSNPLAGILLCELCGHSMLYQPRKDRPNPQVRCVQSSCKGVQKGASLALVEQRILDGLKQIIESFEIQENMVQKKKIKNNIQFQQKALEKKAQQINDLQKQKGNLHDLLEKGIYDIDTFLERQKSIVVRLKTTQEEIEQLEQEINQTLEQEKHIHKFVPKIKTVLEAYYATTDVEKKNYLLKSVLKKVTYLRKQEWRRKDEFVVELYTKI

SEQ ID NO: 4133 - protein, 508 aa, synthetic construct
MKKAIAYMRFSSPGQMSGDSLNRQRRLITEWLKVNSDYYLDTVTYEDLGLSAFNGKHAQSGAFSEFLDAIEHGYILPGTTLLVESLDRLSREKVGEAIERLKLILNHGIDVITLCDNTVYNIDSLNEPYSLIKAILIAQRANEESEIKSSRVKLSWKKKRQDALESGTIMTASCPRGLSLDDKRTAFIPDPDRVKTIELIFKLRMERRSLNAIAKYLNDHAVKNFSGKESAWGPSVIEKLLANKALIGICVPSYRARGKGISEIAGYYPRVISDDLFYAVQEIRLAPFGISNSSKNPMLINLLRTVMKCEACGNTMIVHAVSGRLHGYYVCPMRRLHRCDRPSIKRDLVDYNIINELFFNCSKIQPVENKKDANETLELKIIELQMKINNLIVALSVAPEVTAIAEKIRLLDKELRRASVSLKTLKSKGGSSLGDFHAIDLTSKNGRELCRTLAYKIFEKIIINTDNKTCDIYFMNGIVFKHYPLMKVISAQQAISTLKYMVGGEVYF

SEQ ID NO: 4134 - protein, 552 aa, synthetic construct
MQTATLYIRVSTDEQAQKGYSQQSQRERLEKFCFANKIQILQVVYEDHSAKTFNRPEWSKLFLSLSRNRSNRSNRPDFILFSRWDRFSRNAADAYSMIERLKKMNIETKAIDQPLNLAIPENKIMLATYLATSEVENDRRSLNVRQGMRKAKQEGRYMCHAPIGYINITLIDGKKCIIPKEPEATFIKNIFIELAKGYHSTRFIYNEAIENGFKCSLNNFWPMIRNPIYCGKIIVPAYEQENRYLVNGLHEKLISEGTFKQVQQVLNNHGKPQRRTTTNNQLPLRGLLTCPLCFKNLTGSASKGRNTYYHYYHCMNGCKFRVRADSIDELVLKELIQLIPREFYLSLFHVVLKRVYNKHFGEASNTQSQIFKSIERTFERLNKAKELLLTGDIDNDDYFAIKADCEYKINSIGTSLNNAAFMISKAEKIIADAIGKFSNISLTYQQFETTYKRKIIDLLTEKRILCDDKNFHIHFTDGVKFIFNLDHENLDAMIYEGIQANSDSNSAEEFVYSQECAEIMKFESNNNRNIEPRNAQDIILFLERFTELIICS

SEQ ID NO: 4135 - protein, 475 aa, synthetic construct
MKTTNKVAIYVRVSTTSQVEEGYSIDEQKDKLEAYCKIKDWKIYDVYVDGGFSGANTQRPELERLISDVKRKKVDIVLVYKLDRLSRSQKDTLFLIEDVFAKNDVAFISLQENFDTSTPFGKASIGMLSVFAQLEREQIKERMMLGKEGRAKNGKSMSWTTIPFGYDYSKETGVLSVNPTQALIVNRIFTEYLNGKPVVKIIRDLNAEGHVGRKRPWGETITKYLLKNETYLGKVKYKDKVYEGQHEPIITQELFDLVQLEVERRQISAYEKYNNPRPFRAKYMLSGLMKCGYCGASLGLRYTRKDKNGISHHKYQCRNRHSKDLEKRCESGWYSKEELERVVIKELERIKFDPKYKNETLAKKEETIKVEEIKKQLERINNQVSKLTELYLDEIITRKELDEKNDKIKTERQFLEEQLENQKSNVLSIRKRKLTRLLKDFDVEKLSYEDASKIVKNIIKEIIVTKDGMSITLDF

SEQ ID NO: 4136 - protein, 559 aa, synthetic construct
MKTKLYSYIRFSSMKQADGSSYERQKRTAAEIAAKYDLELVTSYQDFGVSAFKGANSRTGALSRFLDEIGRSVPVGSWLVVENLDRISRQSIIEAQELFLSIIRRGITIVTGMDGKVYSKESVNANPIDLLLSVMLFARANEESQTKRNRTNSSALIKIKAHQENPQNPAVAIEEIGKNMWWTDTTSGYVLPHPVFFPIVQEVVELRRNGRSTAEILDHLNATYTPPPAASHKRHSNWSRAMIERLFHTRALIGIKEISVDGVKYELKDYYPRVLDDAEFYHLKKSIGVRACNYGDKEEVKPIPLLSGVGLLKCEHCGSAMVKVKGTNKRPNQYRYSCDAMRSSRIACVHTNWSFRGDQLEKAVLQLLADKIWIAEDKANPVPALKVQIDEISRKIDNLITLSAMTGATKELADQITTLNSERETLYNQIKMAEEEMYSVDSQGWEKLAEFDLEDVYNEDRIKVRFKIKQALKRIGCSRIDKYKNLFVLEYIDGKTQRVVIENSRGPRKGRIFVDLKTINDRQILESNGLVLHPCLDMLTDKNWKPEEEIPGPLQEFGI

SEQ ID NO: 4137 - protein, 543 aa, synthetic construct
MSKARVYSYLRFSDPKQAAGSSADRQIEYARRWAAERNLELDDTLSLRDEGLSAYHQRHVKQGALGVFLSAVEGGRIAPGSVLIVEGLDRLSRAEPIQAQAQLAQIVNAGITVVTASDGKEYNRERLRSQPMDLVYSLLVMIRAHEESDTKSKRVKAALRRQCQQWIDGKWRGIIRSGRDPHWVEIRDGQFALVPERVAAVREALALFSRGHGKTKILRTLTERGLSMSNAGNHGTFIYRLVRNPMLMGTRVFEIDKEEFRLEGYYPALLSPEEFAVLQHLADERKGTRVKGEIPGLLTGLGITHCGYCGAAMVAQNYMGRARKADGTPQDGHRRLHCVSDSQNSGCVVAGSVSIVPIERAIMTFCADQMNLTKLIEGDDGSAAVAGRLALARQKASGLQAQLERLTTALLADDGNAPPATFLRRARELEEELSAERRVIESLEREVLASASTTAPAAADVWAKLTHGVLALDYESRVRARQLVADTFSRIVIYHAGFRPGEGTEKRIGIQLVAKHGNVRMLDVDRKSGGWRAAEDFDLRALT

SEQ ID NO: 4138 - protein, 507 aa, synthetic construct
MKRVISYIRFSSERQAKGDSLRRQSKMVTDWLKAHPEYYLDQDLSFRDLGVSGFTGKHLKGGLGDFLTAIEKGLVKAGDTLLIESLDRLSRQDIDIASELLRRILRAGVDVVTLSDGEHYTRESLRDPLALIKSILIMQRAHEESLRKAERIQAAWDAKKEAAKAGIKVSKRCPAWLKLNDDRKSFSVIPEKVETVKRCFQLRLEGKSIWEIVRTLNDEGHQSMSQYKPGKFGQTSVQDLLKNRSVIGYFTPKGCEEISGYYPAIIDETTFYKVQQLSHSRYGRKPVSAKPLSVNLFKGVIRCSECGHALIITGFSDTRSGIYRCPLRNENRCSAKGLSRKQTDSTLLALLSRLDRFDSDTTNIIDTLKLHREHISSNIEKLVQLSLEIEDLSAITSKLKQLKGELSQVDADIEKETQRLKSIDVGCLSDCDLTTKAGRIEAQLIIKSAVKEVVLNTAKRRCKVTFHNGKVIDLPITENPSEDVTEAIQSLSEVTERGLIDVDVVEI

SEQ ID NO: 4139 - protein, 546 aa, synthetic construct
MIAAIYSRKSKFTGKGESIDNQIEMCKEYASKYLNIDEFIEYEDEGCTGANLHRDDFKRLMSDAKLKKFDVLICYRLDRISRNVADFSSTLSTLQNYNIDFVSIKEQFDTSSPMGRAMVYIASVFAQLERETIAERVKDNMMELAKTGRWLGGVSPIGFDSSQITYLDENLKERKMSKLTQNKEELKIVQLLFDKYLELKSLSAVETYTLQNNIKTKKGSYFSKNNLRIILTNTVYVRANNKVINHLNSLGIQTCGEIDNNCGLLSYNKQKTVLTETGAAIRSYRDMSEWITTVSSHSGIIDADKWLMVQQLLKDNKSKFPNEGKTHNALFTGILRCSKCGANMQIAHGHLSKKTGKKFYYYSCSMKKNSKSSVCDNKNGKVEEIDYAVIESLKELGNSKMNILKKIKEENKKSKSVRSTLNNQNSIKLTIQSNEKKIDNLLNKLSIDESLDDLILSKIKKIKLENEDLQNSINTLNILDLNSNEESLNLAFIELLLNRCSIIDTLEPDEIKQLASGLIEYLGWNGETGKIKFDFIGSKEESKKKL

SEQ ID NO: 4140 - protein, 390 aa, synthetic construct
MSRPVKAYSYIRFSTPKQAQGDSYRRQLQQAMDYCAEHNLQLDDKTIDDFGTSAFRGANMSEGALGRFVDAVKHGEIEQGSYLLVESVDRLSRQAVEEALEQFLAIVRAGIVIVTLSDKQVFRRGQVDFTKLIVSIVYMARANDESEMKSRRSRAAWSNGREQARKNNKVIANSRLPSWLTRDGEQIVPIPERVAIVNEMFEMAKSGCGYEQIAKVFLEKGYKTFGKEADWRPAGIQAVIKSQAVIGVFQPHVIENGHRVPADEPILGYYPTIVSPALFEEVQHLISKRNKHSGSYRKGTFNNLFSGVLRCQCGESLRYQNKGRAGSPRNYLVCPKQNTAGCKLPNMLYDKVEPQLLQAVFLLNRVMKQRVEGRIKQSLLKPCLPNYEFS

SEQ ID NO: 4141 - protein, 494 aa, synthetic construct
MKAWLYARFSSSQQADGDSINRQVKAAQQWCSANGIELQQTSFRDLGVSGWKSIKRPMFEQLIKAMQEGKIPRGSYVLFESTDRLSRRGWRHTQELIRTITCVYDCKLVILDKGQVYTKENVNDVVQNILLMVAADMAEKESQRKSDLVAAAYKSKRQDGDVSRWPFWIDKTDSGFVLNENAETIRLIIALRLKGVGALGIASELNRRGIKSSRGGNWGHTSIRVVLSNSALYGTKDFYSMKTIKQFDEHGEEIKVTDNQLVSSMPNVFPPLCDFTTWQQIQIKGEKPGRKGQSSPFHNMLFCKCGAAMGLQIGSAGERYRKCTRSKVGSCSQKMIRNFDETLIECLGRITYESSETQKDELPELQARLAKLEGVKDVLMAAGAVDALVDVYKDIAKAKDAVANAQKIAVVPTTELKDVFAGSVDEQRVALKRVISKVVVNRVKNTASIKVHLTNGHKRVFGINIGVKKQSGVNLIFSVSETESFLSELKTINK

SEQ ID NO: 4142 - protein, 589 aa, synthetic construct
MPKRKRAPKKALRAVGYIRVSTDMQAEEGYSLENQEHQIKEYVEYQNMQLVHIYKEEKGASGKNIEGRPQFQQMLADIAKNRDIDYIVVLNMSRFARNAADALVTLNKLKSYNVNLYLIDDKLDTSSKTGSAMFSLSSIFAELERNNIRENTTAGRYQKARNGLWNGAQAPFGYRLDNGKLVIEESEAEVVRIIFDRYVHTPDGIHKIAVWLNEHGYKKEPRGNGKYVFFSPGTLKNILDNPVYAGKIAYGRRRMEQVEGENNEFRPVRQDKEDWQISEGQHEAIVSPELFDEAQKRREAESTPFPRKRSDHVNLLTGLLVCPICGRKMIATNTRGKVKKDGTLGKETHAYNCKYSKKAFGPDCTFTKQYRQELIDKEIDDVIGVCLDDKLIAEMLTYMHNEMQDTEAIEGEIAAQEKQVAKFDTAIRSLSATMDSMDGTEPAYERKYRDLQERQDKLYEKIDEAELKLEEAQRRLDGAREGEATVEEVKLFLTEFGKTIGQVDKATRKTLYAELIDTIEIMPDADWKHGEGIVSRIRFKLPMIYGDKRTLEVSRREDGMLKPADKEVGNKYFRVTENTDECVALLVKA

SEQ ID NO: 4143 - protein, 525 aa, synthetic construct
MQAVYLYIRVSTDEQAVKGYSQRSQLDRLVLYCKDHNLIVTKTIFEDYSAKTFNRPEWNKLFAELKLIKNQSSLILFTYWDRFSRNIMDAYKMLERLQNMKVSIQAIEQQLDFSIPESKIMLAMYWATSEVENDKRSRNVRLGMQKARLEGRWINKAPLGYRNKITSDGKKYIAIYEPEAYVIRQAFTAIVRQNKYCLNDIYKEAVSNGLNCSRSAFYRLVRNPIYCGKIKIPAFEDKPEKIVEGTHERLIPVVLFDHVQRIIKDADLNHPKKLTSKRIVDENLIFRGVLQCPNCGNTLTGSGSQGHTKKYYYYHCMGRCSYRVRADAINLSFLLFLKNNRVEEPFLELANSISKEIYGEEHHDYIQKKEEIKKEMEKLIDRGFNAQKLFSNGNIDYDDYILIRSRCQESLKDNTDKLRQQALKIVAEKHTEKGTDYIINHLGEFYENSDTITKQRIIRLFFPDKVKVIEGNIEKMLSESVKTIFGLTVSASKIKEIHGQQTEQEIVEFFKELYFLGYEQNLKNI

SEQ ID NO: 4144 - protein, 506 aa, synthetic construct
MRSVITYLRFSSAIQGAEGADSTRRQNDLFKQWLKKNSDAQVVASFSDEGLSGYKGKHLSGQFGDMLSRIESGEFSEGTILLVEAIDRIGRLEHLETEALMNRIIAHGIEIHTLQDGLIYTRDALSDDLGISIIQRVKSYIAHQESKQKSFRVSQKWGQRAKLALAGKQRLTKMVPGWIDPETFEVNEHAETVRLIFKLLLDGESLHNIARHLQANNISSFSRRKDANGFSVHSVRTILRSETTIGTLPASQRNDRPAIPNYYEAAIDAATFNKAQEILDKNRKGRTPASDNPLTINIFKGLFRCQCGASVHPTGTKNKYQGVYRCNNHLDGRCDVPPLKRKPFDKWMIDNFLGMIDVGNDGEAEGKIAALQHEVEIVTARIKKATALLLEMDDIDELKIQLKELNQKRTELQTTIDNMRRKASLTDKELPQLKDIDLTTKAGRVECQLILSKHLKGLTLGKDTVTVTLQNDTEITIPTDPLPLNDGTSIFEIAEKNLLNIDTFQL

SEQ ID NO: 4145 - protein, 489 aa, synthetic construct
MRVSREPIADIYVRVSTDEQADKGYSQRNQEEMLRKYCESHSIEIRHVIYEDHSAKTFNRPEWKKLIANLKKNKNRIDLILFTKWDRFSRNAGDAYQMINQLRDLNVEPQAIEQPLDLSIPENKMMLAFYLAAPEVENDRRALNVFYGMRRAKKEGRYMGLAPVGYKNKIDEAGTKYITPKEPDASTLRWSFEQLAKGTYNTEQIWKKAKEKGLKCSKNAFWQVIRNPLYCGKIFIPTFKNEESYFVQGQHEAILSEELFEQVQDILDGRGRKYRLKIETRNEFPLRGFLICPECGKLLTASRSKGRNKYYNYYHCYKGCSMRIGAEQLTELLENELRRYVPSKEVLEVYRDILVESYLEQTRDIQTSKKQISVQLKDLEKRVSHIRDLLATDKIDASEYHEIKNQYSTSIDQLNKKFQEVCGRIPDIDELLKNDIAEFLKLDKVLEQSSSEDFRGFLSLIFPEKLLFDGISFSKSKFCTAVQIGYSYI

SEQ ID NO: 4146 - protein, 513 aa, synthetic construct
MDTSLDIALYLRKSQQDREREAEAAKRGEIYDTLSRHRRELLDIAKKRHYNIIDIFEEVVSGAHLALRPEMNALLENVKARKYDAVLVVDIARLGRGDKVEQGVIERVFKQSDTMIITTTEMFDLNADSGEFSVEVNTFLSRMEYRQIKKRLHAGIMRSTGEGKDVSKKPPYGYRKDENLKLIIHPEEAEIVKYIFQMCIEGKGQMYITNELANMKVPSPSGNETWSNSTINRMIKNPKYKGDQVYGRKQTVRDDNGKVTIREKALESRIVYSPDSHEAIISKEDWDKAQYSISNRSTHTVRKKNLVNVFAGLLRCKKCGKILISNTRSSRSGVYLYCKTPGCDTKGIAMWKVEKALLENLADTLKNINVKDTDGSESSKDKIVKVLQKKLNGLLQEQEKDVVRRENLYDLLEDGTYDKDTFVDRMQVVQERTKEREYQIEELRGNIETAVEDEERRINLVPAVHSALDSYEKAPTAQIKNDILKGIIEAIYYERSDEYSGPLDFTIHVYLLG

SEQ ID NO: 4147 - protein, 455 aa, synthetic construct
MKAAIYIRVSTDEQAKKFSIPAQERLAKAFCESKGWKIYKIYTDGGFSGKNLDRPALQEMLSETDKFDAVIVYRLDRLSRSQVDTMTLIETFFLKNDIEFISLTETLDTTSPGGRAMIGVLAAFSQMERESIRERSIMGRIQRVKSGLRDSPVKKRNFGYDIVDGKLYINESEAAVIREVCNRFEVLQSVGKIQQEQKSQGREVITRARIMNYLTNDLYIGYVHYLDEVHRKGIHEPIISEDQYYRIQAILERIKRAPNINKKSQSLLSGLVRCATCGSPYHHAVKGAKKYASGKVIEYRYYTCKKNRRKPESEGCTNKSHRGEKLEDIVINRIKNYSVDTRTDEKMKDLAENREKLDAQVVKKNRLLALYVDGVYQKSDLDPLMQEIDAEIKRLTDEASQQSKEINNKEITKRLLNKNQTLDFDSLDFAEKQRLLRGIIKEIVINGDNVKVYWL

SEQ ID NO: 4148 - protein, 452 aa, synthetic construct
MKAAIYIRVSTQEQVENYSIQAQTEKLTALCRSKDWDVYDIFIDGGYSGSNMNRPALNEMLSKLHEIDAVVVYRLDRLSRSQRDTITLIEEYFLKNNVEFVSLSETLDTSSPFGRAMIGILSVFAQLERETIRDRMVMGKIKRIEAGLPLTTAKGRTFGYDVIDTKLYINEEEAKQLQLIYDIFEEEQSITFLQKRLKKLGFKVRTYNRYNNWLTNDLYCGYVSYKDKVHVKGIHEPIISEEQFYRVQEIFTRMGKNPNMNRDSASLLNNLVVCSKCGLGFVHRRKDTMSRGKKYHYRYYSCKTYKHTHELEKCGNKIWRADKLEELIIDRVNNYSFASRNIDKEDELDSLNEKLKIEHTKKKRLFDLYISGSYEVSELDAMMSDIDAQINYYEAQIEANEELKKNKKIQENLADLATVDFNSLEFREKQLYLKSLINKIYIDGEQVTIEWL

SEQ ID NO: 4149 - protein, 522 aa, synthetic construct
MSLARSVTVIPARRRGSNVDAEDKKKLKVAAYCRVSTDSEEQATSYEVQVEHYTSYIQNNPEWELAGIYADDGISGTNTKKREQFNKMIEDSMNGKIDMIITKSISRFARNTLDCLKYIRQLKDKEIPVFFEKENINTMDAKGEIMLTIMASLAQQESQSLSQNVKLGIQYRYQQGEVQVNHNRFLGYTKDENNKLVINPEQAKVVKRIYREYLEGASLVQIARGLETDEILSAAQRSKWRPESIKKILQNEKYIGDALLQKTYTVDFLTKKRVVNNGHVPQYYVENNHEPIIPREIYLQVQEEMMRRANIRNGKTGKKRVYSSKYALSSIVFCKECEDVFRRVHWNNRGYRSIVWRCVSRLERKTHLCSAETIREDELQQAIVHAINEVLGNKDNYLNILIENIETVLNENADKPTVGIDEKLEELQMELLRLANSKEDYDDVAEEIYRLRELKQEVMMKNAAREGLRQRIEEMTKYLKEQPQQLETYDDLLVRQLIERVTIHKRNLTIEFKSGIEKEIAI

SEQ ID NO: 4150 - protein, 452 aa, synthetic construct
MKAAIYIRVSTQEQVENYSIQAQTEKLTALCRSKDWDVYDTFIDGGYSGSNMNRPALNEMLSKLHEIDAVVVYRLDRLSRSQKDTITLIEEYFLKNNVEFVSLSETLDTSSPFGRAMIGILSVFAQLERETIRDRMVMGKIKRVESGLPLTTAKGRTYGYDVVDTKLYINEEEAQHLQLIYDIFEEEKSITFLQKKLKELGFKVKSYSSYNKWLMNDLYIGYVSYGDKVHVKGVHEAIISEEQFYRVQEIFSRMGKNPNMNKESSSLLNNLIVCEKCGLGFVHRVKDTVSRGKKYHYRYYSCKTYKHTHELEKCGNKIWRADKLEEIIINRVKNYSFATRNLDKEDELDSINAKLKVEHSKKKRLFDLYINGSYEVAELDKMMADIDAQINYYNSQIEANEELKRDKKVQESLAELATVDFDSLEFREKQIYLKSIINKIYISDEQVTIEWI

SEQ ID NO: 4151 - protein, 452 aa, synthetic construct
MKAAIYIRVSTQEQVENYSIQAQTEKLTALCRSKDWDVYDTFIDGGYSGSNMNRPALNEMLSKLHEIDAVVVYRLDRLSRSQKDTITLIEEYFLKNNVEFVSLSETLDTSSPFGRAMIGILSVFAQLERETIRDRMVMGKIKRVESGLPLTTAKGRTFGYDVVDTKLYVNKEEAQHLQLIYDIFEEEKSITFLQKRLKKLGFKVKSYSSYNKWLMNDLYIGYVSYGDKVHVKGVHEAIISEEQFYRVQEIFSRMGKNPNMNKESSSLLNNLIVCEKCGLSFVHRVKDTVSRGKKYRYRYYSCKTYKHTHELEKCGNKIWRADKLEEIVIDRVKNYSFATRNLDKEDELDSINAKLQVEHSKKKRLFDLYMNGSYEVAELDKLMADIDAQINYYNSQIEANEELKRNKKVQESLAELATVDFDSLEFREKQIYLKSIINKIYISDEQVTIEWI

SEQ ID NO: 4152 - protein, 452 aa, synthetic construct
MKAAIYIRVSTQEQVENYSIQAQTEKLTALCRSKDWDVYDTFIDGGYSGSNMNRPALNEMLSKLHEIDAVVVYRLDRLSRSQKDTITLIEEYFLKNNVEFVSLSETLDTSSPFGRAMIGILSVFAQLERETIRDRMVMGKIKRVESGLPLTTAKGRTYGYNVVDTKLYVNKEEAQHLQLIYDIFEEEKSITFLQKRLKKLGFKVKSYSSYNKWLMNDLYIGYVSYGDKVHVKGVHEAIISEEQFYRVQEIFSRMGKNPNMNKESSSLLNNLIVCEKCGLNFVHRVKDTVSRGKKYHYRYYSCKTYKHTHELEKCGNKIWRADKLEKIIIDRVKNYSFTTRNLDKEDELDSLNAKLQVEHSKKKRLFDLYINGSYEVAELDKMMADIDAQINYYNSQIEANEELKRDKKVQESLAELATVDFDALEFREKQIYLKSIINKIYIDGEQVTIEWI

SEQ ID NO: 4153 - protein, 455 aa, synthetic construct
MKAAIYIRVSTDEQAKKFSIPAQERLAKAFCESKGWKIYKIYTDGGFSGKNLDRPALQEMLSETDKFDAVIVYRLDRLSRSQVDTMTLIETFFLKNDIEFISLTETLDTTSPGGRAMIGVLAAFSQMERESIRERSIMGRIQRVKSGLRDSPVKKRNFGYDIVDGKLYINESEAAVIREVCNRFEVLQSVGKIQQEQKAKGVEVITRARIMNYLTNDLYIGYVHYLDEVHRKGIHEPIISEDQYYRIQAILERIKRAPNINKKSQSLLSGLVRCATCGSPYHHAVKGAKKYASGKVIEYRYYTCKKNRRKPESEGCTNKSHRGEKLEDIVINRIKNYSVDTRTDEKMKDLAENREKLDAQVVKKNRLLALYVDGVYQKSDLDPLMQEIDAEIKRLTDEASQQSKEINNKEITKRLLNKNQTLDFDSLDFAEKQRLLRGIIKEIVINGDNVKVYWL

SEQ ID NO: 4154 - protein, 640 aa, synthetic construct
MNDNMSVEIIKASKTVLDRMRKGNKLIRVAAYCRVSTDSEDQLNSYNSQVQYYTNLIKDNDEWEFAGIFADEAISGTRTKKRVNFLRLIDECRKGDIDMIITKSIPRFARNTVDTLKYVRELKALDIAVYFEDLSINTLTMDGELILTMFSSAAQQEVETTSSNVKKGLKMKMSRGELVGFQGCLGYDYDKESKSISVNEKEAEIVTYIFKRYCEGAGAHIIGKELQERGIKTKKGSERWAPSTILGIVKNEKYKGDIRLGKSFTTDPISGRRLINRGEQDQFYLRKNHVAIVSEETFEQAQEMLGKRSLPQVKNKEQLTSKKFSRKYAFSSLLECGYCGATLTRKIWRPGTKTEKHVWHCAIATGKGKKYCPHCKGIAEAVIEDAFLEMFQRLCTDNKHLIDNALKTIEEVLMQEDTRPQIKKLTREIDVIKNKTKKLVDMYLEDKISKAIYEEKYQLLESDLVDTQNELLTLENTSIDTKTVKMRIENLKKVITNESVLSQFDRKVFENIIEKVVVGSINEDGEIEPYNLKFYFKSGLTRNIDGEDIIPSRVGKLDIVKDIERKLEADKASDSSYSYHSDKGCSPHIHGRPSLKKRCKKNGESNQSRNTRRDRYRKRVDRKRRKHWRSGHFRGRYESS

SEQ ID NO: 4155 - protein, 464 aa, synthetic construct
MQKTVAYVRVSTSKQESIYFQIDAIQKIAKKNNWMVSEVYQDTASGGKIDRTGLQHMLQAIQKNEIERVIVFRLNRLGRNVKDLLTIGELLFEKKVALFSLMEPMLTTTTSLGKLNYEMISSLAELERALIQENQTISYQQKWSKGEPLSATAPFGYRYEHRTLHVQKWEAELVMEVFQRYMRGEGYKRISSQMQGKIPSSTPANIRNMLCNETYTGFLVSKRFGRVKGNFESIISTDDFQQVQQIRQGKQQASAVLRYPFLLRRKIACPFCGTALACRSRKNGQNIYGYYYCAKAENSHKEACRGISISAKIVEAEVVEALQKWLSKKIVPKYLKDAVEGISIDADSQKKTDKAQLLLAFSTKQIDAATLQKKLLALQSQDDMIKERGKSRLQPADKPLFFTWVAQAWSLDTIQSPVFTKLLQHAISSVVVSLNQTTLQMEMLDGSIIHMKGKGGKPHATKSN

SEQ ID NO: 4156 - protein, 452 aa, synthetic construct
MKAAIYIRVSTQEQIENYSIQAQTEKLTALCRSKDWDVYDIFIDGGYSGSNMNRPALNEMLSKLHEIDAVVVYRLDRLSRSQRDTITLIEEYFLKNNVEFVSLSETLDTSSPFGRAMIGILSVFAQLERETIRDRMVMGKIKRIEAGLPLTTAKGRTFGYDVIDTKLYINHEEAKQLQMIYDVFEEEKSITSLQKRLKKLGFKVKSYSSYNNWLTNDLYCGYVSYKDKVHVKGIHEPVISEEQFYRVQEIFSRMGKNPNMNRDSASLLNNLVVCGKCGLGFVHRRKDTVSRGKKYHYRYYSCKTYKHTHELEKCGNKIWRADKLEELIIDRVNNYSFASRNVDKEDELDSLNEKLKTEHVKKKRLFDLYISGSYEVSELDAMMADIDAQINYYEAQIEANEELKKNKKIQENLADLATVDFDSLEFREKQLYLKSLINKIYINGEQVTIEWL

SEQ ID NO: 4157 - protein, 452 aa, synthetic construct
MKAAIYIRVSTQEQIENYSIQAQTEKLTALCRSKDWGVYDIFIDGGYSGSNMNRPALNEMLSKLHEIDAVVVYRLDRLSRSQRDTITLIEEYFLKNNVEFVSLSETLDTSSPFGRAMIGILSVFAQLERETIRDRMVMGKIKRVESGLPLTTAKGRTYGYDVVDTKLYINEEEAQHLQLIYDIFEEEKSITFLQKRVKELGFKVKSYSSYNKWLMNDLYIGYVSYSDKVHVKGIHEPIISEDQFYRVQEIFSRMGKNPNMNKESSSLLNNLIVCEKCGLGYVHRAKDTVSRGKKYHYRYYSCKTYKHTHELEKCGNKIWRADKLEEIIISRVKNYSFATRNLDKEDELDSITEKLKTEHSKKKRLFDLYINGSYEVAELDKMMADIDAQINYYDSQIEANKELKRNKKVQESLAELATVDFDSLEFREKQIYLKSIINKIYIDGEQVTIEWI

SEQ ID NO: 4158 - protein, 535 aa, synthetic construct
MTNQSTNNEKLTALYVRLSNDDEREGESNSIVNQKKMLSKYASDYNLRKTQFYIDDGISGTTFNRKGFQAMIADIESGLVGTVIVKDMSRFGRDYLQVGLYTDIMFPEHNIHFIAINDGVDSEKGDNEFTPFRNIINEWYAKDTSKKIRAVFKAKGLSGVPLTANPPYGYLKDQNNPTQWLIDEESATVVRRMFQLSIEGYGPTQIAKKFQAEEILTPAHYVVSQGRKAMGQLPITPYYWNNKTIANMLESQEYIGHTVNFRSTTKSYKDKRKVRRDKSDWVIFENTHEAIIEQSVFDTVQALRKHKRRPTRQKELPLFSGLLYCADCGGKLYFCRGKSISPNQENYICSSYRRRTTECTAHYIRSVVLEEVITENLKKTMTYIHANERTFMADVLKGDQQARKKEAAQQQKQLIQSQKRIAELDSIFPQLYEDMVSGRITSERFDKLSSTYEEEQVLLKQQVLDASREIQAELDVTAYLRELRKFVRKHIHFETLTPELLHEMIDKIMIHEDKRIEVHYKFGLGDLGHLIDDIA

SEQ ID NO: 4159 - protein, 461 aa, synthetic construct
MTVGIYIRVSTEEQAKEGFSISAQREKLQAYCIAQGWGEFKFYVDEGLSAKNMERPLLKALLKHIETGLIDTVLVYKLDRLTRSVVDLHNMLNFFDKYDCSFKSATEVYDTSSAMGRFFITIISSVAQFERENTSERVSFGMEERARQGKYIPAAPFGFTKGDDGYLIPNEEAAEPLRDVISKIMRGYSLRQCAAYLDNLGVRPRRSKDVWKANTLKLILTNPALYGATKWADKVFENTHQGIITKDEFESLKKIIDDRSSKGTYRSPALTHIFSGKIICEKCGYRMSITRTKYKDRFNNDYRCSNCKVYHTHTSISERKMLKAFDDYIYEFKLVQFDISKETKTVNKQTRVEKQIVSLTKKREKYQKGWALDLIEDDEFSKLMKDTQIELEELEMELQKYTAITEQKFDKIAIKNIVKNIKENWSELSIEERKDFVNMFIKDIHYVKNDGIATITKIDFY

SEQ ID NO: 4160 - protein, 461 aa, synthetic construct
MTVGIYIRVSTEEQAKEGFSISAQREKLQAYCIAQGWNEFKFYVDEGLSAKNMERPLLKSLLKHIETRLIDTVLVYKLDRLTRSVVDLHNMLNFFDKYDCSFKSATEVYDTSSAMGRFFITIISSVAQFERENTSERVSFGMEERARQGKYIPLAPFGYKKGEDGVLVIYEEEAALVLELVDRLQKGYSIRQCCTYLDNLGVKTRRSNNVWKNTTLRRILGNHALYGATSWSGKVFKNTHTGILTEAEFLELQSILKARTGHVSSRKRALTHIFAGKIVCPNCGYRMSCVRTKYKERYNNDYRCPNCKIHYTHTSVSERKLLKAFDEYIESYRLTSFDIKKESKKENNQMKIEKQVVNLSKKREKYQKGWALDLIDDQEFSKLMKETQLELNQLESKLETDKYSSEKTFNQTAINNIVKNIKMNWSELTIEERKDFVNMFLKDIHYVKVAGVAEITKIDFY

SEQ ID NO: 4161 - protein, 543 aa, synthetic construct
MSNQSTNNEKLTALYVRLSNDDEREGESNSIVNQKKMLSKYASDHNLRKTTFYIDDGVSGTTFNRKGFQAMIADIESGLVGTVIVKDMSRFGRDYLQVGLYTDIMFPEHNIHFIAINDGVDSVQGDNEFTPFRNIINEWYAKDTSKKIRAVFKAKGLSGAPLSNILPYGYIKDPNNPTQWLIDEDSAMIVRRMFQLTIEGYGPTQIAKKFESEKILTPAHYAVSLGRKASTVLPKSPYHWNDRTIAYLLEKHEYVGHTVNFRTTRKSYKDKRKIHQDKKDWVIFENTHEAIIEQSVFDTVQELRKHKRRPTRQKELPLFSGLLYCADCGGKLYFNRGKGIDRKQENYFCSSYRRRTTECTAHYIRSVVLEEVVTKNLRKTMKYIQANGKSFFVDVLKGDQQARKKEAQQQQKQLYDAQKRIAELDAIFPQLYEDMVSGRINSERFDKLSSAYEKEQATLKQQVLDILNEKQAELDVNAYIQELRQFVRKHVYFETLTSELLHEMIDKIIVHDNKQIEVHYKFGLGELGNLVEEHCIKKGRGAC

SEQ ID NO: 4162 - protein, 454 aa, synthetic construct
MEMKAAIYIRVSTQEQVENYSIQAQTEKLTALCRSKDWDVYDIFIDGGYSGSNMNRPALNEMLSKLHEIDAVVVYRLDRLSRSQRDTITLIEEYFLKNNVEFVSLSETLDTSSPFGRAMIGILSVFAQLERETIRDRMVMGKIKRIEAGLPLTTAKGRTFGYDVIDTKLYINEEEAKQLQLIYDIFEEEKSITFLQKRLKNLGFKVRTYNRYKNFLTNDLYCGYVSYKDKVHVKGIHEPIISEEQFYRVQEIFTRMGKNPNMNRDSASLLNNLVVCGKCGLGFVHRRKDTVSRGKKYHYRYYSCKTYKHTHELEKCGNKIWRADKLEELIIDRVNNYSFASRNVDKEDELDYLNEKLKIEHAKKKRLFDLYINGSYEVSELDSMMNDIDAQINYYESQIEANEELKKNKKIQENLADLATVDFDSLEFREKQLYLKSLINKIYIDGEQVTIEWL

SEQ ID NO: 4163 - protein, 455 aa, synthetic construct
MKAAIYIRVSTDEQAKKFSIPAQERLAKAFCESKGWPIYKIYTDGGFSGKNLDRPALQEMLSETDKFDAVIVYRLDRLSRSQVDTMTLIETFFLKNDIEFISLTETLDTTSPGGRAMIGVLAAFSQMERESIRERSIMGRIQRVKSGLRDSPVKKRNFGYDIVGGKLYINESEASIIRDVCNRFEVLQSIGKLQQEQKANGVEVITRARIMNYLTNDLYIGYVHYLDEVHRKGIHEPIISEDQYYRIQAILERIKRAPNINKKSQSLLSGLIRCAVCGSTYHHAVKGSKKYASGKVIEYRYYTCKRNRRKPELEGCANKSYRGEKLEDIVINRIKNYSVDTRTDEKMKDLAENREKIDAQVAKKNRLLALYVDGVYQKSDLDPLMREIDAEIKRLTDEASQQSKEINNKEITKRLLDKNRTLDFDNLDFAEKQRLLRSIIKEIVINGDNVKVYWL

SEQ ID NO: 4164 - protein, 452 aa, synthetic construct
MKAAIYIRVSTQEQIENYSIQAQTEKLTALCRSKDWDVYDIFIDGGYSGSNMNRPALNEMLSKLHEIDAVVVYRLDRLSRSQRDTITLIEEYFLKNNVEFVSLSETLDTSSPFGRAMIGILSVFAQLERETIRDRMVMGKIKRIEAGLPLTTAKGRTFGYDVIDTKLYINEEEAKQLQLIYDIFEEEQSITFLQKRLKKLGFKVRTYNRYNNWLTNDLYCGYVSYKDKVHVKGIHEPIISEEQFYRVQEIFARMGKNPNMNRDSSSLLNNLVVCGKCGLGFVHRRKDTVSRGKKYHYRYYSCKTYKHTHELEKCGNKIWRADKLEELIIDRVNNYSFASRNVDKEDELDSLNEKLKTEHAKKKRLFDLYISGSYEVSELDGMMADIDARINYYEAQIEANEELKKNKKIQENLADLATVDFDSLEFREKQLYLKSLINKIYIDGEQVTIEWL

SEQ ID NO: 4165 - protein, 461 aa, synthetic construct
MTVGIYIRVSTEEQAKEGFSISAQREKLQAYCIAQGWNEFKFYVDEGLSAKNMERPMLKSLLKHIENGLIDTVLVYKLDRLTRSVVDLHNMLNYFDKFNCAFKSATEVYDTSSAMGRFFITIISSVAQFERENTSERVSFGMEERARQGKYIPLAPFGYKKGEDGVLVIYEEEAALVLELVDRLQKGYSIRQCCTYLDNLGVKTRRSNTVWKNTTLRRILENHALYGATSWSGKVFKDTHPGILTEAEFFELQNILKARTGHVSSRKRALTHVFAGKIVCPNCGYRMSCVRTKYKERYNNDYRCPNCKIHYTHTSVSERKLLKAFDEYIDSYRLTSFDIKKETKKENNQMKIERQIVNLSKKREKYQKGWALDLIDDQEFSKLMKETQLELDQLESQLEIDEHSPEKTFNVAAINNIVKNIKKNWSELTIEERKDFVNMFLKDIHYVKVAGVASITKIDFY

SEQ ID NO: 4166 - protein, 455 aa, synthetic construct
MKAAIYIRVSTDEQAKKFSIPAQERLAKAFCESKGWKIYKIYTDGGFSGKNLDRPALQEMLSETDKFDAVIVYRLDRLSRSQVDTMTLIETFFLKNDIEFISLTETLDTTSPGGRAMIGVLAAFSQMERESIRERSIMGRIQRVKSGLRDSPVKKRNFGYDIVDGKLYINESEAAVIREVCNRFEVLQSVGKIQQEQKANGVEVITRARIMNYLTNDLYIGYVHYLDEVHRKGIHEPIISEDQYYRIQAILERIKRAPNINKKSQSLLSGLVRCATCGSPYHHAVKGVKKYASGKVIEYRYYTCKKNRRKPELEGCTNKSYRGEKLEDIVINRIKNYSVDTRTDEKMKDLAENREKIDAQVVKKNRLLALYVDGVYQKSDLDPLMQDIDTEIKRLTDEASQQSKEINNKEITKRLLNKNQTLDFDSLDFAEKQRLLRGIIKEIVINGDNVKVYWL

SEQ ID NO: 4167 - protein, 616 aa, synthetic construct
MNDNMSVEIIKASKTVLDRMRKGNKLIRVAAYCRVSTDSEDQLNSYNSQVQYYTNLIKDNAEWEFAGIFADEAISGTRTKKRVNFLRLIDECRKGDIDMIITKSIPRFARNTVDTLKYVRELKALDIAVYFEDLSINTLTMDGELILTMFSSAAQQEVETTSSNVKKGLKMKMSRGELVGFQGCLGYDYDKESKSISVNEKEAEIVTYIFKRYCEGAGAHIIGRELQERGIKTKKGSERWAPSTILGIVKNEKYKGDIRLGKSFTTDPISGRRLINRGEQDQFYLRKNHVAIVSEETFEQAQEMLGKRSLPQVKNKEQLTSKKFSRKYAFSSLLECGYCGATLTRKIWRPGTKTEKHIWHCAIATGKGKKYCPHCKGIAESVIEDAFLEMFQRLCTDNKHLIDNALKTIEEVLMQEDTRPQIKKLTREIDVIKNKTKKLVDMYLEDKISKAIYEEKYQLLESDLVDTQNELLTLENTSIDTKTVKMRIENLKKVITNESVLSQFDRKVFENIIEKVVVGSINEDGEIEPYNLKFYFKSGLTRNIDGEDIIPSRVGKLDIVKDIERKLEADKANDSSYSYHSDKGCSPHIHGRPSLKKRCEKNGESNQSRNTRRDRY

SEQ ID NO: 4168 - protein, 546 aa, synthetic construct
MNRIALYARYSSDQQSAASIEDQLRICRERAAREDWHVVGVYEDAAISGSSMILRPGIQSLVQDAQAGKFDIVLAEALDRVSRDQADVATLFKHLQFARVPLVTLAEGEISELHVGLKGTMNALFLKDLAKKTHRGQRGRVEKGFSAGPVGYGYRTVRRLSSEGELVRGECRIEPSEVPIVERIFREFAAGKSPRAIARDLNADGIPGPSGRPWSDTTIRGKRARGIGIINNEMYVGVRVWNHKHHLKDPRTGRAVARTNPESEWVRVEVPQLRILSDQMWQAVKERQDALAVEYKPQIDGFHSAQASRMHMARRPAYLLSGLVECGVCGDKMGVVTKGRIGCLNHHRRHVCTNHRTIRRELLEQRALSGLAERLVSPDKVQAAVAAYAEYINRENRQQRAQADADAKALEKIDKAVAGIMAAIEDGLYQPVMKARMAELERQKAEITARMAQAPQAIPDVHPGIAEIYKREMQRFTQALEDPETRLDAADAIRSLIERIVLHPGEKHGEIRATLHGALMGILDFVQDTPRPKAIVTTKVALGSLA

SEQ ID NO: 4169 - protein, 546 aa, synthetic construct
MNRIALYARYSSDQQSAASIEDQLRVCRERAAREGWHVVGVYEDAAISGASMILRPGIQSLVQDAQAGKFDIVLAEALDRVSRDQADVATLFKHLQFARVPLVTLAEGEISELHVGLKGTMNALFLKDLAKKTHRGQRGRVEKGFSAGPVGYGYRTVRRLSSEGELVRGECRIEPSEVPIVERIFREFAAGKSPRAIARDLNADGIPGPSGRPWSDTTIRGKRSLGIGILNNEMYVGVRVWNHKQAVKDPRTGRTVRRPNPEAEWVRAEAPQLRIVSDDMWQTVKQRQDVLGEQYKPMIDGIHAAQASRMHRARRPVTLLSGLVECGACGGKVGLAVNGRFGCINHHRRHTCDNNRTIRREALEERALAGLRDRLVSPEKVQAAVAAYAEHINRENREARAQVEADGRALDKIERAIAGIMTAIEDGLYQPTMKARMAELERQKTEVAARMALAPQAVPDVHPGIAEIYKREMERFTQALEDPETRLDASDAIRSLIHRIVLHPGEKRGEIHATLHGALMGILDFAKEAPRSTPVVTTKVAQGSLA

SEQ ID NO: 4170 - protein, 584 aa, synthetic construct
MKEVKVIKARNDLQTRTRGKTIELMRVGAYCRVSTDSADQLNSYKSQVAYYTDMIKKNKEWVLADIYADEAITGTQVAKREDFQRMINDCMNGEIDMVITKSISRFARNTLDTLKYVRMLKERNIAVYFEDEKINTLTMDGELLLVVLSSVAQQEVENISANVKKGLKMKMKRGELVGFQGCLGYDYHKDTKTITVNEEEAEIVRYIFNRYIEGAGGSVIAHELENLGYKTKYGSSTWVQSTVIGIIKNEKYKGDLLLGKTFTVDPISKRRLENFGEEDKFYIRNHHEPIISEEVFEKAQEILARRNVNIGKIGEGNTKREKYSRKYAFSCMLECGFCGGTLTRRNWHSSSQYSKVIWQCVTATKKGKKFCKHSKGIPETAIEEAFVESYRLLCDDNKDVLEEFLQRMDDTLSSSVVSKQLAKAEKEIDALEKKKSKLVDMRLEEIIDKETYESKYADLVSKQEQLVEERKKLQETSDNEKDIKKRLKEFKKTLEQNEVLDKFDRYVFESIVEKVIVGGLDENGNVDPAQLTFVYKTGLKNSVDGAKFKPQRKNARGRHRTDELCSHDSNEVDKMCSDSSNDTL

SEQ ID NO: 4171 - protein, 541 aa, synthetic construct
MPKAISYIRFSTKIQSVGDSTKRQSKYINDWLKRNPDYYLDESLRFQDLGISGFSGANAKSGAFGEFLAAVESGYIEAGSVLLVESLDRVSRQDIDTAGEQLRKILRSGVEVVTLVDNEWYTKESLKDSLSMIKAMLVMERAHEESAMKSTRLRSVWAAKRERAAKGEIMSKRCAAWLKVSEDRSRFEFIPENVKAVQRVFQLRLEGLSHVKIAKQMNDEGFSTLNQFKSVTGGWSQSSVTELLSNRSVIGFKVPSKSMAVKGVSEIPNYYPSIITDEQFYSVQQLKQGSGRKPSSDLPLLTNLFKGVLRCSECGFIVVVAGVSAKRSGIYKCSMKSEGRCNSVGLSRLQTDRALVQGLLYNTNRLSLNRDNGSAIGTLQSELEQLQKQRERLIKLAMLADDTESMAKDLKALNSQIKDAEKAVSEVHQREQSSQLETISHLDLTLKKDRIEAQIIIKRIIKEIRLNTAGKKCDVFLHNGLKLLNFPLDRVVDGGQWIEILPLIDGDEFDFEGFTTKPRHIALEEAPEWVKEMEEQPNQPL

SEQ ID NO: 4172 - protein, 541 aa, synthetic construct
MPKAISYIRFSSKTQASGDSTKRQNKYIYEWLKNNPDYQLDESLRFQDLGISGYSGANAKSGAFGEFLAAVESGVIQAGSVLLVESLDRVSRQDIDTARERLRKILLAGVDVVTLADNSWYKKESLNDPLSLIKAVLIMQRANEESATKSKRLRSAWDAKREDAAKGKIMSRRCVAWLRVSGDMSHFELIPDNVKAVQRVFQLRLEGLPFVRIARQMNEEGFYTLNQRNPVKGAWSHTTVKALLDNRSVIGFKVPSNCTVTQGVKEIPNYYPAVISEEQFYAVQQLKQGAGRRPSSEKPLLTNLFKGVMRCGECGFVTVVNCATEKWHGVYRCSMRYEGRCDAKSINRRLADKALVQGLLYNTNRLSLNRDNGSAIGSLQSELEQLQKQRERLIKLSMLTDDVESMAKELKLLNSRIVDAEKAVSEVHQREQSSQLETISHLDLTVKKDRIEAQIIIKRIVKEIRLNTAGKKCDVLLHNGLKLLNFPLDRVVDGAQWIEILPLIDGDEFDFEGFTTKPRHIALEEAPEWVKEMEVQPNQPL

SEQ ID NO: 4173 - protein, 560 aa, synthetic construct
MSGKIALYSRVSTSEQSEHGYSVKEQEQVLIKEVVKNFPGYDYETYIDSGISGKNIEGRPAMKRLLQDVKDNKIEMVLSWKLNRISRSMRDVFNIIHEFKEHGVGYKSISENIDTSNASGEVLVTMFGLIGSIERSTLISNVKMSMNAKARSGEAITGRLQGYRLSLNPLTQKNDLVIDENEANIVREIFDLYLNHNKGLKAITTVLNQKGYRTINQKPFSVYGVKYILNNPVYKGYVRFNNHQNWAVQRRSGKSDKNDVILVKGKHEAIISEEVFDQVHEKLASKSFKPGRPIGGDFYLRSLIKCPECGNNMVCRRTYYKTKKSKERTIKRYYICSLFNRSGSSACHSNSINAEVVERVINVHLNRILSQPDVIKHIASNVIEELKQKHSNQTEIKYDIDSLEKQKAKLKTQQERLLELFLDDQMDSEMLKAKQSQMNGQLKMLDKQIKEAQQATESQDEVPNFDKLKSRLTMMISRFSVYLREATPEAKNQLMKMLIDSIEITTDKKVKLVRYKIDESLIPQSLKKDWGSFFMPKIHFIIYGTQKYSIDKITTFATLS

SEQ ID NO: 4174 - protein, 561 aa, synthetic construct
MVKAYIYTRVSSLQQSDGFGIERQVHTLMDFLEDAELPKELGYQLDPHDYEVLEQDAGLSGFKGHNFTKGSIGKFKNRVASGEITSGCLLIESVDRFSRKQGYDAIDEFTFLIKRNIDIIEVETGQIFSYKLDHKLTQLSTSIERAYQESKRKSRMAVKSWANVKRKAVEEGIAISRNVPYWLEVKNNEYLTRTEHVNKIKRVFDMYMNGVGVTSIVRELNKEGGKHDGGVYSTNFINMMLRDKRLLGWQRGKKKANETQEEREGRAIKIYPVIIETDIFDLVQRKIDANKLSKSVRTSSKQKSLFNGLVRCEICGEALVGHFSERGNYLRCIGKRSKVGSCDSRLIKYSTFEEAMIVNLKGIDFKEIYTNKNVSDGHVNNLRNELAVVNAEYDEIEGLLNTSGSTIEIVALSKALREKNKEKDKLQSELTTLTNNNVIEDIEIDISELTEQDNVELREKYNIYLRKVIKEIRVKRVDDILYVMVQYFTDAISHLFIIDGNDGTLLSRSHISNDLVFESDMMTIDMVKGEWELKKNNMSQWDELALDIWQSVVESAVKSIK

SEQ ID NO: 4175 - protein, 452 aa, synthetic construct
MKAAIYIRVSTQEQIENYSIQAQTEKLTALCRSKDWDVYDIFIDGGYSGSNMNRPALNEMLSKLHEIDAVVVYRLDRLSRSQRDTITLIEEYFLKNNVEFVSLSETLDTSSPFGRAMIGILSVFAQLERETIRDRMVMGKIKRIEAGLPLTTAKGRTFGYDVIDTKLYINEEEAKQLQMIYDIFEEEKSITSLQKRLKKLGFKVKSYSSYNNWLTNDLYCGYVSYADKVHTKGVHEPIISEEQFYRVQEIFSCMGKNPNMNRDSASLLNNLVVCGKCGLGFVHRRKDTVSRGKKYHYRYYSCKTYKHTHELEKCGNKIWRADKLEELIIDRVNNYSFASRNVDKEDELDSLNEKLKTEHVKKKRLFDLYISGSYEVSELDAMMADIDAQINYYEAQIEANEELKKNKKIQENLADLATVDFDSLEFREKQLYLKSLINKIYIDGEQVTIEWL

SEQ ID NO: 4176 - protein, 505 aa, synthetic construct
MTLAFSYVRFSTKHQASGTSLERQVNASKLFCSQNGLTLSNQSYHDLGISGFKNVRRPELEQMLEAIQTGDIPSGSYILIEAIDRLSRKGISHTQDILKKILQYDVKVAFVGEDAKTLQGHILNKDSLNDLSSVILVALAADLAHKESLRKSKLVKASKAIAREKAADGEILPGKSVFYLDYDKKNKKYVFNKRVDLARKIIQMRLEGKGPRKIARLLNEENIPGPTGKQWYQMSVKRLLKSPVLYGAYQTHQIIEEKYIPVSLIENYYPALIDYQTFSQIQFDDKRVSKGRPSRHKFSGVLYCECGAVLCRKVNTYETKQGPKEYQYFNCFGAFEGRCKNNKAIKDLHIPLEKAIDKLQIKTRSVKNIKNEQIIAKREKIDQLNKMLLELEMPPVSVLKTISTLEKELQELLEQPDVQPPKSADVKALVAIKDAEQYNLYLKRLVKRITIFQLNGPKNIRIKIEKTDGHYQSFIVNNGKIMFNADTKALQEHLRKLKEGTSDED

SEQ ID NO: 4177 - protein, 452 aa, synthetic construct
MKAAIYIRVSTQEQIENYSIQAQTEKLTALCRSKDWDVYDIFIDGGYSGSNMNRPALNEMLSKLHEIDAVVVYRLDRLSRSQRDTITLIEEYFLKNNVEFVSLSETLDTSSPFGRAMIGILSVFAQLERETIRDRMVMGKIKRIEAGLPLTTAKGRTFGYDVIDTKLYINEEEAKQLQMIYDIFEEEKSITSLQKRLKKLGFKVKSYSSYNNWLTNDLYCGYVSYADKVHTKGVHEPIISEEQFYRVQEIFSRMGKNPNMNRDSASLLNNLVVCGKCGLGFVHRRKDTVSRGKKYHYRYYSCKTYKHTHELEKCGNKIWRADKLEELIIDRVNNYSFASRNVDKEDELDSLNEKLKTEHVKKKRLFDLYISGSYEVSELDAMMADIDTQINYYEAQIEANEELKKNKKIQENLADLATVDFDSLEFREKQLYLKSLINKIYIDGEQVTIEWL

SEQ ID NO: 4178 - protein, 541 aa, synthetic construct
MPKAISYIRFSSKTQASGDSTKRQNKYIYEWLKNNPDYQLDESLRFQDLGISGYSGANAKSGAFGEFLAAVESGVIQAGSVLLVESLDRVSRQDIDTARERLRKILLAGVDVVTLADNSWYKKESLNDPLSLIKAVLIMQRANEESATKSKRLRSAWDAKREDAAKGKIMSRRCVAWLRVSGDMSHFELIPDNVKAVQRVFQLRLEGLPFVRIARQMNEEGFYTLNQRNPVKGAWSHTTVKALLDNRSVIGFKVPSNCTVTQGVKEIPNYYPAVISEEQFYAVQQLKQGAGRRPSSEKPLLTNLFKGVMRCGECGFVTVVNCATEKWHGVYRCSMRYEGRCDAKSINRRLADKALVQGLLYNTNRLSLNRDNGSAIGSLQSELEQLQKQRERLIKLSMLTDDVESMAKELKLLNSRIVDAEKAVSEVHQREQSSQLETISHLDLTVKKDRIEAQIIIKRIVKEIRLYTAGKKCDVLLHNGLKLLNFPLDRVVDGAQWIEILPLIDGDEFDFEGFTTKPRHIALEEAPEWVKEMEVQPNQPL

SEQ ID NO: 4179 - protein, 600 aa, synthetic construct
MAQKLYSYQRWSSAVQADGTTKARQTKAAEEYAQKNGLEIEEIVDAGVSGFKSANTDESGALGQFLQAVDQGLIASNAVLFVESLDRITRDEIDTALELFLGILRRGITIVTGMDNKVYTREAIKGNPVDLLTSILMFSRAHEESKTKQNRTNGNAVALIDRFLKQGLPVNIKSIGSHPWWIDDSGSMYEAVKPHPVLWACAQLAMDNFMEGVSVFKVTQMLNERFPHYYKGKAWAMANVRKLRLNKAVYGVRELSVGGKSYVLPNYYPALISEGQFLRLQQIRTTTKYIGKVGEGRVVTDEEGNSKVIAERNNINLLAGMKLFRCGHCGGTMMAMRHGDTIRYLCEKGRGYHHDCKTWSLPGILVEHTLMLVTTIAYIELQQKGQGDKADYTQQINAMESTINSYSTKINKATKLAIALDDIDVDELAETIKELNANRDNAIIELEVLQRKQLLANDSTFETIMMDFFTYAQYGVLQDPVHEYRSKLRDVVYSAIGDVRAWKHDRRLFISFQIKGNDEYYNFSAGNTPYEWGCYVGALPFSQQELEIADGEVPDEVLERVRERYAELHAANMMMLHQAKELLSHVGYPELDSRMFWPRK

SEQ ID NO: 4180 - protein, 506 aa, synthetic construct
MRTVITYLRFSSATQGAEGADSTRRQNELFKQWLRKNSDAQVVASFSDEGLSGYKGKHLTGQFGDMLARIEAGEFPAGAILLVESIDRIGRLEHLETEALMNRIIAHGIEIHTLQDGLIYTRDALSDDLGISIIQRVKSYLAHQESKQKSFRVSEKWKQRAKLALAGEQHLTRNVPGWIDPDTFKCNEHAETVRLIFKLLLDGESLHNIARHLQSNDIKSFSRRKDANGFSVHSVRTVLRSESVIGTLPASQRNDRPAIPNYYEAAIDAATFNKAQEILDKNRKGRTPASDNPLTINIFKGLFRCQCGASVHPTGTKNKYAGVYRCNNHLDGRCDVPPLKRKPFDRWMIDNFLGMIDVGNDGESERKIAALQHEVEIVTARIKKATALLLEMDDITELKAQVKGLNQKRTEIQTTIDTLKRKTSLTDKELPQLKDIDLTTKAGRVECQLILSKHLKGLTLGKDSVTVTLQNDTEITIPTNPLPLNDGSPIFEIAEKNLLNIDTFQL

SEQ ID NO: 4181 - protein, 560 aa, synthetic construct
MTKLYSYIRFSSMRQGEGSSYERQIKMAKEIADRYGLELVNDYQDLGVSAFKGANSKTGALSRFLDEIGRSIPVGSWLFIENLDRLSRQDIISAQELFLSIIRRGITIVTGMDNKIYSIETVTANPMDLMFSILLFIRGNEESQTKRNRTNSSALLKIKAHQQNPQSPAVAIEEIGKNMWWTDTTSGYVLPHPVYFPILQKIVKMKQEGHSTGSVLDYLNEHHTPPAPTSNKQHRKWSIAMVSRLFKTKALIGVKEVTVDGVQYELKDYYPRVLSDSEYYFLKNNLIKKAWSFGHAQEKTIPLLSGIGLLKCVHCGSPMVKRKAANGKVEQYRYTCDGEGSGRTDCLYPNWGFRASSLEGAVLQLLADKVWIAEDKANPIPEIQVQIDEISRKIDNLINLSAMTGATKELANQITDLNTQREALHEEIRLFEREMYSVDSQGWEKLAQFDLSDVQNEERLQIRLKIKGALRSIECARIDRNKNLFVLVYLDGLRQRIVIENNRGIRKGQIFVDLKTINDRQILESAGMVLHDHIDILIDEKAFYDGLPKEEDGPLSKFGI

SEQ ID NO: 4182 - protein, 452 aa, synthetic construct
MKAAIYIRVSTQEQIENYSIQAQTEKLTALCRSKDWDVYDIFIDGGYSGSNMNRPALNEMLSKLHEIDAVVVYRLDRLSRSQRDTITLIEEYFLKNNVEFVSLSETLDTSSPFGRAMIGILSVFAQLERETIRDRMVIGKIKRIEAGLPLTTAKGRTFGYDVIDTKLYINEEEAKQLQMIYDIFEEEKSITTLQKRLKKLGFKVKSYSSYNNWLTNDLYCGYVSYADKVHTKGVHEPIISEEQFYRVQEIFSRMGKNPNMNRDSASLLNNLVVCGKCGLGYVHRRKDTVSRGKKYHYRYYSCKTYKHTHELEKCGNKIWRADKLEELIIDRVNNYSFASRNVDKEDELDSLNEKLKTEHAKKKRLFDLYISGSYEVSELDGMMADIDAQINYYEAQIEANEELKKNKKIQENLADLATVDFDSLEFREKQLYLKSLINKIYIDGEQVTIQWL

SEQ ID NO: 4183 - protein, 506 aa, synthetic construct
MRHVITYLRYSSAIQGAEGADSTRRQNELFKQWLRKNSDAQVVASFSDEGLSGYKGKHLTGQFGDMLARIEAGEFPAGTILLVESIDRIGRLEHLETEALMNRILGNGIEIHTLQDGLIYTKDALADDLGISIIQRVKAYIAHQESKQKSFRVSQKWEQRAKLALAGEQRLTKMVPGWIDPDTFKCNEHAETVRLIFKLLLDGESLHNIARHLQANNISSFSRRKDANGFSVHSVRTILRSETTRGTLPASQRNDRPAIPNYYEAAIDAATFNKAQEILDKNRKGRTPASDNPLTINIFKGLFRCQCGASVHPTGTKNKYAGVYRCNNHLDGRCDVPPLKRKPFDKWMLENFLGMIDVGNDGEAEEKIASLQHEVEIVTTRIKKATALLLEMDDIDELKIQLKELNQKRTELQTTIDNMRRKASLTDKELPQLKDIDLMTKAGRVECQLILSKHLKGLTLGKDSVTVTLQNDTEITIPTNPLPLNDGSPIFEIADKELLDIDAYQL

SEQ ID NO: 4184 - protein, 452 aa, synthetic construct
MKAAIYIRVSTQEQVENYSIQAQTEKLTALCRSKDWDVYDTFIDGGYSGSNMNRPALNEMLSKLHEIDAVVVYRLDRLSRSQKDTITLIEEYFLKNNVEFVSLSETLDTSSPFGRAMIGILSVFAQLERETIRDRMVMGKIKRVESGLPLTTAKGRTYGYDVVDTKLYINEEEAQHLQLIYDIFEEEKSITFLQKRLKKLGFKVKSYSSYNKWLLNDLYIGYVSYSDKVHAKGIHEPIISEDQFYRVQEIFSRMGKNPNMNKESSSLLNNLIVCEKCGLGYVHRAKDTVSRGKKYHYRYYSCKTYKHTHELEKCGNEIWRADKLEEIIISRVKNYSFATRNLDKEDELDSITEKLKTEHSKKKRLFDLYINGSYEVAELDKMMADIDAQINYYDSQIEANKELKRNKKVQESLAELATVDFDSLEFREKQIYLKSIINKIYIDGEQVTIEWI

SEQ ID NO: 4185 - protein, 448 aa, synthetic construct
MESGYIEAGSVLLVESLDRVSRQDIDTAGEQLRKILRSGVEVVTLVDNEWYTKESLKDSLSMIKAMLVMERAHEESAMKSTRLRSMWAAKRERAANGEIMSKRCAAWLKVSEDRSHFEFIPENVKAVQRVFQLRLEGLSHVKIAKQMNDEGFSTLNQFKSVTGGWSQSSVTELLSNRSVIGFKVPSKSMAVKGVSEIPNYYPSIITDEQFYAVQQLKQGSGRKPSSDLPLLTNLFKGVLRCSECGFIMVVAGVSAKRSGIYKCSMKSEGRCNSVGFSRLQTDRALVQGLLYNTNRLSLNRDNGSAIGSLQSDLEKLHKQRERLIKLAMLADDTESMAKDLKALNSQIKDAEKAVSEVHQREQSSQLETISHLDLTVKKDRIEAQIIIKRIVKEIRLNTARKKCDVFLHNGLRLLNFPLDRVVDGEIFLEVLPVLEADEFDFDTYRMIE

SEQ ID NO: 4186 - protein, 452 aa, synthetic construct
MKAAIYIRVSTQEQIENYSIQAQTEKLTALCRSKDWDVYDIFIDGGYSGSNMNRPALNEMLSKLHEIDAVVVYRLDRLSRSQRDTITLIEEYFLKNNVEFVSLSETLDTSSPFGRAMIGILSVFAQLERETIRDRMVMGKIKRIEAGLPLTTAKGRTFGYDVIDTKLYINEEEAKQLQMIYDIFEEEKSITSLQKRLKKLGFKVKSYSSYNNWLTNDLYCGYVSYADKVHTKGVHEPIISEEQFYRVQEIFSRMGKNPNMNRDSASLLNNLVVCSKCGLGFVHRRKDTVSRGKKYHYRYYSCKTYKHTHELEKCGNKIWRADKLEELIIDRVNNYSFASRNVDKEDELDSLNEKLKTEHAKKKRLFDLYISGSYEVSELDVMMADIDAQINYYEAQIEANEELKKNKKIQKNLADLATVDFDSLEFREKQLYLKSLINKIYIDGEQVTIEWL

SEQ ID NO: 4187 - protein, 519 aa, synthetic construct
MKKITKIDTVAQVKPAKLKVAAYARVSTSSEEQLLSLENQKLHYEQRILANSNWEFVEMYFDEGISGTKIDKRNGLKRLLQDCETGKVDFILTKSISRFSRNALDCLEIVRRLIDLNIFIEFEKENINTQTMDGELMLSILSSLAESESRSLSQNTKWGIEKRFQDGTYKIGYPPFGYDWLDGAMVINKEQAVVVKDIFADILKGTSTGDIAEKLNQQGVTTKRRKTWHGTTIRGIIKNEKYIGDALFGKTFTDDSFKRKVNRGDKNQYFMEGHHSAIIDKETFEQAQQMLVQNAKSKNIVQEDDKYQNRYSFSGILKCGECGGTFKRRIQTKNKNEKYVAWACTTHLKDKHSCSMKFIKDEQIKLAFITMMNKLVFSHQILLKPLLADVRSTTYTVDNTQIVVLDDELEKLKQQQDNLVQFVANGYIDRPTFVKEQNQLTKQMDDLENKRKMLTVAISKGFDNLESLEELVKYTKQDQMLTSFEDTHFVIFVDEVVILSRTELVFKLKCGLKLKERLV

SEQ ID NO: 4188 - protein, 539 aa, synthetic construct
MPKAISYIRFSTKIQSVGDSTKRQSKYINDWLKRNPDYYLDESLRFQDLGISGFSGANAKSGAFGEFLAAVESGYIEAGSVLLVESLDRVSRQDIDTAGEQLRKILRSGVEVVTLVDNEWYTKESLKDSLSMIKAMLVMERAHEESAMKSTRLRSVWAAKRERAAKGEIMSKRCAAWLKVSEDRSRFEFIPENVKAVQRVFQLRLEGLSHVKIAKQMNDEGFSTLNQFKSVTGGWSQSSVTELLSNRSVIGFKVPSKSMAVKGVSEIPNYYPSIITDEQFYSVQQLKQGSGRKPSSDLPLLTNLFKGVLRCSECGFIVVVAGVSAKRSGIYKCSMKSEGRCNSVGFSRLQTDRALVQGLLYNTNRLSLNRDNGSAIGTLQSELEQLQKQRERLIKLAMLADDTESMAKDLKALNSQIKDAEKAVSEVHQREQSSQLETISHLDLTVKKDRIESQIIIKRIVKEIRLNTAGKKCDVFLHNGLKLYNFPLDRVVDGAQWLEILPLIDGDEFDFEGFTTKPRHIALEEAPEWVKEMEEQPKQ

SEQ ID NO: 4189 - protein, 452 aa, synthetic construct
MKAAIYIRVSTQEQVENYSIQAQTEKLTALCRSKDWDVYDTFIDGGYSGSNMNRPALNEMLSKLHEIDAVVVYRLDRLSRSQRDTITLIEEYFLKNNVEFVSLSETLDTSSPFGRAMIGILSVFAQLERETIRDRMVMGKIKRIEAGLPLTTAKGRTFGYDVIDTKLYINEEEAKQLQMIYDIFEEEKSITTLQKRLKKLGFKVKSYSSYNNWLTNDLYCGYVSYADKVHTKGVHEPIISEEQFYRVQEIFSRMGKNPNMNRDSASLLNNLVVCGKCGLGFVHRRKDTISRGKKYHYRYYSCKTYKHTHELEKCGNKIWRADKLEELIIDRVNNYSFASRNVDKEDELDNLNEKLKTEHKKKKRLFDLYISGSYEVSELDAMMADIDAQINYYEAQIEANEELKKNKKIQENLADLATVDFDSLEFREKQLYLKSLINKIYIDGEQVTIEWL

SEQ ID NO: 4190 - protein, 599 aa, synthetic construct
MKKIIPYGYLRVSSLEQVRSGGGLEAQDEEVRRYITQKSDVFDIDKMVMMSDEGLSAYSGRNIKEGELGRFLANVDAGLIPAGSALVCYSVDRLSRQNPWVGTQLISTLIGAGIEIHSVAENQILRSDDPVGAIMSTIYLMRANNESVIKSERAKHGYTKRLNESIANNKVLTRQMPRWLYDNDGKYAIDPNMQKVIDFTFDSYIAGQSTGYIAKKLNDMGLKYGDTSWRGSYVAKLIRDERLIGKHIRYSKQIKGVKREIIETIPDFYPVTIDTDKFHIANNMLTSVAKNIRGRTRMTYGDISILRNLFNGVIKCGVCSGETSVVQNTRRKITNGVVTYVPYKTFLRCRNRYELKTCTQGDIRYEVIERAILNHLMGLDITTLLAAPVDNKIERYRTELELCKAEEEELQAIIKERENEGKRPRPQTLKSYEDVADRIDELTQLIESHVEDNFIPHFNVDLDSITDVSNVSERSLIKKGIATIADSICYKRISDFILVEIKYRNLNDKHVLVIDNKNSEMVVNFSIEYNEENKVYICNSFVMEYDNLSCEFTVSKTTMEDYAHMMNFVDYVSDDESYNAKEFLVKNFTHIKFIDKSNE

SEQ ID NO: 4191 - protein, 461 aa, synthetic construct
MTVGIYIRVSTEEQAKEGFSISAQREKLQAYCIAQGWNEFKFYVDEGLSAKNMERPLLKSLLKHIETGLIDTVLVYKLDRLTRSVVDLHNMLNFFDKYDCSFKSATEVYDTSSAMGRFFITIISSVAQFERENTSERVSFGMEERARQGKYIPSPPFGYKKGEDGVLVIYEEEAALVLELVARLQKGYSVRQCCTYLDNLGVKTRRSNSVWKNTTLRRILGNHALYGATSWSGKVFKNTHTGILTEAEFLELQSILKARTGHVSSRKRALTHVFAGKIVCPNCGYRMTCVRTKYKERYNNDYRCSNCKIHYTHTSVSERKLLKAFDEYIDSYRLTSYDIKKESKKENNQMKIERQIVNLSKKREKYQKGWALDLIDDHEFSKLMKETQLELNQLESKLETDKYSSEKTFNQTAINNIVKNIKMNWSELTIEERKDFVNMFLKDIHYVKVAGIAKITKIDFH

SEQ ID NO: 4192 - protein, 452 aa, synthetic construct
MKAAIYIRVSTQEQVENYSIQAQTEKLTALCRSKDWDVYDTFIDGGYSGSNMNRPALNEMLSKLHEIDAVVVYRLDRLSRSQKDTITLIEEYFLKNNVEFVSLSETLDTSSPFGRAMIGILSVFAQLERETIRDRMVMGKIKRVESGLPLTTAKGRTFGYDVVDTKLYINKEEAQHLQLIYDIFEEEKSITFLQKRLKKLGFKVKSYSSYNKWLMNDLYIGYVSYGDKVHVKGVHEAIISEEQFYRVQEIFSRMGKNPNMNKESSSLLNNLIVCEKCGLSFVHRVKDTVSRGKKYRYRYYSCKTYKHTHELEKCGNKIWRADKLEEIVIDRVKNYSFATRNLDKEDELDSITEKLKTEHSKKKRLFDLYMNGSYEVAELDKMMADIDAQINYYNSQIEANEELKRNKKVQESLAELATVDFDSLEFREKQIYLKSIINKIYIDGEQVTIEWI

SEQ ID NO: 4193 - protein, 450 aa, synthetic construct
MKRVALYMRVSTEQQAKHGDSLREQKETLYEYIEQHKDLKVVNEYVDGGISGQKINRDEFQKLLQDVKENKIDIILFTKLDRWFRNLRHYLNTQEILEKHNVSWNAVSQQYYDTTTAYGRTFIAQVMSFAELEAQIDSERIKAVMANKIAQGEVVSGKTPLGYSIENKKLVINDDAPIVIDIFNYFLSSGSLRKTVYYLGSQYGIVRDYQSVKNMLTNKKYIGELRNNKNYCPPIIDKKLFYAVQKALPKNLKTNAKRDYIFKGLLKCSDCQGSVAGQTIKARYKKKDGTESIYERTCYRCVKRRNNKLRCTNKRAFYEKNLERYIFEATKQKFEQIQINYSKKQPKIIKKKNSKKNIENKLDRLKKAYLNEVIDLEEYKKDREALMKELNEIEVEPAKIDIKNVEFILSKEFDEIYKESSEEEKNALWRSIIDNIIVFPDGNITVNFLI

SEQ ID NO: 4194 - protein, 506 aa, synthetic construct
MRTVITYLRFSSATQGAEGADSTRRQNELFKQWLRKNSDAQVVASFSDEGLSGYKGKHLTGQFGDMLARIEAGEFPASTILLVESIDRIGRLEHLETEALMNRIIAHGIEIHTLQDGLIYTRDALSDDLGISIIQRVKSYLAHQESKQKSFRVSEKWKQRAKLALAGEQRLTKMVPGWIDPETFKLNEHAETVRLIFKLLLDGESLHNIARHLQANNISSFSRRKDANGFSVHSVRTILRSETTRGTLPASQRNDRPAIPNYYEAAIDAATFNKAQEILDKNRKGRTPASDNPLTINIFKGLFRCQCGASVHPTGTKNKYAGVYRCNNHLDGRCHVPPLKRKPFDKWMIDNFLGMIDVGNDGEAEGKIASLQHEVEIVTTRIKKATALLLEMDDIDELKIQLKELNQKRTELQTTIDNMRRKASLTDKELPQLKDIDLTTKAGRVECQLILSKHLKGLTLGKDSVTVTLQNDTEITIPTDPLPLNDGTSIFEIAEKNLLNIDTFQL

SEQ ID NO: 4195 - protein, 559 aa, synthetic construct
MKTKLYSYIRFSSMRQNDGSSYERQIRMAREVAAKYDLELVNDYQDLGVSAFKGANSKTGALSRFLDAIGRSVPVGSWLFIENLDRLSRADIVSAQELFLSIIRRGITIVTGMDNKIYSLDTVTANPMDLMFSILLFIRGNEESQTKRNRTNSSALIKIKAHQENPQNPAVAIEEIGKNMWWTDTTSGYVLPHPTYFPVVQEIVELRKNGRSTAEILDHLNETYAPPPAVSNKKHSKWSRAMVERLFHTRALIGIKEISVDGVNYELKDYYPRVIDDPTFYHLKKNIGARAWNFGDKEEVKPIPLLSGIGLLKCDHCGCAMVKVKGTNKRSDQYRYTCDATRSRRLDCEHPNWSFRGDQLEKAVLQLLADKIWIAEDKANPVPALKVQVDEISRKIDNLIALSAMTGATKELADQITTLNSERETLYNQIKMAEEEMYSVDSQGWEKLAEFDLEDVYNEERLKVRFKIKQALKRIGCSRIDRNKNLFVLEYIDGKTQRVVIENSRGTRKGQIFVDLKTINDRQILESNGLVLHPCLDMLTDKNWKPEEEIPGPLQEFGI

SEQ ID NO: 4196 - protein, 506 aa, synthetic construct
MRTVITYLRFSSATQGAEGADSTRRQNELFKQWLRKNSDAQVVASFSDEGLSGYKGKHLTGQFGDMLARIEAGEFPAGAILLVESIDRIGRLEHLETEALMNRIIAHGIEIHTLQDGLIYTRDALSDDLGISIIQRVKSYLAHQESKQKSFRVSQKWKQRAKLALAGEQRLTRNVPGWIDPDTFKCNEHAETVRLIFKLLLDGESLHNIARHLQSNDIKSFSRRKDANGFSVHSVRTVLRSESVIGTLPASQRNDRPAIPNYYEAAIDASTFNKAQEILDKNRKGRTPASDNPLTINIFKGLFRCQCGASVHPTGTKNKYQGVYRCNSHLDGRCDVPPLKRKPFDRWMIDNFLGMIDVGNDGEAEKEIASLQHEVETVTARIKKATALLLEMDDITELKTQVKELNQKRTELQTTINTMKRKTSLSDKGLPQLKDIDLMTKAGRVECQLILSKHLKGLTLGKDSVTVTLQNDTEITIPTNPLPLNDGSPIFEIADKELLDIDAYQL

SEQ ID NO: 4197 - protein, 605 aa, synthetic construct
MKKCFIYHRVSSEFQLARTGIQRQEDSLQAYVERTNLLADMEDPEPTIISDRGISAFKTNENNFSIGELGRWMDQVRDGMWDGSALVLESIDRFSRQNPFTVVAYLSELVSHNITIHDVSLSMLINRTNSAMLPIVTMSAQRAYEESKLKSDRIRDGWRRRRENAFNNGTIVTNKRPRWIDVKNDKYVLNDKVAIAREIFRLYKKGIGTSTIAKILNTRGEKWLFESGRLWRSESVHKILKNKRVTGVIFISETIRDYNSTDKSIDRNTYEMDLYPIAISKEEYTLVQQLLKMRRTNNGRITNIKDTGELKKSNIFNRVFRCAKCGEAMYHNVVLANRDSKKRGKFKEEYRYIRCIGERDGLCDNKALRYEVVEQFVIEHIKGMDFTKILKPNEINPEIELVRVLIEEEKAHIQEYELGIERLKKQDKKIPFDVLTELQDSRDKLRTLEDRQFSFADIKVDTDYIKSVDSSVIFDQTNIAIRSMVENELIKIIDTIKLYRMGKHYVITLKYRSVGILKHVLIVEAKKTPTLISNIVIERTGKTVEYSTASFSLVITDGDSPRLKTSDGVQISMIDYSLLLNYVDDVDRDDIVGVWMREKFNTLTS

SEQ ID NO: 4198 - protein, 559 aa, synthetic construct
MKTKLYSYIRFSSMRQSDGSSYERQIRMAREIAAKYDLELVNDYQDLGVSAFKGANSKTGALSRFLDAIGRSVPVGSWLFIENLDRLSRADIVSAQELFLSIIRRGITIVTGMDNKIYSLDTVTANPMDLMFSILLFIRGNEESQTKRNRTNSSALIKIKAHQENPQNPAVAIEEVGKNMWWTDTTSGYVLPHPTYFPVVQEIVELRKNGRSTAEILDHLNETYTPPPAVSNKKHSKWSRAMVERLFHTRALIGIKEVSVDGVNYELKDYYPRVIDDPTFYHLKKNIGARAWNFGDKEEVKPIPLLSGIGLLKCDHCGCAMVKVKGTNKRSDQYRYTCDATRSRRLDCEHPNWSFRGDQLEKAVLQLLADKIWIAEDKANPVPALKVQVDEISRKIDNLIALSAMTGATKELADQITALNSERETLYNQIKMAEEEMYSVDSQGWEKLAEFDLEDVYNEERLKVRFKIKQALKRIGCSRIDRNKNLFVLEYIDGKTQRVVIENSRGTRKGRIFIDLKTINDRQILESNGLVLHPCLDMLTDKNWKPEEEIPGPLQEFGI

SEQ ID NO: 4199 - protein, 507 aa, synthetic construct
MKRVISYIRFSSEKQAKGDSLRRQSKMVNDWLKAHPEYYLDQDLSFRDLGVSGFTGKHLKGGLGDFLTAIEKGLVKAGDTLLIESLDRLSRQAVDRASELLRNILRSGVDIVTLSDGEHYTSESLKDPLALIKSILIMQRAHEESLRKSERIQAAWDAKKEAAKAGIKVSKRCPAWLRLNDDRKSFSVIPEKVETVKRCFQLRLEGKSIWEIVRTLNAEGHRSMNQYKPGKFGQTSVQDLLKNRSVIGYFTPKGCEEISGYYPAIIDETTFYKVQQLSHYRYGRKPVSDKPLSVNLFKGVIRCSECGHALIITGFSDTRNGIYRCPLRNENRCNAKGLSRKQTDGTLLALLSRLDRFDSDMTNTVDTLKLHREHISSNIEKLVQLSLEIEDLNAITSKLKQLKGELSQVDADIEKETQRLKSIDVGCLSDCDLTTKAGRIEAQLIIKSAVKEVILNTAKRRCKVTFHNGKSITLPITENPSEDVTEAIQSLSEVTERGLIDVDVVEI

SEQ ID NO: 4200 - protein, 507 aa, synthetic construct
MKRVISYIRFSSEKQAKGDSLRRQSKMVTDWLKAHPEYYLDQDLSFRDLGVSGFTGKHLKGGLGDFLTAIEKGLVKSGDTLLIESLDRLSRQDIDIASELLRNILRSGVDVVTLSDGEHYTRESLRDPLALIKSILIMQRAHEESLRKAERIQAAWDAKKEAAKAGIKISKRCPAWLRLNDDRKSFSVIPDKVETVKRCFQLRLEGKSIWEIVRTLNAEGHQSMSQYKPGKFGQTSVQDLLKNRSVIGYFTPKGCEEISGYYPAIIDETTFYKVQQLSHYRYGRKPVSDKPLSVNLFKGVIRCSECGHALIITGFSDTRNGIYRCPLRNENRCSAKGLSRKQTDGTLLALLSRLDRFDSDMTNTIDMLRLHREHISSNIEKLVQLSLEIEDLSAITIKLKQLKGELSQVDADIEKETQRLKSIDVGCLSDCDLTTKAGRIEAQLIIKSAVKEVVLNTAKRRCKVTFHNGKSITLPITENPSEDVTEAIQSLSEVTERGLIDVDEVII

SEQ ID NO: 4201 - protein, 559 aa, synthetic construct
MKTKLYSYIRFSSMRQSDGSSYERQIRMAREIAAKYDLELVNDYQDLGVSAFKGANSKTGALSRFLDAIGRSVPVGSWLFIENLDRLSRADIVSAQELFLSIIRRGITIVTGMDNKIYSLDTVTANPMDLMFSILLFIRGNEESQTKRNRTNSSALIKIKSHQENPQNPAVAIEEVGKNMWWTDTTSGYVLPHPTYFPVVQEIVELRKNGRSTAEILDHLNETYTPPPAVSNKKHSKWSRAMVERLFHTRALIGIKEISVDGVNYELKDYYPRVIDDPTFYHLKKNIGARAWNFGDKEEVKPIPLLSGIGLLKCDHCGCAMVKVKGTNKRSDQYRYTCDATRSRRLDCEHPNWSFRGDQLEKAVLQLLADKIWIAEDKANPVPALKVQVDEISRKIDNLIALSAMTGATKELADQITTLNSERETLYNQIKMAEEEMYSVDSQGWEKLAEFDLEDVYNEERLKVRFKIKQALKRIGCSRIDRNKNLFVLEYIDGKTQRVVIENSRGTRKGQIFVDLKTINDRQILESNGLVLHPCLDMLTDKDWKPEEEIPGPLQEFGI

SEQ ID NO: 4202 - protein, 559 aa, synthetic construct
MKTKLYSYIRFSSMRQNDGSSYERQIRMAREVAAKYDLELVNDYQDLGVSAFKGANSKTGALSRFLDAIGRSVPVGSWLFIENLDRLSRADIVSAQELFLSIIRRGITIVTGMDNKIYSLDTVTANPMDLMFSILLFIRGNEESQTKRNRTNSSALIKIKSHQENPQNPAVAIEEVGKNMWWTDTTSGYVLPHPTYFPVVQEIVELRKNGRSTAEILDHLNETYTPPPAVSNKKHSKWSRAMVERLFHTRALIGIKEVSVDGVNYELKDYYPRVIDDPTFYHLKKNIGARAWNFGDKEEVKPIPLLSGIGLLKCDHCGCAMVKVKGTNKRSDQYRYTCDATRSRRLDCEHPNWSFRGDQLEKAVLQLLADKIWIAEDKANPVPALKVQVDEISRKIDNLIALSAMTGATKELADQITTLNSERETLYNQIKMAEEEMYSVDSQGWEKLAEFDLEDVYNEERLKVRFKIKQALKRIGCSRIDRNKNLFVLEYIDGKTQRVVIENSRGTRKGRIFIDLKTINDRQILESNGLVLHPCLDMLTDKNWKPEEEIPGPLQEFGI

SEQ ID NO: 4203 - protein, 547 aa, synthetic construct
MKLLVTYIRWSTKEQDSGDSLRRQTNLIDAFYSKHKNDYYLLPAHRYVDKGKSGFHQQHKAQGSDFRRMFENVMSGAIPEGSLIVVENFDRFSRADIDTAIDDVRQILRKGVSILTLGDGELYDKSALTDPVKLIKHIIIAERAHQESLVKQKRIAQVWNHKTQLARELKKPMGKQAPGWLELSEDGSHYIVDEDKASLVNIIYDKRLSGMSMFAICKWLNEQGYPTINQRKVRISKTKKPDGNWSALSVKHILTSRSVLGYLPAKISSEDRKTVLREEIEGFYPQIVTDSKFYAVQQLLEETGKGKTSSGEHWLYVNILKGLIRCKCGLVMTPTGIRKPVYQGTYRCNGNKESRCSYGTVSRKLLDTQLCSRLFSKLSQLHDEATDTSKLDELQRRLNTVDSELEKLTETLIQLPNITQIQEALRVKQEEKDELIVQLSREKARVKSVSSLDLSGLDMESVEGRTEAQIIIKRLVKEIVVSGNEKLVDIYLHNGNMIRGFPLDGKDDHTLTLEEATDEMQSLDDMLIFGEPVTRIYPAGDMEEVDA

SEQ ID NO: 4204 - protein, 547 aa, synthetic construct
MKLLATYIRWSTREQDSGDSLRRQTNLIDAFYSKHKNDYYLLPAHRYVDKGKSGFHQQHKAQGSDFRRMFENVMSGAIPEGSLIVVENFDRFSRADIDTAIDDVRQILRKGVSILTLGDGELYDKSALTDPVKLIKHIIIAERAHQESLVKQKRIAQVWNHKTQLARELKKPMGKQAPGWLELSEDGSHYIVDEDKASLVNIIYDKRLSGMSMFAICKWLNEQGYPTINQRKVRISKTKKPDGNWSALSVKHILTSRSVLGYLPAKISTEDRKTVLREEIEGFYPQIVTDSKFYAVQQLLEETGKGKTSSGDHWLYVNILKGLIRCKCGLVMTPTGIRKPVYQGTYRCNGNKESRCSYGTVSRKLLDTQLCSRLFSKLSQLHDEATDTAKLDELQRRLNTVDSELEKLTETLIQLPNITQIQEALRVKQEEKDELIVQLSREKARVKSVSSLDLSGLDMESVEGRTEAQIIIKRLVKEIVVSGNEKLVDIYLHNGNMIRGFPLDGKDDHTLTLEEATDEMQSLDDMLIFGEPVTRIYPAGDMEEVDA

SEQ ID NO: 4205 - protein, 629 aa, synthetic construct
MPQLYSYIRWSSDRQDKGTTRNRQVAAAKAYAEEAGLEMVEILEPGVSAFRGKNRAGKLGDFIDAVKNNAIPSDSWLYCENLDRLSRDQVDEALRLFLELIGLGLTIVTGMDRKVYNSKSIKQNPIDLMISILMFIRGNEESETKFNRTVGNVVALVERHKEGLPVNIKSVGRHPFWIDDSGSQYEAVKKHPVYWSIAREAIEMFLAGDGIYTVKRHLDDKYPNGLKGKEWDYQVLKKMRDNRALIGERTINVAGATYKLDNYYPWLCKDEAEFLTLAERKQQNNYKAKKDKTEEIKLLSGLQVLRCSKCGGTMHSFMNHGSARYICTNGVHLQKNCSGWSISAQLVEHCTMISLLIGYMDKSRKDGIDTTAIEEEISRKATLITDLESRISNMAKAIAIAPEVSELAVQLNAFDLERKKAVLEVDKLKERLHSLKGKGSLEVDITDFLMLIQWSVFTNMEDADRNKIRKIISSIIESIIIDKTDGCITIKIKCHNKDEWLVFGGVNRKPFWAFTIEYSTNDSKDIEGEDSSNFVSNPLFQKAVEQLDSIKQSYLNLFETANTMLGVVGYSDIRGASFWPNTGQYERANVEYEGITYSIAMNGRVSKAITTALEATGLSRKAFIERYKV

SEQ ID NO: 4206 - protein, 590 aa, synthetic construct
MSAHVTIPRNILLPVKLNVMNRPRLYSYIRYSSERQGKGNSIERQKSYIAEMAKQIAAEYDLEIFEEYEDLGVSAYKGKNVQEGALSDFIAQVESGVIPKGSFLLIESLDRFSRQNAMQAVNLFTSLLLNGITVITGIDKQVYRQTEVNNETLQQLMFSVMLFSRANEESSTKSHRTIARALSKIKRHQKRDPGDPVVAIKELGSDKWWTDSSSGYVKPHPVLFPIAKEIIRLKQDGWSNRMILIHLKNNYNGPIIGNKKSKGIWNMQHCSRILDPAIYGRKVITVNHTEYVLDDYYPAIVSKDEFEALKIQVGNKGFAPNRESNPEIPLLSGIGILYCAHCSCYMVKAKSTLKNHPHAYRYQCASRDLHRDCNKWGFRASTLERTILQLIADHIFLQEKPQPSGVEGKIADLQTQIDNYLLAIGSAKSPAIVNSLTSQIDQLEQEKESLVLEKRLYDESIVQMNTEGWDKFRKFDIDDALDPLRAKIRANIKTVILRVDCTRVDKKHNLFTITYRDQRQQRVVIENNSGWKKGNVFVDLHTINDAQILESEGLILHDHIDILINRDKFMTEVKERLEHPRTPIDELTGD

SEQ ID NO: 4207 - protein, 542 aa, synthetic construct
MQQLKTKRVGIYVRVSTEMQSTEGYSIDGQINQIKEYCDFHHFEVKDIYADRGISGKSMNRPELQRMLKDAKEGNIDCVMVYKTNRLARNTSDLLKIVEDLHKQNVEFFSLSERMEVNTSSGKLMLQILASFSEFERNNIVENVFMGQTRRAQEGYYQGNLPLGYDKIPNSKHELMINQHEANIVKYIFESYAKGHGYRKIANALNHKGYVTKKGKPFSISSITYILANPFYIGKIQFAKYKDWSEKRRKGLNDKPVIAEGKHSPIINQDLWDKVQMRKKQVSQKPQVHGKGTNLLTGIIHCPQCGAPMAASNTTNTLKDGTKKRIRYYSCSNFRNKGSKVCSANSVRADVIEDYVMKQILEIVKSDKVIQRVVARVNQENKVDGAALHHDIAYKQQQYDEVQTKLNNLIKTIEDNPDLTSVIRPSIQKYEKQLNDITNQINQLKNQQNEDKSLFDAKQISKLLQHIFQDIKHMEKSRLKALYLSVIDRINIRKDDNHKKQFYVTLKLNNEIIKQLFNNKQLDEVHLSTSSLFLPQTLYLTI

SEQ ID NO: 4208 - protein, 449 aa, synthetic construct
MKQVIGYLRQSTMKQQSLAAQKQAIEAIAEKHHIQHINFYSDKQSGRKDNRSGYRQMTQLIQQGQCDILCCYRLNRLHRNLKNALKLIKLCQTYRVHILSVHDGYFDMDQAFDRFKLNIFISLAELESDNIGEQVRNGLQEKAKQGRLITTHAPFGYDYHNGTFIINQNESPTVKAVFNYYIKGHGYKKIAQLLEKDDTFINRQPYQVRNIIMNPNYCGRVINQYGQFDNMFPSIVSANVYEQAQRLRLQKQTKRTPSDNQLKQKIKCPYCNATLTNMTVRKKNHILRYYVCPKNLNASRFVCDFKGINAQTLEDKVLKVCQDFYQDHHIYAKIKNAIDKRLKRQRNTETHHTLTQEKLIEKLAQGIIDAETFRKQMQSLHQQPQRITSISEHQIQHTIQNIIQKRFTLNILYPYIETIHIAKDKNLIGIYFKNEPLNIVNQTMQSSIA

SEQ ID NO: 4209 - protein, 559 aa, synthetic construct
MKGKIALYSRVSTSEQSEHGYSEKEQEQLLIKEVMKNFPGYDYETYTDSGISGENIEGRPAMKRLLQDVKDNKIEMVLSWKLNRISRSMRDVFNIIHEFKEHDVGYKSISENIDTSNASGEVLVTMFGLIGSIERQTLISNVKLSMNAKARSGEAITGRVLGYKLSLNPLTQKNDLVIDENEAHIVREIFDLYLNHNKGFKAITTILNQKGYRTINQKPFSVFGVKYILNNPVYKGYVRFNNHQNWAVQRRSGKSDKNDVILVKGKHEAIISEDVFDQVHEKLASKSFKPGRPIGGDFYLRGLIKCPECGNNMVCRRTYYKTKKSKERTIKRYYICSLFNRSGSSACHSNAINAEVVERVINVHLNRILSQPNVIKQIASSVIEELKQKHSKQTEIKYDINSLEKQKAKVKTQQERLLELFLDDEMDSEMLKAKQSEMNQQLEVLDQQIKEAKQANQSQDDIPNFDKLKARLILMITRFSVYLRKATPEAKNQLMKMLIDSIEITKDKQVKLVRYKIDESLIPQSLKKDWGSFFIPKFNFVINVTKKNRIENLSLLPLF

SEQ ID NO: 4210 - protein, 523 aa, synthetic construct
MRQVITYLRFSSKPQERGDSIRRQKGLFERWLKDNPDAKVVDEFSDEGASAYHGHHLKGDFGRMLQNIQDGKYLSGQTVLLVESETRLNRQKARNTENLVDLITGKGVDVICLESGKIYTSTNIDDLDTSIQLKIAAHIAHQQSKEKSIKVSAAWEHRAQLALEGKQQLTKNVPGWIDPDTRKLNEHSSTVVTIFDLLLSGESLHNIARYLQANNIKSFSRREKANGFSVHSVRTILRSESTVGTLAASKRNDRPAIPNYYEPAIDVATFNKAQEILSKNRVGRAPASDNPITINLFKGIIRCQCGASVHPTGVKATYQGVYRCNNVPDGRCNVPTIKRKPFDKWMLDNIVGFLERDDGNNTDKRKAEIEYQISLVTSKLKKATTLLLELDDVTELKEQVKELNIQRSNLQSELDELNQRETLSDKPLHHLSEIDLTTKAGRVEAQLILSKFVQSIELQREMIIITLRNGTVIGKSRDLSPVLSQDLMKQVVSSPSPTDIDMFSVITSDEEFRKSGKQVTKRS

SEQ ID NO: 4211 - protein, 506 aa, synthetic construct
MRHVITYLRYSSATQGAEGADSTRRQNELFKQWLRKNSDAQVVASFNDEGLSGYKGKQLSGQFGDMLSRIESGEFSKGTILLVEAIDRIGRLEHLETEALMNRIIAHGIEIHTLQDGLIYTRDALSDDLGISIIQRVKSYLAHQESKQKSFRVSEKWKQRAKLALAGEQRLTKMVPGWIDPDTFKCNEHAETVRLIFKLLLDGESLHNIARHLQANNISSFSRRKDANGFSVHSVRTILRSVTTIGTLPASQRNDRPAIPNYYEAAIDAATFNKAQEILDKNRKGRTPASDNPLTINIFKGLFRCQCGASVHPTGTKNKYAGVYRCNNNPDGRCDVPPLKRKPFDKWMIDNFLGMIDVGNDGEAEGKIAALQHEVEIVTARIKKATALLLEMDDITELKTQVKGLNQKRTELQTTIDSMRRKTSLSDKGLPQLKDIDLMTKEGRVECQLILSKHLKGLTLGKDSVTVTLQNDTEITIPTNPLPLNDGSPIFEIADKELLDIDAYQL

SEQ ID NO: 4212 - protein, 523 aa, synthetic construct
MRQVITYLRFSSKPQERGDSIRRQKGLFERWLKDNPDAKVVDEFSDEGASAYHGHHLKGDFGRMLQNIQDGKYLSGQTVLLVESETRLNRQKARNTENLVDLITGKGVDVICLESGKIYTSTNIDDLDTSIQLKIAAHIAHQQSKEKSIKVSAAWEHRAQLALEGKQQLTKNVPSWIDPDTRKLNEHSSTVVTIFDLLLSGESLHNIARYLQANNIKSFSRREKANGFSVHSVRTILRSESTVGTLAASKRNDRPAIPNYYEPAIDVATFNKAQEILSKNRVGRAPASDNPITINLFKGIIRCQCGASVHPTGVKATYQGVYRCNNVPDGRCNVPTIKRKPFDKWMLDNIIGFLERSDGNNTDKRKAEIEYQISLVTSKLKKAATLLLELDDVTELKEQVKELNIQRINMQSELDDLNQRETLSDKPLHHLSEIDLTTKAGRVEAQLILSKFVQSIELQREMIIITLRNGAVIGKSRDLSPALSQDLMKQVVSSSSPRDIDMFSVITSDEEFRKSGKPVTKRS

SEQ ID NO: 4213 - protein, 518 aa, synthetic construct
MPKAISYIRFSTKIQSVGDSTKRQSKYINDWLKRNPDYYLDESLRFQDLGISGFSGANAKSGAFGEFLAAVESGYIEAGSVLLVESLDRVSRQDIDTAGEQLRKILRAGVEVVTLVDNEWYTKESLKDSLSMIKAMLVMERAHEESAMKSTRLRSVWAAKRERAAKGEIMSKRCAAWLKVSEDRSHFEFIPENVKAVQRVFQLRLEGLSHIKIAKQMNDEGFYTLNQHKSVKGGWSQSSVTELLSNRSVIGFKVPSKSMAVKGVSEIPNYYPAIITDEQFYAVQQLKQGSGRKPSSDLPLLTNLFKGVLRCSECGFIVVVAGVSAKRSGIYKCSMKSEGRCNSVGFSRLQTDKALVQGLLYNTNRLSLNRDSGSAIGTLQSELEQLQKQRERLIKLAMLADDTESMAKDLKALNSQIKDAEKAVSEVHQREQSSQLETISHLDLTVKKDRIEAQIIIKRIVKEIRLNTAGKKCDVFLHNGLKLLNFPLDRVVDGEIFLEVLPVLEADEFDFDTYRMIE

SEQ ID NO: 4214 - protein, 542 aa, synthetic construct
MQQLKTKRVGIYVRVSTEMQSTEGYSIDGQINQIKEYCDFHHFEVKDIYADRGISGKSMNRPELQRMLKDAKEGNIDCVMIYKTNRLARNTSDLLKIVEDLHKQNVEFFSLSERMEVNTSSGKLMLQILASFSEFERNNIVENVFMGQTRRAQEGYYQGNLPLGYDKIPDSKHELMINQHEANIVKYIFESYAKGHGYRKIANALNHKGYVTKKGKPFSISSITYILANPFYIGKIQFAKYKDWSEKRRKGLNDKPVIAEGKHSPIINQDLWNKVQIRKKQVSQKPQVHGKGTNLLTGIIHCPQCGAPMAASNTTNTLKDGTKKRIRYYSCSNFRNKGSKVCSANSVRADVIEDYVMKQILEIVKSDKVIQRVVARVNQENKVDGAALHHDIAYKQQQYDEVRIKLNNLIKTIEDNPDLTSVIRPSIQKYDKQLNDIMSQINQLKKQQNEDKPSYNAKKIGKILRYVFHNIEKMKKSQLKALYLAVIDRIDIRKDSNHKKQFYVTLKLDNEVIKQVFNDIPLDEVHLSTSSLFLPQTLYLTI

SEQ ID NO: 4215 - protein, 536 aa, synthetic construct
MPKAISYIRFSTKQQIQGDSTKRQSRLINSWLEHNPGYVLDEHMRFQDLGISGYSGANAKSGAFSEFLAAVESGYIERGSVLLVESLDRVSRQDIDKAGEQLRKILRAGVEVVTLVDGSWYKEESLRDSLSMIKAMLVMERAHEESLTKSKRLKSAWANKRREAEATGKIMSRRCVAWLRVSEDGTKFEQIPENVKAVQRVFQLRLDGLSHVKIARQMNEEGFVTLNQFRSKAGVWSQSTVTELLSNRAVIGYKVPSKSMVVKGVQEIPDYYPAIISQEQFFAVQQLKQGSGRRPSSDKPLLTNLFKGVMRCALCGFVVIVTGVTEKRSGNYRCSMKYEGRCNAKGISRLQTDKALVQGLLYNAHRLNLSSDNSKVIGNLQSELETLQKQQERLVKLAMLTDDTESVAGELRGLNKQIKEAEKAVAEAHQRDQSSKLDTLNHLDMTVKKDRIEAQIIIKRMIRTITVDTARKVCRIVFHNGLVFHDYPLDRVIDGARDLELLPVMGYSEVRFTNGKGHTPNHVLMADTPDWVKDEE

SEQ ID NO: 4216 - protein, 541 aa, synthetic construct
MKQAISYVRFSSERQKGGSSVERQQAMIAQWLSDHPDYTNTDLKFSDLGKSGFHGEHVKEGGGFGKLLLAVEAGAIKAGDVVLVEAIDRTGRLPALEMLTRVIAPILQAGVSIITLDDKTTYTNDSVGGQHLFMLVAKIQAAHGYSKALSERVAASYKLRREQAKKSGITPKRMTPVWLNPDGTVRNDVAPWIKTAFELYVSGVGKATIAKRMRESGVERLAKASGPGVEGWLRNKAVIGKWETQPDTPEHQIIDDVYPVIIEPSLFYKAQVHAERMRTERPTKTAKHFLVGLVRCGGCGKSYVMQNRDGAPHTMRCISRAQKLGCDNSHIVPKLVLDKIYSYTAITAALEAIAQQQMGVNDKEIVTREAELQELSRKVASLLQTVEAVGFMPELATKLKEAQNAREAAENALVILRSTIVAPAGHHWNEMGKLWTLERDDKQRLAAMLRTVGYSITVNADGRVTSSHSGVVYRYMGVDRRANQYKLMAGEELILVMKRSKEDDYPYEEPFLSDDMEGTSQWDEADYADLHQQHQKATASA

SEQ ID NO: 4217 - protein, 559 aa, synthetic construct
MNTRAKAYSYIRFSSPEQAKGDSYRRQRTAAEDYCRKHDIELASSREYTFLDKGRSAYTGRHLDDEGQLRRFLDLVESGAIERGSYLLVESLDRLSREKVSTALPRFMDLLNSGIRVVTLSDERLYTEEFNELDLIISIVHMSRAHSESSIKAQRLSAVWDKKKNLARTELKPLGKACPAWLELVDGQYQPSPNRVETILMIFELAIAGYGQGVIPRILNERGVAVFGSRNRNHSGAWGTSSVSKILGNRALLGEYQPTHIVNGVRTNHGEPIAAFFPAVITEEIFYQAQTVRAERRVHKTGGQTKHFNVLQGLMKCDVCGDAMHLVNKGRPPKGTTYIQCHSARKGVCKNGYIRAERAEAVLREILAKVDSLSLVQSSDGEARKQLTTVTGKLEMVTLRHAQMTDDYFASPSTGVAQMIARLEGEQTALRAEQEHLKETLATNQVVSKEDFFDKLDLITFEGRHAANSLLKRLGVKASVMSEGPSQQWYRVNTETLALFLISHNSDQIKVGTFDSRILDLQEAQGEISAEEKRQLALAPALLNELAREVIKKLDLGKK

SEQ ID NO: 4218 - protein, 517 aa, synthetic construct
MKTIHKLARPQLPEPPKLKVAAYARVSTSSNEQLASLQTQITHYENHIQNNDQWEYVGVYYDEGISGTKVEKRDGLHRLIKDAELGKIDLILTKSISRFSRNTVDCLNLVRKLTDIGVIIFFEKENINTGDMESELLLSILSSLAESESYSHSENMKWANRKRMAKGIFKTVPPYGYQRKGADFYLIPDEAKVIEQIFKWALEGVSAYQVAKRLNEKNIFTRKGSKWQASGINNILHNIVYTGTMLHQRYFNDDQFRKKKNNGELPMYRIDNNHPPIISWEDYERVQELITLRANAKGTSKGSQKYSQRYAFTKRIICDKCGCNYKRVHTAGKGNTKVVKWSCTGHLKNKDGCDALPITDESLKTAYLTMLNKLILGHTIVLEPLINTPVEGKASKQELEKLSIEITKIDEKLEVLASLNASGVVSTKTALEEQGRLQMELNKLQEKQHKIMESVNGTSTQRIQLEQLHQFTKRSEMLTEWDEDLFLRFAERIVVYSRQEVSFELKCGLLLKERLEA

SEQ ID NO: 4219 - protein, 547 aa, synthetic construct
MKLLVPYIRWSTKEQDSGDSLRRQTNLIDAFYAKHKDDYYLLPAHRYVDKGKSGFHQQHKAQGSDFRRMFENVMSGAIPEGSLIVVENFDRFSRADIDTAIDDVRQILRKGVSILTLGDGELYDKSALTDPVKLIKHIIIAERAHQESLVKQKRIAQVWNHKTQLARELKKPMGKQAPGWLELSEDGSHYIVDEDKASLVNIIYDKRLSGMSMFAICKWLNEQGYPTINQRKVRISKTKKPDGNWSALSVKHILTSRSVLGYLPAKISTEDRKTVLREEIESFYPQIVTDSKFYAVQQLLEETGKGKTSSGEHWLYVNILKGLIRCKCGLVMTPTGIRKPVYQGTYRCNGNKESRCSYGTVSRKLLDTQLCSRLFSKLSQLHDEATDTAKLDELQRRLNTVDSELEKLTETLIQLPNITQIQEALRVKQEEKDELIVQLSREKARVKSVSSLDLSGLDMESVEGRTEAQIIIKRLVKEIVVSGNEKLVDIYLHNGNMIRGFPLDGKDDHTLTLEEATDEMQSLDDMLIFGEPVTRIYPAGDMEEVDA

SEQ ID NO: 4220 - protein, 547 aa, synthetic construct
MKLLVTYIRWSTREQDSGDSLRRQTNLIDAFYAKHKDDYYLLPAHRYVDKGKSGFHQQHKAQGSDFRRMFENVMSGVIPEGSLIVVENFDRFSRADIDTAIDDVRQILRKGVSILTLGDGELYDKSALTDPVKLIKHIIIAERAHQESLVKQKRIAQVWNHKTQLARELKKPMGKQAPGWLELSEDGSHYIVDEDKASLVNIIYDKRLSGMSMFAICKWLNEQGYPTINQRKVRISKTKKPDGNWSALSVKHILTSRSVLGYLPAKISTEDRKTVLREEIEGFYPQIVTDSKFYAVQQLLEETGKGKTSSGEHWLYVNILKGLIRCKCGLVMTPTGIRKPVYQGTYRCNGNKESRCSYGTVSRKLLDTQLCSRLFSKLSQLHDEATDTAKLDELQRRLNTVDGELEKLTETLIQLPNITQIQEALRVKQEEKDELIVQLSREKARVKSVSSLDLSGLDMESVEGRTEAQIIIKRLVKEIVVSGNEKLVDIYLHNGNMIRGFPLDGKDDHTLTLEEATDEMQSLDDMLIFGEPVTRIYPAGDMEEVDA

SEQ ID NO: 4221 - protein, 541 aa, synthetic construct
MPKAISYIRFSTKIQSVGDSTKRQSKYINDWLKRNPDYYLDESLRFQDLGISGFSGANAKSGAFGEFLAAVESGYIEAGSVLLVESLDRVSRQDIDTAGEQLRKILRSGVEVVTLVDNEWYTKESLKDSLSMIKAMLVMERAHEESAMKSTRLRSMWAAKRERAANGEIMSKRCAAWLKVSDDRSHFEFIPENVKAVQRVFQLRLEGLSHVKIAKQMNDEGFSTLNQFKSVTGGWSQSSVTELLSNRSVIGFKVPSKSMAVKGVSEIPNYYPSIITDEQFYAVQQLKQGSGRKPSSDLPLLTNLFKGVLRCSECGFIVVVAGVSAKRSGIYKCSMKSEGRCNSVGFSRLQTDRALVQGLLYNTNRLALNRDNGSAIGSLQSELEQLQKQRERLIKLAMLADDTESMAKDLKALNRQIKDAEKAVSEVHQREQSSQLETISHLDLTVKKDRIEAQIIIKRIVKEIRLNTAGKKCDVFLHNGLKLLNFPLDRVVDGAQWLEVLPLIDGDEFDFEGFTTKPRHLVLEEAPEWVKEIEAQPNQPL

SEQ ID NO: 4222 - protein, 518 aa, synthetic construct
MPKKEANQPIKAVLYARYSSDRQREESIEGQIRVCEDYARRNNIVIVHTYADRAMTGRSDQRPEFQMMIQAAATQAFDVVLVYKLNRFARNRYDSAKYKHKLKKYGVHVVSAMENIADDPSGILLESVIEGMAEYYSAELAENVMRGMTENALECKWSGGLVPLGYKLDADHHLVIDEAGAPIVRRIYQMVLDGRTPTGIINELNAANCRTSTGRPFGKSSLTTILRNEKYIGTYTWNHIRKENAIPAIIDRKTFEAVQKTLQYRKNNHVKVCSENFLLTGKLFCGQCGSNMVGTSGTSKYKNTYYYYACTKHLKKDGCTARNIRADKLEELVCSVTTRILSSKEAVHAIARQAVEAQKKQKESLTVQSLKNQAAEINKKLKNCVQAVESGLISVTITNHIKEYEKRLTELNEAISREELLSGKSKLTEKHIEFFFYSIAQKIKTADKYKSILLSSLVRCVIVYDDYIEIQYNYKNELPLLQNPVRVKSSNLNGMVTQEGFEPTTHRLEGGCSIQLSY

SEQ ID NO: 4223 - protein, 644 aa, synthetic construct
MLRPICYERVSSIQQIEGGGGLDDQRSALEGYLDRNSDKFSNDRIFIQDRGVSAFKNSNISSESQLGIFLQDVQNRKYGEGDALIVMSLDRISRRSSWAEDTIRFIVNSGIEVHDISASTVLRKDDPHSKLIMELIQMRSHNESLMKSVRAKAAWDRKIIEAVQNGTVISNKMPMWLKNVDNRYQVIQEKADLIIRCFEWYRDGFSTGEIVKRIADPKWQMVTVSRLVRDRRLLGEHKRYNDEIIHNVYPKVIDDDLFLTANRMMDRVMLEKNKPAEDLLLESDVVQEIFQLYESGLGSGAIVKRLPKGWSTVNVLRVLRDKNVVTQKIIDNLTFERVNQKLSMNGVANRIRKDITIAQDDYITNLFPKILKCGCCGGNIAIHYNHVRTKYVICRNREERKICDAKSIQYIRIEKNILKCVKNVDFQKLMIESTGSETSVLDGLREELSSLRREESSYNDKINERKLAGKRVGIHLNDGLTEVQDRIEEIEKEIISAQTVREIPKFDFDMDEVLDPMNIELRAKVRKQLRLVLKAVKYWMFDKRIFIQLEYFNDVLSHMLVIDNKRGGGEVMYEMSIEEKKGERIYTVHENGYAVFIASVTIGTELWSLALSRTRTIDSVGNYLSLLAREGFEIFVNEDQIDWF

SEQ ID NO: 4224 - protein, 507 aa, synthetic construct
MKRVISYIRFSSERQAKGDSLRRQSKMVNDWLKAHPEYYLDQDLSFRDLGVSGFTGKHLKGGLGDFLTAIEKGLVKAGDTLLIESLDRLSRQAVDRASELLRNILRSGVDVVTLSDGEHYTRESLRDPLALIKSILIMQRAHEESLRKSERIQAAWNRKKELISEGIKISKRCPAWLKLNDDRKSFSVIPEKVETVKRCFQLRLEGKSIWEIVRTMNAEGHQTLHQHKAGSFGQSSVQDLLKNRSVIGYFTPKGCEEISGYYPAIIDETTFYKVQQLSYARYGRKPASDKPLSVNLFKGVIRCSECGHALIITGFSDTRSGIYRCPLRNENRCNAKGLSRKQTDSTLLALLSRLDRFDSDMTNTIDTLKLHREHLSSNIEKLVQLSLEIEDLSAITSKLKQLKNELSQVDADIEKETQRLKSIDVGCLSDCDLTTKAGRIEAQLIIKSAVKEVVLNTAKRRCKVTFHNGRAITLPITENPSKDVTEAIQSLSEVTERGLIDVDEVII

SEQ ID NO: 4225 - protein, 529 aa, synthetic construct
MRKVYSYMRFSRPEQAKGTSIERQSNFAEQYALEHGLELDKSLTMMDKGLSAFHGVHKTKGAFGQFLAAVTAGKVPSGSVLVVESLDRLSREDPLIAQAALTDLILSGITVVTAADNQVYSREEIQQNPFKLIMSLVVMIRANEESETKQRRSNAFLKSALNQYQANGKVRRLGSDPSWLDFNKDNDTYSFNERVEVIRRILNLYNQGIGSLKIARQLTEESIPTLSGKRSAWGQTTVANIVKSHALYGTKRINVQGVEYDLEDFYPALITKSKWLALQQHRTKRSKSMHGRGEVVHLITGHGKGFTTCGYCGGGLGAQTQKQYKRSGVYSKTVTRLHCLTHKETSSCCSSVFLEPIENAVLFAACIGVEPQSLVPTVNNVNYSALIDEVDNKVKHIVEQVTAGAPWDLFKDAHDRLKSEKQKLIEERDSQKPDVNQSDVQKWVNKLVELADKARANDKEARLKCRTLISSICKSIVIKLRGHDLKSEPVVTITFVTDEQFEFKVGKSGAVQFVDNGMAVNRRLKPLLA

SEQ ID NO: 4226 - protein, 559 aa, synthetic construct
MKTKLYSYIRFSSMRQNDGSSYERQIRMAREIAAKYDLELVNDYQDLGVSAFKGANSKTGALSRFLDAIGRSVPVGSWLFIENLDRLSRADIVSAQELFLSIIRRGITIVTGMDNKIYSLDTVTANPMDLMFSILLFIRGNEESQTKRNRTNSSALIKIKAHQENPQNPAVAIEEVGKNMWWTDTTSGYVLPHPVYFPVVQEIVELRKNGRSTAEILDHLNETYTPPPAVSNKKHSKWSRAMVERLFHTRALIGIKEVSVDGVNYELKDYYPRVIDDPTFYHLKKNIGARAWNFGDKEEVKPIPLLSGIGLLKCDHCGCAMVKVKGTNKRSDQYRYTCDATRSRRLDCEHPNWSFRGDQLEKAVLQLLADKIWIAEDKANPVPALKVQVDEISRKIDNLIALSAMTGATKELADQITTLNSERETLYNQIKMAEEEMYSVDSQGWEKLAEFDLEDVYNEERLKVRFKIKQALKRIGCSRIDRNKNLFVLEYIDGKTQRVVIENSRGTRKGRIFIDLKTINDRQILESNGLVLHPCLDMLTDKNWKPEEEIPGPLQEFGI

SEQ ID NO: 4227 - protein, 559 aa, synthetic construct
MKTKLYSYIRFSSMRQNDGSSYERQIRMAREIAVKYDLELVNDYQDLGVSAFKGANSKTGALSRFLDAIGRSVPVGSWLFIENLDRLSRADIVSAQELFLSIIRRGITIVTGMDNKIYSLDTVTANPMDLMFSILLFIRGNEESQTKRNRTNSSALIKIKAHQENPQNPAVAIEEIGKNMWWTDTTSGYVLPHPVFFPIVQEVVELRRNGRSTAEILDHLNATYTPPPAASHKRHSNWSRAMIERLFHTRALIGIKEISVDGVKYELKDYYPRVLDDAEFYHLKKSIGVRACNFGDKEEVKPIPLLSGVGLLKCEHCGSAMVKVKGTNRRPNQYRYSCDAMRSSRIECVHTNWSFRGDQLEKAVLQLLADKIWIAEDKANPVPALKVQIDEISRKIDNLITLSAMTGATKELADQITTLNSERETLYNQIKMAEEEMYSVDSQGWEKLAEFDLEDVYNEDRIKVRFKIKQALKRIGCSRIDKYKNLFVLEYIDGKTQRVVIENSRGPRKGRIFVDLKTINDRQILESNGLVLHPCLDMLTDKNWKPEEEILGPLQEFGI

SEQ ID NO: 4228 - protein, 506 aa, synthetic construct
MRTVITYLRFSSATQGAEGADSTRRQNELFKQWLRKNSDAQVVASFSDEGLSGYKGKHLTGQFGDMLARIEAGEFPAGAILLVESIDRIGRLEHLETEALMNRIIAHGIEIHTLQDGLIYTRDALSDDLGISIIQRVKSYLAHQESKQKSFRVSEKWKQRAKLALAGEQHLTRNVPGWIDPDTFKCNEHAETVRLIFKLLLDGESLHNIARHLQANNISSFSRRKDANGFSVHSVRTVLRSESVIGTLPASQRNDRPAIPNYYEAAIDAATFNKAQEILDKNRKGRTPASDNPLTINIFKGLFRCQCGASVHPTGTKNKYAGVYRCNSHLDGRCGVPPLKRKPFDKWMIDNFLGMIDVGNDGEAEKEIASLQHEVETVTARIKKATALLLEMDDITELKTQVKELNQKRTELQTTIDSMRRKTSLSDKGLPQLKDIDLMTKAGRVECQLILSKHLKGLTLGKDSVTVTLQNDTEITIPTNPLPLNDGTSIFEIAEKNLLNIDTFQL

SEQ ID NO: 4229 - protein, 547 aa, synthetic construct
MKLLVPYIRWSTKEQDSGDSLRRQTNLIDAFYSKHKEEYYLLPAHRYVDKGKSGFHQQHKAQGSDFRRMFENVMSGAIPEGSLIVVENFDRFSRADIDTAIDDVRQILRKGVSILTLGDGELYDKSALTDPVKLIKHIIIAERAHQESLVKQKRIAQVWNHKTQLARELKKPMGKQAPGWLELSEDGSHYIVDEDKASLVNIIYDKRLSGMSMFAICKWLNEQGYPTINQRKVRISKTKKPDGNWSALSVKHILTSRSVLGYLPAKISSEDRKTVLREEIEGFYPQIVTDSKFYAVQQLLEETGKGKTSSGEHWLYVNILKGLIRCKCGLVMTPTGIRKPVYQGTYRCNGNKESRCSYGTVSRKLLDTQLCSRLFSKLSQLHDEATDTAKLDELQRRLNTVDGELEKLTETLIQLPNITQIQEALRVKQEEKDELIVQLSREKARVKSVSSLDLSGLDMESVEGRTEAQIIIKRLVKEIVVSGNEKLVDIYLHNGNMIRGFPLDGKDDHTLTLEEATDEMQSLDDMLIFGEPVTRIYPAGDMEEVDA

SEQ ID NO: 4230 - protein, 507 aa, synthetic construct
MKRAISYIRFSSEKQSRGDSLRRQSKMVNDWLKAHPEYYLDQDLSFRDLGVSGFTGKHLKGGLGDFLTAIEKGLVKAGDTLLIESLDRLSRQAVDRASELLRNILRSGVDIVTLSDGEHYTSESLKDPLALIKSILIMQRAHEESLRKSERIQAAWDAKKEAAKAGIKVSKRCPAWLRLNDDRKSFSVIPEKVETVKRCFQLRLEGKSIWEIVRTLNAEGHRSMNQYKPGKFGQTSVQDLLKNRSVIGYFTPKGCEEISGYYPAIIDETTFYKVQQLSHSRYGKRSVSDKPLSVNLFKGVIRCSECGHALIITGFSDTRNGIYRCPLRNENRCNAKGLSRKQTDGTLLALLSRLDRFDSDMTNVIDALKLHREHISNNIEKLVQLSLEIEDLSAITIKLKQLKGELSQVDADIEKETQRLKSIDVGCLSDCDLTTKAGRIEAQLIIKSAVKEVVLNTAKRRCKVTFHNSKSITLPITENPSDNVTEAIQSLSEVTERGLIDVDVVEI

SEQ ID NO: 4231 - protein, 598 aa, synthetic construct
MNKIIPYGYLRVSSLEQVRTGGGLDTQDEEVRRYITQNSEKFDIDRMVVMSDAGMSAYTGSNIKEGELGRFLADVNAGLIPTGSALICYSVDRLSRQNPWVGTHLISTLIGAGIEIHSVAENQILRSDDPVGAIMSTIYLMRANNESVIKSERAKKGYEKRLNESITNKKVLTRQMPRWLFDCDGKYAIDPNMQNVINFTFDSYIAGQSTGFIAKELNNRGLMYGNTSWRGSYVAKLIRDERLIGKHIRYSKQIKGVKRVVIETIPNFYPVVVDVEKFFLANNMLTSVAKNIRGRTRVTYGDDSILRNLFNGVIKCGVCGGDTSVVQNTRKKIVNGEATYIPYKTFLRCRTRYELKNCVQSDIRYEVIERAILNHLMGLDISALLSVPVDNKIESYRTELELCKAEEVELHTLIEQREREGKRVRPRTIKAYEDVSDRIDELNKLIESYVEDTFVPDFNVDLNSIADVSNVSDRSLIKKGIATIADSICYKRISDFILVEIKYRNLSVKHVLVIDNKQSKVVVNFSIEYHENSHDYTCNGFILKYVKSPEEFHLMGVNIEDYAHMMNFVDFISDNEAKKIKEYLVSNLSRVLISNVTE

SEQ ID NO: 4232 - protein, 507 aa, synthetic construct
MKRVISYIRFSSERQAKGDSLRRQSKMVTDWLKAHPEYYLDQDLSFRDLGVSGFTGKHLKGGLGDFLTAIEKGLVKAGDTLLIESLDRLSRQNVDRASELLRNILRSGVDVVTLSDGEHYTRESLKDPLALIKSILIMQRSHEESLRKSERIQAAWNRKKELISEGIKISKRCPAWLRLNDDRKSFSVIPEKVETVKRCFQLRLEGKSIWEIVRTLNAEGHQTLNQYKAGSFGQTSVQDLLKNRSVIGYFTPKGCEEISGYYPAIIDETTFYKVQQLSYARHGRKPASAKPLSVNLFKGVIRCSECGHALIITGFSDTRNGIYRCPLRNENRCSAKGLSRKQTDGTLLTLLSRLDRFDSDTTNTIDTLKLHREHISSNIEKLVQLSLEIEDLSAITSKLKQLKNELSQVDADIEKETQRLKSIDVGCLSDCDLTTKAGRIEAQLIIKSAVKEVVLNTAKRRCKVTFHNGKAITLPITENPSDNVTEAIQSLSEVTERGLIDVDVVEI

SEQ ID NO: 4233 - protein, 559 aa, synthetic construct
MKTKLYSYIRFSSMRQSDGSSYERQIRMAREIAAKYDLELVNDYQDLGVSAFKGANSKTGALSRFLDAIGRSVPVGSWLFIENLDRLSRADIVSAQELFLSIIRRGITIVTGMDNKIYSLDTVTANPMDLMFSILLFIRGNEESQTKRNRTNSSALIKIKAHQENPQNPAVAIEEVGKNMWWTDTTSGYVLPHPVYFPVVQEIVELRKNGRSTAEILDHLNETYAPPPAVSNKKHSKWSRAMVERLFHTRALIGIKEVSVDGVNYELKDYYPRVIDDATFYHLKKNIGARAWNFGDKEEVKPIPLLSGIGLLKCDHCGCAMVKVKGTNKRSDQYRYTCDATRSRRLDCEHPNWSFRGDQLEKAVLQLLADKIWIAEDKANPVPALKVQVDEISRKIDNLIALSAMTGATKELADQITTLNSERETLYNQIKMAEEEMYSVDSQGWEKLAEFDLEDVYNEERLKVRFKIKQALKRIGCSRIDRNKNLFVLEYIDGKTQRVVIENSRGTRKGRIFIDLKTINDRQILESNGLVLHPCLDMLTDKNWKPEEEIPGPLQEFGI

SEQ ID NO: 4234 - protein, 518 aa, synthetic construct
MPKAISYIRFSTKIQSVGDSTKRQSRYINDWLKRNPDYYLDESLRFQDLGISGFSGANAKSGAFGEFLAAVESGYIEAGSVLLVESLDRVSRQDIDTAGEQLRKILRAGVEVVTLVDNEWYTKESLKDSLSMIKAMLVMERAHEESAMKSTRLRSVWAGKRERAANGEIMSKRCAAWLKVSEDRSHFEFIPENVKAVQRVFQLRLEGLSHVKIAKQMNDEGFSTLNQFKPVKGGWSQSSVTELLSNRSVIGFKVPSKSMAVKGVSEIPNYYPSIITDEQFYAVQQLKQGSGRKPSSDLPLLTNLFKGVLRCSECGFIVVVAGVSAKRSGIYKCSMKSEGRCNSVGFSRLQTDRALVQGLLYNTNRLSLNRDNGSAIGAIQSELQHLQKQRERLIKLAMLADDTESMAKDLKALNSQIKDAEKAVSEVHQREQSSQLETISHLDLTVKKDRIEAQIIIKRIVKEIRLNTAGKKCDVFLHNGLKLLNFPLDRVVDGEIFLEVLPVLEADEFDFDTYRMIE

SEQ ID NO: 4235 - protein, 547 aa, synthetic construct
MKLLVPYIRWSTKEQDSGDSLRRQTNLIDAFYAKHKDDYYLLPAHRYVDKGKSGFHQQHKNQGSDFRRMFENVMSGVIPEGSLIVVENFDRFSRADIDTAIDDVRQILRKGVSILTLGDGELYDKSALTDPVKLIKHIIIAERAHQESLVKQKRIAQVWNHKTQLARELKKPMGKQAPGWLELSEDGSHYIVDEDKASLVNIIYDKRLSGMSMFAICKWLNEQGYPTINQRKVRISKTKKPDGNWSALSVKHILTSRSVLGFLPAKISSEDRKTVLREEIEGFYPQIVTDSKFYAVQQLLEETGKGKTSSGDHWLYVNILKGLIRCKCGLVMTPTGIRKPVYQGTYRCNGNKESRCSYGTVSRKLLDTQLCSRLFSKLSQLHDEATDTAKLDELQRRLNTVDSELEKLTETLIQLPNITQIQEALRVKQGEKDELIVQLSREKARVKSVSSLNLSGLDMESVEGRTEAQIIIKRLVKEIVVSGNEKLVDIYLHNGNMIRGFPLDGKDDHTLTLEEATDEMQSLDDMLIFGEPVTRIYPAGDMEEVDA

SEQ ID NO: 4236 - protein, 507 aa, synthetic construct
MKRVISYIRFSSERQAKGDSLRRQSKMVNDWLKAHPEYYLDQDLSFRDLGVSGFTGKHLKGGLGDFLTAIEKGLVKAGDTLLIESLDRLSRQAVDRASELLRNILRSGVDVVTLSDGEHYTKESLKDPLSLIKSILIMQRAHEESLRKAERIQAAWDAKKEAAKAGIKVSRRCPAWLRLNDDRKSFSVIPEKVETVKRCFQLRLEGKSIWEIVRTLNAEGHQTLNQYKAGKFGQTSVQDLLKNRSVIGYFTPKGCEEISGYYPAIIDETTFYKAQQLSYARYGRKPASDKPMAVNLFKGVIRCSECGHALIITGFSDTRSGIYRCPLRNENRCSAKGLSRKQTDGTLLTLLSRLDRFDSDMTNVIDTLKLHREHISSNIEKLVQLSLEIEDLNAITNKLKQLKNELSQVDADIEKETQRLKSIDTGSLSDCDLSTKAGRIEAQLIIRSAVKEVVLNTAKRRCKVTFHNGKVIDLSITETSSEDVTEAIQSLSEVTERGLIDVDEVII

SEQ ID NO: 4237 - protein, 507 aa, synthetic construct
MKRAISYIRFSSEKQSRGDSLRRQSKMVNDWLKAHPEYYLDQDLSFRDLGVSGFTGKHLKGGLGDFLTAIEKGLVKAGDTLLIESLDRLSRQDVDQASELLRNILRSGVDVVTLSDGEHYTKESLKDPLALIKSILIMQRAHEESLRKAERIQAAWDAKKEAAKAGIKISRRCPAWLKLNDDRKSFSVIPEKVETVKRCFQLRLEGKSIWEIVRTLNAEGHRSMNQYKPGKFGQTSVQDLLKNRSVIGYFTPKGCEEISGYYPAIIDETTFYKVQQLSHSRYGKRSVSDKPLSVNLFKGVIRCSECGHALIITGFSDTRNGIYRCPLRNENRCSAKGLSRKQTDGTLLTLLSRLDRFDSDTTNTIDTLKLHREHISNNIEKMVQLSLEIEDLSAITSKLKQLKGELSQVDADIEKETQRLKSIDVGCLSDCDLSTKAGRIEAQLIIRSAVKEVVLNTAKRRCKVTFHNGKVIDLPITENPSEDVTEAIQSLSEVTERGLIDVDVVEI

SEQ ID NO: 4238 - protein, 559 aa, synthetic construct
MKTKLYSYIRFSSMRQNDGSSYERQIRMAREVAAKYDLELVNDYQDLGVSAFKGANSKTGALSRFLDAIGRSVPVGSWLFIENLDRLSRADIVSAQELFLSIIRRGITIVTGMDNKIYSLDTVTANPMDLMFSILLFIRGNEESQTKRNRTNSSALIKIKAHQENPQNPAVAIEEVGKNMWWTDTTSGYVLPHPTYFPVVQEVVELRKNGRSTAEILDHLNETYAPPPAVSNKKHSKWSRAMVERLFHTRALIGIKEVSVDGVNYELKDYYPRVIDDATFYHLKKNIGARAWNFGDKEEVKPIPLLSGIGLLKCDHCGCAMVKVKGTNKRSDQYRYTCDAIRSRRLDCEHPNWSFRGDQLEKAVLQLLADKIWIAEDKANPVPALKVQVDEISRKIDNLIALSAMTGATKELADQITTLNSERETLYNQIKMAEEEMYSVDSQGWEKLAEFDLEDVYNEERLKVRFKIKQALKRIGCSRIDRNKNLFVLEYIDGKTQRVVIENSRGTRKGRIFIDLKTINDRQILESNGLVLHPCLDMLTDKNWKPEEEIPGPLQEFGI

SEQ ID NO: 4239 - protein, 507 aa, synthetic construct
MKRAISYIRFSSEKQSRGDSLRRQSKMVNDWLKAHPEYYLDQDLSFRDLGVSGFTGKHLKGGLGDFLTAIEKGLVKAGDTLLIESLDRLSRQAVDRASELLRNILRSGVDVVTLSDGEHYTKESLRDPLSLIKSILIMQRAHEESLRKSERIQAAWNRKKELISEGIKVSRRCPAWLRLNDDRKTFSVIPEKVETVKRCFQLRLEGKSIWEIVRTLNDEGHQSMSQYKPGKFGQTSVQDLLKNRSVIGYFTPKGCEEIAGYYPAIIDETTFYKVQQLSHSRYGRKPVSAKPLSVNLFKGVIRCSECGHALIITGFSDTRNGIYRCPLRNENRCSAKGLSRKQTDGTLLALLSRLDRFDSDMTNTIDMLRLHREHISSNIEKLVQLSLEIEDLSAITIKLKQLKGELSQVDADIEKETQRLKSIDVGCLSDCDLTTKAGRIEAQLIIKSAVKEVVLNTAKRRCKVTFHNGKSITLPITENPSEDVTEAIQSLSEVTERGLIDVDVVEI

SEQ ID NO: 4240 - protein, 507 aa, synthetic construct
MKRAISYVRFSSEKQSRGDSLRRQAKMVTDWLKAHPEYYLDESLTFRDLGVSGFTGKHLKGGLGDFLTAIEKGLVKAGDTLLIESLDRLSRQDIDIASELLRRILRAGVDVVTLSDGEHYTKESLKDPLSLIKSILIMQRAHEESLRKAERIQAAWDAKKEAAKAGIKISRRCPAWLKLNDDRKSFSVIPEKVETVKRCFQLRLEGKSIWAIVKALNDEGHQTLNQYKAGKFGQTSVQDLLKNRSVIGYFTPKGCEEIAGYYPAIIDETTFYKVQQLSHSRYGKRSVSDKPLSVNLFKGVIRCSECGHALIITGFSDTRNGIYRCPLRNENRCSAKGLSRKQTDGTLLALLSRLDRFDSDTTNTIDTLKLHREHISNNIEKLVQLSLEIEDLSAITSKLKQLKGELSQVDADIEKETQRLKSIDVGCLSDCDLTTKAGRIEAQLIIKSAVKEVVLNTAKRRCKVTFHNGKVIDLPITENPSEDVTEAIQSLSEVTERGLIDVDEVII

SEQ ID NO: 4241 - protein, 507 aa, synthetic construct
MKRAISYIRFSSEKQSRGDSLRRQAKMVTDWLKAHPEYYLDESLTFRDLGVSGFTGKHLQGGLGDFLTAIEKGLVKAGDTLLIESLDRLSRQDVDQASELLRNILRSGVDVVTLSDGEHYTRESLKDPLALIKSILIMQRSHEESLRKSERIQAAWDAKKEAAKAGIKISRRCPAWLKLNDDRKTFSVIPEKVETVRRCFQLRLEGKSIWEIVRTLNDEGHQTLNQYKAGKFGQTSVQDLLKNRSVIGYFTPKGCEEIAGYFPPIIPETDFYKVQQLSYSRYGRKPASDKPLSVNLFKGVIRCSECGHALIITGFSDTRSGIYRCPSRNENRCNAKGLSRKQTDSTLLALLSRLDRFDSDMTNTVDTLKLHREHISNNIEKLVQLSLEIEDLSAITSKLKQLKGELSQVDADIEKETQRLKSIDVGCLSDCDLTTKAGRIEAQLIIKSAVKEVVLNTAKRRCKVTFHNGKVIDLPITENPSEDVTEAIQSLSEVTERGLIDVDEVII

SEQ ID NO: 4242 - protein, 541 aa, synthetic construct
MPKAISYIRFSTKIQSVGDSTKRQSKYINDWLKRNPDYYLDESLRFQDLGISGFSGANAKSGAFGEFLAAVESGYIESGSVLLVESLDRVSRQDIDTAGEQLRKILRSGVEVVTLVDNEWYTKESLKDSLSMIKAMLVMERAHEESAMKSTRLRSMWAAKRERAANGEIMSKRCAAWLKVSDDRSHFEFIPENVKAVQRVFQLRLEGLSHTKIAKQMNDEGFSTLNQFKSVTGGWSQSSVTELLSNRSVIGFKVPSKSMAVKGVSEIPNYYPSIITDEQFYAVQQLKQGSGRKPSSDLPLLTNLFKGVLRCSECGFIVVVAGVSAKRSGIYKCSMKSEGRCNSVGFSRLQTDRALVQGLLYNTNRLSLNRDNGSAIGTLQSELQELQKQRERLIKLSMLTDDIESMAKDLKSLNSQIKDAEKAVSEVHQREQSSQLETISHLDLTVKKDRIEAQIIIKRIVKEIRLNTAGKKCDVFLHNGLKLLNFPLDRVVDGAQWLEVLPLIDGDEFDFEGFTTKPRHLVLEEAPEWVKEIEAQPNQPL

SEQ ID NO: 4243 - protein, 597 aa, synthetic construct
MKRKLYSYQRWSSAVQSDGTTKARQTFAAEEYAKRNDLEVVEIVDAGISGFKSDNSKSGALSKFLAAVDEGLIPNNAYLFVESLDRITRDEIDVALELFMGILRRGITIVTGMDNKVYTRAGIKGNPIDLLTSILLFTRAHEESKTKQNRTNGNALAMIRRFQSGLPTTIKAVGSHPWWIDCSTDKFEAVRRHPTLWQPAQDAINMFMEGVSVFKVVQYLNEKYPHAYKSKAWKTANIRKLRFNKAVYGVREITVDGTDYALPNYFPSLITEGQFLRLEKIRETTKYIGKVGEGKTVTDEEGNSKVIAERNNINLLAGMKLFRCGHCGGTMMAMRHGDTIRYLCEKGRGHQNDCKTWSLPGILVEHTLMLVTTIAYINMQRKGGVDKEDYTAQISSTEKLIEDISKKISNGTSLVLGGLGDVEEVIAQLQELKDSRSNLVLELEVLQRKQLLAEDHTFEGLMMDFFTYAQYGVLQDPIHEYRRKLRDIVYSSIGDVRAWKVDRRLMISFQIKGDDEYYTFSAGDEQYNYIFYYGSPVQLKEGLSPQGNYELPEEIKQRIREHRGVYEATMALMNTAHELLATVNYPQLDGRLFWPRK

SEQ ID NO: 4244 - protein, 559 aa, synthetic construct
MKTKLYSYIRFSSMKQADGSSYERQKRTAAEIAAKYDLELVTSYQDFGVSAFKGANSRTGALSRFLDEIGRSVPVGSWLVVENLDRISRQSIIEAQELFLSIIRRGITIVTGMDGKVYSRESVNANPIDLLLSVMLFARANEESQTKRNRTNSSALIKIKAHQENPQNPAVAIEEVGKNMWWTDTTSGYVLPHPVFFPIVQEVVELRRNGRSTAEILDHLNATYTPPPAASHKRHSNWSRAMIERLFHTRALIGIKEISVDGVKYELKDYYPRVLDDAEFYHLKKSIGVRACNYGDKEEVKPIPLLSGVGLLKCEHCGSAMVKVKGTNRRPNQYRYSCDAMRSSRIECVHTNWSFRGDQLEKAVLQLLADKIWIAEDKANPVPALKIQIDEISRKIDNLITLSAMTGATKELADQITTLNSERETLYNQIKMAEEEMYSVDSQGWEKLAEFDLEDVYNEDRIKVRFKIKQALKRIGCSRIDKYKNLFVLEYIDGKTQRVVIENSRGPRKGRIFVDLKTINDRQILESNGLVLHPCLDMLTDKNWKPEEEIPGPLQEFGI

SEQ ID NO: 4245 - protein, 506 aa, synthetic construct
MRHVITYLRYSSAIQGAEGADSTRRQNDLFKQWLKKNSDAQVVASFNDEGLSGYKGKHLSGQFGDMLSRIESGEFSKGTILLVEAIDRIGRLEHLETEALMNRIIAHGIEIHTLQDGLIYTRDALSDDLGISIIQRVKSYLAHQESKQKSFRVSEKWKQRAKLALAGEQRLTKMVPGWIDPETFKLNEHAETVRLIFKLLLDGESLHNIARHLQANNISSFSRRKDANGFSVHSVRTILRSETTRGTLPASQRNDRPAIPNYYEAAIDAATFNKAQEILDKNRKGRTPASDNPLTINIFKGLFRCQCGASVHPTGTKNKYQGVYRCNNHLDGRCDVPPLKRKPFDKWMIDNFLGMIDVGNDGEAEGKIAALQHEVEIVTARIKKATALLLEMDDITELKTQVKGLNQKRTELQTTIDNMRRKASLTDKELPQLKDIDLTTKAGRVECQLILSKHLKGLTLGKDSVTVTLQNDTEITIPTDPLPLNDGTSIFEIAEKNLLNIDTFQL

SEQ ID NO: 4246 - protein, 506 aa, synthetic construct
MRTVITYLRFSSATQGAEGADSTRRQNELFKQWLRKNSDAQVVASFSDEGLSGYKGKHLTGQFGDMLARIEAGEFPASTILLVESIDRIGRLEHLETEALMNRILGNGIEIHTLQDGLIYTKDALADDLGISIIQRVKAYIAHQESKQKSFRVSQKWEQRAKLALAGEQRLTKMVPGWIDPDTFKCNEHAETVRLIFKLLLDGESLHNIARHLQANNISSFSRRKDANGFSVHSVRTILRSETTRGTLPASQRNDRPAIPNYYEAAIDAATFNKAQEILDKNRKGRTPASDNPLTINIFKGLFRCQCGASVHPTGTKNKYAGVYRCNNNPDGRCDVPPLKRKPFDKWMIDNFLGMIDVGNDGEAEGKIAALQHEVEIVTARIKKATALLLEMDDITELKTQVKGLNQKRTELQTTIDNMRRKASLTDKELPQLKDIDLTTKAGRVECQLILSKHLKGLTLGKDSVIVTLQNDTEITIPTNPLPLNDGTSIFEIAEKELLEIDAYQL

SEQ ID NO: 4247 - protein, 506 aa, synthetic construct
MRHVITYLRYSSAIQGAEGADSTRRQNDLFKQWLKKNSDAQVVASFNDEGLSGYKGKHLSGQFGDMLSRIESGEFSAGTILLVESIDRIGRLEHLETEALMNRILGNGIEIHTLQDGLIYTKDALADDLGISIIQRVKAYIAHQESKQKSFRVSQKWEQRAKLALAGEQRLTKMVPGWIDPDTFKLNEHAETVRLIFKLLLDGESLHNIARHLQSNGIKSFSRRKDANGFSVHSVRTILRSVTTRGTLPASQRNDRPAIPNYYEAAIDAATFNKAQEILDKNRKGRTPASDNPLTINIFKGLFRCQCGASVHPTGTKNKYAGVYRCNNHLDGRCDVPPLKRKPFDKWMLENFLGMIDVGNDGEAEGKIASLQHEVEIVTTRIKKATALLLEMDDIDELKIQLKELNQKRTELQTTIDNMRRKASLTDKELPQLKDIDLMTKAGRVECQLILSKHLKGLTLGKDSVTVTLQNDTEITIPTNPLPLNDGSPIFEIADKELLDIDAYQL

SEQ ID NO: 4248 - protein, 476 aa, synthetic construct
MHTPQTAIYLRQSLDRDQNQLAIDRQRDDLLKLCKRLGWANPVQYADNNVSATKGRRQRYEELCRDIADGVIGRVAVWDMDRLHRQPRELEGFIDLVERHHVELANVGGSVDLSTPAGRYFARTRGAAARFEVEHKAERQKSANRQRAKAGKAWNVRSFGWKGDKLVAREANAIRKASRDLLNGASLWSIAAQWNSQGLKTVKGCGWTGGTVRQVLTRASNAGLVTYDVRAAQAEARIKGKPVHLAGIVEGAEPSRPAIVDRDVWEGVCTLLADPKRHTGKSPGRKHLLSGIAICDACRKPIGTGVRGTKTGGKRAVYSCKRIGCMKIVRGVELTDKRVVDAITKRLAEPDAAVTLARPTVDAKALRDQIELLRGQIREAEADYDDGQITAARMNARIERVEAKLKPLQDTLLGSHMSADVKALAGRPDAAKRFAALPLDRQRGVIDTLATVTIHALNRPGGRFDPKAITVDFERK

SEQ ID NO: 4249 - protein, 507 aa, synthetic construct
MKRVISYIRFSSEKQAKGDSLRRQSKMVTDWLKAHPEYYLDESLTFRDLGVSGFTGKHLKGGLGDFLTAIEKGLVKAGDTLLIESLDRLSRQAVDRASELLRNILRSGVDVVTLSDGEHYTSESLKDPLALIKSILIMQRAHEESLRKSERIQAAWDAKKEAAKAGIKVSKRCPAWLKLNDDRKSFSVIPEKVETVKRCFQLRLEGKSIWEIVRTLNAEGHQTLNQYKAGSFGQTSVQDLLKNRSVIGYFTPKGCEEIAGYYPAIIDETTFYKVQQLSYARHGRKPASAKPLSVNLFKGVIRCSECGHALIITGFSDTRNGIYRCPLRNENRCSAKGLSRKQTDGTLLALLSRLDRFDSDTTNTIDTLKLHREHISSNIEKLVQLSLEIEDLNAITNKLKQLKNELSQVDADIEKETQRLKSIDVGCLSDCDLTTKAGRIEAQLIIKSAVKEVVLNTAKRRCKVTFHNGKVIDLSITENPSEDVTEAIQSLSEVTERGLIDVDEVII

SEQ ID NO: 4250 - protein, 528 aa, synthetic construct
MKVPVWSYARVSTISQIDGFGIQRQVNTINQFIQYLVLDHRLPFTLDVDNITQMVAEGKSAFRGKNWNPKTKLGQYRKMVMDGLIPDSVLIVENIDRLTRLDPFQAVEIVSGMINRGTTILEIETGMTYSRYIPESITVLTMQINRANGESKRKSIMMQKSHQNRFGNVSKVRPRWFDVVEIDGVKQYRTNDTAKAIQRMYSDYINGIGAAQIVRTYGKTDNGKWWTLVTVLRALSDKRVADDPRYPPIVDKAIYEKVQAIKIRSNKGNTHQKNMLNIFSGMTRCPICKQSIIVKRNSHGGLYTICLGKRTNKTCEARCIAYNAFERPLLNAIRGLDFSEVYNREESNVVTLRDQWIQNERDISAFRERLVKASRHEKFAILDELETLSKEQEELSIRLKSVDAPKDVKITYNDTKLDLDVEYRIELNSRMKKLIQCIDIGRVDNSKSSYTIYCTIKYWTDAIKHLVIIDAESVRIGKGGANKLTTTLRSVSSIDANGTISGNPDIEALEYWEKVIDKAVVMAKEQVG

SEQ ID NO: 4251 - protein, 569 aa, synthetic construct
MKQSNNKKSRDVTAFLYERLSRDDNLEGESYSIGNQKKLLAKVAKEKGYTNLVHFLDDGISGVTMDRPGFVEMICQLEQGKAAAVFVKDLSRLGRNYIEVGRLTEEFFPDHDIRLVAVSDNIDTAEGENELAPIRNLFNEWYARDISKKRRISNKIKGNAGEPMGQPPYGYIKDPNDPKHWIVDDEAAQVVRRVYSMTLEGFGTEQIAAQLEKDDVLTPRAYWLTKGIKRPGKGKQQPPTKWNSSTITKILSLQEYCGDILNFKTYSKSYKNKKRIDNDRENWVVFQDVHEAIIERAVYEQVQQKRGKIRKRRTNNGEHNMFSGLLVCADCGSNLHFHFNQGNPEIKYFNCSNYKGNRGTCTSTHYVRVDFLEEVVLGEIRRLTKFASLYEDEFVKAVIGHSQQAEQTDRKLKEKELKTLLARDEELDGLFERIYEDNVSGKLSDDRFAKMSRRYEDEQKELAEKIKKLRSEIEKQSSRSMTTDMFIGLVRKYTRARKLTPRMLNELIEKIEVFNAEKIDGVWEQRLRIHYNCVGTIEIPTVLPLPIPEVSVNTRKGVVVNYAPCELAV

SEQ ID NO: 4252 - protein, 520 aa, synthetic construct
MKKITKIDELPQGQLPNTKLRVAAYARVSTDSDEQLESLKAQREHYERYIKSNPEWEFAGLYYDEGISGTKMEKRTELLRMIRDCKQGRIDFIITKSISRFARNTVDCLELVRKLIDIDVYIYFEKENLNTGDMESELMLSILSGFAAEESASISQNNKWSIQKRFQNGSYVGTPPYGYTNIDGEMVIVPEEAEIIKRIFAECLSGKGGGTIARGLNKDKIPARRGNHWSAGTVIDMLRNEKYMGDVLLQKTYTDSNYNRHSNTGEKDQYYYKDNHEPIISREDFAKAQDLIDERAKMKCKGVKKNVYLNRYALSGKIVCGECGRNFRRKTNYSAGRSYIAWSCIGHIEDKESCSMLFLRDGEIKATFTTMMNKLAFSHKLILEPLFKSISQIDEESDRERMDAIDKRMEQLMEERNTLITLMAKGFLEPALFNQERNVLDNEIRNFSTEKTNLVTNSTSGVLRANDIKDLIDYVSADNFNGDYTEELFEEFVENIIVNSRDELTFNLKCGLSLKEKVVR

SEQ ID NO: 4253 - protein, 520 aa, synthetic construct
MTEKNIMVIPARKRVGSTAAKEQIKKLRVAAYCRVSTETEEQNSSYEVQVAHYTEFIKKNNEWEFAGIFADDGISGTNTKKRDEFNRMIAECMDGNIDMIITKSISRFARNTLDCLQYIRQLKDKNISVYFEKENINTMDAKGEVLLTIMASLAQQESQSLSQNVKLGLQYRYQQGKVQVNHKRFMGYTKDEDGNLIIVPEEAEIIKRIYREYLEGQSLVGIGRALEKDGILTAAGKPRWRPESVKKILQNEKYIGDALLQKTVTVDFLTKKRVKNEGHLPQYYVENSHEAIIPKELYLQVQEEIHRRRNIYTGADKNKRIYSSKYALSAITFCGDCGDIYRRTYWNIRGRKEFVWRCVTRIEHGPETCKNRTVKEGDLYDAVMTAINRLLAGGNNMIKTLEENIHAVIGETTEYQISEINNLLEEKQKELIKQANKGQDYEHLADEIDGLRDKRQTLLVEDASLSGENERINELIAFIRINKYRTLTYDDTLVRKIIQNVTVYDDHFVICFKSGIEIEV

SEQ ID NO: 4254 - protein, 559 aa, synthetic construct
MKTKLYSYIRFSSMRQNDGSSYERQIRMAREIAAKYDLELVNDYQDLGVSAFKGANSKTGALSRFLDAIGRSVPVGSWLFIENLDRLSRADIVSAQELFLSIIRRGITIVTGMDNKIYSLDTVTANPMDLMFSILLFIRGNEESQTKRNRTNSSALIKIKAHQENPQNPAVAIEEVGKNMWWTDTTSGYVLPHPVYFPVVQEIVELRKNGRSTAEILDHLNETYAPPPAVSNKKHSKWSRAMVERLFHTRALIGIKEISVDGVNYELKDYYPRVIDDPTFYHLKKNIGARAWNFGDKEEVKPIPLLSGIGLLKCDHCGCAMVKVKGTNKRSDQYRYTCDATRSRRLDCEHPNWSFRGDQLEKAVLQLLADKIWIAEDKANPVPALKVQIDEISRKIDNLIALSAMTGATKELADQITTLNSERETLYNQIKMAEEEMYSVDSQGWEKLAEFDLEDVYNEERIKVRFKIKQALKRIGCRRIDRNKNLFVLEYVDGKTQRVVIENSRGTRKGRIFIDLKTINDRQILESNGLVLHPCLDMLTDKNWKPEEEIPGPLQEFGI

SEQ ID NO: 4255 - protein, 507 aa, synthetic construct
MKRAISYIRFSSEKQSRGDSLRRQSKMVNDWLKAHPEYYLDQDLSFRDLGVSGFTGKHLKGGLGDFLTAIEKGLVKAGDTLLIESLDRLSRQNVDRASELLRNILRSGVDVVTLSDGERYTKESLRDPLSLIKSILIMQRSHEESLRKSERIQAAWNRKKELISEGIKISKRCPAWLRLNDDRKSFSVIPEKVETVKRCFQLRLEGKSIWDIVRTLNDEGHLSLNQYKAGKFGQTSVQDLLKNRSVIGYFTPKGREEIAGYFPPIIPETDFYKVQQLSYSRYGRKPASDKPLSVNLFKGVIRCSECGHALIITGFSDTRSGIYRCPLRNENRCSAKGLSRKQTDGTLLTLLSRLDRFDSDTTNTIDTLKLHREHISSNIEKLVQLSLEIEDLSAITIKLKQLKGELSQVDADIEKETQRLKSIDVGCLSDCDLTTKAGRIEAQLIIKSAVKEVVLNTAKRRCKVTFHNSKSITLPITENPSEDVTEAIQSLSEVTERGLIDVDVVAI

SEQ ID NO: 4256 - protein, 539 aa, synthetic construct
MKASDKKVYSYLRFSDPRQAVGSSADRQLAYAASWAAMHGMVLDSSLSLKDEGLSAYHERHVTQGALGVFLRAITEGRIPNGSVLIVEGLDRLSRAEPLLAQAQLAQIINGGVTVVTASDGREYNRASLKAQPMDLVYSLLVMIRAHEESDTKSKRVKAAIRRQCEGWIAGTYRGLIRNGKDPQWLRLSTEGWELIPERVAAVKRALELYSQGLGAGRAANVMHDEGFKLTEWGISGLQIYRMIKQPALRGVKRLTLDGEDFELEEYYPRVLSDTEWSELQHLASQRFRRRGAGEIPGIITGVGLAFCGYCGTAVVAQNIMNRRRADGTIADGHRRLHCTSYSKNGGCSYGGSCSVVPVERAVLSFCSDQINLTRLMQAGDAGQTLQKQLVVARAAVTKITTQLSKVTDALLADESGAAPLAFVRKARELEAQQAAAEQKVAQLEHEAIATSGAVRPAQAERWVELAAEVEAGNYSAREKVRQLVMDTFNRIVIYMRGMQTDGRNGPFIDVQLFSRSGQHRLLRINRKNGAWVASEDWE

SEQ ID NO: 4257 - protein, 551 aa, synthetic construct
MEKDSALLRIALYARYSSENQRDASIEDQLRQCRERAAREGWTVVETYSDRAISGSSMFRAGIRSLLADAQAGRFDMVLSEALDRISRDQEDVAAVFKRLRFAGVSIVTLSEGEINELHVGLKGTMNALFIKDLAIKTHRGQRGRVEAGKAGSGKAAYGYRVVHQLDANGEPIRGERAIVEEEAEIVRRIFREYASGRSPKEIAFQLNREGVPGPKKRPWIDAMIRGNPVAATGILNNELYAGVLAWNRQRFIKNPETGTRISRVNPESEWIRTEVPHLRIVDDALWQAVRERQRGISAMFGPNLGTTREARAKRLHLTNRPVTLLSGLLTCGCCGGRISMVMTDRYACRNHLRKGICDNARTIRRDEIEARVLAGLKEKLVSSEAVAEAVRAYAKETNRLNRDRRAQAEADQKALQKIDKAVAGIMAAIEDGLYQPSMKARMAELERDKAEIIARMALAPADVPDVHPNIASVYRRNVERFTEALNDPDGGRQAAEALRSLIGEIVLTPGPKRGEVHAELRGELMGILAFATDQKPKQNIRFMPPVASCG

SEQ ID NO: 4258 - protein, 562 aa, synthetic construct
MRRRTPVYAYIRMSTLEQAKGDSERRQLGQIERFLQENNGELVEPVFLDRLSSFNGKNIKKGAIKDFLEKVKNGQIEKGSILVIESFDRISRQGGYIAHSVILDIIKNGVDIATLSPYKRYSINSDNQFIEGIEIQTLLYRAHEESRTKSERITIQHEARREKAKDKKIVYGSLPFWLVRTEDWIEFREPEASDVKLCLSLLKTYGMYTATAKVNEQRRSSKPFTKETVSHLLNRSAVCGDLQTHRIEYDDNGNKIRVPGEVIHDYYPALITRSEFEELRAEIQNRKTSNTRGRVSGFKNIFRNVMTCDSCFAPMRLAHMKWKGGEKKYLICTKSETNQCAESGRVWFDYDDVERVFFREINLSILKQSLTQRAVFNDEEVEKLRSGFLKTEEQKANILKAIEMGTVSKALVNRLEALEKLSDETQKRIDEIKAENALKRSQNEADTFDYEQLDAALNDEEQRAVINKILRTNTSKISISKCEVGYDFVIDISINDKLETQILYNKNDDFINRYEFDSPQNQSSDLVIHEDQTDPYADEEIELFDPTTMPIINIDQHKKSPD

SEQ ID NO: 4259 - protein, 523 aa, synthetic construct
MAKSVTTIPATLSRFTAAPINSTKKRRVAAYARVSTDNEEQLTSYEAQVDYYTNYIQGRDDWEFAGVYTDEGITGTNTKKREGFKSMVADALAGKIDLIITKSVSRFARNTVDSLTTIRSLKEHNVECYFEKENIWTFDGKGELLLTIMSSLAQEESRSISENCTWGQRKRFADGKVTVPYNRFLGYDMGPDHNLVVNPEQAKLVKRIYGMFLQGQSPFQIARTLTEEGIPSPGGKDHWNPSNIKSILTNEKYKGDALLQKTFTVDFLTKKKKANEGEIPQYYVKDNHEAIIDPETFEMVQTLMATRKKGRNRKSSVSIFSSKVKCGDCGSWYGPKVWHSNDAYRKVIWQCNHKFDGQKCATPTLTEDEIKELFLWAANQVIDQKEQFIAIYKQVLSRSLDTTALESELSDLEAEINIAAELIDECIKENAHVAIDQAEYQKRYDGLVARFDKAKARHTEVTDLIAECTARRHQIETYLRELRNREPLTEFWETDWLAMVDYITVHSKNDIRVTFKDGTEIKA

SEQ ID NO: 4260 - protein, 563 aa, synthetic construct
MESERMQHSLSAQVNYYSALIQKNPEWEYAGVFADYGISGTGTKKREEFNRMLAECEAGNIDIILTKSIQRFARNTVDLLNTVRHLKDLGIEVRFEKENINSLSGDGELMLSILSSFAQEESRSISENVKWGTIKRFKQGIPNGKFSIFGYEWQDDKLVIVPEEAEIIRWMYAEYMKGASRIEIGRALMDRGIYTRQGKPWVDSNVKVILTNITYTGNMLFQKEYCEDPITKHRRKNYGEMPQYFVEDTHEAIIPMDEWQAVQVEFKRRRDLGPFGNKSLKLSAFSTKITCGCCRKHYRHSGKRNTAGEVYYIWICQTKSQKGVSACPSKNIPEKMLQNTAAEVLGLDKFDEDVFSQQIEEVIVIGDDILTFRFYDGHEVTTKWQSTAKTDWWTDERRKLWGERHKRKDTNPNRNTFYEFTGFIKCGCCGANYRCQSGKRKDGTPTRSWYCTGPRSECWNPAIRDDTMKRLVADVLGLDEFDEAAMDARIENATILDHTVTFHFRDGHTESRAFLDKRHGTPWTEERREKARESMKAAWTDERREAMSERIKKIRSEKKWPNP

SEQ ID NO: 4261 - protein, 499 aa, synthetic construct
MALDATLTLKDEGLSAYHQRHVKQGALGVFLRAIEDGRISSGSVLVVEGLDRLSRAEPIQAQAQLAQIINAGITVVTASDGREYNRAGLKAQPMDLVYSLLVMIRAHEESDTKSKRVKAAIRRQCEGWLSGSYRGLIRNGKDPQWVRLTSDGWELIPERVAAVKRALELYRQGLGAGRAALVMHEEGFQLTTGGISGLQIYRTIKLPALRGVKRLSIEGENYELEEYYPRILSDAEWSDLQHLAGQRLRRRGAGEIPGIITGVGLAYCGYCGTALVAQNIMKRRRSDGSIADGNRRLQCTSYSKNAGCSAGGSCSVVPIERALLSFCSDQLNLQRLLQVGDDGKSVRQKLLVARAALDKITAQVGKVTDALLADESGASPIAFIRKARELEEQQGVAEQNLKRLEFELASMSGAAQPVQADRWQELATQVRAEDYAAREKVRQLIMDTFERIVIFMRGMGAQDREGKEIDVQLLSRTGQHRLIQINRRSGDWVASEDWD

SEQ ID NO: 4262 - protein, 547 aa, synthetic construct
MKLLVTYIRWSTKEQDSGDSLRRQTNLIDAFYSKHKNDYYLLPAHRYVDKGKSGFHQQHKNQGSDFRRMFENVMSGVIPEGSLIVVENFDRFSRADIDTAIDDVRQILRKGVSILTLGDGELYDKSALTDPVKLIKHIIIAERAHQESLVKQKRIAQVWNHKTQLARELKKPMGKQAPGWLELSEDGSHYIVDEDKASLVNIIYDKRLSGMSMFAICKWLNEQGYPTINQRKVRISKTKKPDGNWSALSVKHILTSRSVLGYLPAKISTEDRKTVLREEIESFYPRIVTDSKFYAVQQLLEETGKGKTSSGEHWLYVNILKGLIRCKCGLVMTPTGIRKPVYQGTYRCNGNKESRCSYGTVSRKLLDTQLCSRLFSKLSQLHDEATDTAKLDELQRRLNTVDSELEKLTETLIQLPNITQIQEALRVKQEEKDELIVQLSREKARVKSVSSLDLSGLDMESVEGRTEAQIIIKRLVKEIVVSGNEKLVDIYLHNGNMIRGFPLDGKDDHTLTLEEATDEMQSLDDMLIFGEPVTRIYPAGDMEEVDA

SEQ ID NO: 4263 - protein, 507 aa, synthetic construct
MKRAISYIRFSSEKQSRGDSLRRQSKMVTDWLKAHPEYYLDQDLSFRDLGVSGFTGKHLKGGLGDFLTAIEKGLVKAGDTLLIESLDRLSRQAVDRASELLRNILRSGVDIVTLSDGEHYTKESLRDPLSLIKSILIMQRAHEESLRKSERIQAAWDAKKEAAKAGIKVSRRCPAWLRLNDDRKSFSVIPEKVETVKRCFQLRLEGKSIWEIVRTLNAEGHRSMNQYKPGKFGQTSVQDLLKNRSVIGYFTPKGCEEISGYFPPIIPETDFYKVQQLSYSRYGKRSVSDKPLSVNLFKGVIRCSECGHALIITGFSDTRNGIYRCPLRNENRCSAKGLSRKQTDGTLLTLLSRLDRFDSDTTNTIDMLRLHREHISSNIEKLVQLSLEIEDLSAITIKLKQLKGELSQVDADIEKETQRLKSIDTGSLSDCDLSTKAGRIEAQLIIKSAVKEVVLNTAKRRCKVTFHNGRIISLPITENPSEDVTEAIQSLSEVTERGLIDVDVVEI

SEQ ID NO: 4264 - protein, 514 aa, synthetic construct
MSAHVTILRNTVLPVKFNTMNRPRLYSYIRYSSERQGKGSSIERQKSYIAEMAKQIATEYDLEIFEEYQDLGVSAYKGKNVQEGALSDFIDQVESGLIPKGSFLLIESLDRFSRQNAMQAVNLFTSLLLNGITVITGIDKQVYRQTEVNTETLQQLMFSVMLFSRANEESPTKSHRTIASALSKIRRHQERKPGDPVVAIKELGSDKWWTDSSTGYVNPHPVLFPIAKKIIQLKQDGWSNRMILQHLKNNYDGPVIGNKKSKGIWNMQHCSRILEPAIYGRKVITVNNAEYVLDDYYPAIISKDEYEALKLQVGNKGFAPNRESNPEIPLLSGIGILHCAHCSCYMVKAKSTLKNHPHAYRYQCASRDLHQDCNKWGFRASTLERTILQLIADRIFLQTKYQPSGLEGKIADIQSQIENYVLAIGSAKSPEIINSLTSQIDQLEQEKQSLIVEKRLYDESIVQMNTEGWDKFRKFDIDDALNPLRTKIRANIKTVIMRVDCSRIDKKHNLFTIT

SEQ ID NO: 4265 - protein, 505 aa, synthetic construct
MKLVAYIRISSHGQKDKGDSLDGQRQYVKSWALTGKHTIKKWYIDEAVSAFKGKRLNFELMLDELDSGLVQADAVIVYSLSRFSRNLVTQLNATKTLEKLGMSLLSASESLPNSPDDKYLVVTMLGLINEHQSRQNSRVVSDRLRDTARKGFYTGGPIPFGYNAITVSGDTSKKRKKLVVNHQESPVVKLIFELAEKGTNGKGFGVKNIAVHLNKNGYSNRGKKWNKNSVCNILNNRVYMGEFLFGKSKPNKLGDERIVVKVPSIVSSSKFERVRQYVEERALSNTGIKSARSNSLLTGVLTCPVCHGSMRVTHGKSGKYKYYQCSQQVMYSPDSCSFKRIRKEEADKLIIDSLINRIFTEQNLSEIYLQTRNLLKERVAKNRMELTSLSQRIGSEKSRANHLIELISEHKIEATKVVNDTLKKHSDQIAHLEEELARKKISSSLPVKNFGMDKIKQFTHDVHSYIKKADEASLKQLILATIDKVYIIPEKKLAFTVVTWLLSIL

SEQ ID NO: 4266 - protein, 659 aa, synthetic construct
MRQTTNSLDLSTTKAYSYIRFSTTRQKKGDSLRRQTELAERYAIQQGLCLQDLSFEDLGVSAYRGSNSIEGALSCFIAAVRDGEIDRGSWLLVESVDRLSRQATEDALSLFTTIINLGITLVTLQDCEVYRKGELSMSKLMLLLVKAQAAFEESDKKGKRSKANWDTKRAKMRAGKKFKVATTPQWLTWDKAKERYEIKQEAAATLQRLFNLTIDGYGARAIASTFNDEAIPMLNGAPAKWLASTVNRLQNDKKVIGIYQPKSRGLDGSRTPIGAPVENFYPSVIDKQDFYEAMRIRESKRRGESGSYRRGSMRNLFTGLLRCGLCGNPLHVVQQNNKARVERYGVQYRLVCSTKKELGCASASIKYLTFERMVSSALAYIPELMAGQLDNTSVLKSLDKQLGAANAELKDLTIQGKRVLDMLLTRQESEVLTQRFDSIEQSKLNLQDRIAELQTSKLEASSVEGFFKQAQVMFNEVNSEQAITSVDWRQRFNTQLKRILSKLVVYMSKEGVSVWAVDKSDNTVLSLVGGRRMRLMAGESDMKGNHYGRLVDGDSSIEGDEEGILVYLRNRKEDHNVERVANSTELHANEDMCVEYFDWFESQSLSFVKGTRQAAPTIQDYFYWQRENFIRWGETDEYICRWEDNMVKALAYCGVAWLK

SEQ ID NO: 4267 - protein, 653 aa, synthetic construct
MAVIPYARVSSSKQIEGLSLKLQNDINLLKNIAKEYKTTVSNLFYIDAGVSSFKGKNAQSGELARLLTDIKEGTIKSGDIIVMRALDRLSRQNLTTSEVLYNQIISAGVMIFTTIDNHLYKADCTMSSILKTLALNTANEESAKKSHLTNRYALYRIEQFKNNDIPSNGTAYDIGIGRHPFWIHVENKVIKKHPTNFAIAREMFELSLKGDGVTKVMSYAHSKGLKISYSAVSQMFNSASIYGLLKINHQGINHELHGYYPPIATEEEFYQLRAIKDSFVKISNGNRKKISILGGINKLYCGCCGYAMGIARNGLQQTEYYGCLNRHKDKKQEKCFPLLKQQYVDKLVLNLISTHIWSIEEKDQTILLGLERQLEELKDKYQKQQLMLLEDPDLFDDDAKEILRNQKNKINSLKSDIDNEKVSIASSITDLSTFNEFKSALEFYKQHTSKIDEYIFGSDTEKKEIRSIISKLVKRVVIDHRHMITVEFIDGQKSYSLLLRSKTNKKSWDRYYIKPLIVSDLDFEQLKAANPELAVISATNETINHLDIYLEDVPNPHLILSRYTNRDLEKEFFESLTDDVYEWKRKYLLGKGASATQWQDYKDADVAKYGFTKAEIEITTKYYTKQKKTIIYKNYDLNAIKCLFGAINVCTVM

SEQ ID NO: 4268 - protein, 453 aa, synthetic construct
MECVAYMRVSTEKQAVEGNGLDSQKRDIENYCRKNELVITDWYIDDGYTGTNMDRPELQRLVNDCSRKRVSCVVAFKLDRLSRNMIDGIYLIEKVFQKYNVVFKCVHDSVNYDSPMEQAYTQMMAVFAQLDKNTMMLRMRGGMLERIKQGYWMGGGNLPYCYSYSKEQGILIPIPERAEQARKGLELFISGYSDAKIKEICGFKSELVTRSILTGVVNIGMIPYKGKIYQGKHEPIFDKDRFNLGLELRKSRCSAKTYCITEPNLLTGLCYCGICGCKMRYQKWGSEKHKIYCCSRNKSLSYLPNYNASCNNSLEWADEIEKQVEEEILKISLDLSSYKPKEKATKLEIMQSQLEKEQIKLKRLYNLYADGNDTVLEMIKELEAQIKEMKLNIAAESKNAINTQKKEFVYENIKKLADIWDKVDKKQKNLILKTIIDKIVIVNGNIEIQLKNF

SEQ ID NO: 4269 - protein, 507 aa, synthetic construct
MKRVISYIRFSSERQAKGDSLRRQSKMVNDWLKAHPEYYLDQDLSFRDLGVSGFTGKHLKGGLGDFLTAIEKGLVKAGDTLLIESLDRLSRQDVDQASELLRNILRSGVDVVTLSDGEHYTKESLRDPLSLIKSILIMQRAHEESLRKAERIQAAWDAKKEAAKAGIKISRRCPAWLKLNDDRKSFSVIPEKVETVKRCFQLRLEGKSIWEIVRTLNAEGHQTLNQYKAGKFGQTSVQDLLKNRSVIGYFTPKGCEEISGYYPAIIDETTFYKVQQLSYARYGRKPASDKPMAVNLFKGVIRCSECGHALIITGFSDTRNGIYRCPLRNENRCSAKGLSRKQTDGTLLALLSRLDRFDSDMTNTIDTLKLHREHISSNIEKLVQLSLEIEDLSAITSKLRQLKNELSQVDADIEKETQRLKSIDVGCLSDCDLTTKAGRIEAQLIIKSAVKEVVLNTAKRRCKVTFHNSKSITLPITENPSDNVTEAIQSLSEVTERGLIDVDVVEI

SEQ ID NO: 4270 - protein, 612 aa, synthetic construct
MRAAFLIRCSTKKQDYERQVNDLTRLAKKFGYTSSDNMIFGEHITGKDDASKRDRQSIQRLKDAAINKEFDVVLVSEVSRMSRDPMSGRLYVRQLINMDIPVYFRDIDTWTIDPVTGKKVRDAETIIGAAFDAAWKYIKSMKTQIASGRRDELDNNQMSIGQPFFGYKRYGGRDKGKKNSWVINDDAAKVVVDVFEEYVKDGATLKSTALAITAKYGEQFNKKFSIGTIEHILTFEPYCTGIKVVSLTDPDTEDVDEFEVEIPTIITRAMFDKATTKRATNRTARTPYPKQATYILSKLLKCPICEHSLTPQKRGGDKGDKYRLMNGKVAIRWSCMSGINNATDCSSRITISNEKLEAIIWGLVKQELIGFANLNDEDRVARVVELTDKITNLEMNIANFTSHISNMDRLIERAYSAYMDAPDSVMDIAKDKYYKTLTKCENERAECKDKIEALNVEKLRLENMRTFFNQPTLPKDAIEKAESDPIKMRNLVMELVDKIYPYRITTYVSPATNRIMKNGIVLLEVYTINGIYNVLYDGNQRNNKVAYYISSVYATFQNGRNKFDAYDTGEYFVISHATLVTETEDVDMLVTFNELIKICMQNGWEIDYTYKM

SEQ ID NO: 4271 - protein, 554 aa, synthetic construct
MKQQAFSYVRFSARSQRSGDSLRRQTDMVSTWLLQNPEYELSPLRFEDLGRSGYSGAHLENAFGRLLAAVETGAIPSGSTILIEAIDRAGRMEPMDMLPLVSRIVKAGVDIVTLDDGIRYDKKSANSNHLFLLVAKVQQAYNYSENLSRRVLAAYEKKREVARSGVAVGRRTPLWLTSEFPNGKGTPPVVTLRDDIAPYVAQAFEDYAAGLGERRILTRLRAQNDEFKTVSFSTIKRWLNNPVAVGRWNDIEDVYPPVVSKELWFRVQKKLKEVSKPKSASSRYLLSGLVRCARCGKNYCVTGQNAALRMMCITRHHFGAGSNGCANKRSIPYAVLDYIRSQTAHAALLRASQSKTLSQSEKRLIEIDGQLTDLHRQSERAAEGLAAYGMLPAIKAVLDRVSDGVVALEQERALLKATPVETTLDDMIGEEDILLDDDPERLTALMRNVAYAMIVDDRTITVKEQSVFNNLPEQTYRFLGTDRVKGVFKLRENDGPLLEIPNLHSKVQKAEIAANDAQEARYQSGDLERTLFNWNAETGEINYLSGPLPENIGD

SEQ ID NO: 4272 - protein, 560 aa, synthetic construct
MPKAISYVRFSTGKQSTGSSKERQDLAVTRWLVANPEYTPSDLEYKDLGKSGYHGEHIADGGGWAKLLVAVKGGRIQPGDVVLVEAIDRTGRLDTSDMLHKVIIPILQAGVSIITLDDNTTYSKQTVNTPLIHLLLAKIQAAYGYSKQLSERITASYEIRRTKARNGEKIKRFAVTWLTTDGQVKPQYRQAVKQVFDWYISGIGKNTIATRIRASGVPELATISGPTIDNWLKNRAAVGYWNDIPNACESVVSPEVFMQAQKRQKQMSTGPRTRTSKHFLIGLVKCGGCGANYIIHRKDGKPNSMRCLTHQQTKGVDCSNAETMPYQVVHHVYLETAPLWIDRALKVINLSNNDKRKLILTTERDDVTASIQRLSKLLARQDSEELEAEYYSATERRTLIDSELSILERTDVDGDESKSTSIFQGYEGILSFDRLTLHDPLQLSALLKQAGYSITVQPGRKLHLAESNSPFIYTGVARKRNMTLGYRIQNGELEYTISNVIPDSFDVRELSNPDGELTHMMGRSYKYVKSPRQLNQKGERNVNGITTEPAANMFGSMENK

SEQ ID NO: 4273 - protein, 559 aa, synthetic construct
MKTKLYSYIRFSSMRQNDGSSYERQIRMAREVAAKYDLELVNDYQDLGVSAFKGANSKTGALSRFLDAIGRSVPVGSWLFIENLDRLSRADIVSAQELFLSIIRRGITIVTGMDNKIYSLDTVTANPMDLMFSILLFIRGNEESQTKRNRTNSSALIKIKSHQENPQNPAVAIEEVGKNMWWTDTTSGYVLPHPTYFPVVQEIVELRKNGRSTAEILDHLNETYTPPPAVSNKKHSKWSRAMVERLFHTRALIGIKEISVDGVNYELKDYYPRVIDDPTFYHLKKNIGARAWNFGDKEEVKPIPLLSGIGLLKCDHCGCAMVKVKGTNKRSDQYRYTCDATRSRRLDCEHPNWSFRGDQLEKAVLQLLADKIWIAEDKANPVPALKVQVDEISRKIDNLIALSAMTGATKELADQITTLNSERETLYNQIKMAEEEMYSVDSQGWEKLAEFDLEDVYNEERLKVRFKIKQALKRIGCSRIDRNKNLFVLEYIDGKTQRVVIENSRGTRKGQIFVDLKTINDRQILESNGLVLHPCLDMLTDKNWKPEEEIPGPLQEFGI

SEQ ID NO: 4274 - protein, 559 aa, synthetic construct
MKTKLYSYIRFSSMRQNDGSSYERQIRMAREVAAKYDLELVNDYQDLGVSAFKGANSKTGALSRFLDAIGRSVPVGSWLFIENLDRLSRADIVSAQELFLSIIRRGITIVTGMDNKIYSLDTVTANPMDLMFSILLFIRGNEESQTKRNRTNSSALIKIKAHQENPQNPAVAIEEVGKNMWWTDTTSGYVLPHPTYFPVVQEIVELRKNGRSTAEILDHLNETYTPPPAVSNKKHSKWSRAMVERLFHTRALIGIKEVSVDGVNYELNNYYPRVIDDPTFYHLKKNIGARAWNFGDKEEVKPIPLLSGIGLLKCDHCGCAMVKVKGTNKRSDQYRYTCDAIRSRRLDCEHPNWSFRGDQLEKAVLQLLADKIWIAEDKANPVPALKVQIDEISRKIDNLIALSAMTGATKELADQITTLNSERETLYNQIKMAEEEMYSVDSQGWEKLAEFDLEDVYNEERLKVRFKIKQALRRIGCSRIDRNKNLFVLEYIDGKTQRVVIENSRGTRKGRIFIDLKTINDRQILESNGLVLHPCLDMLTDKNWKPEEEIPGPLQEFGI

SEQ ID NO: 4275 - protein, 547 aa, synthetic construct
MSRKKQNIQKTTALYCRLSLEDGRENESMSISNQKLMLKDFAEKNGMFRYEYYVDDGYTGRNFNRPAFQRMIADIEAGKIDCVITKDLSRLGRNYIEAGSYIEIFFPKHHVRYIAITDGVDSLTRQEMDITPFKNILNDMYSRDISKKVLAGVMTRSRQGKFCGGTPPYGLMRDPKDNGHLIIDPDAAPVIRKIYDYALDGMGNMRIAKKLLEEKIPITRVKANTALDANYYTWGTARIGHILRNPFYKGAHLVCRTHQTGIRSGSFKFIPREEWEIIENCHEAIVTPEEWAKVQELIDRRPTIMTGNDCPYYNIFHGIIYCATCGKSMQARYEKVGRKDVNRTTKKKREPIDKAFFTCQTYNRIGCKVCSSHKIEARDLHELVLNDIQELAAQAMKDSDAFYQRLSRRMENQYRTDTSAVRTEIRRLEERNQEIDDVFLNLYTDKSKGIISEQRFLKLTDAMEQEQNSNKARLSELNLLLHQSDEQESDVHAFIEEIRKYAAIKELDEVVLNRLIKKIMIGEVQKVDGQKIQEVKIIYNFVGEISA

SEQ ID NO: 4276 - protein, 560 aa, synthetic construct
MTKLYSYIRFSSSRQADSSSYERQKRTAKEIADRYGLELVTSYQDLGVSAFKGANSKTGALSRFLDEIGKSVPVGSWLVVENLDRISRQSIIEAQELFLSIIRRGITIVTGMDGKVYSKESVNANPLDLLLSVMMFARANEESQTKRNRTNSSALLKIKAHQQNPQSPAVAIEEIGKNMWWTDTTSGYVLPHPVYFPILQKIVKMKQEGHSTGSVLDYLNEHHEPPAPTSNKQHRKWSIAMVSRLFKTKALIGVKEVTVDGVQYELKDYYPRVLNDSEYYFLKNNLIKKAWSFGHAQEKTIPLLSGIGLLKCAHCGSPMVKRKAANGKVEQYRYTCDGEGSGRTDCLYPNWGFRASSLEGAVLQLLADKVWIAEDKANPIPEIQVQIDEISRKIDNLINLSAMTGATKELANQITDLNTQREALHEEIRLFEREMYSVDSQGWEKLAQFDLSDVQNEERLQIRLKIKGALRSIECARIDRNKNLFVLVYLDGLRQRIVIENNRGIRKGQIFVDLKTINDRQILESAGMVLHDHIDILIDEKAFYDGLPKEEDGPLSKFGI

SEQ ID NO: 4277 - protein, 506 aa, synthetic construct
MRTVITYLRFSSAIQGAEGADSTRRQNDLFKQWLKKNSDAQVVASFSDEGLSGYKGKHLTGQFGDMLARIESGEFPEGTILLVEAIDRIGRLEHLETEALMNRIIAHGIEIHTLQDGLIYTRDALSDDLGISIIQRVKSYVAHQESKQKSFRVSQKWKQRAKLALAGEQRLTKMVPGWIDPDTFKCNEHAETVRLIFKLLLDGESLHNIARHLQANNISSFSRRKDANGFSVHSVRTILRSETTRGTLPASQRNDRPAIPNYYEAAIDAATFNKAQEILDKNRKGRTPASDNPLTINIFKGLFRCQCGASVHPTGTKNKYQGVYRCNNHLDGRCDVPPLKRKPFDKWMIDNFLGMIDVGNDGEAEVKIASLQHEVEIVTARIKKATALLLEMDDIDELKIQLKELNQRRTELQTTIDSMRRKTSLSDKGLPQLKDIDLMTKAGRVECQLILSKHLKGLTLGKDSVTVTLQNDTEITIPTNPLPLNDGTSIFEIAEKNLLNIDTFQL

SEQ ID NO: 4278 - protein, 558 aa, synthetic construct
MTKLYSYIRFSSMRQSDGSSYERQIRMAKEIADRYNLELVNDYQDLGVSAFKGANSKTGALSRFLDEIGRSIPVGSWLFIENLDRLSRQDIISAQELFLSIIRRGITIVTGMDNKIYSIETVTANPMDLMFSILLFIRGNEESQTKRNRTNSSALLKIKAHQQNPQNPAVAIEEIGKNMWWTDTTSGRVLPHPVYFPVLQKIVQLRQEGHSAGVILDYLNEHHEPPAPTSNKKHGKWSRAMVSRLFATKALIGVKTVNVDGVEYELRDYYPRVLSDSEFYFLRKNIIKKAWDYSHDKEKVIPLLSGIGVLRCVHCGATMVKQTAANGKREQYRYCCDGRKSGRTDCPYPNWGFRAVTLEGAVLQLLADKIWIAEDKTNPIPEIQVKIDEISRKIDNLINLSAMMGATKELANQITDLNSQREALHEEIRLFEREMYSVDSQGWDKLAQFDLSDVQNEERLKVRMKIKGALHEIECSRIDSKKNLFVLVYLDGLRQRLVIENNRGLKKGQIFVDLKTINDRQILESAGMVLHPCIEMIIDSDWKAPEEIPGLLSEEFGI

SEQ ID NO: 4279 - protein, 547 aa, synthetic construct
MKLLVTYIRWSTREQDSGDSLRRQTNLIDAFYAKHKDDYYLLPAHRYVDKGKSGFHQQHKAQGSDFRRMFENVMSGVIPEGSLIVVENFDRFSRADIDTAIDDVRQILRKGVSILTLGDGELYDKSALTDPVKLIKHIIIAERAHQESLVKQKRIAQVWNHKTQLARELKKPMGKQAPGWLELSEDGSHYIVDEDKASLVNIIYDKRLSGMSMFAICKWLNEQGYPTINQRKVRISKTKKPDGNWSALSVKHILTSRSVLGYLPAKISTEDRKTVLREEIESFYPQIVTDSKFYAVQQLLEETGKGKTSSGEHWLYVNILKGLIRCKCGLVMTPTGIRKPVYQGTYRCNGNKESRCSYGTVSRKLLDTQLCSRLFSKLSQLHDEATDTARLDELQRRLNTVDSELEKLTETLIQLPNITQIQEALRVKQEEKDELIVQLSREKARVKSVSSLDLSGLDMESVEGRTEAQIIIKRLVKEIVVSGNEKLVDIYLHNGNMIRGFPLDGKDDHTLTLEEATDEMQSLDDMLIFGEPVTRIYPAGDMEEVDA

SEQ ID NO: 4280 - protein, 507 aa, synthetic construct
MKRVISYIRFSSERQAKGDSLRRQSKMVNDWLKAHPEYYLDQDLSFRDLGVSGFTGKHLKGGLGDFLTAIEKGLVKAGDTLLIESLDRLSRQAVDRASELLRNILRSGVDVVTLSDGEHYTSESLKDPLALIKSILIMQRAHEESLRKSERIQAAWNRKKELISEGIKISKRCPAWLKLNDDRKSFSVIPDKVETVKRCFQLRLEGKSIWEIVRTLNDEGHQTLNQYKAGKFGQTSVQDLLKNRSVIGYFTPKGREEISGYYPAIIDETTFYKVQQLSYARYGRKPASDKPLSVNLFKGVIRCSECGHALIITGFSDTRSGIYRCPLRNENRCSAKGLSRKQTDGTLLTLLSRLDRFDSDTTNIIDMLRLHREHISSNIEKLVQLSLEIEDLNAITSKLKQLKGELSQVDADIEKETQRLKSIDVGCLSDCDLSTKAGRIEAQLIIKSAVKEVVLNTAKRRCKVTFHNGRSITLPITENPSEDVTEAIQSLSEVTERGLIDVDEVII

SEQ ID NO: 4281 - protein, 547 aa, synthetic construct
MKLLVPYIRWSTKEQDSGDSLRRQTNLIDAFYAKHKDDYYLLPAHRYVDKGKSGFHQQHKAQGSDFRRMFENVMSGVIPEGSLIVVENFDRFSRADIDTAIDDVRQILRKGVSILTLGDGELYDKSALTDPVKLIKHIIIAERAHQESLVKQKRIAQVWNHKTQLARELKKPMGKQAPGWLELSEDGSHYIVDEDKASLVNIIYDKRLSGMSMFAICKWLNEQGYPTINQRKVRISKTKKPDGNWSALSVKHILTSRSVLGYLPAKISTEDRKTVLREEIESFYPQIVTDSKFYAVQQLLEETGKGKTSSGEHWLYVNILKGLIRCKCGLVMTPTGIRKPVYQGTYRCNGNKESRCSYGTVSRKLLDTQLCSRLFSKLSQLHDEATDTAKLDELQRRLNIVDGELGKLTETLIQLPNITQIQEALRVKQEEKDELIVQLSREKARVKSVSSLDLSGLDMESVEGRTEAQIIIKRLVKEIVVSGNEKLVDIYLHNGNMIRGFPLDGKDDHTLTLEEATDEMQSLDDMLIFGEPVTRIYPAGDMEEVDA

SEQ ID NO: 4282 - protein, 506 aa, synthetic construct
MRSVITYLRFSSATQGAEGADSTRRQNDLFKQWLKKNSDAQVVASFSDEGLSGYKGKHLTGQFGDMLARIESGEFPEGTLLLVEAIDRIGRLEHLETEALMNRIIAHGIEIHTLQDGLIYTRDALSDDLGISIIQRVKSYIAHQESKQKSFRVSQKWEQRAKLALAGEQRLTKMVPGWIDPDTFKLNEHAETVRLIFKLLLDGESLHNIARHLQSNDIKSFSRRKDANGFSVHSVRTVLRSESVIGTLPASQRNDRPAIPNYYEAAIDAATFNKAQEILDKNRKGRTPASDNPLTINIFKGLFRCQCGASVHPTGTKRTYQGVYRCNNHLDGRCDVPPLKRKPFDKWMIDNFLGMIDVGNDGEAEGKIASLQHEVEIVTTRIKKATALLLEMDDITELKTQVKELNQKRTELQTTIDSMRRKTSLSDKGLPQLKDIDLMTKEGRVECQLILSKHLKGLTLGKDSVTVTLQNDTEITIPTNPLPLNDGSPIFEIADKELLDIDAYQL

SEQ ID NO: 4283 - protein, 547 aa, synthetic construct
MKLLVTYIRWSTKEQDSGDSLRRQTNLIDAFYSKHKNDYYLLPAHRYVDKGKSGFHQQHKNQGSDFRRMFENVMSGAIPEGSLIVVENFDRFSRADIDTAIDDVRQILRKGVSILTLGDGELYDKSALTDPVKLIKHIIIAERAHQESLVKQKRIAQVWNHKTQLARELKKPMGKQAPGWLELSEDGSHYIVDEDKASLVNIIYDKRLSGMSMFAICKWLNEQGYPTINQRKVRISKTKKPDGNWSALSVKHILTSRSVLGYLPAKISTEDRKTVLRVEIEGFYPQIVTDSKFYAVQQLLEETGKGKTSSGEHWLYVNILKGLIRCKCGLVMTPTGIRKPVYQGTYRCNGNKESRCSYGTVSRKLLDTQLCSRLFSKLSQLHDEATDTAKLDELQRRLNTVDSELEKLTETLIQLPNITQIQEALRVKQEEKDELIVQLSREKARVKSVSSLDLSGLDMESVEGRTEAQIIIKRLVKEIVVSGNEKLVDIYLHNGNMIRGFPLDGKDDHTLTLEEATDEMQSLDDMLIFGEPVTRIYPAGDMEEVDA

SEQ ID NO: 4284 - protein, 507 aa, synthetic construct
MKRAISYIRFSSEKQSRGDSLRRQSKMVNDWLKAHPEYYLDQDLSFRDLGVSGFTGKHLKGGLGDFLTAIEKGLVKAGDTLLIESLDRLSRQDVDQASELLRNILRSGVDVVTLSDGEHYTKESLKDPLALIKSILIMQRAHEESLRKAERIQAAWDAKKEAAKAGIKISRRCPAWLKLNDDRKSFSVIPEKVETVKRCFQLRLEGKSIWEIVRTLNAEGHRSMNQYKPGKFGQTSVQDLLKNRSVIGYFTPKGCEEISGYYPAIIDETTFYKVQQLSHSRYGKRSVSDKPLSVNLFKGVIRCSECGHALIITGFSDTRNGIYRCPLRNENRCSAKGLSRKQTDGTLLTLLSRLDRFDSDMTNVIDSLKIHREHISSNIEKLVQLSLEIEDLNAITNKLKQLKNELSQVDADIEKETQRLKSIDVGCLSDCDLTTKAGRIEAQLIIKSAVKEVVLNTAKRRCKVTFHNSKVIDLPITENPSDNVTEAIQSLSEVTERGLIDVDVVEI

SEQ ID NO: 4285 - protein, 572 aa, synthetic construct
MAKKKKPAGGNAIIYARYSSHNQRDVSIEQQIEACRKHAAELGLTITDTYEDRAISGRTDNRPAFQRMMRDAEDGKFQYVLAWKSNRMGRNMMQAMVNESRLMDCGVKVFYAEEDFDDSAAGRFALRSMMNVNQFYSDNLAEDVRRGLMDNASKCMANGRQPLGYKRGEDGKVVVDEPAAAIVREIYTRIASGEMFMDIARDLNRRGIKTQSGSEWNKSSFKVLCRNERYRGIYIYGDTRIEGGIPPIVDDVLWYKVQEVLKVKKSKNRHHCPSDEDYLLTGKLRCGKCGGYMIGMSGRSKTGDVHHYYACQNRRVGHTCDKKNIRRDVVEPAVAQAIKQYCLTDDAIEWITDQTIAYWEDEDRKLQIDSIENDLSAVQSSISNVMKAIEMGVITETTRDRLIELERQQTDLKSKLALAKEEIVHVDRKDLISSLLAFRHGNVHDRAYQEKLFNAFLIAVYVYDDDHLKLVFNSFGKDDTVNIALDLGENDDNSGLSDVSKSSPILSNGQPKDIRTVRMSFLFSFFVHRESQKERYSKRCIALFTLTVISNSDRSRCGSSCRRHRSRRSCRP

SEQ ID NO: 4286 - protein, 539 aa, synthetic construct
MARRKKVSPGNRLVAYYRYSGGSQQTEQSIEGQRRDCEAYARQHGLTIVHEYIDRHISGRGVESRLAFQQMIADSSKHLFDLVICWKTDRFARNRYDSAVYKKKLRDNGVRILYAAESSVEGPEGIILEGLMESLAEYYSAELAQKMRRGMRESALKGKAINPNRPLGLTTDEHKRFIIDEKNAPTIRFIFEHYAAGESSASIVDQLNAAGLRTSKGNSFNKCSIPRIIQNEAYHGVYICKAYDVRIDGAIPAIIDDDLWKRAQKMLTLNKQHRAPHSSHADYLLSGKLFCGCCHSLMRGISGHNCRNDVYYYYACGNKADGGTCKKKNIPKDVSENLVVNAICENILRPDTLEDLADAIAAAQQADVNQPDPERAMLEQNLADVRRKINNIIESIENGTASSRLSARLADLEQQESTLNYQLESLKEVHPPVLDRERILFLLEQFLISPNERTEDYNRRIIDTFVNRIEITDTEMLIYFNLSEASASEKQKNSQPNNCSTGNHLVHLAHQQANYSLYAASGYFSLVEHQFSARLWRTA

SEQ ID NO: 4287 - protein, 464 aa, synthetic construct
MTVRAYIRVSGRHQVDGFSLGAQQAKCQAWATYQGLGDVVVYEDAGLSGRGDNRPGLQALLLDLVPGDVVVILSITRLARGGAVQLLTLVNSIREKGARLVFLSENIDTDNYTGRLMLTTFAGFAEMEVEQTRDRAMMGKTQAAQQGLYPHNPHNLRMGWATDEEGRIVEDEHAETVRRIIRQGRASYRQTADLLNREGVPTRNGLIGRWDVYQVQRIVTHAGYWTGEVIFRESSGGEQIVIPAPPLVSREEWEAAQRPRSANSVFRRPDLYPLTGHLSCACGHGLAGQRKDSQRGRKRFYEYYFCSPLRRGTATCPAWQKRSPCFPVAPLHQHARHVLAEAVANPTDPLKLALAWQGELPPDPHAKERADIAQRLDALLDLYLDNMVDRAIYAQRRQTFERRLEELAPPAPVAPVAMPARPDLAAAILASTNEEFAALLDLLEVRFVQCERDRVELQSYTPLG

SEQ ID NO: 4288 - protein, 485 aa, synthetic construct
MPEMGSGYVRLSAVAGEDNLSLAGMVDEVKALAASEGIHLLNVHVDEKSGGYRDRPAFQAWLAELALDHVSVAVVHSVDRLSREGVNVLGSILDRLEGKDPATGRVVHEPVRMISVDGLDSQRDPEAFRWQIVIRGEVGRAERGRIIQRNKDNKRRLREAGRHPGGRAIFGCRVVKRELPEGGVGKFLEVDPVTGPIVEEIARRLIDNQPMNQVLRWLAAEGITTNRGNAWSPRSLRNTLRSTSIRDHVLDPATWLALQARLDSTQETRSEGPERPSWSGRPPTWLLSRGNGVCGRCGSTLSITYTRGHARYNCTGVVKGICPGVTIAAEPTDAFIAAEYLAVHGEQPAMQMIPTWPGQEELRAATLARDTARDALTMAARGGGGDVVALATDLQAKEAEVVHWDQVVKSSKVSVTLSLKGYTLGQEWERAAREDRWHIIYQAIAYPIVVQPASRGGVTVKGEIDTSRIEVAWEVEMPTPTLNDE

SEQ ID NO: 4289 - protein, 546 aa, synthetic construct
MARVLGALRLSRASDESTSVVRQKVAIQRWADSRGHTIVGWVEDVDVSGAIAPWERPGLGQWLPSTIGKDVSAVEERLAWELSRADEWDVLCGMKLDRISRRVLHIAQLVEWAGEHGKEVASAEDGFDVSSPMGKILFQLIAAFAEGELEAIKFRAKSSYAHLMKSGRWRGGFVPYGYRAEKDAVGDGWKLVPDDYGTDTASVVREIVRRIVDEGQAINAVCRWLNAEKVPTSLDAQRIRAGKEPKGSVWRVGNLTKMLRSHTLLGRVEMTEEIQLPDGTKEKRTRLVRDAEGLPLQRAEPILGKREWDELQAKLKENSRPTAGHRYDRSPLLRVAFCVCGRPLYRNNGRTWMYYRCSSRNISGAECGQNEAIRAKHLEEAVEEAFLRAVGHAQIIRRTFRPGVDHTADVAEVTRALAELREDREAGLYSSELGKKEYREEYLRLEAKREALAAMPVVPDRWEEIPTGQTYADKWAELSSPAEKNKELREAGVKAIVHREELPKALPLMELGETEGTVRHTLGRVELLLPRDLYTRVRGLAAEHSA

SEQ ID NO: 4290 - protein, 563 aa, synthetic construct
MERDDLPTLRALGFEDEELRALGLWDVPTGEPFDLAEAYIRRSKRSDDLASLRAHVRDICRTALSEGKRIRHVWFEQKSASKAYVKREEFDNAVSAVKAGLSKTLYIWKTDRLSRRGMGHVGLLLDEFDKRGARIVSVTEGLDSSKGSRMVFAILSERARDEAKDIALRTKNGVDAHKAEGKWLGGVTPFGLECPKETGKLRHKASEYPTARAIAVALLDGKTPAEIANDLNTRNVPTRKGKRWRAQTIIHLAHSPSWAGLIPNRERATDEFGQPLGKWHRGGEPLLNAKGHPIKCGKGVVSYAEWVRINALISGRSKPGSAIGDKTRGIRKAATIMTGTLRCPHCKGPMGNGGRNYRCQARINQGPSVCKGVASDRKRIDDAMGALWIGHVLRLSPESPTIHNIARRFLNYQDPEKEARKRAVSAALDSAVSRELRLNKEFFVGGMDETQYDALRNDLGAQIESLKTELAELGKDADLTPLMSTEALAALWESEGMEGKRALLSAALKSVTLLPAKCKGDRTPITERLVPEWRDTDGMPDDVREGAQKTIERRRARKLAGAA

SEQ ID NO: 4291 - protein, 604 aa, synthetic construct
MKKVFVYHRVSSDQQLDGSGIARQAELLEGYLERTGICAEMDDPAPVVLSDQGVSAFKGLNISEGELGAWMEQVRNGMWDSSILVVESIDRFSRQNPFDVMGYINALMAHNVAIHDVMANIVISRSNSKDLPFVMMNAQRAYDESKYKSDRIRKGWAKKREQAFNKGTIVTNKRPQWIEVENDKYVVNEKAAVVKEIFALYQTGMGCPTIAKQLQTKEGEQYKFNRPWTGELVHKILTNRRVTGKIFISEIIRNHDDIDNPVTQKKYDMDVYPVVINEEEFELVQELLKSRRPNAGRITVKKEGQEEVLIKSNLFSGIARCTECGGSMYHNVVRAKRTPKKGDPKIEEYRYIRCLNERDGLCENKAMTYETVERFVVEHLLGMDLNTVIKEQEFNPEIEVIRIQIDQVKDQITNYENGIERRKSAGKAVSFEMREELDDAKLELEQLLARQASLATVQVDVPVLQDVNVTELYNVNNVDIRTRYENELNKIVSNIRLKRNGTSYTIDINYKQNELKRHVLFVENKKKEQTLISEVIIEDVDGGKFYYTPSFMIRLKDGEIRFQQTNEDLSIVDYSLLLNYVDAIDRNDAVGVWMRNNMSFLFTK

SEQ ID NO: 4292 - protein, 559 aa, synthetic construct
MTKAKAVVYARVSTNHEEQKHSLKSQKEYYNEYAEKNGYDLIETYFDSGLTGTSFKRKYFLQMMYDAGLDVTIKNHSGILTFDTSNREPLFKYIILKDVSRFARNTDAIEVVKQLRYKGVYIIFENLNFSSEDDDWEFRFGLLVLFAQQESVDRSIKGKKAYGIRSENGKFHMTNVLLGYKRNPETKEYEIDEDKAHIVRFVFDLYVNKGKGTKEIASICNEKGFKTSKGKRFAGDSIIRLIKNEKYKGQVITGRYTHTDITGQHKRIELPRDQWNVFDNLIPAIIPTKVFDEAQAIMNRRVMNTKNYGRKGIKVPKSEFHKKIFCGKCGADYVRISSVKKRVNSEDITEYFYSCRNRRYSLRTGQKCDNAGISHNVLVRELTEISKKLHFSFNTTQIKYEKEELDKILKDLDYKLDNAESEKEKIKESISNLDKEIVNVIKSIRQGASETVKKVLNDEIEKIENEKAELNLKILEFDTLTIENKKQEYLDKYQEVLKFSQKKSFTYDDVLELIEGIHILEHREALVDLRTPTIFDADQIYKGENGSEYAMFPFTFKLP

SEQ ID NO: 4293 - protein, 558 aa, synthetic construct
MTKLYSYIRFSSMRQSDGSSYERQIRMAKEIADRYNLELVNDYQDLGVSAFKGANSKTGALSRFLDEIGRSIPVGSWLFIENLDRLSRQDIISAQELFLSIIRRGITIVTGMDNKIYSIETVTANPMDLMFSILLFIRGNEESQTKRNRTNSSALLKIKAHQQNPQNPAVAIEEIGKNMWWTDTTSGRVLPHPVYFPVLQKIVQLRQEGHSAGAILDYLNEHHEPPAPTSNKKHGKWSRAMVSRLFTTKALIGVKTVNVDGVEYELRDYYPRVLSDSEFYFLRKNIVKKAWDYSHVKEKVIPLLSGIGVLRCVHCGATMVKQTAANGKREQYRYCCDGRKSGRTDCPYPNWGFRAVTLEGAVLQLLADKIWIAEDKTNPIPEIQVKIDEISRKIDNLINLSAMMGATKELANQITDLNSQREALHEEIRLFEREMYSVDSQGWDKLAQFDLSDVQNEERLKVRMKIKGALHEIECSRINSKKNLFVLVYLDGLRQRLVIENNRGLKKGQIFVDLKTINDRQILESAGMVLHPCIEMIIDADWKAPEEIPGLLSEEFGI

SEQ ID NO: 4294 - protein, 568 aa, synthetic construct
MSRPVKAYSYIRFSTPKQAQGDSYRRQLQQAMDYCAEHNLQLDDKTIDDFGTSAFRGANMSEGALGRFVDAVKHGEIEQGSYLLVESVDRLSRQAVEEALEQFLAIVRAGIVIVTLSDKQVFRRGQVDFTKLIVSIVYMARANDESEMKSRRSRAAWSNGREQARKNNKVIANSRLPSWLTRDGEQIIPIPERVAIVNEMFEMAKSGCGYEQIAKVFLEKGYKTFGKEADWRPAGIQAVIKSQAVIGVFQPHVIENGHRVPADEPILGYYPTIVSPALFEEVQHLISKRNKHSGSYRKGTFNNLFSGVLRCQCGESLRYQNKGRAGSPRNYLVCPKQNTAGCKLPNMLYDKVEPQLLQAVFLLNKVMKQRVEGEDKTIALRTMLAELRVQLEVETQKRKKAAQLVLDNDNDADYRVLFEQCKKKTQALEEQIQRAESDLMSRELSVKTLKYFVDPEDLRSTEQRQRFNGQLKTALKEIRFRFDGGYLWAEYMDIDGSRVLTQTFEDKLAGSSIYDGSSYLVRKTQTEAPYDVDPSVMQKEMDDYIRNLQKNDDGTDPDFEDLSSEYSK

SEQ ID NO: 4295 - protein, 507 aa, synthetic construct
MKRVISYIRFSSEKQAKGDSLRRQSKMVTDWLKAHPEYYLDQDLSFRDLGVSGFTGKHLKGGLGDFLTAIEKGLVKAGDTLLIESLDRLSRQDIDIASELLRRILRAGVDVVTLSDGEHYTRESLKDPLSLIKSILIMQRAHEESLRKSERVQAAWNRKKELISEGIKVSRRCPAWLRLNDDRKSFSVIPEKVETVKRCFQLRLEGKSIWEIVRTLNDEGHQTLNQYKAGKFGQTSVQDLLKNRSVIGYFTPKGCEEITGYFPSIIPETDFYKVQQLSYSRYGRKPASDKPLSVNLFKGVIRCSECGHALIITGFSDTRNGIYRCPLRNENRCSAKGLSRKQTDGTLLTLLSRLDRFDSDTTNTIDMLRLHREHISSNIEKLVQLSLEIEDLSAITSKLKQLKGELSQVDADIEKETQRLKSIDVGCLSDCDLTTKAGRIEAQLIIKSAVKEVVLNTAKRRCKVTFHNGRAITLPITENPSEDVTEAIQSLSEVTERGLIDVDEVII

SEQ ID NO: 4296 - protein, 507 aa, synthetic construct
MKRVISYIRFSSERQAKGDSLRRQSKMVNDWLKAHPEYYLDQDLSFRDLGVSGFTGKHLKGGLGDFLTAIEKGLVKAGDTLLIESLDRLSRQDVDQASELLRNILRSGVDVVTLSDGEHYTKESLRDPLSLIKSILIMQRSHEESLRKSERIQAAWNRKKELISEGIKISKRCPAWLRLNDDRKSFSVIPDKVETVKRCFQLRLEGKSIWEIVRTMNAEGRQTLHQYKAGSFGQSSVQDLLKNRSVIGYFTPKGCEEISGYYPAIIDETTFYKVQQLSYARHGRKPASAKPLSVNLFKGVIRCSECGHALIITGFSDTRSGIYRCPLRNENRCSAKGLSRKQTDGTLLTLLSRLDRFDSDTTNTIDTLKLHREHISNNIEKLVQLSLEIEDLSAITIKLKQLKGELSQVDADIEKETQRLKSIDVGCLSDCDLTTKAGRIEAQLIIKSAVKEVVLNTAKRRCKVTFHNSKSITLPITENPSEDVTEAIQSLSEVTERGLIDVDVVEI

SEQ ID NO: 4297 - protein, 507 aa, synthetic construct
MKRVISYIRFSSEKQAKGDSLRRQSKMVTDWLKAHPEYYLDQDLSFRDLGVSGFTGKHLKGGLGDFLTAIEKGLVKAGDTLLIESLDRLSRQAVDRASELLRNILRSGVDVVTLSDGEHYTSESLKDPLALIKSILIMQRAHEESLRKSERIQAAWDAKKEAAKAGIKISKRCPAWLKLNDDRKTFSVIPDKVETVKRCFQLRLEGKSIWEIVRTLNAEGHRSMNQYKPGKFGQTSVQDLLKNRSVIGYFTPKGCEEIAGYYPSVIDETTFYKVQQLSHSRYGRKPASAKPLSVNLFKGVIRCSECGHALIITGFSDTRNGIYRCPLRNENRCSAKGLSRKQTDGTLLTLLSRLDRFDSDTTNTIDTLKLHREHISSNIEKLVQLSLEIEDLSAIASKLRQLKNELSQVDADIEKETQRLKSIDVGCLSDCDLTTKAGRIEAQLIIKSAVKEVVLNTAKRRCKVTFHNGKAITLPITENPSEDVTEAIQSLSEVTERGLIDVDEVII

SEQ ID NO: 4298 - protein, 520 aa, synthetic construct
MKKAVYCYARVSSRGQAKDGYGMSRQQTMLRDYVAAYDDSQHNRGYEFGDISWLYAEGVSAYSGKNIEDGSVLKNFIDDVLQKKITNSVLVIENLDRFSRAAPNRAAGLFLSLINAGCDIHEVETEMIHHQYSDLNIISGGLQRAHNESKRKARLSIKNWDERIKNTIEGTSVLTHRVPSWIEVKNNKYVIKEGETEKFNLIFKMYADGFGPAAIRDELKKKKMQINESEPTINHLVKIIKDQRLIGKFNSTGRKILDGMIIYPVVVEQSLFETVNDLRKQRNPLGKVNVKANNLFAGLCICMNCGRYVQVNSVDKKGDTYFRCGGSLLKIDKCKERGFKYKIIENALLEHIRNFDFSMLRSNDDDIQIKINYLSIELATKENYSSEILADMEKEYIPDPNDRRILKNLQRRISEIRTEITRLKQSNVGYEKFSDLKESCTDDLLDSKNTNLRLNFNVKIKRVIKNIKMKRLGNAIMLVVNYIGVNEKQAMVIDSKTGDVKFMAVQNDDLKSVEYLINKS

SEQ ID NO: 4299 - protein, 506 aa, synthetic construct
MRTVITYLRFSSAIQGAEGADSTRRQNDLFKQWLKKNSDAQVVASFSDEGLSGYKGKHLTGQFGDMLARIESGEFPEGTILLVEAIDRIGRLEHLETEALMNRIIAHGIEIHTLQDGLIYTRDALSDDLGISIIQRVKSYVAHQESKQKSFRVSQKWKQRAKLALAGEQRLTKMVPGWIDPDTFKCNEHAETVRLIFKLLLDGESLHNIARHLQANNISSFSRRKDANGFSVHSVRTILRSETTRGTLPASQRNDRPAIPNYYEAAIDAATFNKAQEILDKNRKGRTPASDNPLTINIFKGLFRCQCGASVHPTGTKNKYAGVYRCNNNPDGRCDVPPLKRKPFDKWMLENFLGMIDVGNDGEAEGKIASLQHEVEIVTARIKKATALLLEMDDIDELKIQLKELNQKRTELQTMIDNMRRKASLTDKELPQLKDIDLMTKAGRVECQLILSKHLKGLTLGKDSVTVTLQNDTEIIVPTDPLPLNDGTSIFEIADKELLDIDAYQL

SEQ ID NO: 4300 - protein, 507 aa, synthetic construct
MKRVISYIRFSSEKQAKGDSLRRQSKMVTDWLKAHPEYYLDQDLSFRDLGVSGFTGKHLKGGLGDFLTAIEKGLVKAGDTLLIESLDRLSRQAVDRASELLRNILRSGVDVVTLSDGEHYTRESLRDPLSLIKSILIMQRSHEESLRKSERIQAAWDAKKEAAKAGIKVSKRCPAWLRLNDDRKSFSVIPDKVETVKRCFQLRLEGKSIWEIVRTLNAEGHRSMNQYKPGKFGQTSVQDLLKNRSVIGYFTPKGCEEIAGYYPSVIDETTFYKVQQLSHSRYGRKPVSAKPLSVNLFKGVIRCSECGHALIITGFSDTRNGIYRCPLRNENRCSAKGLSRKQTDGTLLTLLSRLDRFDSDMTNTIDTLKLHREHISSNIEKLVQLSLEIEDLNAITNKLKQLKNELSQVDADIEKETQRLKSIDTGSLSDCDLSTKAGRIEAQLIIKSAVKEVVLNTAKRRCKVTFHNGKSITLPITENPSEDVTEAIQSLSEVTERGLIDVDVVEI

SEQ ID NO: 4301 - protein, 579 aa, synthetic construct
MPTAYAYIRYSSKAQGGADRDSVDRQMSSIEAITKRQNIELLPQNIFSDTGVSGYDGSNSRTGKLKELIDRINSLEIRKGDYVFVESIDRLSRQRLLQAKELVNNILEKGIVLITTIDGQRYEKPNDINGIDDLQQDILLSVISKRAHEESRTKSIRRKSAWNRAKASAETDQKIFNAHNPPYGIYYDKKTNSFKINEDEANEIRQIFESLKYVGVSQTIRDMNSTAKRKWTNKNVSHLFSTKYPLGYYMAQRRDEQKRKIFESYIENYYPQIISFELWQEVRNAMEGRKHRKNYGSHSLGNLNIFRHAIKCGECKASLLFEMNKNPKGIQYSYFHCHTRKEIKGKCNQPRFRFEYALGILLELVKNATENPNYIGEGYIDPDYVDVLDPSVWQARHNNFKELLADIMNDKGGAIANQQKLSTLEAELSKNLIIEQNLKKSFEGFADGVIPDVFINRVIKVQNAITELRTEITKLKASLNTNKTDLRIYSTKDILRLYETEQGRLELNNYFTVNEISFIFEYSKETRTLVGKVLHKGVFIQRIDKKFPLHNPLVKEYGIQNINKMSETNKAIQPSQSPN

SEQ ID NO: 4302 - protein, 560 aa, synthetic construct
MKGKIALYSRVSTSEQSEHGYSIHEQEQVLIKEVVKNFPGYDYETYTDSGISGKNIEGRPAMKRLLQDVKDNKIEMVLSWKLNRISRSMRDVFNIIHEFKEHDVGYKSISENIDTSNASGEVLVTMFGLIGSIERQTLISNVKLSMNAKARSGEAITGRVLGYKLSLNPLTQKNDLVIDENEANIVREIFDLYLNHNKGLKAITTVLNQKGYRTINQKPFSVYGVKYILNNPVYKGYVRFNNHQNWAVQRRSGKSDKNDVILVKGKHEAIISEEVFDKVHEKLASKSFKPGRPIGGDFYLRGLIKCPECGNNMVCRRTYYKTKKSKERTIKRYYICSLFNRSGSSACHSNSINAEVVERVINVHLNRILSQPDIIKQIASNVIEELKQKHSNQTEIKYDIDSLEKQKAKLKTQQERLLELFLDDQMDSEMLKAKQSQMNQQLEVLDQQIKEAQQANQSQDEIPNFDKLKGRLILMITRFSVYLRKATPEAKNQLMKMLIDSIEITTDKQVKLVRYKIDESLIPQSLKKIGGLFLCPNSNLKYMVKMIISSTKLPLLPLSY

SEQ ID NO: 4303 - protein, 537 aa, synthetic construct
MSETLFFGSFAKGRKEPKAMKSTKDCVIYTRVSSQQQADNLSLATQLKACTLYAERMGYNIAATFGGTYESAETDERKQFTAMIAFVKKFRGKISYILVYSLERFSRNDNSIWLTNELRKLGIEIVSVTQPIDTSNASGQMQQKMLFLFGEFDNQLRKQKCMAGTKEMLLRGDWPTRPPMGYEVVKEGGKRRIVTNARGRLIRQAFHWKAFDNFSSESIRELLAEKGLKVSAQTLSKIFRNPFYCGMMVHSTLEGAVVEGNHEQLVSRDVFLKANGVLKENAQGYTIREENANIPLKRFLMCGHCGQPLRGYIHKKKNLHYYKCNTKACNNNKSAKVLNGIFESVLHAFRIDTAKDIIEMIKRQTVAAFNQLTATRQDDYKHLHEKHTEIVTRINRLEERYIEEEIGGDLYHKYRDRYETERAEIEGKLRKLSQQVSNLEESIKFALKFALEMPLKWVSADYNAKQRLQFLLFPEGITYCKKTDECRTPRINVVFSYIAYLQQIISNKKRGIPELGLDFASFSLSVARRGIEPLLQE

SEQ ID NO: 4304 - protein, 559 aa, synthetic construct
MKTKLYSYIRFSSMRQSDGSSYERQIRMAREIAAKYDLELVNDYQDLGVSAFKGANSKTGALSRFLDAIGRSVPVGSWLFIENLDRLSRADIVSAQELFLSIIRRGITIVTGMDNKIYSLDTVTANPMDLMFSILLFIRGNEESQTKRNRTNSSALIKIKAHQENPQNPAVAIEEVGKNMWWTDTTSGYVLPHPTYFPVVQEIVELRKNGRSTAEILDHLNETYTPPPAVSNKKHSKWSRAMVERLFHTRALIGIKEVSVDGVNYELNNYYPRVIDDPTFYHLKKNIGARAWNFGDKEEVKPIPLLSGIGLLKCDHCGCAMVKVKGTNKRSDQYRYTCDAIRSRRLDCEHPNWSFRGDQLEKAVLQLLADKIWIAEDKANPVPALKVQIDEISRKIDNLIALSAMTGATKELADQITTLNSERETLYNQIKMAEEEMYSVDSQGWEKLAEFDLEDVYNEERLKVRFKIKQALRRIGCSRIDRNKNLFVLEYIDGKTQRVVIENSRGTRKGRIFIDLKTINDRQILESNGLVLHPCLDMLTDKNWKPEEEIPGPLQEFGI

SEQ ID NO: 4305 - protein, 507 aa, synthetic construct
MKRVISYIRFSSERQAKGDSLRRQSKMVNDWLKAHPEYYLDQDLSFRDLGVSGFTGKHLKGGLGDFLTAIEKGLVKAGDTLLIESLDRLSRQDVDQASELLRNILRSGVDVVTLSDGEHYTKESLRDPLSLIKSILIMQRAHEESLRKAERIQAAWDAKKEAAKAGIKISRRCPAWLKLNDDRKSFSIIPEKVETVKRCFQLRLEGKSIWEIVRTLNDEGHQTLNQYKAGKFGQTSVQDLLKNRSVIGYFTPKGREEIAGYFPPIIPETDFYKVQQLSYSRYGRKPASDKPMAVNLFKGVIRCSECGHALIITGFSDTRNGIYRCPLRNENRCSAKGLSRKQTDGTLLALLSRLDRFDSDTTNTIDTLKLHREHISSNIEKLVQLSLEIEDLSAITSKLKQLKGELSQVDADIEKETQRLKSIDVGCLSDCDLTTKAGRIEAQLIIKSAVKEVVLNTAKRRCKVTFHNGKAITLPITENPSDNVTEAIQSLSEVTERGLIDVDEVII

SEQ ID NO: 4306 - protein, 507 aa, synthetic construct
MKRAISYIRFSSEKQSRGDSLRRQSKMVNDWLKAHPEYYLDQDLSFRDLGVSGFTGKHLKGGLGDFLTAIEKGLVKAGDTLLIESLDRLSRQAVDRASELLRNILRSGVDIVTLSDGEHYTSESLKDPLALIKSILIMQRAHEESLRKSERIQAAWDAKKEAAKAGIKVSKRCPAWLRLNDDRKSFSVIPEKVETVKRCFQLRLEGKSIWEIVRTLNAEGHRSMNQYKPGKFGQTSVQDLLKNRSVIGYFTPKGCEEISGYYPAIIDETTFYKVQQLSHSRYGKRSVSDKPLSVNLFKGVIRCSECGHALIITGFSDTRNGIYRCPLRNENRCNAKGLSRKQTDGTLLALLSRLDRFDSDMTNVIDALKLHREHISNNIEKLVQLSLEIEDLSAITIKLKQLKGELSQVDADIEKETQRLKSIDVGCLSDCDLTTKAGRIEAQLIIKSAVKEVVLNTAKRRCKVTFHNGRAITLPITENPSEDVTEAIQSLSEVTERGLIDVDEVII

SEQ ID NO: 4307 - protein, 547 aa, synthetic construct
MKLLVPYIRWSTKEQDSGDSLRRQTNLIDTFYAKHKDDYYLLPAHRYVDKGKSGFHQQHKAQGSDFRRMFENVMSGTIPEGSLIVVENFDRFSRADIDTAIDDVRQILRKGVSILTLGDGELYDKSALTDPVKLIKHIIIAERAHQESLVKQKRIAQVWNHKTQLARELKKPMGKQAPGWLELSEDGSHYIVDEDKASLVNIIYDKRLSGMSMFAICKWLNEQGYPTINQRKVRISKTKKPDGNWSALSVKHILTSRSVLGYLPAKISTEDRKTVLREEIESFYPQIVTDSKFYAVQQLLEETGKGKTSSGDHWLYVNILKGLIRCKCGLVMTPTGIRKPVYQGTYRCNGNKESRCSYGTVSRKLLDTQLCSRLFSKLSQLHDEATDTAKLDEIQRRLNTVDSELEKLTETLIQLPNITQIQEALRVKQEEKDELIAQLSREKARVKSVSSLDLSGLDMESVEGRTEAQIIIKRLVKEIVVSGNEKLVDIYLHNGNMIRGFPLDGKDDHTLTLEEATDEMQPLDDMLIFGEPVTRIYPAGDMEEVDA

SEQ ID NO: 4308 - protein, 506 aa, synthetic construct
MRSVITYLRFSSAIQGAEGADSTRRQNELFKQWLRKNSDAQVVASFSDEGLSGYKGKHLTGQFGDMLARIESGEFPEGTILLVESIDRIGRLEHLETEALMNRILGNGLEIHTLQDGLIYTKDALADDLGISIIQRVKAYIAHQESKQKSFRVSEKWKQRAKLALAGKQRLTKMVPGWIDPDTLKLNEHAETVRLIFKLLLSGESLHNIARHLQSNGIKSFSRRKDANGFSVHSVRTILRSETTIGTLPASQRNDRPAIPNYYEAAIDAATFNKAQEILDKNRKGRTPASDNPLTINIFKGLFRCQCGASVHPTGTKNKYAGVYRCNNHLDGRCDVPPLKRKPFDKWMLENFLGMIDVGNDGEAEGKIASLQYEVEIVTTRIKKATALLLEMDDIDELKIQLKELNQRRTELQTTIDNMRRKASLTDKELPQLKDIDLTTKAGRVECQLILSKHLKGLTLGKDSVIVTLQNDTEITIPTNPLPLNDGTSIFEIAEKELLEIDAYQL

SEQ ID NO: 4309 - protein, 547 aa, synthetic construct
MKLLVTYIRWSTKEQDSGDSLRRQTNLIDAFYAKHKDDYYLLPAHRYVDKGKSGFHQQHKNQGSDFRRMFENVMSGIIPEGSLIVVENFDRFSRADIDTAIDDVRQILRKGVSILTLGDGELYDKSALTDPVKLIKHIIIAERAHQESLVKQKRIAQVWNHKTQLARELKKPMGKQAPGWLELSEDGSHYIVDEDKASLVNIIYDKRLSGMSMFAICKWLNEQGYPTINQRKVRISKTKKPDGNWSALSVKHILTSRSVLGYLPAKISSEDRKTVLREEIEGFYPQIVTDSKFYAVQQLLEETGKGKTSSGEHWLYVNILKGLIRCKCGLVMTPTGIRKPVYQGTYRCNGNKESRCSYGTVSRKLLDTQLCSRLFSKLSQLHDEATDTSKLDELQRRLNTVDSELEKLTETLIQLPNITQIQEALRVKQEEKDELIVQLSREKARVKSVSSLDLSGLDMESVEGRTEAQIIIKRLVKEIVVSGNEKLVDIYLHNGNMIRGFPLDGKDDHTLTLEEATDEMQSLDDMLIFGEPVTRIYPAGDMEEVDA

SEQ ID NO: 4310 - protein, 452 aa, synthetic construct
MKAAIYIRVSTQEQVENYSIQAQTEKLTALCRSKDWDVYDTFIDGGYSGSNMNRPALNEMLSKLHEIDAVVVYRLDRLSRSQRDTITLIEEYFLKNNVEFVSLSETLDTSSPFGRAMIGILSVFAQLERETIRDRMVMGKIKRIEAGLPLTTAKGRTFGYDVIDTKLYINEEEAKQLQMIYDIFEEEKSITTLQKRLKKLGFKVKSYSSYNNWLTNDLYCGYVSYADKVHTKGVHEPIISEEQFYRVQEIFSRMGKNPNMNRDSASLLNNLVVCGKCGLGYVHRRKDTVSRGKKYHYRYYSCKTYKHTHELEKCGNKIWRADKLEELIIDRVNNYSFASRNVDKEDELDSLNEKLKTEHTKKKRLFDLYISGSYEVSELDAMMSDIDAQINYYEAQIEANEELKKNKKIQENLADLATVDFDSLEFREKQLYLKSLINKIYIDGEQVTIEWL

SEQ ID NO: 4311 - protein, 547 aa, synthetic construct
MKLLVPYIRWSTKEQDSGDSLRRQTNLIDTFYAKHKDDYYLLPAHRYVDKGKSGFHQQHKAQGSDFRRMFENVMSGTIPEGSLIVVENFDRFSRADIDTAIDDVRQILRKGVSILTLGDGELYDKSALTDPVKLIKHIIIAERAHQESLVKQKRIAQVWNHKTQLARELKKPMGKQAPGWLELSEDGSHYIVDEDKASLVNIIYDKRLSGMSMFAICKWLNEQGYPTINQRKVRISKTKKPDGNWSALSVKHILTSRSVLGYLPAKISTEDRKTVLREEIESFYPQIVTDSKFYAVQQLLEETGKGKTSSGEHWLYVNILKGLIRCKCGLVMTPTGIRKPVYQGTYRCNGNKESRCNYGTVSRKLLDTQLCSRLFSKLSQLHDEATDTAKLDELQRRLNTVDSELEKLTETLIQLPNITQIQEALRVKQEEKDELIVQLSREKARVKSVSSLDLSGLDMESVEGRTEAQIIIKRLVKEIVVSGNEKLVDIYLHNGNMIRGFPLDGKDDHTLTLEEATDEMQSLDDMLIFGEPVTRIYPAGDMEEVDA

SEQ ID NO: 4312 - protein, 547 aa, synthetic construct
MDTTSPTITVAPYVRTSSIKQIDNNSIPAQLAEIEKYCKLNDYEMLPPYIDNGISGAEMENRPGLQQMLNDLKNNKLDKIVVWKLTRLGRSMKDILQIIEECEKNNVSFYSVSEHLGIDTDMNKLMLNIMGSLGEYERTILKDNIRIGASNKASEGKSVGGQPPYGYDRIDGLLIVNQHESRIVKEIYQMYSQGMNFTAIAKVLNDRHEVTKLGKPHSKDSVSYILKNKVYRGLVVYNQYVDWKKKGRKGYNDNPIITEGEHEAIISQELWNKVQTQLKARKRHKRGNNKTDNLLTGLLKCKCCNANYVISNTINTLKDGSKRHFRYYVCRTRKQRSKDCKAAPNIRADFIENYIFQNIKNLIQKPELIKKVVEAVNHKRTPNTDEINHEIANKQFQIDDLKSRYNNLIQVITTDTSLTESIKPTLLKYSEQINELNTSIKQLESNKNVNHPKIEADTVINIFHILFKNLENTKNSSLKAIYHLVIEYIYITADSNNKKQFYITFKFNQDIVETLLNNINPDEQLLNCSSSFLSQISSETFFLEFSL

SEQ ID NO: 4313 - protein, 466 aa, synthetic construct
MSIVIGYARQSVDKKKTENSVHSQINAIKKYANTHKIKDVKFISDVKSGRSTTRDGYQSMLDVIRKGECHHVIVFRINRLNRNFKDFMELQTLCEEHHVLITSLSDGRFDLSDKTQAFKIRCLAILGETESNIISENVRSANAIKAENNELLGTNAPFGYIYMNKSFHIDESKVTTIRFIFNMYVNQGWGYKKISQALINHSKLYNRTPKQVMRIITNEKYAGLIRNHFGEYEGNFEPIIEKSLFRKAETIRGSKKTLTHYHPIVLLRKKIRCICGATMTPIRMNRKHMTCPITYYICPLNDKLGYKKCSMGYFVASKIDKQVIKIIEDNIINQQMIQRLENTIHSKLSLKIKRSRPKYNQDQLITKLSKQQISIEEYKKQLNKIKEWHNKMNRYNQVNSANQLECITQNILSNYTLYIDQLSEMITQITVNKDKEITGVFLKNTPLNLLKEKDDKHDERSTFIST

SEQ ID NO: 4314 - protein, 547 aa, synthetic construct
MKLLVTYIRWSTKEQDSGDSLRRQTNLIDAFYAKHKDDYYLLPAHRYVDKGKSGFHQQHKAQGSDFRRMFENVMSGAIPEGSLIVVENFDRFSRADIDTAIDDVRQILRKGVSILTLGDGELYDKSALTDPVKLIKHIIIAERAHQESLVKQKRIAQVWNHKTQLARELKKPMGKQAPGWLELSDDGSHYIVDEDKASLVNIIYDKRLSGMSMFAICKWLNEQGYPTINQRKVRISKTKKPDGNWSALSVKHILTSRSVLGYLPAKISTEDRKTVLREEIESFYPQIVTDSKFYAVQQLLEETGKGKTSSGDHWLYVNILKGIIRCKCGLVMTPTGIRKPVYQGTYRCNGNKESRCSYGTVSRKLLDTQLCSRLFSKLSQLHDEATDTAKLDELQRRLNTVDSELEKLTETLIQLPNITQIQEALRVKQGEKDELIVQLSREKARVKSVSSLNLSGLDMESVEGRTEAQIIIKRLVKEIVVSGNEKLVDIYLHNGNMIRGFPLDGKDDHTLTLEEATDEMQSLDDMLIFGEPVTRIYPAGDMEEVDA

SEQ ID NO: 4315 - protein, 507 aa, synthetic construct
MKRVISYIRFSSEKQSRGDSLRRQSKMVNDWLKAHPEYYLDQDLSFRDLGVSGFTGKHLKGGLGDFLTAIEKGLVKAGDTLLIESLDRLSRQDVDQASELLRNILRSGVDVVTLSDGEHYTSESLKDPLALIKSILIMQRAHEESLRKSERIQAAWNRKKELISEGIKVSKRCPAWLRLNDDRKSFSVIPEKVETVKRCFQLRLEGKSIWEIVRTLNDEGHQSMSQYKPGKFGQTSVQDLLKNRSVIGYFTPKGCEGISSYYPAIIDETTFYKVQQLSYARYGRKPASDKPLSVNLFKGVIRCSECGHALIITGFSDTRSGIYRCPLRNENRCSAKGLSRKQTDGTLLALLSRLDRFDSDMTNTIDTLKLHREHISSNIEKLVQLSLEIEDLNAITNKLKQLKNELSQVDADIEKETQRLKSIDVGCLSDCDLTTKAGRIEAQLIIKSAVKEVVLNTAKRRCKVTFHNGKAITLPITENPSEDVTEAIQSLSEVTERGLIDVDVVEI

SEQ ID NO: 4316 - protein, 547 aa, synthetic construct
MKLLVTYIRWSTKEQDSGDSLRRQTNLIDAFYSKHKNDYYLLPAHRYVDKGKSGFHQQHKAQGSDFRRMFENVMSGVIPEGSLIVVENFDRFSRADIDTAIDDVRQILRKGVSILTLGDGELYDKSALTDPVKLIKHIIIAERAHQESLVKQKRIAQVWNHKTQLARELKKPMGKQAPGWLELSEDGSHYIVDEDKASLVNIIYDKRLSGMSMFAICKWLNEQGYPTINQRKVRISKTKKPDGNWSALSVKHILTSRSVLGYLPAKISSEDRKTVLREEIEGFYPQIVTDSKFYAVQQLLEETGKGKTSSGEHWLYVNILKGLIRCKCGLVMTPTGIRKPVYQGTYRCNGNKESRCSYGTVSRKLLDTQLCSRLFSKLSQLHDEATDTAKLDELQRRLNTVDSELEKLTETLIQLPNITQIQEALRVKQEEKDELIVQLSREKARVKSVSSLDLSGLDMESVEGRTEAQIIIKRLVKEIVVSGNEKLVDIYLHNGNMIRGFPLDGKDDHTLTLEEATDEMQPLDDMLIFGEPVTRIYPAGDMEEVDA

SEQ ID NO: 4317 - protein, 506 aa, synthetic construct
MRSVITYLRFSSAIQGAEGADSTRRQNDLFKQWLKKNSDAQVVASFSDEGLSGYKGKHLTGQFGDMLARIESGEFPEGTILLVESIDRIGRLEHLETEALMNRIIAHGIEIHTLQDGLIYTRDALSDDLGISIIQRVKSYVAHQESKQKSFRVSQKWKQRAKLALAGEQRLTKMVPGWIDPDTFKCNEHAETVRLIFKLLLDGESLHNIARHLQSNGIKSFSRRKDANGFSVHSVRTILRSETTIGTLPASQRNDRPAIPNYYEAAIDASTFNKAQEILGKNRIGRTPASDNPLTINIFKGLFRCQCGASVHPTGTKNKYQGVYRCNNHLDGRCDVPPLKRKPFDKWMIDNFLGMIDVGNDGEAEGKIASLQHEVEIVTTRIKKATALLLEMDDIDELKIQLKELNQKRTELQTTIDNMRRKASLTDKELPQLKDIDLTTKAGRVECQLILSKHLKGLTLGKDSVTVTLQNDTEIIVPTNPLPLNDGTSIFEIAEKELLEIDAYQL

SEQ ID NO: 4318 - protein, 506 aa, synthetic construct
MRTVITYLRFSSATQGAEGADSTRRQNELFKQWLRKNSDAQVVASFSDEGLSGYKGKHLTGQFGDMLARIESGEFSEGTVLLVEAIDRIGRLEHLETEALMNRIIAHGIEIHTLQDGLIYTRDALSDDLGISIIQRVKSYVAHQESKQKSFRVSQKWKQRAKLALAGEQRLTKMVPGWIDPDTLKLNEHAENVRLIFKLLLDGESLHNIARHLQANNISSFSRRKDANGFSVHSVRTILRSETTIGTLPASQRNDRPAIPNYYEAAIDVSTFNKAQEILDKNRKGRTPASDNPLTINIFKGLFRCQCGASVHPTGTKNKYQGVYRCNNHLDGRCDVQPLKRKPFDRWMIDNFLGMIDVGNDGESERKIAALQHEVEIVTARIKKATALLLEMDDIDELKIQLKELNQKRTELQTTIDNMRRKASLTDKELPQLKDIDLTTKAGRVECQLILSKHLKGLTLGKDSVTVTLQNDTEITIPTNPLPLNDGTSIFEIADKELLDIDAYQL

SEQ ID NO: 4319 - protein, 507 aa, synthetic construct
MKRVISYIRFSSERQAKGDSLRRQSKMVTDWLKAHPEYYLDQDLSFRDLGVSGFTGKHLKGGLGDFLTAIEKGLVKAGDTLLIESLDRLSRQAVDRASELLRNILRSGVDVVTLSDGEHYTSESLKDPLALIKSILIMQRAHEESLRKSERIQAAWDAKKEAAKAGIKVSKRCPAWLRLNDDRKSFSVIPEKVETVKRCFQLRLEGKSIWEIVRTLNAEGHRSMNQYKPGKFGQTSVQDLLKNRSVIGYFTPKGCEEISGYFPPIIPETDFYKVQQLSHSRYGKRSVSDKPLSVNLFKGVIRCSECGHALIITGFSDTRNGIYRCPLRNENRCSAKGLSRKQTDGTLLTLLSRLDRFDSNTTNTIDMLRLHREHISNNIEKLVQLSLEIEDLSAITIKLKQLKGELSQVDADIEKETQRLKSIDVGCLSDCDLTTKAGRIEAQLIIKSAVKEVVLNTAKRRCKVTFHNGRAITLPITENPSEDVTEAIQSLSEVTERGLIDVDEVII

SEQ ID NO: 4320 - protein, 506 aa, synthetic construct
MRHVITYLRYSSATQGAEGADSTRRQNELFKQWLRKNSDAQVVASFNDEGLSGYKGKHLSGQFGDMLSRIESGEFSKGTILLVEAIDRIGRLEHLETEALMNRIIAHGIEIHTLQDGLIYTRDALSDDLGISIIQRVKSYLAHQESKQKSFRVSEKWKQRAKLALAGEQRLTKMVPGWIDPETFKLNEHAETVRLIFKLLLDGESLHNIARHLQANNISSFSRRKDANGFSVHSVRTILRSETTIGTLPASQRNDRPAIPNYYEAAIDAATFNKAQEILGKNRIGRTPASDNPLTINIFKGLFRCQCGASVHPTGTKNKYQGVYRCNNHLDGRCDVQPLKRKPFDRWMIDNFLGMIDVGNDGESERKIAALQHEVEIVTARIKKATALLLEMDDIDELKIQLKELNQKRTELQTTIDNMRRKASLTDKELPQLKDIDLTTKAGRVECQLILSKHLKGLTLGKDTVTVTLQNDTEITIPTDPLPLNDGTSIFEIAEKNLLNIDTFQL

SEQ ID NO: 4321 - protein, 542 aa, synthetic construct
MTRVALYARYSSDRQNERSISDQVNVLIQHAAAKGWAVVGTYTDAAISGSAMANRPGLLAALAAADRGEFDLLLAEDEDRLARNLEHLAHVANRLADIGAGIATLSTDRVQDMHVAFKGLIAQDFIRNLSMKTKRGMASNAEKGLATGSRLYGYRSQPGGTVEIVPDQAEVIRRIFSMYVNDRMSSREIAERLNRDRIPSPAGRQWNASSIQGSRQRANGVLHSEIYAGVKVYNRVEMRKDRQTGRKITICKPPSEHKRIDVPHLAIIDQDLWKAAQQRLDSRQTTDPSQRASLRRRPGLLSGLTKCGRCGASYTSLSQGRLVCAAYREKGASACDNNRHVNRAEIEQRVLDGLRTRLLAPDAVAAYVRAYHAAWAEQAAQVEVRRRPLTRRIAEVERAIERGADALLSGATAAAVIGKKLEALEIEQAQLKATLEQLDAEGAPPVQLHPRAAENYASKIEQLQARLAEAAGSTDDADRDLIGSVRGLIQKVDIEPINKSRGSPVRVTLHGDLARFVLPQHPPASGCALVVGGGIEPPTCGL

SEQ ID NO: 4322 - protein, 507 aa, synthetic construct
MKRVISYIRFSSERQAKGDSLRRQSKMVNDWLKAHPEYYLDQDLSFRDLGVSGFTGKHLKGGLGDFLTAIEKGLVKAGDTLLIESLDRLSRQDVDQASELLRNILRSGVDVVTLSDGEHYTRESLKDPLALIKSILIMQRSHEESLRKSERIQAAWNRKKELISEGIKISKRCPAWLKLNDDRKSFSVIPEKVETVKRCFQLRLEGKSIWEIVRTLNDEGHQTLNQYKAGSFGQTSVQDLLKNRSVIGYFTPKGCEEIADYYPAIIDETTFYKVQQLSYARYGRKPASDKPMAVNLFKGVIRCSECGHALIITGFSDTRNGIYRCPIRNENRCSAKGLSRKQTDGTLLTLLSRLDRFDSDTTNTIDTLKLHREHISSNIEKLVQLSLEIEDLSAITSKLKQLKNELSQVDADIEKETQRLKSIDVGCLSDCDLTTKAGRIEAQLIIKSAVKEVVLNTAKRRCKVTFHNGKVIDLPITENPSDNVTEAIQSLSEVTERGLIDVDEVII

SEQ ID NO: 4323 - protein, 507 aa, synthetic construct
MKRVISYIRFSSEKQAKGDSLRRQSKMVTDWLKAHPEYYLDQDLSFRDLGVSGFTGKHLKGGLGDFLTAIEKGLVKAGDTLLIESLDRLSRQDIDIASELLRRILRAGVDVVTLSDGEHYTKESLRDPLSLIKSILIMQRAHEESLRKAERIQAAWDAKKEAAKAGIKISRRCPAWLRLNDDRKSFSVIPEKVETVKRCFQLRLEGKSIWEIVRTLNDEGHQSMSQYKPGKFGQTSVQDLLKNRSVIGYFTPKGCEEIAGYYPAILDETTFYKVQQLSYARHGRKPASAKPLSVNLFKGVIRCSECGHALIITGFSDTRNGIYRCPLRNENRCSAKGLSRKQTDGTLLTLLSRLDRFDSDTTNTIDTLKLHREHISSNIEKLVQLSLEIEDLNAITNKLKQLKNELSQVDADIEKETQRLKSIDVGCLSDCDLTTKAGRIEAQLIIKSAVKEVVLNTAKRRCKVTFHNGRAITLPITENPSEDVTEAIQSLSEVTERGLIDVDEVII

SEQ ID NO: 4324 - protein, 538 aa, synthetic construct
MAKNGARVYSYLRFSDPRQATGSSADRQLQYAQRWAADKGLALDESLSLRDEGLSAYHQRHVKQGALGVFLQAVEDGRIADGSVLVVEGLDRLSRAEPIQAQAQLAQIINAGITVVTASDGREYNRSGLKAQPMDLVYSLLVMIRAHEESDTKSKRVKAAIRRQCEGWVAGTYRGIIRNGKDPQWLHWDGQAFQLVPERVEGVRLVIELFRQGYGSVRIIREMTERGLAVTTKGITALQVHRLVRLPALMGIKVLELDGETYRLEGYYPPILTADEFADLSLQVEGRVRRKGKGEIPGLVTGLGITYCGYCGTAVVGQNVMHRAKSDGSLSDGHRRLICVGYSHNSGCPIGGSCSVVPIEKALMSYCTDRMNLSSLLEGNDQSQQLQVRLSTAKAETALIEQQLERVSEALLAAEGGAAPLIFVRKARELEDLHAAKQKEVSQVERELVAVSNRDQPGLAEAWERLASGVEMLDFDARMKVRHLVRETFERIVVFHHGMQASNREGKVIDLLLVGKGGQPRLLRIDRKTGEWRAGIGA

SEQ ID NO: 4325 - protein, 547 aa, synthetic construct
MKLLVTYIRWSTKEQDSGDSLRRQTNLIDAFYAKHKDDYYLLPAHRYVDKGKSGFHQQHKNQGSDFRRMFENVMSGAIPEGSLIVVENFDRFSRADIDTAIDDVRQILRKGVSILTLGDGELYDKSALTDPVKLIKHIIIAERAHQESLVKQKRIAQVWNHKTQLARELKKPMGKQAPGWLELSEDGSHYIVDEDKASLVNIIYDKRLSGMSMFAICKWLNEQGYPTINQRKVRISKTKKPDGNWSALSVKHILTSRSVLGYLPAKISTEDRKTVLREEIESFYPQIVTDSKFYAVQQLLEETGKGKTSSGDHWLYVNILKGIIRCKCGLVMTPTGIRKPVYQGTYRCNGNKESRCNYGTVSRKLLDTQLCSRLFSKLSQLHDEATDTAKLDELQRRLNTVDSELEKLTETLIQLPNITQIQEALRVKQGEKDELIVQLSREKARVKSVSSLDLSGLDMESVEGRTEAQIIIKRLVKEIVVSGNEKLVDIYLHNGNMIRGFPLDGKDDHTLTLEEATDEMQSLDDMLIFGEPVTRIYPAGDMEEVDA

SEQ ID NO: 4326 - protein, 507 aa, synthetic construct
MKRVISYIRFSSEKQAKGDSLRRQSKMVTDWLKAHPEYYLDQDLSFRDLGVSGFTGKHLKGGLGDFLTAIEKGLVKAGDTLLIESLDRLSRQDIDIASELLRNILRSGVDVVTLSDGEHYTKESLRDPLSLIKSILIMQRAHEESLRKAERIQAAWDAKKEAAKAGIKISKRCPAWLKLNDDRKSFSVIPDKVETVKRCFQLRLEGKSIWEIVRTLNDEGHQTLNQYKAGKFGQTSVQDLLKNRSVIGYFTPKGREEIAGYYPAIIDETTFYKVQQLSYSRYGRKPASDKPLSVNLFKGVIRCSECGHALIITGFSDTRSGIYRCPLRNENRCSAKGLSRKQTDGTLLTLLSRLDRFDSDMTNTLDTLKLHREHISSNIEKLVQLSLEIEDLNAITSKLKQLKGELSQVDADIEKETQRLKSIDVGCLSDCDLTTKAGRIEAQLIIKSAVKEVVLNTAKRRCKVTFHNGRAITLPITENPSDNVTEAIQSLSEVTERGLIDVDVVAI

SEQ ID NO: 4327 - protein, 535 aa, synthetic construct
MNKAYSYIRFSTGKQLKGSSEERQQAMLDNWERDNPTFTLNRDLTFKDLGISGRSGKHLKNGFGKLLEAIEKGAIGVGDVVLVEAIDRAGRMEPGIMIRVLTDILNAGVALVTLDDGQKYTQEALRGGSLYILVGKVQAAFNYSQSLSDRMKASYKSRNVLAANGVIPKRYTPVWLTSEGELLGEIAPFIKQAFEDYAAGLGERRIYERILEAGGDKHDCFIKMAPSTVKRWMKNKTAIGEWQGIPNVYPRVVEPDLFYRVQKRLSEGYVQRAAPTKHKYTGLVVCGECGKNFNTKSYKNKANPPPPVMECSSRARRGSTACPNSKGIPEAVIGVAFQLSCWDHISKALQGQVLTESMKREVVIDGLLSELSVKIAKVARAVAEVDDVEELIVALRALKAEKLSLEGEKKALSHEQATVKEKILNSAEIMKDPMKANALLQSVGYRIVCNLDRTIHTPVGVFTYQGWGRAEDVHKVVTHEGVLLKLPVARQTQTPRKRDSVRVDVMSVLEGKVFKATLETPLGHAQLQHCRSNEG

SEQ ID NO: 4328 - protein, 558 aa, synthetic construct
MTKLYSYIRFSSMRQSDGSSYERQIRMAKEIADRYNLELVNDYQDLGVSAFKGANSKTGALSRFLDEIGRSIPVGSWLFIENLDRLSRQDIISAQELFLSIIRRGITIVTGMDNKIYSIETVTANPMDLMFSILLFIRGNEESQTKRNRTNSSALLKIKAHQQNPQNPAVAIEEIGKNMWWTDTTSGRVLPHPVYFPVLQKIVQLRQEGHSAGVILDYLNEHHEPPAPTSNKKHGKWSRAMVSRLFHTKALIGVKTVNVDGVEYELRDYYPRVLSDSEFYFLRKNIVKKAWDYSHDKEKVIPLLSGIGVLRCVHCGATMVKQTAANGKREQYRYCCDGRKSGRTDCPYPNWGFRAVTLEGAVLQLLADKIWIAEDKTNPIPEIQVKIDEISRKIDNLINLSAMTGATKELANQITDLNSQREALHEEIRLFEREMYSVDSQGWDKLAQFDLSDVQNEERLKVRMKIKGALHEIECSRIDSKKNLFVLVYLDGLRQRLVIENNRGLKKGQIFVDLKTINDRQILESAGMVLHPCIEMIIDADWKAPEEIPGLLSEEFGI

SEQ ID NO: 4329 - protein, 547 aa, synthetic construct
MKLLVTYIRWSTREQDSGDSLRRQTNLIDAFYSKHKNDYYLLPAHRYVDKGKSGFHQQHKNQGSDFRRMFENVMSGAIPEGSLIVVENFDRFSRADIDTAIDDVRQILRKGVSILTLGDGELYDKSALTDPVKLIKHIIIAERAYQESLVKQKRIAQVWNHKTQLARELKKPMGKQAPGWLELSEDGSHYIVDEDKASLVNIIYDKRLSGMSMFAICKWLNEQGYPTINQRKVRISKTKKPDGNWSALSVKHILTSRSVLGYLPAKISTEDRKTVLREEIEGFYPQIVTDSKFYAVQQLLEETGKGKTSSGEHWLYVNILKGIIRCKCGLVMTPTGIRKPVYQGTYRCNGNKESRCSYGTVSRKLLDTQLCSRLFSKLSQLHDEATDTAKLDELQRRLNTVDSELEKLTETLIQLPNITQIQEALRVKQEEKDELIVQLSREKARVKSVSSLDLSGLDMESVEGRTEAQIIIKRLVKEIVVSGNEKLVDIYLHNGNMIRGFPLDGKDDHTLTLEEATDEMQSLDDMLIFGEPVTRIYPAGDMEEVDA

SEQ ID NO: 4330 - protein, 528 aa, synthetic construct
METTTRRRAVTYQRFSSVRQVGNSSLERQNEETKNWLLRNPDVEVIDSFVDKAMSGWSGKHLKDGSLGQLMNAIDDGIITSGTLILVEHFSRLSRQNITDAEKLMHRIWDAGITLVTVRDGTEYTPEAANDMVLRIRLLVEMEQAFKESEWRSAKVKASYVNRENKAKNGIVPKMRKPFWLNADGTLNELHEAVKDMFHLYKNGYGQQRIIVTLREKYANTAIQKLNPSTVMRWIQADVTRGYWRGNRVYEAAIDDETFFEVQTIHKNRLYENVKPDRNWPLSGLMKCGVCGRGMSIQKSGTSNPVVRCSSKQRDKSCNRKTTFPYFIVHQYMMTVVKKYALRKYTNVTSNKELRHELLIVERDLLKARQELSELKAFYKQQKAEGKKTFATLEILEEERENVENLQNKEKELKSSLEAFANGGASIESRKLVLDGRNFNLEMHKLNFKIIVGEEEVSAEGFDEEIPTLKYIGYSRKTRSYEWTQGSHRFIQSWPSSDVTEQALMLDDYRQNLYAKNFFEKQLSKLKD

SEQ ID NO: 4331 - protein, 507 aa, synthetic construct
MKRVISYIRFSSEKQAKGDSLRRQSKMVTDWLKAHPEYYLDQDLSFRDLGVSGFTGKHLKGGLGDFLTAIEKGLVKAGDTLLIESLDRLSRQDVDQASELLRNILRSGVDVVTLSDGEHYTKESLRDPLSLIKSILIMQRAHEESLRKAERIQAAWDAKKEAAKAGIKISRRCPAWLKLNDDRKSFSVIPEKVETVKRCFQLRLEGKSIWEIVRTLNAEGHQTLNQYKAGKFGQTSVQDLLKNRSVIGYFTPKGCEEISGYYPAIIDETTFYKAQQLSYARYGRKPASDKPMAVNLFKGVIRCSECGHALIITGFSDTRNGIYRCPLRNENRCSAKGLSRKQTDGTLLTLLSRLDRFDSNTTNTIDMLRLHREHISNNIEKLVQLSLEIEDLSAITIKLKQLKGELSQVDADIEKETQRLKSIDVGCLSDCDLTTKAGRIEAQLIIKSAVKEVVLNTAKRRCKVTFHNGKVIDLSITENPSEDVTEAIQSLSEVTERGLIDVDEVII

SEQ ID NO: 4332 - protein, 558 aa, synthetic construct
MTKLYSYIRFSSMRQSDGSSYERQIRMAKEIADRYNLELVNDYQDLGVSAFKGANSKTGALSRFLDEIGRSIPVGSWLFIENLDRLSRQDIISAQELFLSIIRRGITIVTGMDNKIYSIETVTANPMDLMFSILLFIRGNEESQTKRNRTNSSALLKIKAHQQNPQSPAVAIEEIGKNMWWTDTTSGRVLPHPVYFPVLQKIVQLRQEGHSAGVILDYLNEHHEPPAPTSNKKHGKWSRAMVSRLFNTKALIGVKTVNVDGVEYELRDYYPRVLSDSEFYFLRKNIVKKAWDYSHDKEKVIPLLSGIGVLRCVHCGATMVKQTAANGKREQYRYCCDGRKSGRTDCPYPNWGFRAVTLEGAVLQLLADKIWIAEDKTNPIPEIQVKIDEISRKIDNLINLSAMMGATKELANQITDLNSQREALHEEIRLFEREMYSVDSQGWDKLAQFDLSDVQNEERLKVRLKIKGALHEIECSRIDSKKNLFVLVYLDGLRQRLVIENNRGLRKGQIFVDLKTINDRQILESAGMVLHPCIEMIIDADWKAPEEIPGLLSEEFGI

SEQ ID NO: 4333 - protein, 507 aa, synthetic construct
MKRVISYIRFSSERQAKGDSLRRQSKMVNDWLKAHPEYYLDQDLSFRDLGVSGFTGKHLKGGLGDFLTAIEKGLVKAGDTLLIESLDRLSRQDVDQASELLRNILRSGVDVVTLSDGEHYTKESLRDPLSLIKSILIMQRAHEESLLKAERIQAAWDAKKEAAKAGIKISRRCPAWLKLNDDRKSFSVIPEKVETVKRCFQLRLEGKSIWEIVRTLNAEGHQTLNQYKAGKFGQTSVQDLLKNRSVIGYFTPKGCEEISGYYPAIIDETTFYKAQQLSYARYGRKPASDKPMAVNLFKGVIRCSECGHALIITGFSDTRSGIYRCPLRNENRCSAKGLSRKQTDGTLLTLLSRLDRFDSDTTNTIDTLKLHREHISSNIEKLVQLSLEIEDLSAITSKLKQLKGELSQVDADIEKETQRLKSIDVGCLSDCDLTTKAGRIEAQLIIKSAVKEVVLNTAKRRCKVTFHNGKAITLPITENPSDNVTEAIQSLSEVTERGLIDVDEVII

SEQ ID NO: 4334 - protein, 557 aa, synthetic construct
MSKEKIKVYLYTRVSTSIQIEGYSLEAQKSRMKAFAIYNDYEIVGEYEDAGKSGKSIEGRIQFNRMMEDIKSGKDGVSFVLVFKLSRFARNAADVLSTLQIMQDYGVNLICVEDGIDSSKDAGKLMISVLSAVAEIERENIRIQTMEGRIQKAREGKWNGGFAPYGYKLEDGKLFINEEEAIAIRTIFDQYVNTTIGANGISKYLENHGIRKIPRQNGKNPLFDAGLIRKILKNPVYNGKIAFGRRTLEKVHGTRNEYKQVEQDEYLISEGIHEAIVSDEVWQAAQVKLKSQAKKYEHVNKGKDTRTHLLSGIVKCPICGVGMFGNKCIKKKKDGTKYKDFYYYGCKHRQMIRGHKCTFRKQIREELLDDAVAEVIVKIVSNPKFASMMQEKINMKVDTSEIETEIDNYQKELRKCHSTKFKLIEEIDNLDVEDKHYKRRKQDLDDRLYRMYDKIDELESSLIDAKAKKQTIEAEKLTGDNIYKVLIYFDKLYKVMNDVERRQLITALISEIQVYEEKQPNGQWLKSITFKLPIIEENLNIGLDNDEHVEMLSLLKK

SEQ ID NO: 4335 - protein, 547 aa, synthetic construct
MKLLVTYIRWSTREQDSGDSLRRQTNLIDAFYSKHKNDYYLLPAHRYVDKGKSGFHQQHKNQGSDFRRMFENVMSGAIPEGSLIVVENFDRFSRADIDTAIDDVRQILRKGVSILTLGDGELYDKSALTDPVKLIKHIIIAERAHQESLVKQKRIAQVWNHKTQLARELKKPMGKQAPGWLELSEDGSHYIVDEDKASLVNIIYDKRLSGMSMFAICKWLNEQGYPTINQRKVRISKTKKPDGNWSALSVKHILTSRSVLGYLPAKISTEDRKTVLREEIEGFYPQIVTDSKFYAVQQLLEETGKGKTSSGEHWLYVNILKGLIRCKCGLVMTPTGIRKPVYQGTYRCNGNKESRCSYGTVSRKLLDTQLCSRLFSKLSQLHDEATDTAKLDELQRRLNTVDSELEKLTETLIQLPNITQIQEALRVKQEEKDELIVQLSREKARVKSVSSLDLSGLDMESVEGRTEAQIIIKRLVKEIVVSGNEKLVDIYLHNGNMIRGFPLDGKDDHTLTLEEATDEMQSLDDMLIFGEPVTRIYPAGDMEEVDA

SEQ ID NO: 4336 - protein, 538 aa, synthetic construct
MSISPKVFSYLRFSDPKQSAGGSADRQLQYAQRWAAEKSLVLDESLSLRDEGLSAYHQRHVTQGALGVFLLAIQDGRIAAGSILVVEGLDRLSRAEPIQAQAQLAQIINAGITVVTASDGREYNRASLKAQPMDLVYSLLVMIRAHEESDTKSKRVKASIRRLCEGWIAGTYRGLVRNGKDPQWVKWTGDAWELIPERVAAVKRALELYQSGLGAARAAKLMHEEGFELSEWGINGQQIYRLIKLPALRGAKRISVDGEDYLLEDYYPRLLSETEWSELQHLGGQRLRRRGHGEIPGFITGMGITYCGYCGSALVAQNAMSRRKTDGSLNDGHRRLHCVGYSKNGGCKESGSCSVVPIERALLSFCSDQINLQRLLQVGDDGQGLRQQLIVARSAGEKIKVQLDRVTDALMADDSGSPPQAFIRKARELEAQQVEAGRKVAQLEHELATVSRSTKPAQAGRWAELAARANKLDTDAREQIRQLVMDTFDRIVIYMRGLNPDGRNGQEIDVQLLSRTGQHRLIQISRRSGAWVASEDWD

SEQ ID NO: 4337 - protein, 429 aa, synthetic construct
MAKQITRIPTPVPAAKRTRVAAYARISEVKGNTPVSLSAQVSYYNQKIRQNPAWQFAGVYTDAGISGTTTSRPGFQRLLAACKRGEVDIILTKSISRFARNTVDLLSIVRDLRQAGIEVFFERENIRTLSGDGELMLSILASFAQEEAWSTSENVKWGIRKNFEKGMTNQMCVYGYIWTGTEFIINKTQAEAVRYIYKRFLQGARYSQIIDECAAHGWQAYWGGRFTIAAIKMILSQERYTGNTLLGKTFNPYPGHHGMKNTGQAPMFFAEGTNPVIIDQETFERAQIALAERTKQNQKCVHNQTLTVFSGRVWCGPCQRRANRCHQYRPQGQRVIYGWCCPAKAKGKPHKCAGGALREDRIKHITCLLTDKPEFSNELFDSYIERIELVMPGQATFILVDGREFLVRYKRGKTATMPTWDDVKEVTKK

SEQ ID NO: 4338 - protein, 540 aa, synthetic construct
MKQPYNTTIYNTALYMRLSRDDESYGDSVSIETQRTILQQYAREQGLHVVGEYVDDGWSGTNFERPSFQRMMDDVEAGKVNCIVTKDLSRFGREHVMMDYYLEFLFPEKRVRYIAVAENEDTEKGLSDFVPFKNLFNEWFAKDTSRKVKTAFKAKFAAGQRISAYAPLGYKKHPEIKNKLIIDEETRWIVEKIFDLAIHGKGAASITRILIAEKVPTPGFINFQRDGTFANIYAGAPEEKGYAWTIAQVKSIMKDETYIGHTIHYRETNISFKNKRRIRKPQSEWVRVENTQEPIISEQVFRQVQEQIASRRRERKNGTTQIFAGLIKCADCGWSLAYEENRQNSKPYGYYHCSKNGQGTRQCSMHYIRYDVLYAYVLSRLQYWSALVQHDEEQLLKRLLNANDKGQAAARKKQAAELKKAEKRKAEVDTLFARMYEDWAAGRITEYNFNMLSGKYQSEQAELEEKIEQLQSAIAAESQSAADAEKWIALMKECVNPTELTAELLNTLIEKILVHEAVKNEDGSREQEVEIFYRFIGKID

SEQ ID NO: 4339 - protein, 519 aa, synthetic construct
MSYAIYLRKSQADLEAEASGVGETLSRHRRTLLELAKRQHLEVGAIYEEIVSGETIAARPQMQKLLSEVGEGRWQGVLVMEVERLARGDSIDQGIVSQAFKFSGTKIITPLKTYDPSNEFDEEYLEFGLFMSRREYQTIKRRMIAGRIASVKEGKYMGKVDPFGYRRVKLENEKGWTLAIVPEQAEIVRKIFYWYLNGESTRTIAKHLKVIGSKTRVGQDWSMASISALLRNPLYCGYVTWGHKTTKKTVDAGRVTKKRYFSENYIKVRGRHEAIIPEEDWDAVQHRLKTTPGFKIRTDYTMRNPFIGLLYCAECGHAMTLNTTTRDGKPNYGMMCPWPHCNVVSSRLPALEQAVQAALCTWLENYKTRISKGPPEDNKETELQESVILLHKELERMDDQLQRAFDLVEQGIYTPEQFVDRQRVLTSRKKELTTQVAIQEQALQEYRATYTMHESLIPRIEAVLRAYPSARSAEEKNHLLRSVLQRINYRKFPQESDGKRKFCLDLDLVPLIPNPQIGR

SEQ ID NO: 4340 - protein, 517 aa, synthetic construct
MSRTVTAIPATKKFGNVTTPSGVPARRRVAAYARVSTEMEEQTSSYEAQIDYYTTYIRSRNDWQFAGMYSDEGISGTSMKRREGFQTMIDDALAGKIDLILTKSVSRFARNTVDSLTTVRKLKDAGVEVYFQKENIYTFDAKGELLITIMSSLAQEESRSISENVTWGHRKRFADGKIMVPYASLLGYKKGEEGNLAIDETQAPIVRRIYARFLEGATPQTIAKELTADQIPTPRGKQIWSPSTVRSILTNEKYKGDALLQKSFTTDFLTKTMKVNEGEVPQYYVTGNHEPIITPATWDVVQTELARRAGKGTSNTHPFANKITCSECSGSFGRKVWHSTSKYRRYIWRCNNKYKKIHRCATPHVTEEQIKNAFVAALAERVTNTDVLDDTMCLLDETVYDTRELETQQATLGERIEETITLMNQLITTAAATAHDPDDYDRRYHQLETRHRQLETEHQHITDKIDDLRHRRAQAIKVHFYLATLPPLAYSDQAWNTLVDHAIINANGAISVIFKDE

SEQ ID NO: 4341 - protein, 415 aa, synthetic construct
MGEMRVIPARPARPQRLRVAAYARVSTEHERQLSSIAAQVSYYSHLIQSTPGWDYVGVFIDEGITGTSTKHRDGFKHLMDTAKAGGIDVILTKSISRLARNTVDLLATVRELKDLGVAVRFEREQIDTLSADGELLLTLLASFAQEESRSLSQNVKWAIRNRYKNGGTNSFVVYGYSWANGEFTIIDEEAKIVRLLFANYLDGISPEKTATMLNAGGKRSRGGRRFYGSVFRRMLENERYKGCQMLQKMYRPTIQAPTRALNDGELPRYWVEQALPPIIDEAMFDAVQAEIAHRREVGPAATPSKNTGVFTGRICCGACGKSYQRKTRTYKSGTSYKFWRCWSACTGNGNPCGGHNLRESLLEHACAYMLGTQGFDPVQVGEQIVMIEAFEHQLTFHLADGTMTPVGLTSEGRLA

SEQ ID NO: 4342 - protein, 547 aa, synthetic construct
MKLLVTYIRWSTREQDSGDSLRRQTNLIDAFYSKHKNDYYLLPAHRYVDKGKSGFHQQHKNQGSDFRRMFENVMSGAIPEGSLIVVENFDRFSRADIDTAIDDVRQILRKGVSILTLGDGELYDKSALTDPVKLIKHIIIAERAHQESLVKQKRIAQVWNHKTQLARELKKPMGKQAPGWLELSEDGSHYIVDEDKASLVNIIYDKRLSGMSMFAICKWLNEQGYPTINQRKVRISKTKKPDGNWSALSVKHILTSRSVLGYLPAKISTEDRKTVLREEIESFYPQIVTDSKFYAVQQLLEETGKGKTSSGEHWLYVNILKGLIRCKCGLVMTPTGIRKPVYQGTYRCNGNKESRCSYGTVSRKLLDTQLCSRLFSKLSQLHDEATDTAKLDELQRRLNTVDSELEKLTETLIQLPNITQIQEALRVKQEEKDELIVQLSREKARVKSVSSLDLSGLDMESVEGRTEAQIIIKRLVKEIVVSGNEKLVDIYLHNGNMIRGFPLDGKDDHTLTLEEATDEMQSLDDMLIFGEPVTRIYPAGDMEEVDA

SEQ ID NO: 4343 - protein, 495 aa, synthetic construct
MKKIAIYTRKSVYVENSESIETQINMCKAYFTRQFKDCEFEIFEDEGFSGKNTDRPAFKRLMNLCKLKKFDAVAVYKIDRLARNIVDFMNIYDDLEKLEIKLISITEGFDPTTPIGRMMMVMLAGFADMERMNIAQRVKDNMISLAKKGCFTGGKINRGYCLEEKSDGKKYLKLENPEFIKFTFESFDKGFSLLEILRMQKDKFGSYALGSTMSVKRMLRSPVYVQSSSNVSDYLRNKGYEIVGNENKNGYLPYGVTVNEPCAIVSKHKAVIEPLLWLRVNSKLDKVRENAIKKDSKCYWLTGVLKCPICGENYVLANSRKKTYYTCSTRLKRGANRPNTCTNSKYVDATGIEAIVENTISKLFNKDTFNSSYSKNEIIYEDNTLELEKKIKSHEKSIKSLVEKLTLIDNSAAKYLTDKIEELTKEISEIKIKIEENKLNKLENELNKSTPEIIYNNIINFVSSNSPQEKRRYLKLIFKSIYYNPETNNIEVDFI

SEQ ID NO: 4344 - protein, 507 aa, synthetic construct
MKRVISYIRFSSERQAKGDSLRRQSKMVNDWLKAHPEYYLDQDLSFRDLGVSGFTGKHLKGGLGDFLTAIEKGLVKAGDTLLIESLDRLSRQNVDRASELLRNILRSGVDVVTLSDGEHYTRESLKDPLALIKSILIMQRSHEESLRKSERIQAAWNRKKELISEGIKVSKRCPAWLKLNDDRKSFSVIPEKVETVKRCFQLRLEGKSIWEIVRTLNDEGHQSMSQYKPGSFGQSSVQDLLKNRSVIGYFTPKGREEIAGYFPPIIPETDFYKVQQLSYARYGRKPASDKPLSVNLFKGVIRCSECGHALIITGFSDTRSGIYRCPLRNENRCSAKGLSRKQTDGTLLTLLSRLDRFDSDMTNTLDTLKLHREHISSNIEKLVQLSLEIEDLNAITSKLKQLKGELSQVDADIEKETQRLKSIDVGCLSDCDLTTKAGRIEAQLIIKSAVKEVVLNTAKRRCKVTFHNGKTITLSITENPSEDVTEAIQSLSEAIERGLIDVDVVEI

SEQ ID NO: 4345 - protein, 324 aa, synthetic construct
MMSKIIPYGYLRVSSLEQVKSGGGLDSQDEAVRRYINERSDLFDIEQMVMMSDMASAYSGKQLSEGQLGGGLADVEAGKVPSGSALIAYSIDRLSRQNPWIGTKLISTLIGAGIQIHSVAENQILKSSDPVGAIMSTIYLMRANNESEIKSDRAKTGYQKRLKESIQNKKVLTRQMPRWLFDNDGKYAVEPKMKRVIEFVFDSYIAGQSSGYIANELNNKGWLYGNTYWRGSYVAKLIRDERLIGKHLRYSKQIKGVKREVIETIPDFYPNAVDVEKYHLANNMLTNVAENIRGRTRITYGDTSILRNIFSNVIKCGLCGGDTL

SEQ ID NO: 4346 - protein, 507 aa, synthetic construct
MKRVISYIRFSSEKQAKGDSLRRQSKMVNDWLKAHPEYYLDQDLSFRDLGVSGFTGKHLKGGLGDFLTAIEKGLVKAGDTLLIESLDRLSRQDIDIASELLRRILRAGVDVVTLSDGEHYTRESLRDPLALIKSILIMQRAHEESLRKAERIQAAWNAKKEAAKAGIKVSKRCPAWLKLNDDRKSFSVIPDKVETVKRCFQLRLEGKSIWEIVRTLNDECHQSMNQYKPGKFGQTSVQDLLKNRSVIGYFTPKGCEEISGYYPAIIDETTFYKVQQLSHSRYGRKPASDKPLSVNLFKGVIRCSECGHALIITGFSDTRNGIYRCPLRNENRCSAKGLSRKQTDGTLLALLSRLDRFDSDMTNTVDTLKLHREHISSNIEKLVQLSLEIEDLSAITIKLKQLKGELSQVDADIEKETQRLKSIDVGCLSDCDLTTKAGRIEAQLIIKSAVKEVVLNTAKRRCKVTFHNGKVIGLSITENPSEDVTEAIQSLSEVTERGLIDVDEVII

SEQ ID NO: 4347 - protein, 559 aa, synthetic construct
MKTKLYSYIRFSSMRQSDGSSYERQIRMAREIAAKYDLELVNDYQDLGVSAFKGANSKTGALSRFLDAIGRSVPVGSWLFIENLDRLSRADIVSAQELFLSIIRRGITIVTGMDNKIYSLDTVTANPMDLMFSILLFIRGNEESQTKRNRTNSSALIKIKAHQENPQNPAVAIEEVGKNMWWTDTTSGYVLPHPVYFPVVQEIVELRKNGRSTAEILDHLNETYTPPPAVSNKKHSKWSRAMVERLFHTRALIGIKEISVDGVNYELKDYYPRVIDDPTFYHLKKNIGARAWNFGDKEEVKPIPLLSGIGLLKCDHCGCAMVKVKGTNKRSDQYRYTCDATRSRRLDCEHPNWSFRGDQLEKAVLQLLADKIWIAEDKANPVPALKVQVDEISRKIDNLIALSAMTGATKELADQITTLNSERETIYNQIKMAEEEMYSVDSQGWEKLAEFDLEDVYNEERLKVRFKIKQALKRIGCSRIDRNKNLFVLEYIDGKTQRVVIENSRGTRKGQIFVDLKTINDRQILESNGLVLHPCLDMLTDKNWKPEEEIPGPLQEFGI

SEQ ID NO: 4348 - protein, 509 aa, synthetic construct
MRRAISYIRFSSERQLKGDSVRRQSKLVTDWLDKNPEFYLDSSLSFKDLGKSAFSGKHLKGGLGDFLTAIEKGLVKAGDTLLIESLDRLSRQDIDIASELLRRILRAGVDVVTLSDGEHYTKESLKDPLSLIKSILIMQRAHEESLRKSERVQAAWNRKKELISEGIKVSRRCPAWLRLNDDRRTFTIIPDKVEVVKRAFDLRLQGLSFWAITRTLNDEGHLSLNQYTPKQKGWSDTAVKKLLRNRAVIGCFTPAGREEVQGYYPAIISESLFYRVQQLNTGQYGRASVSSNPLSVNLFRGIIKCSECGATIVLGGYALKRFGMYRCPNRSANRCSAKAISRKQTDATILYMLALCDRFETENTDTIDGLKIQREDLQRKISKMAELAIELDDMTIITEKLRDMKNALSKLNHDIEEETKRIKAITTGSLKDIDRTTKEGMIETQLLIKGVLKEIVIDAAKRRCKVTFHNGRIIDLPITENPSEDVTEAIQSLSEVTERGLIDVDVVAI

SEQ ID NO: 4349 - protein, 507 aa, synthetic construct
MKRVISYIRFSSEKQSRGDSLRRQSKMVNDWLKAHPEYYLDQDLSFRDLGVSGFTGKHLKGGLGDFLTAIEKGLVKAGDTLLIESLDRLSRQAVDRASELLRNILRSGVDVVTLSDGEHYTRESLRDPLALIKSILIMQRAHEESLRKAERIQAAWDAKKEAAKAGIKVSKRCPAWLKLNDDRKSFSVIPEKVETVKRCFQLRLEGKSIWEIVRTLNAEGHQTLNQYKAGKFGQTSVQDLLKNRSVIGYFTPKGCEEISGYFPPIIPETDFYKVQQLSYSRYGRKPASDKPLSVNLFKGVIRCSECGHALIITGFGDTRNGIYRCPLRNENRCSAKGLSRKQTDGTLLALLSRLDRFDSDMTNTIDTLKLHREHISSNIEKLVQLSLEIEDLSAITNKLKQLKNELSQVDADIEKETQRLKSIDVGCLSDCDLTTKAGRIEAQLIIKSAVKEVVLNTAKRRCKVTFHNGKSITLPITENPSEDVTEAIQSLSEVTERGLIDVDVVEI

SEQ ID NO: 4350 - protein, 587 aa, synthetic construct
MPQLYSYIRWSSERQQKGTTRQRQVIGAKEFAIANGLELVEIEDPGVSAFRGKNTTHGKLGDFIDAVRQGAIPPDSWLYVENLDRLTRQEVTTAQKLFIELLDLGLTLVTGMDKRVYTLESVNKNPTDLMISLLLFSRANEESKTKQARTIGNVESLIERHRQGLPVNIKSCGKHPFWIDDSGSQYESVKRHTIYWEIAREAIELFLSGYGIYKVKRFLDEKYPNGLNGKEWGYQVLKKMRESRALIGERQINIGSHTYTLRDYYPCLCKNEVEFLHLQELKGQNSYKSKKNPLKEQIKLLSGLAILRCSKCGGTMSSFMNKGKPRYICLNGRHLQKGCVGWSLTAPLVDHCVIIALLMGYMDANRKERQDTSDISALIEAKNTSVGELNVSITNLVAVIEAGVNVSELASRLKVLSTERETFLKEIERLKERKALIDSKGSFEVSMMDFINLIHWNVLSDYAHESRDKIRSTINKIIEHVIIDKTDGCITIKIKCRGSDEQLIFCGIGRKPHWKFDIALYVEQDTDGDTTFEEKSILPMANQLMEEATKQFALIREGYISYFDKICKILAAIGYPDIDGSAFWPNR

SEQ ID NO: 4351 - protein, 507 aa, synthetic construct
MKRVISYIRFSSERQAKGDSLRRQSKMVNDWLKAHPEYYLDQDLSFRDLGVSGFTGKHLKGGLGDFLTAIEKGLVKAGDTLLIESLDRLSRQDIDIASELLRNILRSGVDVVTLSDGEHYTRESLKDPLSLIKSILIMQRAHEESLRKSERIQAAWNRKKELISEGIKVSRRCPAWLRLNDDRKSFSVIPEKVETVKRCFQLRLEGKSIWAIVKALNDEGHQSMSQYKPGKFGQTSVQDLLKNRSVIGYFTPKGCEEISGYYPAIIDETTFYKVQQLSHYRYGRKPVSDKPLSVNLFKGVIRCSECGHALIITGFSDTRNGIYRCPLRNENRCSAKGLSRKQTDGTLLTLLSRLDRFDSDTTNIIDTLKLHREHISSNIEKLVQLSLEIEDLSAITSKLKQLKGELSQVDADIEKETQRLKSIDVGCLSDCDLTTKAGRIEAQLIIKSAVKEVVLNTAKRRCKVTFHNGKVIDLPITENPSEDVTEAIQSLSEVTERGLIDVDVVEI

SEQ ID NO: 4352 - protein, 507 aa, synthetic construct
MKRVISYIRFSSEKQSRGDSLRRQSKMVTDWLKAHPEYYLDESLTFRDLGVSGFTGKHLKGGLGDFLTAIEKGLVKAGDTLLIESLDRLSRQAVDRASELLRNILRSGVDVVTLSDGEHYTSESLKDPLALIKSILIMQRAHEESLRKSERIQAAWDAKKEAAKAGIKVSKRCPAWLKLNDDRKSFSVIPEKVETVKRCFQLRLEGKSIWEIVRTLNDEGHQTLNQYKAGKFGQTSVQDLLKNRSVIGYFTPKGCEEISGYYPSVIDETTFYKVQQLSHSRYGRKPVSDKPLSVNLFKGVIRCSECGHALIITGFSDTRNGIYRCPLRNENRCSAKGLSRKQTDGTLLALLSRLDRFDSDMTNTVDTLKLHREHISSNIEKLVQLSLEIEDLSAITSKLKQLKGELSQVDADIEKETQRLKSIDVGCLSDCDLTTKAGRIEAQLIIKSAVKEVVLNTAKRRCKVTFHNGRAITLPITENPSEDVTEAIQSLSEVTERGLIDVDVVEI

SEQ ID NO: 4353 - protein, 538 aa, synthetic construct
MSQFAISYTRFSSGSQRHGTSLERQQELSNAYCKEHNLTLIQSFHDGGKSGFHGRHLAADGELRRLLKMLDNGDIPKGTHLLIEQTDRLSRQPLMQAFSLVTNLLEKGLVIVTLDDKQKYTYEGDQTQVYMLAGRLHRGYDESRSKSERLSKVWANKQKEMEEGIAPKMRLPFWLARDSSGKVIELSSWVSMIEEVLNLAIEGHGGADIAAKLNGEGRLTKDGVDWNSSKITKLIRNKQLIGWHTRKSDKTTYLCLPPIVSQELFSMAQKALDSRTRTRGNSKQWNSALSGLTTCGACGGTLKLHGRPQSRTAVCRTAVDGGSCTNRKSIRYKALILGSVASLNTSLANLMMNQPIKEQPQEKRELEAKLAKAQVKVSNLTLAIAQLESPAALSAITRELDTASNEIEKIKRSLSELDPVEHPDDKAFRLLWTAREEVPSLVTEVLEGSKAAANKLNTYLHSIDGFKISLQGGVASVLGTNIWFEKKELKIHNEYVGEVSIVKADEATKTSTFVTESGHDIAIEERGTPLGGGYYLAI

SEQ ID NO: 4354 - protein, 449 aa, synthetic construct
MMDNLALAYYRVSSKRQGDRWSLVAQQEAVQKVARQRSYSIALECQDVKSGSSMDRSGLRKILAEVETGQYNYLLVWRLNRLTRSLADFLKMTAICQDNDTQIVSLMEPAQEDAIGRLQQQIYVMFGEWQLGVLKDNQKMAYQQKMNEGKLLSSSVPLGYEYVAGQAKVVAAESQIVQYIYAEYSLGRLGYRKLAECIHQKFDYALTPNGVAKILRNRVYTGVLENQYGRQANLFPRIIEDRQFEHVQRIRQSRQVTKKHASNEFLQHKVVCPVCGGSLTPTHMIRGHRQYDYWYCARSACSGIRINEADLLAQLDAHLMTLIDNHLRERLLEEIRQRSVMKPMVSQMIDQTKLFQQFETGELSSEELAEQLAQAKVIKQRVTTNQIAQKQLELKVRGLLSKLDQTGTEGLLAGLDIDHIEINGLKQVTGLFIQPVPKINLFKLGDVDT

SEQ ID NO: 4355 - protein, 548 aa, synthetic construct
MIVSESVGKKAKRAVGYVRVSTAEQADEGFSVAAQGELIRQECRRYGSELQFVKLYADEGISGKSIKRRPQMQQLLADVQAGEVDAVICWNISRIARNVANLLEIVDIFERNDVSFISINEKMDTQTPAGRLMLQIMASMGEYERNNIAENVYMGSRRRAVEGWNNSGLVLGYDNVVDENGNHTLQINPDEAKIIRHIFDLAVLGKGLRAIANELNQLGYETKRGNSFSTTAVKAILTNPLYVGKVRYGQYRHWDKKRRHGKQADYVLVDGQHPAIIEPQQWSRVVSLMKQRHKLPAWTRQGSNVLTGLLRCPECGGPMAAANTTNRLADGTRKRIRYYSCANFRNKGATVCHANSIRAEVAERLVREKLLQVLRLPKIGQQVIKQMKDTRQKRCQSLKRQQLSQQAEQTRLEQNVQEYEQLMADNHELQAAIRPRMEALENQLDQLHADHQQVAKQLAQVNQLPKPKSLDSLLALVVKLITPAKKDTLKQLYQAFIQKITFNRQQKLVWITVAFDDDVIQQLKTQSKAVELDKGSTAFSVPAFTFTF

SEQ ID NO: 4356 - protein, 554 aa, synthetic construct
MKKSAIYVRVSTYHQIDKNSLPLQKKDMINYSKLVLGIDDYEIFEDAGFSAKNTDRPAFQQMIKRVKQGEFSHLLVWKIDRISRNLLDFCSMYDELKEHGCIFVSKNEQFDTSSAMGEAMLKIILVFAELERKMTGERVTSVMLDRASKGLWNGAPIPLGYKWDDKIKFPIIDDEEKRTIEIIFNEYKEQESTSYIRNLLNANNIKTKRNGSWTTKTVSDIIRNPFYKGTYRYNYRETARGKKKKENEWILLEDNHQAIISKELWNECNNIMDENAKRNNSKFRDNSKVHIFAGLIKCGECHNNLYAKQDKANLDGFRPSLYVCKSRYNGLGCTQKTISENIIGTFVLTFISNMINLANINKKMLSINLLEHELLKDKCFENIIGIKEIDDIMTSILYAPKNLFTPQKKNEKHTHTLIDLDSLSSNLKKQQRALEKLEDLYLYDDADMSKKDYLLKKRTIEDKITEITKKIDETSTTDSSAYSFNFILDAATLEFSKRLLQNGNINMKSLIQSVGRDIIKEFVNTLIYKIILLNKEIKSIEFKNGLKLTFVYNS

SEQ ID NO: 4357 - protein, 536 aa, synthetic construct
MKAAIYSRKSKFTGKGESIENQIEMCKKYATDNNYTEISIYEDEGFSGKNTNRPEFKKMMKDAKAHKFDAIICYRLDRISRNVSDFSTLVDELKKLNIDFISIREQFDTSSPMGTAMMFISSVFAQLERETIAERIRDNMYELAKTGRWLGGTPPYGFISEPDYYLDANGKQKKMVKLSPVKSETNLVKSFFESYLKLGSLSKLQKHLIINSINTKRNVAWDVKALQLLLRNPVYVKSSELVISYLESKGATVFGEPNGNGILSYNKKDSKDKYKDISDWILSISKHEGIIDDLLWLKVQKQLDRNKDLAPRLVSNNSSGLLNNILYCKKCGGRMIQKQGHISKKTGEVLRYYVCLTKTNSSGVLCDCKNVRADKLENDIVDELLKETTDESDLIYTIENYKESLKSDIYSKKDLDSIKKQISQKQIQIDNLLEKISLNPNLYDLFEKKLEELNSELKSLKFKKFELESSNENTKLAIKEITASTEMILNFSKLWKSADFPMKKLLLNTYIDKIIYDSDTKSGRMKLFNSKKKGAL

SEQ ID NO: 4358 - protein, 567 aa, synthetic construct
MEVFLLKAAIYSRKSKFTEEGESIENQINMCIDYAKNLLGITEYEIYEDEGFSGSNTNRPQFKQLIKDIKNKKFSHLICYRLDRISRNVADFTSTLEILNEYNCSFISIKEQFDTSSAIGRAMMNVSATFAQLERETIAERIKDNLRELSKTGRWLGGPAPLGYKSIEVENNDSTGKNRKKHILKVDEENSYIVYKVFELFLKYKSFQTVSITLENEGIYSRTGKVFSRQLVKQMLNNPVYVIADQKILNYFKECGCEIYKQDYINGKYGIMPYNRRDKKGKMVPVKDWIISIGEHDGLISSDTWLECQNISKEIKTIVSNRQCTSYHALLSGLVICKHCGSSMAPRKQKNIAADGTETLYRYYSCNLKNKAGNRCDNTALNAYDAEDYVVKKIKSTTQEDILGLYLSSKERSDIKINNKKMIEKLTAQINANKKSISNIVRNIAKFDDYIPDVINSYENEIEKISNENKLLQDKIINLQNENENIIDLQKDISQIVTLYEDFNRLYDDADDFEEKKRLIRSVVKFVVWDSDTEVLDVIPIGSSLKRSDFGNFAFRSTEQKKWPMLR

SEQ ID NO: 4359 - protein, 544 aa, synthetic construct
MSAYTGSNIKEGELGRFLADVNAGLIPTGSALICYSVDRLSRQNPWVGTHLISTLIGAGIEIHSVAENQILRSDDPVGAIMSTIYLMRANNESVIKSERAKKGYEKRLKESITNKKVLTRQMPRWLYDCDGKYAIDPNMQNVINFTFDSYIAGQSTGFIAKELNNRGLMYGNTSWRGSYVAKLIRDERLIGKHIRYSKQIKGVKRVVIETIPNFYPVVVDVEKFFVANNMLTSVAKNIRGRTRVTYGDDSILRNLFNGVIKCGVCGGDTSVVQNTRKKIVNGEATYIPYKTFLRCRTRYELKNCVQSDIRYEVIERAILNHLMRLDISALLSVPVDNKIESYRTELELCKAEEVELHTLIEQREREGKRVRPRTIKAYEDVSDRIDELNKLIESYVEDTFVPEFNVDLNSIADVSNVSDRSLIKKGIATIAESICYKRISDFILVEIKYRNLSVKHVLVIDNKQSKVVVNFSIEYHENSHDYTCNGFILKYVKSPEEFHLMGVNIEDYAHMMNFVDFISDNEAKKIKEYLVSNLSRVLISNIPE

SEQ ID NO: 4360 - protein, 497 aa, synthetic construct
MDAIYARQSIDKKDSISIETQINFCKRESTSPDGYKIFRDKGFSGKNMKRPDFQRMLTEIRSGIIKRVIVYKMDRFSRSILDFSETWNILQEFGVEFISMNEKFDTTTPMGRAMLYIIMVFAQLERETISERCTDNYYERIKNGVWPGGPAPFGLKNAEIINEGYRMSTLNPDSDLEIMIDNFQEYEKEGMSLGKLAKKRTQQNLKTNKDIVWNNISLSRLFRNPVYVKADILVYMYLKEKGYSFSNPVEEWDGTKAAHVVGKKQYISNGNRINTKAPRQTVSLLNIPGTIDSSLWLACNRKLDHNAQIKNSGAGKHTWLTGLIKCGQCGYALRITTYKNKENKIMKYLMCSGHSNLHCCDVKKFDLLVEDLEELVAEELNKAIEETKVEQIEMTDQTMDNDKKIRLAEIEEKIDRLIQAISEATNITMKYLNKEIEKLDSEKKQIMGNLEGHVQKRDRIKPIVFSELDFEGKKQIAQNYIKKILVYKDKMDIIWKV

SEQ ID NO: 4361 - protein, 562 aa, synthetic construct
MPTATEAPVTTPITGDGLNDAQRAVAYIRVSTKEQAERGGFEEGFSIPAQRDAISRAAAEAGAVIVEEFIDAGETATNARRPDLQRMLAFIKSNRVDLCIVHKLDRLARNRADDVAIHLALRQAGVTLVSVTENIDETPTGMLLHGIMSTIAEFYSRNLAGEVTKGLQQKAAAGGTVSKAPLGYLNVRERDPQGREVRTVTVDPERAPLVAWAFEAYAAGNRSLSDLADELAARGLTSLPTPKRPAKPIGASTLQRMLRNPYYKGDIIYKGARHLGTHDRLVHPTVWTKVQNVLDAHNVAGDRTQTHEHYLKGSLYCGCGARMTINKARNRHGETYPYFICLGRHANTTACERQAVLVSTVEHLVAEHYRTVQLSPEAADALTGMIEDIFDRIDAESEAQRRDLTRQKERLEDEQLRLLQAHYADAISLPVLKKEQHRIEGMLADIDQRLNTYRAGREDAKLRLRAYLHLATNAHAFYLACDEGRRRLCNQAFFTKITLTENLDVTSEFTGVYETILDPTNRLHAEFWQRTGQLHPDIDLNNETTLPTDHGGRVGTSTKWWS

SEQ ID NO: 4362 - protein, 682 aa, synthetic construct
MSIIQTEDKITALYERLSRDDDQIGDSNSIVNQKKYLEGYCAQQGYTNFAHYTDDGFSGGTFERPAWKKLVADIEAGKVARVIVKDMSRIGRDYLQTGFYTEVMFRQHGIHFIAIANSVDSNDQNSNEFAPFLNIMNEWYLRDLSRKQKTAIRVKGESGKPTTNSAIYGYKKDPNDKHHWLIDEEAAAVVRRIFRLTIEGKGPYDIARILFEDKVEAPAVYFARKGIGVWKSKTEFAYPYNWSGYIVGQILSKPEYMGHTVNFRSHKLSYKDKTSIPNPKEDWLIFENTHEAIIEPETWELAQQLRKTPRRIDTIGEANPLTGLLYCADCGAKMYNHRSRGGTEGTPYPSDFFDCSSYTLAHQKHGKDCCGHYITTKSLRILILETIRTVSQLAIADREKFTEKIRAASQVRQVEAAKDAKRKLNKDRKRHSELDTIIKKLYESFAVGRISEERFDSLLAEYEVEQKNLSAQIAETEESLTSYEEDTARVEQFLALAEKYTDFSELTTPMINEFIDKIIVHAPERIDGDRTQEVEIFLKFIGKFELPAPELTAEEIKRQEQLRQHRIKSRERYQLIKAGKHTVGQPFQLTCKCCGQGFESKSSAAMFCGPNCRAKFYRQEAAENRRRDCTCENCGKTFSTTRSNVKYCSDECRYEGHIKGQRVRNAANRKEKLAAETVTSPA

SEQ ID NO: 4363 - protein, 567 aa, synthetic construct
MSRSPKAYSYIRFSTPKQAQGDSYRRQLELATEYCQKHQLQLSDKALEDFGVSAYRGSNRTNGALGRFIDAVKDGKIKEGSYLLVESVDRLSRQAIEDALRQFLEMIGLGIVIVTLIDGRVYKSGAVDITSLLVSIVSMARANDESKTKSKRSSEAWENGRKHARENNQVMKNSRLPSWLKLEDGKIIAIPERVKVVNEMFELAKSGCGYEQIAKIFLEKGYKTFGKKADWRPAGIQAVIKSESVIGVFHPHQIKDGKRIPEGDPIWGYYPAIVEPMLFNEVKHLINQRNNHSGSYRKGTYNNLFSGILRCQCGESLRYQNKGRAGSPRNYLVCPKQNITGCNLPNMLYDKVEPQLLQAVSILSEVMQRRVGENEKFLSLQEQLATLRAQLDVESRKKDKAAQSILDFDDDATFRNAFVKSKASCKVLEEKIRELENELMSLELSEKTILNLLKPEELISTEQRQLFNSQLKAVLKEIKFSYDGYDLAAVFKGLDDQFMLEQAFKPKLAGSSVRDLSGEELLRTTSEAPYIDAAWVKGEIEEYALHRKDVSSGLDDEFEDLSLQESK

SEQ ID NO: 4364 - protein, 557 aa, synthetic construct
MKNKKAYVYTRVSTSMQIDGYSLDAQEERIKQYAKAYGIEIIETYKDAGKSGTSISGRNEFIAMLNDIEAEKDKVDYVMVFKLSRFGRNAADVLQSLQVMENHNVNLICVDDSLDSSKDSGKLVITILSAVAEMERENILSQTMEGRKQKAREGKWNGGFAPIGYSLDNGELVVNEDEAKAVRMIFDLYANSDMGANGVSKYLVSLGINKPIRQNGKNPYFSASLIRQILDNPVYNGKIAYGRRKTIKDKTTGKIKLEKSDHYIIAQGNHEALIDDELWNTVQEKRKSQAKKYEKINRGKDERVHILSNLIKCPYCGAGLYGNKSRKRNKNKEGEHYKDYYYYGCKHRQMMNGHKCTFNKQIRAELIEKEVETIITQVVSNPTFAKKIEEKINIQIDTKEIDEVINKHLAKIRQLTGTKASLINQIDSLNFEDKHYDRKYTDLNLRLDAIYDQLEYAEMQLNDSRKRKEAILEEKITSDNIYKILVNFNSLYTVLSDIDKKRLLNEMIEEIQIYDEKTEKDTWIKSVVFKLPLIDNEIDFGLDNKDNVEAIALIQKM

SEQ ID NO: 4365 - protein, 520 aa, synthetic construct
MNSKVIVIPAKKKKGNSIRESEKKKLRVAAYARVSTDSDEQATSYDTQIDHYTNYIKKNPDWEFAGVFSDEGISGTYTKKRAGFNKMIEEAMEGNIDYIITKSISRFARNTLDCLKYIRKLKENNIPVYFEKENINTMDAKGEVLLTIMASLAQQESQSLSQNVKLGFQYRFQQGQVQVNHNRFLGYTKDEEGKLVIVPEEAKIIKRIYREYLEGASLRDIKVGLEKDKIVNGAGNKKWHVSNLNQILTNEKYMGDALLQKTYTVDFLNKKRVKNDGIAPQYYVENSHEAIIPKEIFMRVQEEMDRRANMVSGKGKRRIYSSKYALSSIVYCSKCGDIYRRIAWNNRGKKYTVWRCCTRVTHGPDACEARTIREEDLQEAVVEAINQLISESSELKEIIKENIEKAITGDGSSQIEEIDKEMLEVQEELLKVANAKKDYTDLADRVEELRNEKEKILLNIAEEKNEQNRLKELEEFLDNQELEIESYDEDLVRKLVDKVVVYDEELKIVLKSGVEVNVCV

SEQ ID NO: 4366 - protein, 520 aa, synthetic construct
MKKITKIEANQKEESILRVAAYARVSTDEDAQLVSLKTQKAHYEKMISENDSYTFAGLYFDEGITGTKKECRDGLLKMIKDCEDGKIDFILTKSISRLARNTTDCLEIVRRLLDLNIGIYFEKENIDTRTMESELMLSILSSLAESESRSISENNKWSIKKRFQNGTFIISSPPYGYENIDGKMVVNEEEGKIIKEIFEQYLSGNGTHKIAEDLNKRKIKGQKGASWHGSTINGILKNEKYIGDVIYQKTYTDDTYKRHKNNGEEDQYKIIDNHEAIVSREDFEKVQDLIKIRAIAKGNGEDTKRYQNRYSLSGKIKCGECGSTFKRRHHYNGKVRYIAWTCSEHLRDINKCSMKFIKDKDIKVAFITLVNKLIFGKDSIFTPLLKSLKRMDSKGEVAKINKIEEGLEKLKERKEVLSKLITSGVLDASIYTKESSEISSEESFLLREKERSKKAILGNDEEIRELEKLIGILDKSKMIDHFEDDLFEEIIDHIQVVNRETLDFHLKCGLVLREEVKNNV

SEQ ID NO: 4367 - protein, 626 aa, synthetic construct
MRNEKITPLYERLSRDDELQGESNSISHQKQMLEEFARRNGLPNPTHFTDDGVSGTRFDRPGFLAMMEEVEAGRVEAIVIKDMSRLGRDYLKVGQVMEILRQRGVRLIAINDGVDSLKGDDDFTPFRNIMNEFYARDTSRKIRSVFKSKGMSGKHLTGTVIYGYLWDEKREHWLVDEEAAEVVRRIFSLTMEGYGPYQISKLLSEAKVEIPAVHLARFHEGVNRSKPVKDPYGWGSSTIVNILKKREYLGHTINFKTRKHFKDKKSHYVDESEWTIFENTHEAIINQETFDNVQRIRANVRRYPDGWGEAHPLTGLMYCADCGGKMYVHRVNNGKRDPQFTCSQYSKYPIGSLCPTQHRIRAEAVLTLITDMLRAIAEYSRNDRAEFIRTVQETQAAQQTADISKKRKRLAAAQKRAGELERLICKIYEDNALGKLPDARYEALDAQYAKEQDALNAEIAELEKAVIGYEQGRKSAEKFIALIDKYENFDTLTNTMLNEFVEKILVHERARKGSQDTTQEVEIYFNFVGRYIPPALQPVPLTPEEQEELRKKEERKDRLHQNYLRRKANGKQKEWEERYNARRKAQVEAAKAAIRAEDMEKGIFTTVSQLPRQEPRKATVSASAAV

SEQ ID NO: 4368 - protein, 558 aa, synthetic construct
MLQTDKITALYCRLSQEDMQAGESESIQNQKMILQKYADEHHFFNTRFFVDDGFSGVSFEREGLQAMLHEVEAGNVATVITKDLSRLGRNYLKTGELIEIVFPEYEVRYIAINDGVDTAREDNEFTPLRNWFNEFYARDTSKKIRAVKQAKAQKGERVNGQVPYGYIADPNDRNHLLPDPETAHIVKQIFAMYVRGDRICEIQNWLREHEVLTVAELQYRRTGSHRHPRPHPNCIYNWPDKTLYDILARKEYLGHTITGKSYKVSYKSKKTKKNPEEKRYFFPNTHEPLIDEETFELAQKRIATKHRPTKVDEIDIFSGLLFCGDCGYKMYLQQGAGTLERKHAYTCGKYRNRIRTGELCTTHYIRKSVLKELVLADLQRVLSYVKEHEQEFIETANECSAKAVQKTLTQQRKELDKAQSRISELNILFRKLYEDNALGKLSDEQFAFLTSGYDEEKKTLTRRIAELSQEIDNATERSADVKRFVALVRKYTAITELTYENVHEFIDRILIHELDKETNTRKIEIFYSFVGRVDTGDKPTESISYFRQIGADVKSYAI

SEQ ID NO: 4369 - protein, 515 aa, synthetic construct
MAEVQVIPPKAARPDTLRVAAYCRVSSDSADQLHSYAAQIRAYTQAINAHDGWDLVDIYADEGLTGTRMDKREDFNRLMADCRKGKIDRIVVKSISRFARNTRDCLATLRELSSLGVTVKFEKENIDTGTLTSELMVSVSASLAQEESISISKNQRMSYQRRMERGEFITCSAPFGYQIVDGKNLTIVEDQAEIVKWIFAAYLRGYSSEWIAQELSENGPAPLHGGQKWHQQTIRKILTNEKYIGDALCQKTYTTNTFPYRRKDNHGEADQYYVEHTHPAIISYEDFQKVQELLKRRAERQSIPHDQTPLARKIICGQCGTLYMRRISKAGYVSWVCRKHDRKAADCPNGRISEDSIHAAFLRMYRKLRTHDGIVLAPVLRQMDTLSDALHRGNPAMLAVNTAIATASEQSYHLTKLHTAGLLDKAALSAKQAELNAKLTELRRERRKLLCNEDIDEQVDAIRLTIDTIRNGPETLSSFDEALFTKLVERIVVDTQGTIRFQLYGGFEFQETLEA

SEQ ID NO: 4370 - protein, 545 aa, synthetic construct
MEQSSLERTVHRIPALRSNVAGNKTRLHGRQRVAAYCRVSTDSEEQINSYTAQKAYYTQKIEESPDWELAGIFADEGITGTSMKKRKEFNRMITACKRGRIDLILTKSLSRFARNTVDCLETVRMLKARGIGVIFEKENINTLTESSEFLITLFSGFAQAESESLSSNIQLGIRMAMKEGKVNFHYRSMLGYQRGADGKPEIVPEEAEVVRRIYRRYLEGCSEGQIQRELTQAGVATAKGVKAWSHQIVHNILTNEKYAGDALLQKTFTTDCISKKVKKNTGELPQYYIKDNHTAIIPRDIYQRVQEEMARRTSRRKILQKSGKTEQGKYSAKYALSERLVCGECGSPYKRCTWARNGLKRIVWRCVSRLEFGKKYCHNSPSMAEDKLHTAILTVLNRVVEASDGLQDELAETLRMVCTPEGDGNNLLELERNMEALTARQNTLLDQVLAHMDDLTLTEQLKALLEEKQHLQTRIDAAKKKAANRINEDSRMAEYTAYLEEHLNGFPHYDDEIVRKMIERVTVVDSEIIRVKFRYSDLEIEQAVC

SEQ ID NO: 4371 - protein, 566 aa, synthetic construct
MSISNPVMADCPPMKGAETMLRQSGKITALYCRLSRDDELTGDSNSIVNQKAILSKYAKENHFSNPLFFVDDGYSGTNFNRPSWSELLEKIENGEVSTLIVKDMSRLGRDYLKVGFYTEVLFVEKGVRFIAINNGIDSANQQDSDFTPFLNIINEWYAKDTSKKIRAVMKSKGEAGEHLCTNPPYGYRKDPENKKRWIIDPEAAEVVKRIFALCLDGYGPSQIARILKDDKVITPTIHFQQTGRATRNAPPDNPFNWTGDTIADILERPEYQGHTVNFKTYKQSYKSKKTCNNPEEKWLVFENTHEAIIDADTWARVQELRKNKRRPTRTGKTNMFSGIVRCADCGEKLYYCTSRNFEARQDHFVCSTSRLKGKEVCATHFIRAVVLERGVLAHMRMTIACVANHEEQFRKAMGAKQKAEAKRELAAKRRQLTQAERRIEELDRLFKRIYEDNVGGKLSDSRFQMLSDDYEQEQKELREKLLRLNEEITEQEEQAENIDRFICKVRKYLDLNELTPTILNDMVKAVYVHAPDKSKGYREQQIDISYDLVGILPASLLIDLQNGETA

SEQ ID NO: 4372 - protein, 535 aa, synthetic construct
MAEKLMTNGSMALREKQYRVITIEANEKPQNAKLRVAAYARVSSASDDQLNSFAAQNHHYSDLISSKDNWRMVDIYADEGITGTSAEKREDFQRLLADCRRGLIDRVLVKSISRFARNTKECLETIRELKSLGVGVYFEKENIDTAKMSGEMMTALFASFAQAESESISDNMRWGIQKRMQAGTYIPANLPYGYTLQNHSIHIVKEQAVIVQRIFSEYLSGKSTERIAFDLRENGIPCKSGEVAWDSTAIRYIISNEKYIGNSVWQKYFSTDTLPYKCRLNRGQKVSYYAYGTHEGIVSKEDFERANALMKSRAQKITLTKKSPYAFRKKIVCGDCQSLFRRKVVRGIIYWVCIGHDKKRHGIKCSITPITEDEITSAFIRLYYKLKHHSKPLLMGMITSLQAIRNRRMLWSMDVIELNKQISDLTSQNQMLATLKQQGLIDPDIFISQSNELTERLRAVKLKKERLLAVDGDNTIDQTRDLMEILDDGPDFLDSFDTELFGELVEKVIVESNERIRFRLKNGLELAETIERTVH

SEQ ID NO: 4373 - protein, 541 aa, synthetic construct
MRESPPKVITIPAKPEVASRQAVQRQLRVAAYCRVSTDDEEQLTSYEAQQNYYTDKIMTNREWTMAGIFADEGITGTSARKRPEFLKMIRLCKQKKIDIILTKSISRFARNTVDCLNYIRALRELGIAVIFEKENINTLEADSEILITMLGAFAQAESESISANVRWGKRQAMREGKTIIQYNRLYAYEKGENGKPKIIQEQAEVVRSIYDQYLSGASLRMIKDRLEAEQIPNVTGGSQWTITAIRSILTNEKYCGDVLLQKTYISDCISRKVIRNTGQLPMYLVQNHHEGIVERKTFDAVQAEMARRSAGKSPSKKNAPTGMTSYASKYALSERLVCGECGTLYRRCTWSKQGRKRIVWRCVSRLDYGTKYCHNSPTLDEEPLQRSILAAINSVMSQKSTLIRQITSAMEMELAPVPGESMSLADIERRLGELNDQTRELVAESARAEDATACTAQLRAIMNEAAALKEKRALIEEQRQSNAQAVRRIEDAAAAMAQASTHISEWDEALIRQLVDTVKVNSAEKITVFLRGGVQVEQDMI

SEQ ID NO: 4374 - protein, 513 aa, synthetic construct
MPQVKLISPITRQEIRKIRVAAYCRVSSNSADQQNSYANQIRVYTSLIQRKKEWELVEIFADEGLSGMNAQNRTEFQRMIKMCEQHQIDLIVTKSVSRFARNAKESLEYVRKLKLLGVGVQFEKEGIYTLALGDEMLLNTFSAIAQEESKAISQNQRLSIVKRMQSGEYVDSNAPYGFRLVDKALVVYEPEAAIVRMMFENYLSGQSTSEIARDLNSRGIKTKTGKSTWRSTKVAYILGNERYCGDCKYQKTYRDTTVPFKQFRNRGQEDMFYATMTHAPLIDRDTFDKVQLLLKKRHDVFGKTTTQNIYPLTSRIQCSECGSYFRRRQVSGTAKWGCSKHIQDRTQCGSNYYSEERIYDAFIAMVNKLRFSEYDILGQTLLRLESAELKRKQKNTAAREISRSIADLNAKLVMVEQLHAKGYLKDEIHKAQVQEINDQLRRLKRERQCEFSSGITHMIEELTRLKKLLEEFEEPLDRFDEKLFTEIVQAISISRRDEMTVTLIGGLRFTEML

SEQ ID NO: 4375 - protein, 547 aa, synthetic construct
MIVTKIPKKTISVIEPKRSLIVNREQYHQRRVAAYCRVSTDSEEQLTSYTNQKKVYTEMIAAKSEWEFAGLYADEGISGTRADKRPQFQKMINDCLSGKIDYIITKSVSRFARNTVDCLDHVRMLRARGIGIYFEEQNIDTLQIDSELYLVIYAGFAQSESESISKNVTWTFRKRFQEGKPIFNYKCLLGYRKGADGEPEIVPEEASIVERIFNMYLSGETINRISTKLREENLQIPGKRFSFSASMIKGILRNERYCGDSILQKTVTIDCIGKVRRKNTGEAPMYYVQNSHVGIISRELFHKTQEELARRMSREPNSTKTATTATGKYSRYALSNVMICAECGSRYKRVTWTSRGKKRVVWRCISRLDYGKRYCKTSLTVDETALHAAIVRAINRFNEEDESTYMALMRATIGEAIGLTGGTDEIDLLRRKIDGLNRKMVSLINESVESGEGIESHEAEFKELSDTIELLQGRIQKLEEALASDQVNDSRILQLQQIIADRASKKMEYDDTIVHQMIECVKVYPDGRLDIIFGGGYLIEERPEKES

SEQ ID NO: 4376 - protein, 474 aa, synthetic construct
MKVAIYTRVSTIEQAEEGYSISEQQDKLKKYCDIKDWKVARVYTDPGFSGSNTNRPSLQQLISDCKNNMFDAVLVYKLDRLSRSQKDTLYLIEDVFNKNGVGFISLSENFDTSTAFGKAMIGILSVFAQLEREQITERMTLGRVGRAKAGKAMSWANCPFGYIIQKEIYEIDPFRAEIVKRIYRDYLSGVSITKITQNLNEEGHVGKNADWVYQTVKQILKNIAYAGYIKYKGEIYPGLHKPIVSISDYKKVQAELERRRITQAQLFNPRPFRAKYMLSGLMRCGYCNSVLQIATSQLKSGILSHRYRCPSSNPHKHSTNKRHDFDCGFKFVRKNEIESVIISEIKKLPLNMDKVINSQETKDNAKKIKAIKLELQQIEKKQDKMVDLYLLDNINVDELNKKNDELSKQKENLQKRLNNLTDDKKKEKIEDFIKNAKEAKNIDKLDYEKQKVIVRNLISGIKVFNDKVEINWNI

SEQ ID NO: 4377 - protein, 524 aa, synthetic construct
MPKAISYIRFSSEKQAKGSSLERQQTMLAQWLESNPEYVLSDLRFQDLGVSGFTGAHLENGFGQLLAAVENGSIEPGDVVLIEAIDRVGRLEPMEMLPLLARIVRTGVYIVTLDDGIKYDRESANTNHLFLLVAKVQQAHQYSETLSRRLKASYAARRKNAVEGVVPKRHTPVWLTSEGELIPEIAPLVKQAFEDYASGIGERRIFERVFKGNSNPLLARMAPSTVKRWMNNRTAIGEWDSIPNVYPAVVEPELFYRVQKRMEAKFSPRGTPNKHGYTGLVVCSECGKNFNTKYFKASDQTSMECSSRARRGAMGCSNNRSIPEPVIELAYLFTYTGHALKALEGQMLTASQKRAMELEGEIGEVNKKITRIVNAITVLEDDSEELTDKLRSLQAERKLLQAEMNGLTHTSISMRDKIVSTTDFNKDMMKANALLQSVGYQLVCHPDGRITFEDETGKHAFHYLGWGRSEDVHKVVLSDGKLVKLGINRPENKLMKKTVKATLVDRAALERIKLSQIKVRWDKQ

SEQ ID NO: 4378 - protein, 532 aa, synthetic construct
MTITSPLPRAFSDVFQSDEIINVYSYIRFSSKAQKMGFGEIRQLEQLNRFFDQYPQARQVERYEDLGVSAFKGKNLKTGQLAKFVERIKSKEILSNALLLVESFDRISRMGGYDALELIISIIQADCAIYTLFDNRLYSKRKKDSSVDISLIQNILERANDESRAKSERISDAKARNLEKGINGGIVTKRCPFWIDYVDGKFVLNENAAAVKKATQLCFDFGFQLIAQELNKENHPKKYSASSVGKFLHSHALYGSFLALKLDENGERTVFNKEIKSYYPALITEAEYHRISAKLKERLDPRLAGRKSDDFKNILRGLVFCKCGSTFRYHAQKSQYVDLVCSASMIGKCEFAKQGKGVRYRYALVEQLFLTFHAQIPFHKIIVKSEDIKALEKEHSEVLGLIILKEKALSNNFSILEKSSESAQKYIMSRIDEVSLELDKLKSAEHQLSVKINSLHIASKSDLKVIEVYRLLVTEKGRIRINNFLHSQNVRLIITPVKKKYFSLEILHEENHIDTIDVTPERYTARLNSHLK

SEQ ID NO: 4379 - protein, 518 aa, synthetic construct
MPKAISYIRFSTKIQSVGDSTKRQSKYINDWLKRNPDYYLDESLRFQDLGISGFSGANAKSGAFGEFLAAVDSGYIEANSVLLVESLDRVSRQDIDTAGEQLRKILRAGVEVVTLVDNEWYTKESLKDSLSMIKAMLVMERAHEESAMKSTRLRSVWAAKRERAANGEIMSKRCAAWLKVSEDRSHFEFIPENVKAVQRVFQLRLEGLSHVKIAKQMNDEGFSTLNQFKSVTGGWSQSSVTELLSNRSVIGFKVPSKSMAVKGVSEIPNYYPSIITDEQFYAVQQLKQGSGRRPSSEKPLLTNLFKGVLRCSECGFIMVVAGVTAKRSGIYKCSMKSEGRCNSVGFSRLQTDKALVQGLLYNTNRLLLNRDNGSAIGALQSELEQLQKQRERLIKLSMLTDDTESMARDLKALNSQIKDAEKAVSEVHQREQSSQLETISHLDLTVKKDRIEAQIIIKRIVKEIRLNTAAKKCDVFLHNGLKLLNFPLDRVVDGEIFLEVLPVLDCDEFDFDTYRMIE

SEQ ID NO: 4380 - protein, 452 aa, synthetic construct
MKAAIYIRVSTQEQIENYSIQAQTEKLTALCRSKDWDVYDIFIDGGYSGSNMNRPALNEMLSKLHEIDAVVVYRLDRLSRSQRDTITLIEEYFLKNNVEFVSLSETLDTSSPFGRAMIGILSVFAQLERETIRDRMVMGKIKRIEAGLPLTTAKGRTFGYDVIDTKLYINEEEAKQLQMIYDIFEEEKSITTLQKRLKKLGFKVKSYSSYNNWLTNDLYCGYVSYADKVHTKGVHEPIISEEQFYRVQEIFSRMGKNPNMNRDSASLLNNLVVCGKCGLGYVHRRKDTVSRGKKYHYRYYSCKTYKHTHELEKCGNKIWRADKLEELIIDRVNNYSFASRNVDKEDELDYLNEKLKIEHAKKKRLFDLYINGSYEVSELDSMMNDIDAQINYYESQIEANEELKKNKKIQENLADLATVDFDSLEFREKQLYLKSLINKIYIDDEQVTIEWL

SEQ ID NO: 4381 - protein, 575 aa, synthetic construct
MRGVIYSRVSTIDQDYSKQTNELKDFAKKNNIDIVHIFEEKESGFNNDRPEFKKVQQLTKDEVDILLVWELSRLSRRSIYIQQQVRNFADKGICIYTKKENLYTLNEDGTENKSAMLLIGFTSIIAEQEVATLKERTISSKRNRIIKEGYSYTYNAPYGYIYDKETKKLSINPIEAEVVKRIFELSANGYSAYRIPVLLNADGIPTKTGKKWTLPTIATILTNTVYKGEAHYKLKGEKPKEGKRYSRTTEYAVVETPAIVTSELFDLSRKMMKERLSRSKSSGVKYNPLLRGLIVCPYCNVKYIFNRRDNLYSCHERYEKATNKTTQCFSKSISINKIDEIIWNLVKILFSKELAAGKTDEQIEPINRELENYKLQVVNLEHKQNELTEKANIIANAAIDIKIQFPNLPDLYLNKLKEVESINKEAGRYLNEIKHLEKLMESCRNKIQAINTLSDESIVVESIVDETEKYDLVHKVIDNIVVYGEGHYTLVVVTFQTGQVAYIGYYSFKRYKYYTIFYPSQSVWFDTEKRLGYIMAMKDSKSLKLSLETVTKEYSITDFINMFDVPENRHYYENQ

SEQ ID NO: 4382 - protein, 472 aa, synthetic construct
MNTKRKVAIYSRVSTLHQAEEGYSIGQQIEALTKYCQAMGWVIYDNYSDGGFSGGKLERPAMQKMIQDAKSGKFDTVVVYKLDRLSRNVRDTLYLVKDVFNANNVDFVSLQENIDTKSAMGNLFITLLSAIAEFEREQIKERMQLGVKGRAKSGKTTAWTTPPFGYKYDTNTQSMTVDHYQAEIVRDMFNKIISGWSIMGITTYMRENYDGKWTHVKVKRILENITYIGKVKYRNEIFEGEHTPILPEELFSKAQKALEERTNKKDNTRPFQGLYMLSHIAKCGYCGTPLKIDTYKPRKDGTRKRTYTCINKNPKRIKTATYNDGKQCKESGRYDVKDVERYVLNEISKLQLNPKSIESLYRDKPEENITAHQERLKKLETKLSKLNDLYINELISMEALKQKSAELLKEKSSLETFINNNKRKINNKPAFEKVAKMDDVFKMSYDDQKKIVKTLIKRVEVKRDEINVIFKL

SEQ ID NO: 4383 - protein, 507 aa, synthetic construct
MKRAISYIRFSSEKQSRGDSLRRQSKMVTDWLKAHPEYYLDQDLSFRDLGVSGFTGKHLKGGLGDFLTAIEKGLVKAGDTLLIESLDRLSRQAVDRASELLRNILRSGVDVVTLSDGEHYTKESLRDPLSLIKSILIMQRSHEESLRKSERIQAAWDAKKEAAKAGIKVSKRCPAWLKLNDDRKSFSVIPDKVETVKRCFQLRLEGKSIWEIVRTLNAEGHRSMNQYKPGKFGQTSVQDLLKNRSVIGYFTPKGCEEIAGYYPSVIDETTFYKVQQLSHSRHGRKPVSDKPLSVNLFKGVIRCSECGHALIITGFSDTRNGIYRCPLRNENRCSAKGLSRKQTDGTLLTLLSRLDRFDSDTTNTIDMLRLHREHISSNIEKLVQLSLEIEDLSAITSKLKQLKGELSQVDADIEKETQRLKSIDVGCLSDCDLTTKAGRIEAQLIIKSAVKEVVLNTAKRRCKVTFHNGKVIDLSITENPSEDVTEAIQSLSEVTERGLIDVDEVII

SEQ ID NO: 4384 - protein, 506 aa, synthetic construct
MRSVITYLRFSSAIQGAEGADSTRRQNELFKQWLRKNSDAQVVASFNDEGLSGYKGKHLSGQFGDMLSRIESGEFPEGTILLVEAIDRIGRLEHLETEALMNRIIAHGIEIHTLQDGLIYTRDALSDDLGISIIQRVKSYIAHHESKQKSFRVSQKWEQRAKLALAGEQRLTRNVPGWIDPETFKLNEHAETVRLIFNLLLSGESLHNIARHLQSNGVRSFSRRKDANGFSVHSVRTILRSETTIGTLPASQRNDRPAIPNYYEAAIDASTFNKAQEILNKNRKGRTPASDNPLTLNIFKGLFRCQCGASVHPTGTKNKYAGVYRCNNHLDGRCDVPALKRKPFDRWMIDNFLGMIDVVSDGESERKIAALQHEVETVTARIKKATALLLEMDDITELKSQVKELNQKRTELQTTIDTLKRKTSLTDKELPQLKDIDLTTKAGRVECQLILSRHLKGLTLCKDSVTVTLQNDTEIIIPTDPLPLNDGTSIFEIADKELLDIDAYKL

SEQ ID NO: 4385 - protein, 541 aa, synthetic construct
MPKAISYIRFSSRIQASGDSTKRQNKYINEWLKNNPDYQLDESLRFQDLGISGYSGANAKSGAFGEFLAAVESGVIEAGSVLLVESLDRVSRQDIDTARERLRKILLAGVDVVTLADNSWYKKESLNDPLSLIKAVLIMQRANEESATKSKRLRSAWDAKREEAAKGKIMSRRCVAWLRVSDDMSHFELIPDNVKAVQRVFQLRLEGLPFVRIARQMNEEGFYTLNQHKPVKGAWSHTTVKALLDNRSVIGFKVPSNCTVTKGVKEIPNYYPAVISEEHFYAVQQLKQGSGRRPTSDKPLLTNLFKGVMRCAECGFVTIVNCATEKWHGVYRCSMRYEGRCHAKSINRRLADKALIQGLLYNTNRLSLNRDNGSAIGSLQSELEQIQKQRERLIKLAMLADDTESMAKDLKALNSQIKDAENAISLLHQREQSSQLETISHLDLTVKKDRIEAQIIIKRIVKEIRLNTAGKKCDVFLHNGLKLLNFPLDRVVDGAQWLEVLPLIDGDEFDFEGFTTKPQHIALEEAPEWVKYMEEQSNQPL

SEQ ID NO: 4386 - protein, 547 aa, synthetic construct
MKLLVTYIRWSTKEQDSGDSLRRQTNLIDAFYSKHKNDYYLLPAHRYVDKGKSGFHQQHKNQGSDFRRMFENVMSGVIPEGSLIVVENFDRFSRADIDTAIDDVRQILRKGVSILTLGDGELYDKSALTDPVKLIKHIIIAERAHQESLVKQKRIAQVWNHKTQLARELKKPMGKQAPGWLELSEDGSHYIVDEDKASLVNIIYDKRLSGMSMFAICKWLNEQGYPTINQRKVRISKTKKPDGNWSALSVKHILTSRSVLGYLPAKISTEDRKTVLREEIEGFYPQIVTDSKFYAVQQLLEETGKGKTSSGEHWLYVNILKGLIRCKCGLVMTPTGIRKPVYQGTYRCNGNKESRCSYGTVSRKLLDTQLCSRLFSKLSQLHDEATDTAKLDELQRRLNTVDSELEKLTETLIQLPNITQIQEALRVKQEEKDKLIVQLSREKARVKSVSSLDLSGLDMESVEGRTEAQIIIKRLVKEIVVSGNEKLVDIYLHNGNMIRGFPLDGKDDHTLTLEEATDEMQSLDDMLIFGEPVTRIYPAGDMEEVDA

SEQ ID NO: 4387 - protein, 509 aa, synthetic construct
MEKAAIYVRLSEEDRTRQVGTSSESIQNQKSLLIQYAAEHHYEVYQIYTDEDYSGVDKMRPAFHQLLQDAESRRFSIILVKAQSRFTRDMEQAEAFLNRKLPEWGIRLISLVDGIDTDDDTNHKARQLNGLINEWYLEDLSANVRASLESKRQQGKYLSSFALYGYCKDPQDHNHLIKNPETAPVVQRIFSLYTAGFGTSQIAMILNAEGILSPSAYKRSHDIRYKAPVQAQWTNSTVRLILHNPIYAGDMVQGRYQKASYKSKTMIRLPREKWKIVPETHEPLVDHKSFELVQERMTERCSQPNPRPVWRPLAKKVKCGCGGGMMLSGSKDSWHMRCQRNSRDPRICTPNRIPVTDLEAIVLDKLQQHLAELLDIDRLALFVQKSDKTSSKKRQSLHQTRHEVINLEQKIKALYLKRADGTLSIDEFNSQTKKLLQQKQLLEENASKLSQKAAFPDFEKTKQQLFPYLVADCLTKDMTDALIDHVTVWPLEANGDADNTRKIEITWKY

SEQ ID NO: 4388 - protein, 604 aa, synthetic construct
MIKIIGYARVSTTKQDLSRQKLKIKEFCENNNYELIEIIEDFGISGVVADRKGYIELQSKTYKDADMIVISELSRLSRQEDVTETVYNIQQIINKGLSVILLDSPSKIYEANKLLDITEILILTIKAWAAAQERLDIKKKNQDGKQALFQAYPYAVVDQKIPYGYKAVPNPNGKRPKYILEEVPEEVENIKRLFALVNSGKTLGAVARYFNERNITFRGYYSTVAILSNYIHSDIYRGIRRRTQRLGREEPYTIEVRIKPIISEEDFMKAQELIKNNYKNTPTGKVNHNPLKGIIRCRCGRAMTVKDKKPAAGISKLTYRCSCVDRKSHPDFCKYNIDEVSYDLTNEILYSLFKSMHTAEYINFFRNQTDNRVTELQEEIAGIEKRLSTLYLDKENLSNESQENANKFLLTTNPTLLNIIQEKQNQLDEKIKSIDKEIIRYKKSQSKKIADIERIKDNNGKEKLQNLSIEEQGELYHKYLERVNYIPVTTMQGYYIVQFLNGIKFYIAITKVRSIAMASLLLDNWTIDEKGIITANYDTLKSSDMKNFSIEMIRKTKTMTLQEYLKSDLAKERALHLDLSYRERYLEELHKAGLDGRLRPLKKE

SEQ ID NO: 4389 - protein, 508 aa, synthetic construct
MKAVIYARYSSDSQREESIEGQLRECAAFAEKNGITVLRHYIDRAYSAKTDNRPEFQSMIKDSGKRLFDIVIVWKLDRFARNRYDSARYKATLKKNGVKVVSATEIISEGAEGIILESVLEGYAEYYSADLSEKVVRGMTDNALKCKFNGGMMPIGYVIAAEQHFQIDPLTAPFVLEAFKRYDGGETISSIMNWLNEQGLTNTRGRKMTFNSVGHILHNRRYIGEFQYRDVVVPDGIPAIVPQDLFDRVQEKLAKNKKAPARHKAEDDYLLTTKLFCGCCGAYLCGESGTSRTGKVHHYYKCVSVKKKRTECHKKPVRKEWIEDLVVGETMKMVMDDKAIEAIVSMLMDLQDRDNVNVPLYEQQLREADTAISNLLNAIQQGILTRSTKERLEELENRRDELENRLACEKLAKPKVSAEFMTFWLHRFRKLDVRQKSHRKMLIDAFINAIFLYDDKMVITFNYKEGTKTITFAELQEAISNKNGSDLDCLAAPFHNIGISLTVITYIS

SEQ ID NO: 4390 - protein, 520 aa, synthetic construct
MVKCMKSVAERAVPAVIYARYSSSHQREESIEGQVRECREYAEREGYSVLQVYADRAITGRTDERPEFQRMLADASKGVFQAILIYKYDRFSRNRYSFAVWETKLKKHGVKVISARENVAEGAAGIVLKSVLQGMAEWYSVDLSEKVTRGMKENALKAKWTSGTVPFGYTRDAEQRLIIDPERGEFVRQIFEKVLAGEKYVDIASWLNMLGVRTARGAAWNKSSFTWMLKNVVYTGLFRWKDIEIKNAVPPIISKELFEAVQRKLKTYGRRGINVQKSDKYLLTPNIICGECGGPMHGMSGKSRSGELYYYYACANKRAKRTSCSISPLNRDELEQSVYNCAREVLLHEENIKLIAEQAEAVAEAQVDNELAEMKAERSRVKKSIANYAAAIANGATSGTIIELINAAEAKAAALDEAIAERELVAAPPKVSKEAIEYFLRNIAAAPDDKMKEKVISTMVNSVVVERVPDEGTKKDSDEKYSITVRFNFTDTPQLSALQSFDVREKSKMVTSAGLEPATF

SEQ ID NO: 4391 - protein, 558 aa, synthetic construct
MSKEKIKVYLYTRVSTSIQIDGYSLEAQKSRMKAFALYNDYEIVGEYEDAGKSGKSIEGRIQFTRMMEDIKSGKDGVSFVLVFKLSRFARNAADVLSTLQTMQDFGVNLICVEDGIDSSKDAGKLMISVLSAVAEIERENIRVQTMEGRIQKAREGKWNGGFAPYGYQLIDGKLIINEEEAVAIRTIFDQYVNTTIGANGLSKYLENHGIRKIPRQNGKNPLFDAGLIRKILKNPVYNGKIAFGRRTLEKVHGTRNEYKQVEQDEYLIAEGIHEAIISDELWQAAQVKLKSQAKKYEHVNKGKDTRTHLLSGIVKCPICGVGMFGNKCIKKKKDGTKYKDFYYYGCKHRHMIRGHKCTYNKQIREELLDDAVAEVIIKIVSNPKFASMMQEKINMKVDTSEIEKEIDNYQKELRKSHSTKFKLIEEIDNLDADDKHYKRRKQDLDDRLYRMYDKIEDLESLLIDAKAKKQTIEAEKLTGDNIYKILIYFDKLYKVMNDVERRQLITALISEIQIYEEKQPNGQWLKSITFKLPIIDEDFNIGLDNDEQVECVALLVKA

SEQ ID NO: 4392 - protein, 690 aa, synthetic construct
MNIHSPHVALRAALYLRVSTARQAEHDVSIPDQKRQGEAYCKSRGYQLVETFVEPGASATNDRRPEFQRMIEAGTSKPPAFDVVVVHSFSRFFRDEFEMEYYYRKLAKNGVKLVSMTQELGDDPIHQMMRRIMSLFDEYQSKENAKHVLRALKENARQGFWNGSLPPIGYRVVDAEQRGTKMKKKLEIDPLHADTVRLIFRLASEGDGTSGPMGVKNIVSYLNRNRMFTRSGGRWGIGQLHRVLTRRTYIGEHRFNRRSKKGEVKPEEEVVTVAVPPLIDLEIFEAVQRRLQVNNPKVTPPRVVSGPNLLTGICYCGNCGGAMTLRTGKNGRYRYYACSIRARQGETGCKGRAIPMDKLDRMVVSHIEERLLDPERIEDVLASLLDRRQESVERRSQHIAELNQRAAEADMRLKRLYEAIEAGSLDPAESALGERIAGLTAIRDQARADAVRTEAMLKNSAHKGLTGAAVRELASEARTGLRLEKGGYRRDHVRAFAQHVEVADDAIYINGSKNTLLRTLIATKGGKSAGIGVPDFIPRWRRERDSNPRNACTLNGFRDRPNRPLWHLSGELGWNRGSAHHHQLMAGVMAGFYRIGKRQPSSIPPSRHKSCFFIDGTGEKQYRTPLFLRFSAAGGALSEPMTKSEQAILLSQKGGNTARGFGNIKRVLHVCSHPHGRETVPRRQGRHPEG

SEQ ID NO: 4393 - protein, 544 aa, synthetic construct
MELKNIVNSYNITNILGYLRRSRQDMEREKRTGEDTLTEQKELMNKILTAIEIPYELKMEIGSGESIEGRPVFKECLKDLEEGKYQAIAVKEITRLSRGSYSDAGQIVNLLQSKRLIIITPYKVYDPRNPVDMRQIRFELFMAREEFEMTRERMTGAKYTYAAQGKWISGLAPYGYQLNKKTSKLDPVEEEAKVVELIFDLFLNGLNGKDYSYNAIATHLTNLQIPSPAGKKKWNRFTVKAILENEAYIGTVKYKVREKEKDGKRTIRPENEQIIVPDAHTPIIDKDQFQEANKKIENKIPLLPNRSDYKLNELAGVCICADCGGPLSKYEAKRKRQNKNGTESLYHVKVLRCLNNKCMNVRYNDVEEAILDYLKYLQALNDNDLTKHLGSVIQSHENKNNIRSKKQMNEQFEQREKELKNKLNFIFDKYESGIYSDEIFLQRKSVLDKELQELKKAKDEINGLVDFKGGLDINQLKENIKNAIELYESSENREEKNKLLRIMLQKVIVKMTAKRKGPIPAQFEITPILRYNFLIGETVSSYES

SEQ ID NO: 4394 - protein, 578 aa, synthetic construct
MTKHQIHVYTRISKTSQQEGSGLDEQLSRIDAYIKSKPEFLGSEITYWQDVGVSAFKNKNIHDGQLAEFIKQVESGSIGAGHALVIYSLDRLSRRSSWDEDTIQKLVKNGVDIHDVSTPVVLKRDDPFSKIIMELIVARGNNESRIKSERSIAGWEKRLKETREQGKVFTRKLPRWLSTDENGYVVITEQAEIIKRIFLEYTNGLSSPMIARRLNEEGIKSTGSSMWRPNTITKLIKDERLRGYLRRNSDQTLIPDIFPVVIDEEIFVLANRILKNNASGIKGRPRENNITREVNNILTGIVRCGKCGARVTTSKNSRGVRYVVCLNRRNYEICGQKSIKLDAFEKIVISHVQQVDMSKVFSYDKVDTSHESTLNSELSNLEIDEKNCITDIEARKKAKKTASLVLANTLVEIQDRIEEIKQQLLELKIEEPLPEIQHFSINDLTNQSNIELRMSLRKFLTQAVDKITFRSLNDNILIEIKYHNNVYRHILITDKKVKEVLHEVDIVKNGDVINYTTNGFLITENEHENTCVFHGIYNVHYTDYFLLANYIGSLKNKHWIVDKMYETENMSIVMTNEK

SEQ ID NO: 4395 - protein, 559 aa, synthetic construct
MKVAIYTRVSTDHDEQLSSLKNQEEYYIDFCHRKGYEIFKIYADEGTSGTNMKRENFLQMLHDAGLDVVEKMNGKIEFQISDRKPKFEKIITKDVSRFSRNINAIEIVRALKRKGVYIYFENADLSTEMDDWEFRLGLFLLFSQQESIDRSKKVQFGKLQRAKKGKWKIPVVLFGYRYDEEKGEYVIDEREAAIVREIFDMYVNQRKGTKIIAKELNQKGKLTRRGNKWDSVAIKRLLKNEKYVGTVILHRYTKQDIFSNARYVKRDPSEWIIHENAIPAIIDRETWERAQEIFETRTKESPDGAKYGIKTAQSKFYKKLICSKCGAYFARVSTKKERKKTNETYIDYNYFCRNRRIYGTCDMKGISHNVLEREIMSLARSKVIREMVAKRNKEQEIYEVLMGIQKRKMESIEKEREKMQNRINEISQQIDKLYDTFLNSDDNSKFLIEATQRKIEQLEVERKNLEREKMKWDVSHIEEENRQIQRTYQKIQEYVEKETYTFDEMLNMIQKIVVYEETKEGRELEFYFNLPTMLAYMFEDEIENVETEIIPHTWKISIK

SEQ ID NO: 4396 - protein, 588 aa, synthetic construct
MTRHKLYSYVRWSSDRQAKGTSLERQTNKAKEFATLHNLELVELLDAGLSAYRGKNTTQGALGGFIQAVESGAIPNDSYLFVENLDRLSRQDILTANKLFSHLLELGLTVVTGMDGKIYTKESVTGNPTDLMLSILLFSRANEESATKQKRVYGNIKALVERHKAGLPTTIKTAGSHVWWTDASGDKHTAVKPHPEYWEPARKAVELFLEGYSAHAVCDYLNEHYTAPPVRVTKATNTQENGGKWSYPLLRRMKTHRALIGERTITTDNTVYTLENYYPALCSPTEFALLQDLNENNKLTQGPTKTRITLLSGLGVLKCGHCGGAMTFMIGANSKIRYMCSNGKDKIGSCRSWSVSLDIVERTLVPALVRGYMEYATGGGAKGEDIKASIEATQEALQELDSQIDNITTAITLGGNLAPLVERMGVLSKEKDSKLVELDRLARLSLLSESEGSAIEKITDFILQIRPAVLADVNHPLRLQLREAVRAVIESCTLTKRADRGLEIEYVIKGDPHRIRYTFKATTFGNYTEVTADLDEHGKPLAYPDTEEGLRLLQTRQHMEAELFKKVDQIQEEMKLPPIDGGQLWARR

SEQ ID NO: 4397 - protein, 519 aa, synthetic construct
MKKNVYCYARVSSRGQAKDGYGMSRQQSMLKDYVVTYDDSLHDRGYDLGAINWLFAEGISAYSGKNIEDGSVLKTFIDDVLKKKIINAVLVIENLDRFSRAEPVKAANLFLNLITAGCDIHEVETEIIHHSSSDLSIITGGLQRAHNESKRKARLSIKNWDKRIKNTINGDAVLTHRVPSWLDVKDNTYIIKKGEKEKYNLIFKMYADGFGPAAIRDELKNKNMLINDREPTIHHLNKILRDQRLIGKFNSTGRKVLEGVVIYPVVVEPTLFNAAMQLRRKGRPVGKINLKANNLFAGLCICMECGRYIQVNGVDRRGDTYFRCGGSLVKIDKCQERGFKYKIVEDALLQHIRNFDFSNLTTDESDIQIRINHLTIELLSNINYRDEILLDLEKEEIPDPHDRRIFKNLQKKIIDIESEILALKQSNVNLRAFDELKKDYSEELRDPTNVDIRLSFNIKIKRVIKSVIIKRYSDVIFLVVNYIAINEKQAIVINSKDGEVLYMGVQNDDLKTVEHLIVK

SEQ ID NO: 4398 - protein, 547 aa, synthetic construct
MKLLVTYIRWSTKEQDSGDSLRRQTNLIDAFYAKHKDDYYLLPAHRYVDKGKSGFHQQHKNQGSDFRRMFENVMSGVIPEGSLIVVENFDRFSRADIDTAIDDVRQILRKGVSILTLGDGELYDKSALTDPVKLIKHIIIAERAHQESLVKQKRIAQVWNHKTQLARELKKPMGKQAPGWLELSDDGSHYIVDEDKASLVNIIYDKRLSGMSMFAICKWLNEQGYPTINQRKVRISKTKKPDGNWSALSVKHILTSRSVLGYLPAKISTEDRKTVLREEIEGFYPQIVTDSKFYAVQQLLEETGKGKTSSGEHWLYVNILKGLIRCKCGLVMTPTGIRKPVYQGTYRCNGNKESRCSYGTVSRKLLDTQLCSRLFSKLSQLHDEATDTAKLDELQRRLNTVDSELEKLTETLIQLPNITQIQEALRIKQEEKDELIVQLSREKARVKSVSSLDLSGLDMESVEGRTEAQIIIKRLVKEIVVSGNEKLVDIYLHNGNMIRGFPLDGKDDHTLTLEEATDEMQPLDDMLIFGEPVTRIYPAGDMEEVDA

SEQ ID NO: 4399 - protein, 581 aa, synthetic construct
MSSKQKLYSYVRWSSEKQSTGTSFERQTARAKQYAHDNGLEYVEIKDAGVSAFKGKNSTQGQLGEFIASVEKGLIPKDSWLYVENFDRITREEVTDANALFLRLINMGLTIVTGMDQRVFTRESVNKNPTDLMLSILMFMRAHEESKTKSDRVNSHVLALLAREKQGLPVNIKAVGRHPFWIDDSGPDNEKVKKHPDYWQPVQDAVRLFLEGHGAFYVTNYLNENYSPPPAFKNKTRKAGGWSQQALNKMRSNQALVGTRIFTLSGKPYQLENYYPPLCTPGEFAQLQDIKANNNRYSGKVSTAISLLGGMQIIRCGHCNGTMTAFLQRGQLRYICEYGRAGGSCNAWSVKASIVERCLMPVLVTGFLIGAYKTHSDLTSLDEESDELKEKLNKIQSQQDHVIDAIAEFGRTTKFDAKYKELEKEEQVISGKLQQLGQLKALYATTKDFSENIAGFVAEQCHWLIISDVHNSRREQLRENVRRVIKSVIVTKKNRCIRIEFQLITGEPFVFTGSKSPDYEVFLPRRIHDIPPDATEDEKSEWKRSDHEYNKHFLKLWYEVVNKDFLSHYPEINGKDFWPKR

SEQ ID NO: 4400 - protein, 604 aa, synthetic construct
MKKVFVYHRVSSDQQLDGSGIARQAELLEGYLERTGICAEMDDPAPVVLSDQGVSAFKGLNISEGELGAWMEQVRNGMWDSSILVVESIDRFSRQNPFDVMGYINALMAHNVAIHDVMANIVISRSNSKDLPFVMMNAQRAYDESKYKSDRIRKGWAKKREQAFNKGTIVTNKRPQWIEVENDKYVLNHKAAVVKEIFALYQTGMGCPTIAKQLQRKEGEQYKFNRPWTGELVHKILTNSRVTGKIFISEIIRNHDDIENPVTQKKYNMDVYPVVINEEEFELVQELLKSRRPNAGRVTVKKDGQEEVLIKSNLFSGIARCTKCGGPMYHNVVRAKRTPKKGDPKIEEYRYIRCLNERDGLCENKAMAYETVERFVVEHMLGMDLSTVIKEQEFNPEIEVLRIQIDQVKDQITNYENGIERRKSAGKPISFDMREELDDAKSELERLLARQASLATVQVDVPVLQDVNVAELYNVNNVDIRTRYENELNKIVSNIRLKRNGTSYTIDINYKQNELKKHVLFVENKKKEQTLISEVIIEDVDDAKFYYTPSFMIRLKDGKIRFQQTKEDLSVIDYSLLLNYVDAVDGIDAVGVWMRNQFNFLTSK

SEQ ID NO: 4401 - protein, 604 aa, synthetic construct
MKKVFVYHRVSSDQQLDGSGIARQAELLEGYLERTGICFEMDDPIPVVLSDQGVSAFKGLNISEGELGAWMEEVRKGMWDSSILVVESIDRFSRQNPFDVMGYINALMAHNVAIHDVMANIVISRSNSKDLPFVMMNAQRAYDESKYKSDRIRKGWAKKREQAFNKGTIVTNKRPQWIDVEDDKYILNHKAAVIKEIFELYKTGLGCPTIAKELQKKEGEQYKFNRAWTGELVHKILTNRRVTGKIFISETIRNHDDLDNPVTQKKYQMNVYPIVVNEDEFELVQDLLKSRRPNAGRITIKKTDNEEVLIKSNLFSGIARCMDCGGPMYHNVVRAKRTPKKGDPKVEEYRYIRCLSERDGLCNNKAMTYETVERFVVEHLIGMDISTVIKEQEFNPELEIIRIQIDQVKDQIANYENGIERRKSVGKVISFEMREELDDARLQLEELLARQASLATVNVDIPVLKNVDVNELFNVNNVDIRTRYENELNKIVSTVRLKRVADSYIIDIKYKNNDLKRHVIFVEHKKKEQKLIGDVIIENIDGTILYSTSSFWIRVKDGAIRFQPTKDDLSIIDYHLLLNYVDGLERDNMVAVWMRHNINFLFDK

SEQ ID NO: 4402 - protein, 521 aa, synthetic construct
MPKAISYIRFSTKIQSVGDSTKRQGKYINDWLKRNPDYYLDESLRFQDLGISGFSGANAKSGAFGEFLAAVESGYIEAGSVLLVESLDRVSRQDIDTAGEQLRKILRSGVEVVTLVDNEWYTKESLKDSLSMIKAMLVMERAHEESAMKSTRLRSVWAAKRERAANGEIMSKRCAAWLRVSEDRSHFEFIPENVKAVQRVFQLRLEGKSHAKIAKQMNEEGFYTLNQFNPVKGGWSQSSITELLSNQAVIGVKVPSKSMVVKGVSEIPDYYPAIISEQQFHAVQQLKQGAGRKPSSDLPLLTNLFKGVLRCSECGFIIIVSGVTAKRSGNYRCSMKYEGRCNAKGFSRLQTDKALVQGLLYNTNRLSLNRDNGSAIGALQTELELLQKQRERLIKLAMLADDTESMAKDLKALNRQIKDAEKAVSEVHQREQSSQLEIISHLDLTVKKDRIEAQIIIKRIVKEIRLNTAGKKCDVFLHNGLKLYNFPLDRVVDGEIFLEVLPVLEADEFDFDTYRVIEQAP

SEQ ID NO: 4403 - protein, 558 aa, synthetic construct
MTKLYSYIRFSSMRQSDGSSYERQIRMAKEIAARYNLELVNDYQDLGVSAFKGANSKTGALSRFLDEIGRSIPVGSWLFIENLDRLSRQDIISAQELFLSIIRRGITIVTGMDNKIYSIETVTANPMDLMFSILLFIRGNEESQTKRNRTNSSALLKIKAHQQNPQNPAVAIEEIGKNMWWTDTTSGRVLPHPVYFPVLQKIVQLRQEGHSAGVILDYLNEHHEPPAPTSNKKHGKWSRAMVSRLFATKALIGVKTVNVDGVEYELRDYYPRVLSDSEFYFLRKNIVKKAWDYSHDKEKVIPLLSGIGVLRCVHCGATMVKQTAANGKREQYRYCCDGRKSGRTDCPYPNWGFRAVTLEGAVLQLLADKIWIAEDKTNPIPEIQVKIDEISRKIDNLINLSAMTGATKELANQITDLNSQREALHEEIRLFEREMYSVDSQGWDKLAQFDLSDVQNEERLKVRMKIKGALHEIECSRIDSKKNLFVLVYLDGLRQRLVIENNRGLKKGQIFVDLKTINDRQILESAGMVLHPCIEMIIDADWKAPEEIPGLLSEEFGI

SEQ ID NO: 4404 - protein, 509 aa, synthetic construct
MRRAISYIRFSSERQLKGDSVRRQSKLVTDWLDKNPEFYLDSSLSFKDLGKSAFSGKHLKGGLGDFLTAIEKGLVKAGDTLLIESLDRLSRQDIDIASELLRRILRAGVDVVTLSDGEHYTKESLKDPLSLIKSILIMQRAHEESLRKSERVQAAWNRKKELISEGIKVSRRCPAWLRLNDDRRTFTIIPDKVEVVKRAFDLRLQGLSFWAITRTLNDEGHLSLNQYTPKQKGWSDTAVKKLLRNRAVIGCFTPAGREEVQGYYPAIISESLFYRVQQLNTGQYGRASVSSNPLSVNLFRGIIKCSECGATIVLGGYALKRFGMYRCPNRSANRCSAKAISRKQTDATILYMLALCDRFETENTDTIDGLKIQREDLQRKISKMAELAIELDDMTIITEKLRDMKNALSKLNHDIEEETKRIKAITTGSLKDIDRTTKEGMIETQLLIKGVLKEIVIDAAKRRCKVTFHNGRAITLPITENPSEDVTEAIQSLSEVTAKGLIDVDVVEI

SEQ ID NO: 4405 - protein, 507 aa, synthetic construct
MKRVISYIRFSSEKQAKGDSLRRQSKMVTDWLKAHPEYYLDQDLSFRDLGVSGFTGKHLKGGLGDFLTAIEKGLVKAGDTLLIESLDRLSRQNVDRASELLRNILRSGVDVVTLSDGEHYTRESLKDPLALIKSILIMQRSHEESLRKSERIQAAWNRKKELISEGIKISKRCPAWLRLNDDRKTFSVIPEKVETVKRCFQLRLEGKSIWEIVRTMNAEGHQTLNQYKAGSFGQTSVQDLLKNRSVIGYFTPKGREEISGYYPAIIDETTFYKVQQLSYARYGRKPASDKPLSVNLFKGVIRCSECGHALIITGFSDTRSGIYRCPLRNENRCSAKGLSRKQTDGTLLTLLSRLDRFDSDTTNIIDMLRLHREHISSNIEKLVQLSLEIEDLSAITSKLKQLKNELSQVDADIEKETQRLKSIDVGCLSDCDLTTKAGRIEAQLIIKSAVKEVVLNTAKRRCKVTFHNGKVIDLPITETPSEDVTEAIQSLSEVTERGLIDVDEVII

SEQ ID NO: 4406 - protein, 624 aa, synthetic construct
MIKTFIYSRVSSQEQLSGGGLDRQETDVREYVTRNGLDQYEIVAMVDRGISGYDGSNMRDGELGKWYKDAITGMYWGSHLVLEAIDRFSRRDPMLAMEDFTVLVNKGGIKVHIVKFNTFINGDNLPMLSMMMNLAHSESKQKSDRISKGWQRRRRMALDNGTAITARTPYWIDVRDNEYRLNNSSIAVVEAFAMYKQGLSCGLIAKKLNELKHYFPYMWTKTAVQHIVDGLNTSGIIDAPRAIKTIKAFYKSGFSVEDIAKKMNAEFQFMKEWNAPAVHKLLQNKSVTGLVEIQKRKLIQEFDSDGKPLELRTKSEGEKYFESIYPQIISIDDFELIQKLLESNRKVDTKTGKGQTTGGTVTQNEDGELVKQFILSSLCRCYKCGGAMFNNIVRSKRKNGKVDTYSYLRCLNERDAHCDVKALNYPVIERAIIEHVKGLNFDTMFKGTNNSELELLKTREVELLRDIATYEDAIAARKAAGKNTSPVLVTSLVDAQDDLEALQKKIRAISGITVNAEELTSLNESVFDVAEYELRNMVELELQKIIKRITFNCTEKNIYFITIQYNTGTVLQHGLKVDKKKGVIETYELHEGNKGYVSNGEVITPALIEAAESKNIGIFEGKVM

SEQ ID NO: 4407 - protein, 515 aa, synthetic construct
MTKAYSYIRFSTKGQIEGRSLQRQLETARKYAEENGLELQSLSFQDLGVSGFKGRNSEQGALSQFIEAVKEGTIPEGSWLLLESFDRMSRQPVEKSMRLLMELVELGITVVTLMDKQVYKRGQLDMTKLIISLVIMSRAHEESAAKSKRLADVWHAKQAVAHLKPLGTHLPAWLEYNEDKTKIQINYEKAVVVRYIFELSANGYGRSALIRKLNSQGIAPIGSRAKRWHLSYVTKLLNNTAVLGEYIPHVTDKLGQRVPTGEVIENYYPPIIEKDLWLRAKAAAQSRKIRGTGAIRRGHTRNILSGMVSCECGSSMQFVNKGSSDKGGYYLVCSTARHGAGCQYIGHRYYSVQWVVLIALQKLLHTFANKADNHEKEMQLEGELVELDRKLNNLINDLEENGSSKYISAAIRKTEQRMDIVKNELLMLQSSKAVENDEVDLQEITLRLNENFERLRLHQYLKRHITNIVVYKNKERLEINLKTGEDIVLTFIPSENLWQSNTGVSFSVTFDTRWG

SEQ ID NO: 4408 - protein, 522 aa, synthetic construct
MTTAYSYIRFSSAVQAKGDSLRRQTQLAQDYCLKHSLTLSDQSFTDLGVSAFRSANTNEDNGLGQFLKALQQGVIPRGSFLLVESLDRLSRASVMTAMRQLFNIIEYGITVVTLIDNRTYNSESETTDLIISLTVMERAHNESKTKSERLKAVWANKRANPNTTTRHSNTPFWLSLNEDKRTYSIIESKADIVRRIFQMSIDGHGAVSTCRILNEEGLKAPKGGTWATTSIKKILGSKAAIGHHTHIINNKVQSSTVPDFYPPIISEETYYLSQAKKKERHKPDSAGRKSTFPNVLSQVAVCGSCGSHMLYDPKSPQWIYLTCREFKKNACTNKPLRIELINRFIIEQYLHPQHFEKHLDLVKKGSTSTDQISVIESKIESEKEALKQLIELTSNFSNSVIQDGIKTRSESIQSLEKQLEEAKALSVESVTSIHMNYREACQLVADALQVQVFDKKPATLSREELFKVRVKLNRSLKQTFSEVTVSHCPDTKKASITANDFVFEAHKSAMTTGFQDTTWWAV

SEQ ID NO: 4409 - protein, 498 aa, synthetic construct
MRFVAYLRISSYSQREKGDSIDGQREYIQRWAKSNGHEIVHWYVDEAASAFKGRRFVFDVMLHELSEQIIDANGVVVYSLSRFSRNLKNQLLAMEVLEKKGMILQSASEALPSEPSSFKFMTNILGILHEHQSRENAAVVSDRLRDTARKGFHTGGPLLFGYQSVSVKGDTSKERKKLVVKSDEAEVVKEIYSLSDIGLNGKGLGVKEIAKILNDKKITNRGKRWNKNTIHRILTNSAYKGEFEFGKTQKNEPGKNIIKIPVPKIVSKELYNRVQNKLSERQVAYNNVKSLRSSSLLTGTLRCPVCGSTMVISTGKGGKYKYYQCSLQVRQDPKLCSSKRLRKNEADNALRKALLEHVFTYKHLANIYNDTLEIVKNKKKVSDEKLRPIRNQISSLKTKVRNLVDLIADGKIEPNPAINRNMDEYNAQIALYEEKLDSYKSLASIPIKRFGKAQISSFVDNVQQYVKEANDEKLKQFLLATITEVTITEQKKASAQRE

SEQ ID NO: 4410 - protein, 531 aa, synthetic construct
MTIAYSYIRFSSSQQSQGDSLRRQTQLAEKYCIENNLTLSDTTFRDLGVSAFHSTNSQEDSGLGQFLSALNQGRINEGSYLLVESLDRLSRAKVQTALRQMLNIIELGVKIVTLMDNRIYDQESDTTDLIISLTIMERAHNESKTKSERIKAAWVHKRQNPTTTNRHSSTPFWLSLNPDKKTYKLKEKYVEIVRKIYQLSIDGWGVIKIVRHLNESNIKAPKGGSWATTTVSRVLTSKAVLGHYEPMQNRKSLNLTIEDYYPSIIDEATYYLSRQRQNERSKPEAAGRKTNYPNPLSQIAKCKLCGSSMYYENKSKSLKYLTCREFKKGSCTNKPIRIELIYRFIYEVFNSPIYYQYQAKLVEKSNKKDTSKLEELEVKKTEQEKALRGLLSMSNDFSNTIIQEEIKVRSERIESFKKHIENVKAEQAVEHTRSTHINFTEALQLAVNAFRFPLEKVQVEELSREELFNTRVKLNRVLKHAFNSLSIYHCGESERITIETEGMEGFSKGLKYETTRQSIKEPLSSRVWSVC

SEQ ID NO: 4411 - protein, 518 aa, synthetic construct
MKQLEKAYSYIRFSTKGQIEGRSLQRQLETAKRYAEENGLELQSLSFQDLGVSGFKGRNSEHGALAQFIEAVRDGTITEGSWLLLESFDRMSRQPVEVALPLFLELIRLGINVVTLMDNQVYRKGNLDMTKLIISLAIMHRAHEESLAKSKRLADVWHSKQAVAHEKPMGTHLPAWLEYNEDKTAIKVIHEKAIIVRYIFELSAYGYGRNALIKKLNSQGVEPIGKRATRWHLSYITKLLNGTTVLGEYIPHITDKLGQRVPTGEVLENYYPPIIEKDLWHRAQAAAQSRRLKGTGATRKGKTRNIFSGFVSCECGSSIQFVNKGSSDKGGYYLVCSTARHGAGCQYVGHRYYSVQWVVLIALQKLLTTFANKPNDNAKEMQLEGELVELDKKLNNLVSDIEEHGSSRYISTAIRNTEQKIDSVKRELSEIQSLKAIEDDHVDLQEFTSKINEDSERLKLNQYLKRHIDTIVLYKDKERVDIKVKSGEDINLSYSPSDNVWSSNTGFKFAVTMDTRWG

SEQ ID NO: 4412 - protein, 575 aa, synthetic construct
MTKIAYSYTRLSTEKQIKGHGFTRQREAIEKVCCQHGWQLSDQTFNDLGVSAWKGANATTGALSQFIDLAKKGAIRPNSVLIVESVDRLSRQQVDKSLRLMLELLEVGVSIFTLSDSKLYTTNSDSVMLDLMMWLMTAQRAHEESEIKSLRVRAAKKKNKELIRKGIIVTRKCPEWLTVSDDKSCFLVNNERAEIVRKIFTWYSQGFSTKPIALKLNELGIPYWGKSSTWSYRHIRSLLKHRGVIGEIQLLKRIDGRDVADGDPVEDYYPAIIDRGLWATCQQIKSSKTTAKGRVVERGMANLFRGLLKCECGSGLAINSSTVKGRTYRFLRCSQLKTTGCQAKNWHYEKTERILLIALRHSLSSFSEEDHAVSLRECQHYLARISEELKEKERQAENAINYLLDKPSKLLEARLQTLEDDIARLKAIQEQAEHRLEAVHYEKSTALDKVEELQRVLEDIANDDDSRHKANGLLRRLIDTITLGSISNPRSKEFMEVSGNDYHGLIIIKRRDGLELRIEVLKDYGLSISWEDDDFTVIECSPTQQLNSQHVSQRLINLGGQTVDLWDDEGWVASS

SEQ ID NO: 4413 - protein, 529 aa, synthetic construct
MTIAYSYIRFSSSQQSQGDSLRRQTQLAERYCSEHNLTLSDTTFQDLGVSAFNSANSNEDSGLGQFLSALHQGLIDRGSYLLVESLDRLSRARVQTALRQMLNIIELGVKIVTLMDNRIYDQESDTTDLIISLTIMERAHNESKTKSERIRAAWENKRQNPHTTNRHSITPFWLTLNSDKRSYTVEKKHADIVRKIYQLSIDGWGVVKIVRFLNDSEIPAPKGGSWSGTTVCRILNTKAVLGHYEPTQNRQSLNTVIENYYPAVIDEQTYYLSQKRKSERSTPESAGRKTEYPNPLHQIAKCKLCGSSMYYDNKSKTLKYLTCREFKKKNCTNKPIRIELIHRFILEVFNSPMYIKQHVELADKSHQRDTNKLLELEGNINEKKKALKGLLSFTNDFTNALIRDEVKTRSEHIQELEKQLESAKAEQAVERDTDTQVSFKEALKLTINAFQLPLEGKTELSTEELFNTRVRLNRVLKQTFNTLSILHDKESKRITIETEVTDNNKFSYKFETNKKAISEPLSNNIWSMY

SEQ ID NO: 4414 - protein, 562 aa, synthetic construct
MKQPLAYSYVRFSSPEQAKGDSFRRQTEAARKYCNKHGLELADLRFHDLGVSGYKGNHFTQGALGDFVEAIEQGKVQGGSYLIVESLDRLSREEVDIAFSRFASILRADVNIVTLQDGKVFTKTSLKNTTDILTSILVMLRAFEESETKANRIREARDEKHRQARENKTPTGYRPPDWIRTVKDADSGKPKYELIPERAEVIKRIYHLNNSGMGAIVIARLLNEEQTPPWGRSKTGWQTSYIKKILKARTVLGEYQPHVVINKVREAVGEPVFGFYPAVIDPNTFKLAQMTMTARDKRSGGVRKDKVNNLFTGLAKCKHCGNTMHFVDKGKPPKGNQYLLCSLAKTGAVHNGVSCKRASIRYQQTEDAILTVAATLNLKFEPPTNKGEVERLQSQLSEVHADLGTAEEAIVRITNAIAELPDSSGLIAKLAELELQKREKKSEYQAIENRIDELNLVPQASSVWNELQQELKVFREDASDRTNVKLRTKINNQLLNSIDRIEFDNHAKIVTIHIDSKRIVEIRFEEKMKGYTVKPSWDNREFFPNTFIIKEQIRKVHYEKEQ

SEQ ID NO: 4415 - protein, 551 aa, synthetic construct
MRKAYSYIRFSSKAQEDGDSLRRQTEATRQYCENNNLELDNSFQDLGKSGFRKRDGNSEQEALSKFIELCEEGQIENDAILIVENLDRLSRDNVKSALQQFLKILDFVDVYTLQDEKLYKKNSKSIDFDLIISITIMSRAHEESSTKSERLSQVWSNKRNNLTKTKATSNGPHWLKLSKDKTEWIVIQERAEVIKLIFELAMDCSSTKIVKHLNDNGYKSPRGKLWAKTSVSRILTDKCVLGEYQPHIGRGGYNRTPIGEVIKDYYPQVIQEDLFYAVQAARESRKQTERGRGGEKFSNLLRNIAICKKCGSPMEFKNKGPKPKGGQYLTCSLATRTTNQCDNDTHVSYPEIEQAILLLLARKQLINDYKTTKKKRIDILALEGEKVTKEKKLNSLLKTVENIDEPRPQIFKSIEKIDIEISKLERDIAEAKIDDAKDKTEINLNAIIQDITNEKDNTKRVKNRKALNKFLIENLGKAKVACLNPDKLNSKKRIVEITFDKQSSIVMEGYRYIHLNNTTCIDLKDNSQALKTIEFHSKNKTRRTIPLFKEH

SEQ ID NO: 4416 - protein, 548 aa, synthetic construct
MDKIIYPYIRFSTKKQEHGHSLTRQITRIKEYALENGYKINDSLELRDLGKSGFKGLNAKEGALSVFLKLLEDEKIPKDGSAYLCIEQFDRLSRMPTDDAYQVFRKILKQNVNIITLMDEKVYRKEDLNNMVSILNSLILMEQAHLESQRKSDLISQIFKGKVKTLKSGGKVQFTYILPGWIDNNGTKEDPDFVLNEKVEVVKMIVDMYLGGETMGHIARILNENQIPQIARKRTKNQTNSWNSAKISHLLTNQTLLGKLHIRTTGDIIEDYYPAVISKDQWDLIQAKKRTQSVTKVAGRRSINIFQGRMFCADCGNKYYFETDDKKGKNGKRYVYHMLKCSGRRFHSCDSESLKYDTMANPDLFFFRNIKEENSEDISLIKEEIKNYNKDILLLNQEKDEIEDLLDNNEINFKAYTLAITKITDKVETLEKKIALNKQHLSFSSNDYRMDHFDKNDSESVANAKKFISSNYAAIIISSKHDAMVILLHSGEMMVKPLPNKKANILPVHRVINEIKNNIQDQDKKGLLDGKFKEILDAFNFQDKFVGL

SEQ ID NO: 4417 - protein, 514 aa, synthetic construct
MNNNKALAVLYVRFSTKKQEAGDSQRRQIESAEQWCERNNAELSAQTYEDLGVSAFKEGGKRPALEDLITAIRMGKIPRDSYLLIEDHDRLSRRGWRYTQDLVYQLVQLGVRLVMLKTGVVYDANNINNIADNIVLMISAERAHQESERKSHLIKASREKARRDKKVTGKLPAWISRDGDGFIFNDKKATIQELINCKLSGKSHQSTAKHLNLLQMTTGNDSAWSASGVRAIVQNHALYGAKAYFDTGKDGRMNKEPIEIVSDIFPALITHEQYQVLNKRQQAGRTSKRGAYSRLLKCGACGGAMTTRTSNYKGKPRAYKMCVKATEGSCNQVERIREPEVYLNQALHFLKYESSSTLYVSRTSEYQQRLETLNATVDLLTKNGNVEALARVYADIKEVSDLIEESKVLDQNNVDIKVDFSLISSIEDVEQRNIELRKVLREIRFYCIEKVGQTSKWKVVIEQINGIKKYLVLDQKYGFGNTVVDYASLLTQGTEDNREPWEIEDSEEWESYSY

SEQ ID NO: 4418 - protein, 664 aa, synthetic construct
MFSFDKSKFKGICVPYARFSTKGQSKIGKKSLERQIEEARRYAKSNNLYINEDLIFADKGISGFAQQGNIAKAFKKGQMQVMLALLEEVPYQEREFIYVTFHNFDRFSRMSPKQARTYFDLILQKGFNVVTTIDNQLYTRHDKDLGKMLISTIKMTTAWEESQVKSIYIKDALARKKKVVEYLYTHPSQKGKYKHIGVVQPNMPRWIDHEKIELTYTDESGSKRTDSFKKFTLNKEKTKIVNYIFDLKIQGLGYARICRRLNEEGIPTFDQGKHRIAKKWHVFAVQNLICNEMVLGHITLHTHNEEEYMCEIDKVFKKRKIKQTATEKLYNYYPAAVSEAKYLEAHKNTIQQDKPKKLGRIGERTNIFAQILLCECGGTLQYRRTKKNKKKSESVSVNEYLQCNNAFVNHKCNSQTINYTMLETAFFRYVNNIDFKNICSTTNSKHALKIIDLDADIKELTDEIESLKLREAGLAKTYMSLASAGLDGSTALIDREKTKKEIAEKVLELENLELKKKGLEIEADKDNREFVDINDYMLNKDNYSSDEKIIIRKKINDFLHSKIEWMEVVSTERQKFVIIAFHDTVIRTFSFDDRYANDLMFNEIDVDLSGLNRVQASNLMFTLIKAIRNSLKGVEAVITKADLISYLQHIKQDYLKNIGEQASV

SEQ ID NO: 4419 - protein, 644 aa, synthetic construct
MFNFDKSKYKGICVPYARFSTDVQDEIGRKSLERQIEEAKRYSNEYGLFFDEDIAFVDRGVSGFALSGDTAKTFQKGQMQLMLELLEEIDVAEREFIYITFHNFDRFSRMSPDVASRYFEQILDKGFNIVTTIDNEVYRRNSGNLEQMIISIIHMSTAYYESEVKSIYISDSRQRKRDVIEYLYNDETQKGKHRHVGIKACCPRWIKTKDIIYEYVGKDGSVKKEALKRFEIDEERAQIINYIFDLKIQGLGNGKICQVLNEQNIPVFHSGNYTKAKYWNLSTISNYLKNENVIGHSYLYHKAKEEVFNEKTQTFSTKRVRKIATDKLYNYYPQIMSEEKFNQAKEAVKANSVKVDRSKSSEKPHMFSNLMRCSCGTRLHYKLTKKNNVKKVDDYFEYLKCERSALNDGCEGENINYKNFEAQFINFIRYIDVNEILNHANGEEAETQGLTELEEREAAINLKITGLTKTYQSLINAGVDGSDVLVELEKAKGELQEVEFEKSKLLNRMKSQTSSSSESIKQKKSALKSKVFAEKVEARKAVNELLKQKIRWMEVYATAYAKFVIVCFVDNVIRTYAYQDEFATDLMFNTIKINTDGLKGYEADELMVLMIKTVRESLAGMNEVITNTDLKIKLAAVKSEYMNE

SEQ ID NO: 4420 - protein, 644 aa, synthetic construct
MFNFDKSKYKGICVPYARFSTDVQDEIGRKSLERQIEEAKRFSNEYGLFFDEEIAFVDRGVSGFALSGDTAKTFQKGQMQLMLELLEEIDVAEREFIYITFHNFDRFSRMSPDVASRYFEQILDKGFNIVTTIDDEVYKRNSGNLEQMIISIIHMSTAYYESEVKSIYISDSRQRKRDVIEYLYNDKTQKGKHRHVGIKACCPRWIKTKDIIYEYVSKDGSVKKEALKQFEIDEERAQIINYIFDLKIQGMGNGKICQVLNEQNIPVFHSGNYTKAKYWNLSTISNYLKNENVIGHSYLYHKAKEEVFNEKTQTFSTKRVRKIATDKLYNYYPPIMSEEKFNQAKEAVKANSNKVDRSKASEKPHMFSNLMRCSCGTRLHYKLTKKNNVKKVDDYFEYLKCERSALNDGCEGENINYKNFEAQFINFIRYIDVNEILNHANGEEAETQGLTELEEREAAINLKITGLTKTYQSLINAGVDGSDVLVELEKAKGELQEVEFEKSKLLNSMKSQTSSSSESIKQKKSALKSKVFAEKVEARKAVNELLKQKIRWMEVYATAYAKFVIVCFVDNVIRTYAYQDEFATDLMFNTIKINTDGLKGYEADELMVLMIKTVRESLAGMNEVITNTDLKIKLAAVKSEYTNK

SEQ ID NO: 4421 - protein, 494 aa, synthetic construct
MNCIAYLRVSSHSQLEKGDSIDGQRNYIESWAKNNNHSIERWYIDDGKSAFNGKREQYELMLNELDNDVVQAEAIVVYSLSRFSRNLRSQLSSLEKLNSLGIKLISTTESLPEAEDDSYMMSTMLGLMNEQYSRQNAKVVCHRLKDTARKGYFTGGPIPFGYISVGVNGDTSKHRKILQIFEEEAVVVKDIFQMSDHGDSGLGIGVKNIAKILNQRGDKRRGTVWNRNSVHRILTNPAYCGNFIFGKNSSEPITVLIPKIISKEQFNRVQDGLKERDFTSTENKKFRSNSLLTGILICPQCGSSMVVTSGKSGKYKYYQCSLQVRQSPDKCSSKRIRKDIIEPIVKEKFCNQLLTEERLKTICKLAREVHKLASKELLSEQLKLTKRISQAKEKSYRLISLIAQGTLEPSKQINDQINDYTITLERLEFQLQQVKRKLTLPVKNFGKRRIEEFAIELKQHLTEIDDASLKQLMLATLNSIEGDVSEKKDTLQRK

SEQ ID NO: 4422 - protein, 530 aa, synthetic construct
MNKTKVYSYIRFSTSRQESGDSVRRQLEIARNYSEKVGGVYQDRSFSDMGISAFKQKERDGLQMMLDMVEDGSIEKGSHIVIERLDRLSRQGISVTQQLITQIVQHGVLLYVAGDDMLLERDSLNDLSIVIRVAVAADLAYKESLQKSQRIKASKIAKKKDGLDGRVTKKVCPFWLKFDEKKQEYVFSDKLPTIQRIIELRQQGFGENKMAQHLNDENVPPPRAAKWSPTSLRKLYTHPAIYGAWQTTEKTEDGKYINSDLIENYYPALLTYEEFMLMNPKSKATTAKDSGLNPFKGLLRCAKCGATMSRQTSKMRTGEKYVAYRCTNAGKGIYCDAVGYRDMDKYLVTACKRLKIKKTLSSDNREKESQLRALEAKLESLQQAILTQTDITALISTSQIVERQINELKATIKPAATVTVDELYSHRDNPQSFNLLARSLIQKVEVEVKAKNRHTKTLLAKFYQHNGYVITLTVLPSGDAFYSTTDLSPIIDNEDYEEPESTEIEEHDDSISNPDYDSSSWSNPINQRNR

SEQ ID NO: 4423 - protein, 545 aa, synthetic construct
MKKYHLYQRVSKQIQAEEGLGIQRQEQVCEHWISEYNKRLLDDGKSAYSKGLVYEDHGKSAYTTANFKRGELGTLMKDIESGKIAKGDLIVIELIDRFSRANVDFVRKKFQSILDAGVKVAITKWNLVFEENMEGISSVSARLLLEIGMHLAYQESSQKSTRIKASRKLLERSGKKSIAKPPFWLVRNLDLRSYTIIEENAEIVRKIFDLKLKFNYGPQKIIKSLGELEIYRYKFDDNGNLVKTTKNSPLSESSINAYIRNPNVIGKLDGKDYYPRIIDDKTYYAVQKRTRENTGGASDIFRNVFVGVGKCGCLIRNEDENGYVKFTKCGYIMAYSSRKVKNPAKGQYLKCNKKRKNTKCKSENINYYLAQNKVYSVLKSLKFDFSQSVDISHLEEKINILNKEMSKIRTFMAKYTDDDEWENHYNVKRMEREKIENEIKNSKSLITGKISSLDLDFSAEKDRVLFNQFLKDNRVIVYFTKENMEIIIGSLNNFSIKCGYDDSSRDIDHIIESYSKNGLVGIEEKVGKSEGKGLLRFNLPTVSGS

SEQ ID NO: 4424 - protein, 545 aa, synthetic construct
MNKYHLYQRVSKQIQAEEGQGIQRQEQACEHWISDYNKRLLSEGKSAYSKGLIYEDRGKSAYTAANFKRGELGALINDIENGKIEKGDLIVIELIDRFSRANVDFVRSQFQRIIDAGVKIAITKWNLVFEENMESVSSVTGRILLEIGMYLAYQESSQKSSRIKASRKLLEDSGRKSIAKPPFWLARNSDLKSYTIIEENAEIIRKIFDLKLNFNYGPQKIIKSLGDLDIYRYSFDENGNLIKTTKNSPLSESSINAYIRNTNVIGKLDGKDYYPRIIDDRTFYAVQKRTRENTGGVGEIFRNVFVGVGKCGCLIRKENENGCGSLAKCGYIMAFSSRKVKNPTKGMYLKCNRKRKSTKCDSENINYYLAQNKIYNVLKSLKFDIDQSVDISHLEEKINTIDKSMSKIRDYMTQYSDDEEWENQYKIKRMEREKIENEIKASKSRITGKLSNLDIDFSKEKDRVLFNQFLKDNRITVYFTKERMEIIIGSLNNFSIKCGYDDSNRDIDHIIESYSKNGLVGIEEKSGKSEGKGLLRFNLPTVPGS

SEQ ID NO: 4425 - protein, 530 aa, synthetic construct
MNKTKVYSYIRFSTSRQESGDSVRRQLEIARNYSEKVGGVYQDRSFSDMGISAFKQKERDGLQMMLDMVEDGSIEKGSHIVIERLDRLSRQGISVTQQLITQIVQHGVLLYVAGDDMLLERDSLNDLSIVIRVAVAADLAYKESLQKSQRIKASKIAKKKDGLDGRVTKKVCPFWLKFDEKKQEYVFSDKLPTIQRIIELRQQGFGENKMAQHLNDENVPPPRAAKWSPTSLRKLYTHPAIYGAWQTTEKTEDGKYINSDLIENYYPALLTYEEFMLMNPKSKATTAKDSGLNPFKGLLRCAKCGATMSRQTSKMRTGEKYVAYRCTNAGKGIYCDAVGYRDMDKYLVTACKRLKIKKTLSSDNREKESQLRALEAKLESLQQAILTQTDITALISTSQIVERQINELKATIKPAATVTVDELYSHRDNPQSFNLLARSLIQKVEVEVKAKNRHTKTLLAKFYQHNGYVITLTVLPSGDAFYSTTDLSPIIDNEDYEEPESTEIEEHDDSIANPDYDSSSWSKPVTQRNR

SEQ ID NO: 4426 - protein, 547 aa, synthetic construct
MRTAYSYVRLSSKKQIQGYGQERQWQAIQAAALAHGWELSEKTFSDLGVSGWKGANIETGALSQFLQCVEDGYIEKGSVLIVENVDRLSRAGVQRAVSLLMQLLASGISIYTFTDSKLYEPDSHNPLMDLMAWALSAQRAFEESERKSQMILNAKAKAREKARLTGEIITRRCPSWLRVNQDKTAFELIPERVETVRKIFDLYVNGYGTPRIGRLLTEEGRKPLTGRAWYPRSISRILQYRAVLGEYQPTLNGKPEGDAIKNYYPAIIDEDQFNEVQAVLKEGGAGKGRRGKEMRNYFAGLLRCSCGEGMHIVSSCVKGKRYYQLRCLQYRISCFGSSWNFYKLSSFVLFALRRLPILEVMGSQDNNNIKELNAKERELTFLLEDTRRQLDNTINAIAALGLNDQLQSKFRELKTSVTNIEKQLSNVKTELETSQGKLVIQKQDSEMLTGRFLELIESTKDIDGRIKLNQVLRRYLSKIEMHADKKEEYRYIKIYRKDGDELVSIQCDHSLKGALFESKDGLETFELLPATDAKRNEISNTLLCTPK

SEQ ID NO: 4427 - protein, 575 aa, synthetic construct
MTKIAYSYTRLSTEKQIKGHGFTRQREAIEKVCCQYGWQLSDQTFNDLGVSAWKGANATTGALSQFIDLAKKGAIRPNSVLIVESVDRLSRQQVDKSLRLMLELLEVGVSIFTLSDSKLYTTNSDSVMLDLMMWLMTAQRAHEESEIKSLRVRAAKKKNKELIRKGIIVTRKCPEWLTVSDDKSCFLVNNERAEIVRKIFTWYSQGFSTKPIALKLNELGIPYWGKSSTWSYRHIRSLLKHRGVIGEIQLLKRIDGRDVADGDPVEDYYPAIIDRGLWATCQQIKSSKTTAKGRVVERGMANLFRGLLKCECGSGLAINSSTVKGRTYRFLRCSQLKTTGCQAKNWHYEKTERILLIALRHSLSSFSEEDHAVSLRECQHYLARISEELKEKERQAENAINYLLDKPSKLLEARLQTLEDDIARLKAIQEQAEHRLEAVHYEKSTALDKVEELQRVLEDIANDDDSRHKANGLLRRLIDTITLGSISNPRSKEFMEVSGNDYHGLIIIKRRDGLELRIEVLKDYGLSISWEGDDFTVIECSPTQQLNSQHVSQRLINLGGQTVDLWDDEGWVASS

SEQ ID NO: 4428 - protein, 545 aa, synthetic construct
MNKYHLYQRVSKQIQAEEGQGIQRQEQACEHWISDYNKRLLSEGKSAYSKGLIYEDRGKSAYTAANFKRGELGALINDIENGKIEKGDLIVIELIDRFSRANVDFVRSQFQRIIDAGVKIAITKWNLVFEENMESVSSVTGRILLEIGMYLAYQESSQKSSRIKASRKLLEDSGRKSIAKPPFWLARNLDLKSYTIIEENAEIIRKIFDLKLNFNYGPQKIIKSLGDLDIYRYSFDENGNLIKTTKNSPLSESSINAYIRNTNVIGKLDGKDYYPRIIDDRTFYAVQKRTRENTGGVGEIFRNVFVGVGKCGCLIRKENENGCGSLAKCGYIMAFSSRKVKNPTKGMYLKCNRKRKSTKCDSENINYYLAQNKIYNVLKSLKFDIDQSVDISHLEEKINTIDKSMSKIREYMTQYSDDEEWENQYKIKRMEREKIENEIKASKSRITGKLSNLDIDFSKEKDRVLFNQFLKDNRITVYFTKERMEIIIGSLNNFSIKCGYDDSNRDIDHIIESYSKNGLVGIEEKSGKSEGKGLLRFNLPTVPGS

SEQ ID NO: 4429 - protein, 559 aa, synthetic construct
MKTKLYSYIRFSSMRQNDGSSYERQIRMAREVATKYDLELVNDYQDLGVSAFKGANSKTGALSRFLDAIGRSVPVGSWLFIENLDRLSRADIVSAQELFLSIIRRGITIVTGMDNKIYSLDTVTANPMDLMFSILLFIRGNEESQTKRNRTNSSALIKIKAHQENPQNPAVAIEEVGKNMWWTDTTSGYVLPHPVYFPVVQEIVELRKNGRSTAEILDHLNETYTPPPAVSNKKHSKWSRAMVERLFHTRALIGIKEVSVDGVNYELKDYYPRVIDDPTFYHLKKNIGARAWNFGDKEEVKPIPLLSGIGLLKCDHCGCAMVKVKGTNKRSDQYRYTCDATRSRRLDCEHPNWSFRGDQLEKAVLQLLADKIWIAEDKANPVPALKVQVDEISRKIDNLIALSAMTGATKELADQITTLNSERETLYNQIKMAEEEMYSVDSQGWEKLAEFDLEDVYNEERLKVRFKIKQALKRIGCSRIDRNKNLFVLEYIDGKTQRVVIENSRGTRKGQIFVDLKTINDRQILESNGLVLHPCLDMLTDKNWKPEEEIPGPLQEFGI

SEQ ID NO: 4430 - protein, 508 aa, synthetic construct
MKKAIAYMRFSSLGQMSGDSLNRQRRLIAEWLKVNSDYYLDTITYEDLGLSAFKGKHAQSGAFSEFLDAIEHGYILPGTTLLVENLDRLSREKVGEAIERLKLILNHGIDVITLCDNTVYNIDSLNDPYSLIKAILIAQRANEESEIKSSRVKLSWKKKRQDALESGTIMTASCPRWLSLDDKRTAFIPDPDRVKTIELIFKLRMERRSLNAIAKYLNDHAVKNFSGKESAWGPSVIEKLLANKALIGICVPSYRARGKGISEIAGYYPRVISDDLFYAVQEIRLAPFGISNSSKNPMLINLLRTVMKCEACGNTMIVHAVSGSLHGYYVCPMRRLHRCDRPSIKRDLVDYNIINELLFNCSKIQPVENKKDANETLELKIIELQMKINNLIVALSVAPEVTAIAEKIRLLDKELRRASVSLKTLKSKGVNSFSDFYAIDLTSKNGRELCRTLAYKTFEKIIINTDNKTCDIYFMNGIVFKHYPLMKVISAQQAISALKYMVDGEVYF

SEQ ID NO: 4431 - protein, 452 aa, synthetic construct
MKAAIYIRVSTQEQVENYSIQAQTEKLTALCRSKDWDVYDTFIDGGYSGSNMNRPALNEMLSKLHEIDAVVVYRLDRLSRSQKDTITLIEEYFLKNNVEFVSLSETLDTSSPFGRAMIGILSVFAQLERETIRDRMVMGKIKRIEAGLPLTTAKGRTFGYDVIDTKLYINEEEAKQLRLIYDIFEEEQSITFLQKRLKKLGFKVRTYNRYNNWLTNDLYCGYVSYKDKVHVKGIHEPIISEEQFYRVQEIFSRMGKNPNMNKESASLLNNLVVCSKCGLGFVHRRKDTVSRGKKYHYRYYSCKTYKHTHELEKCGNKIWRADKLEELINDRVNNYSFASRNIDKEDELDSLNEKLKIEHAKKKRLFDLYINGSYEVSELDSMMNDIDAQINYYEAQIEANEELKKNKKIQENLADLATVDFNSLEFREKQLYLKSLINKIYIDGEQVTIEWL

SEQ ID NO: 4432 - protein, 521 aa, synthetic construct
MKVAIYCRLSREDDDKLYENDESESIQNQKSMLINYAIERSWDIYNIYCDEDYSGIDSERPEFNKLLEDAKNHKFDIVLCKTQSRFTRDMEMVEKYLHNKFVEWNIRFVSLVDHVDTLDKGNKKSRQINGLVNEWYLEDLSENIRRTFDSKRKQGLHIGSFVCYGYKRNPENKNKLIIDTEVSDVIRLIFNLYEQGNGVTKIAQILNDKGILTPTKYKQSQGINFKNQGKNIDYWCESTVSKILKNEVYIGNLVQGYNKKVSYKSKQMKNQPKSEWIIVENTHEPIITKEQFYKVQEIFKSKTRRCKNGEVHLFANKLVCLDCGTKLYKCRNDRGYIYFSCKGSKKLYGTCTPHSIGYENLKNLVTEKIREKILAFYNFDNISDDLFVSNDNLNKAKLLQNKVELLSKEMKDINNAIKELYLNKVSSKVPEDVFEDLNTSFLTDKSAKQKELNKIQNDLSNLKEKELNSKFIKEQKEKIINHFKNFKELNYDIVNSFIDYIEIGEKNKITKSQDVIIHWNF

SEQ ID NO: 4433 - protein, 506 aa, synthetic construct
MRTVITYLRFSSATQGAEGADSTRRQNELFKQWLRKNSDAQVVASFNDEGLSGYKGKHLSGQFGDMLSRIESGEFPEGTILLVEAIDRIGRLEHLETEALMNRIIAHGIEIHTLQDGLIYTRDALSDDLGISIIQRVKSYLAHQESKQKSFRVSEKWKQRAKLALAGKQRLTKMVPGWIDPGTFTLNEHAETVRLIFKLLLSGESLHNIARHLQANSISSFSRRKDANGFSVHSVRTILRSETTIGTLPASQRNDRPAIPNYYEAAIDAATFNKAQEILDKNRKGRTPASDNPLTINIFKGLFRCQCGASVHPTGTKNKYAGVYRCNNNPDGRCDVPPLKRKPFDKWMIDNFLGMIDVGNDGEAEKEIASLQHEVEIVTTRIKKATALLLEMDDIDELKIQLKELNQKRTELQTTIDNMRRKASLTDKELPQLKDIDLTTKAGRVECQLILSKHLKGLTLGKDSVTVTLQNDTEITIPTNPLPLNDGTSIFEIAEKNLLNIDTFQL

SEQ ID NO: 4434 - protein, 452 aa, synthetic construct
MKAAIYIRVSTQEQIENYSIQAQTEKLTALCRSKDWDVYDIFIDGGYSGSNMNRPALNEMLSKLHEIDAVVVYRLDRLSRSQKDTITLIEEYFLKNNVEFVSLSETLDTSSPFGRAMIGILSVFAQLERETIRDRMVMGKIKRIEAGLPLTTAKGRTFGYDVIDTKLYINEEEAKQLQMIYDIFEKEKSITTLQKRLKKLGFKVKSYSSYNNWLTNDLYCGYVSYADKVHTKGVHEPIISEEQFYRVQEIFSRMGKNPNMNRDSASLLNNLVVCSKCGLGFVHRRKDTVSRGKKYHYRYYSCKTYKHTHELEKCGNKIWRADKLEELIIDRVNNYSFASRNVDKEDELDSLNEKLKTEHTKKKRLFDLYISGSYEVSELDGMMADIDARINYYEAQIEANEELKKNKKIQENLADLATVDFDSLEFREKQLYLKSLINKIYIDGEQVTIEWL

SEQ ID NO: 4435 - protein, 507 aa, synthetic construct
MKRAISYIRFSSEKQSRGDSLRRQSKMVTDWLKAHPEYHLDQDLSFRDLGVSGFTGKHLQGGLGDFLTAIEKGLVKAGDTLLIESLDRLSRQDVDQASELLRNILRSGVDVVTLSDGEHYTKESLKDPLALIKSILIMQRSHEESLRKSERIQAAWNRKKELISEGIKISKRCPAWLKLNDDRKSFSVIPEKVETVKGCFQLRLEGKSIWEIVRTLNDEGHQTLNQYKAGSFGQTSVQDLLKNRSVIGYFTPKGCEEIAGYYPAIIDETTFYKVQQLSYSRYGRKPASDKPMAVNLFKGVIRCSECGHALIITGFSDTRSGIYRCPLRNENRCSAKGLSRKQTDGTLLTLLSRLDRFDSDMTNTIDTLKLHREHISSNIEKLVQLSLEIEDLSAITIKLKQLKGELSQVDADIEKETQRLKSIDVGCLSDCDLTTKAGRIEAQLIIKSAVKEVVLNTAKRRCKVTFHNGKVIDLPITENPSEDVTEAIQSLSEVTERGLIDVDEVII

SEQ ID NO: 4436 - protein, 452 aa, synthetic construct
MKAAIYIRVSTQEQIENYSIQAQTEKLTALCRSKDWDVYDIFIDGGYSGSNMNRPALNEMLSKLHEIDAVVVYRLDRLSRSQRDTITLIEEYFLKNNVEFVSLSETLDTSSPFGRAMIGILSVFAQLERETIRDRMVMGKIKRIEAGLPLTTAKGRTFGYDVIDTKLYINEEEAKQLRLIYDIFEEEQSITFLQKRLKKLGFKVRTYNRYNNWLTNDLYCGYVSYKDKVHVKGIHEPIISEEQFYRVQEIFTRMGKNPNMNRDSASLLNNLVVCSKCGLGFVHRRKDTVSRGKKYHYRYYSCKTYKHTHELEKCGNKIWRADKLEELIIDRVNNYSFASRNVDKEDELDSLSEKLKIEHVKKKRLFDLYISGSYEVSELDAMMADIDAQINYYEAQIEANEELKKNKQIQENLADLATVDFDSLEFREKQLYLKSLINKIYIDGEQVTIEWL

SEQ ID NO: 4437 - protein, 507 aa, synthetic construct
MKRAISYIRFSSEKQSRGDSLRRQAKMVTDWLKAHPEYYLDESLTFRDLGVSGFTGKHLKGGLGDFLTAIEKGLVKAGDTLLIESLDRLSRQDVDQASELLRNILRSGVDVVTLSDGEHYTRESLKDPLALIKSILIMQRAHEESLRKAERIQAAWDAKKEAAKAGIKISRRCPAWLKLNDDRKSFSVIPEKVETVKRCFQLRLEGKSIWEIVRTLNAEGHQTLNQYKAGKFGQTSVQDLLKNRSVIGYFTPKGCEEISGYYPAIIDETTFYKVQQLSYARYGRKPASDKPMAVNLFKGVIRCSECGHALIITGFSDTRNGIYRCPLRNENRCSAKGLSRKQTDGTLLALLSRLDRFDSDMTNTIDTLKLHREHISSNIEKLVQLSLEIEDLSAITSKLRQLKNELSQVDADIEKETQRLKSIDVGCLSDCDLTTKAGRIEAQLIIKSAVKEVVLNTAKRRCKVTFHNGKTITLPITENPSDNVTEAIQSLSEVTERGLIDVDEVII

SEQ ID NO: 4438 - protein, 484 aa, synthetic construct
MKDTFQERSIALYCRVSTDEQAREGISLDEQQERLKAYCRAMGWSEEPLLFIDDGYSAKNLDRPELNRLLKEVKKGTISKILVTKLDRLSRRLLDLLKLIDTFQEYNVSFISISESFDTNTPSGRLTLQVLGAVAEFERERIRERVFENMLHAARQGKWLTQSPYGYRLQNKELVIYEPEAQIVRNVYDWYLNKGLGYYAIAKKLNEEGIASRQKKEWSIRAIKRMLTNPVYKGTLVWNRMDSSKSKRVKKDDADWVVLEDACPAIIDQATWEQVQKRVNKKQMAPRAQTSPHLLGGLLKCGRCGSGMSIGWSGSAKNRYRVYRCSANKNKGTCTSKQYRADDVESWFKHGLLKLADSINSQMIPHLIQKAAENEESTIEQKIRTAKNRYKRKVEAYTAGLIELEDLNEEKKRMEQIIAEVQKTENASSVDVKKLEAMVKEKINNVIDAIDVLPVPKAKSLIKTIVEKVILLDEKDIEIVLNIQ

SEQ ID NO: 4439 - protein, 653 aa, synthetic construct
MFDYDKSIFDGICIPYARFSTTEQDKVGRKSLERQLEEAKRYASQNNLYISDDLIFTDKGVSGFAKQGQLSKTFEKGQMALLLDVLEDVPFKERENIYLCFHAFDRFSRQHPEVAYEQFSRILKRGFNIVTTIDDCLYSSKEADLESMLISIIKMSSAHYESEVKSVYVSDAHRRRRETLEYLYNHPTQKGKHKHIGLKQSTTPRWIIESEIIYDFVDDNGVERKDSFSKFSLDEAKAEIINQIFDWKIQGLGHTKICQLLNQKQIPTFEDGNCRKAEKWHTFAISNLFKNKSTIGTFTLKTVEDDEYFCESERIFKTRSNKVDATSEMENYFPAVVTVEKYEAALKIIAMNNKGEKISEPEDKTHVFSKVLRCTCGGRLVFKGTRKTGKSEKADWFEYLRCEKAILKDGCDAENIIYKDFEMAFLRFATSSNYTVFSTTQSKLKTKLKRLSIKQSHLNSEKEHLLLEAKGLKKTFESIVTQNLDATLLLDSISKNKSSLNTVQNELVKIDNQVKGVEREYEKSGKPIDKLTIKKGLRSEDYSKRLLMRKAVNQQLRKNVVHMEVCSTKLLKFVIVCFDDYVIRTYAYQDEFSSDLMFNFIKINVENLDESEAYDLIIHLFKEVRISLSGDNAVITNFDLKVHLSGIKEKYLK

SEQ ID NO: 4440 - protein, 673 aa, synthetic construct
MIGEETLREEIFQYDKTKFKGICVPYARFSTKGQSKVGKKSLERQLSKAREYAKRNNLFINEDLIFTDKGVSGYSNQGELSKAFKKGQMATMLLLLEEVPPEERDNVYITFHNFDRFSRMSPDAAQAHFNKILNRGFKIVTTIDNQLYDRRDKGMSNMLISIIKMTTAWQESLNKSIYITDALSRKKKVIEYLYNHPSQKGKHKHIGVVQPSIPRWIDQENITYAYIDADGSKRTDTFKKFSLNQYKAEVVRKIFELKIAGLGYTRICQKLNNDGVEVFKQGRFKKAKKWHPYAVQNIITSDKVLGHITLKEMVTEEYHCKETDEIKTKKVKKKVTSKLENYYPAVVDEEVFRLANVLKFQEKKGKPLGRIGERTNIFATFMSCYCGATLQYSRSQINKRSNKAPVYREQLRCNNALVKNGCFDDYINYVELEQAFFKYVNHIDFREVCLVGDKSLETEIKNLQAEITYLNGQKKELKLKNSGLEKTFESAISQGLNADYVLVALNEAKKSADLIETKINDLKVRITKLQLSLDSKESDFLDIVEYSKRIKNSSTETKIMMRKKLNEFLHSKIKWMEVCSSKHSKFVILCFHDDVIRTFAYGENYANDLMFNTIKISYEVDDSQLNYELFLIYIHQIKRSLRGETEVVSNRDLIEALQRLKRKFYAGKGINYV

SEQ ID NO: 4441 - protein, 499 aa, synthetic construct
MRLFSYIRFSTEKQIEGDSIDRQTNSAKKYASLHGYDFQNKSFSDLGISGFKNVDRDGLTSMLEAIQSGGISRGDLIFIENVDRLTRQGFQHANDLIVKIVNSGVLLHFERESVTFKSPSDLNDMMSLMKVCMSASLAFEESQKKSERIASAKQKQRNLMKQGIAVKHKTPHWIEFDEDGKRFHLGNTKIIKRVIELRRDGFSVSKIISTMNKEGYKAPYGGTLRSSTVKQWLQSPALYGAVMVEDELIKDYYPALMSYDEATKLYNKLPHKRAPENQNNHLRGLIYCSKCDSAMGLRFTTSSGKSKKKIPTFYCIKQREGGCDAPSVSNIMPLIEKMVSHMKTIENKVDVAAITARIDEISANLERISKSVTTDNFKMMMDMMDKFEKEKRELQTSLTVSDDVDTDTLLNHIDNPVEFNNIARRYIDRIKVTFKGGTRRKRTFHFKLIQRNGHIVNLTRFGSGQITIGKTEILSTFGKPESEFGEDLTTLEDSDMFYE

SEQ ID NO: 4442 - protein, 516 aa, synthetic construct
MNKTKVYSYIRFSTSRQESGDSVRRQLEIARNYSEKVGGVYQDRSFTDMGISAFKQKERDGLQMMLDMVEDGSIEKGSHIVIERLDRLSRQGISVTQQLITQIVQHGVLLYVAGDDMLLERNSLNDLSTVIRVAVAADLAYKESLQKSQRIKASKIAKKKAGIDGRVTKKVCPFWLQFDEAKNEYVFNEKLPTIRRIIELRQQGLGENRIAQHLNDENIKPPRAAKWSPTTLRKMYTHPALYGAWQTTEKAENGQYIDSDLIENYYPALLTYEEFSLMNPKSKATTAKDSGLNPFKGLLRCAKCGATMSRQTTKMRTGEKYVAYRCTNAGKGIYCDAVGYRDMDKYLITACKRLKIKKTESSDNREKESQLRALEAKLESLQQAILTQTDITALISTSQIVERQINELKATIKPATTVTVDELYSHKDNPQSFNLLARSLIQKVEVEVKAKSRHKKTLFAKFYQHNGYLITFTVLPSGEAFYSTTDLSEIIEHKDSLESTAVEEMLVDNGKDASSW

SEQ ID NO: 4443 - protein, 644 aa, synthetic construct
MFNFDKSKYKGICVPYARFSTDVQDEIGRKSLERQIEEAKRFSNEYGLFFDEDIAFVDRGVSGFALSGDTAKTFQKGQMQLMLELLEEIDVAEREFIYITFHNFDRFSRMSPDVASRYFEQILDKGFNIVTTIDNEVYKRNSGNLEQMIISIIHMSTAYYESEVKSIYISDSRQRKRDVIEYLYNDETQKGKHRHVGIKACCPRWIKTKDIIYEYVGKDGSVKKEALKQFEIDEERAKIINYIFDLKIQGLGNGKICQVLNEQNIPVFHSGNYTKAKYWNLSTISNYLKNENVIGHSYLYHKAKEEVFNEKTQTFSTKRVRKIATDKLYNYYPAIMSEEKFNQAKEAVKANSNKVDRSKTSEKPHMFSNLMRCSCGTRLHYKLTKKNNVKKVDDYFEYLKCERSALNDDCEGENINYKNFEAQFINFIRYIDVNEILDHANGEEAETQGLTELEEREAAINLKITGLTKTYQGLINAGVDGSDVLVELEKAKGELQEVEFEKSKLLNSMKSQTSSSSESIKQKKSALKSKVFAEKVEARRAVNELLKQKIRWMEVYATAYAKFVIVCFVDNVIRTYAYQDEFATDLMFNTIKINTDGLKGYEADELMVLMIKTVRESLAGMNEVITNTDLKIKLAAIKSEYMNK

SEQ ID NO: 4444 - protein, 507 aa, synthetic construct
MKRVISYIRFSSEKQSRGDSLRRQSKMVTDWLKAHPEYYLDESLTFRDLGVSGFTGKHLKGGLGDFLTAIEKGLVKAGDTLLIESLDRLSRQAVDRASELLRNILRSGVDVVTLSDGEHYTSESLKDPLALIKSILIMQRAHEESLRKSERIQAAWDAKKEAAKAGIKVSKRCPAWLKLNDDRKSFSVIPEKVETVKRCFQLRLEGKSIWEIVRTLNDEGHQTLNQYKAGKFGQTSVQDLLKNRSVIGYFTPKGREEIAGYFPSIIHETDFYKVQQLSYARHGRKPASAKPLSVNLFKGVIRCSECGHALIITGFSDTRSGIYRCPLRNENRCSAKGLSRKQTDGTLLALLSRLDRFDSDMTNTIDTLKLHREHISSNIEKLVQLSLEIEDLSAITSKLKQLKGELSQVDADIEKETQRLKSIDVGCLSDCDLTTKAGRIEAQLIIKSAVKEVVLNTAKRRCKVTFHNGKVIDLPITETPSEDVTEAIQSLSEVTERGLIDVDEVII

SEQ ID NO: 4445 - protein, 505 aa, synthetic construct
MPFLTSGFHQRSKLKATHSADNLRWFTDWLKAHPEYYLDESLTFRDLGVSGFTGKHLKGGLGDFLTAIEKGLVKAGDTLLIESLDRLSRQDVDQASELLRNILRSGVDVVTLSDGEHYTSESLKDPLALIKSILIMQRAHEESLRKSERIQAAWDAKKEAAKAGIKVSKRCPAWLRLNDDRKSFSVIPEKVETVKRCFQLRLEGKSIWEIVRTLNDEGHQSMSQYKPGKFGQTSVQDLLKNRSVIGYFTPKGCEEIAGYYPAIIDETTFYKVQQLSHYRYGRKPVSDKPLSVNLFKGVIRCSECGHALIITGFSDTRNGIYRCPLRNENRCSAKGLSRKQTDGTLLTLLSRLDRFDSDTTNIIDMLRLHREHVSSNIEKLVQLSLEIEDLNAITSKLKQLKGELSQVDADIEKETQRLKSIDVGCLSDCDLTTKAGRIEAQLIIKSAVKEVVLNTAKRRCKVTFHNGRAITLPITENPSEDVTEAIQSLSEVTERGLIDVDEVII

SEQ ID NO: 4446 - protein, 506 aa, synthetic construct
MRSVITYLRFSSATQGAEGADSTRRQNELFKQWLRKNSDAQVVASFNDEGLSGYKGKHLSGQFGDMLSRIESGEFPEGTILLVEAIDRIGRLEHLETEALMNRIIAHGIEIHTLQDGLIYTRDALSDDLGISIIQRVKSYIAHQESKQKSFRVSQKWEQRAKLALAGEQRLTRNVPGWIDPETFKLNEHAETVRLIFKLLLDGESLHNIARHLQSNGIRSFSRRKDANGFSVHSVRTILRSETTIGTLPASQRNDRPAIPNYYEAAIDASTFNKAQEILGKNRIGRTPASDNPLTINIFKGLFRCQCGASVHPTGTKNMYQGVYRCNNHLDGRCDVPPLKRKPFDRWMIDNFLGMIDVVSDGETERKIAALHHEVETVTARIKKATALLLEMDDITELKAQVKELNQKRTELQTTIDILKRKTSLTDKELPQLKDIDLMTKAGRVECQLILSKHLKGLTLCKDSVTVTLQNDTEITIPTNPLPLNDGTSIFEIADKELLEIDAYQL

SEQ ID NO: 4447 - protein, 676 aa, synthetic construct
MAYTKGKNKTIKLWTSKKAALYVRVSTRYQVDKDSLPFQRKKLKEYCKFLEINDYVIFEDDGYSAKNTDRPRFQEMMSRIRSGEFSHVIVWKVDRVSRNLLDFAAMYQELKDHKVTFISMNEQFDTSTAIGEAMLKIILIFAELERNMTSERVTGIMLDRAEQGLWNGARMPVGYRWNEQTKFPEPDPEEVKIVQLIFDRYEEWRSSIKIARFLNNNNFKSKRGGEWTSRLIYDIIRNPFYIGTYRYNMRESGRGPLKPESEWVIRENNHPGIISKEQFDRCNKIMDENAARRDTSDMRARKFVHTFSGHLICSECGSNMIACKDHARANGWRPSIYRCAKRSRMMTCDNSKTVNEVYLGSFVFNYIANLARIQKNLKNLTSVKKLESELLKGNTFESVSGIDPEGLNLTFQAFLYSHPGKGTYLPDIALLNKSDDTKSRDQINLLSAEIEKSKNAIARLTDVYLYDPASMTKEEFAVKKKELIKKIEGMEHQLTELSAHSENTDLTDLSFIKKASAFLVAQRIISKSFIDYVQLAQELDNAILKNFVDQIIDQIVIKDGRIQAITFINGLTHEFFYNGPAELPVCKKCGGRIGSTCGCRTRTFSFNGKRYQRIKVGDPRDALYGQKNPVCPECYAKEGRWHHWLCGIELCPICGKPLQTCEHGPNGKSNFTFNQL

SEQ ID NO: 4448 - protein, 506 aa, synthetic construct
MRSVITYLRYSSAIQGAEGADSTRRQNDLFKQWLKKNGDAQIVASFSDEGLSGYKGKHLTGQFGDMLARIEAGEFPEGTILLVESIDRIGRLEHLETEALMNRILGNGIEIHTLQDGLIYTKDALADDLGISIIQRVKAYIAHQESKQKSFRVSQKWGQRAKLALAGEQRLTKMVPGWIDPETFKLNEHAETVRLIFKLLLDGESLHNIARHLQSNGIKSFSRRKDANGFSVHSVRTILRSETTIGTLPASQRNDRPAIPNYYEGVVDIPTFNKAQEILDKNRKGRTPASDNPLTINIFKGLFRCQCGASVHPTGTKNKYAGVYRCNNHLDGRCDVPPLKRKPFDRWMIDNFLGMIDVGNDGESERKIAALQHEVEIVTARIKKATALLLEMDDITELKAQVKGLNQKRTEIQTTIDTLKRKTSLTDKELPQLKDIDLTTKAGRVECQLILSKHLKGLTLGKDSVTVTLQNDTEITIPTNPLPLNDGSPIFEIADKELLDIDAYQL

SEQ ID NO: 4449 - protein, 542 aa, synthetic construct
MAAKARVYSYLRFSDPKQAAGGSVDRQLEYAARWAADNEMELDASLSLRDEGLSAYHQRHVRQGALGVFLRAVEDGQVPPGSVLIVEGLDRLSRAEPLQAQAQLAQIVNAGITVVTASDGREYNRERLKAQPMDLVYSLLVMIRAHEESDTKSKRVKAAIRRQCQGWIAGTWRAPIRVGKDPHWVLETEAGRFELADDRAAAVRLVIEMFKQGHGAVRIVRELADRGLKITDSGRSASSHIYRLLANRMLIGEKSVEVDGETFRLEGYYPALLTPADFADLRYLAEQRGRRKGKGEIPGVVTGLGITYCGYCGAAIVAQNIMGRRRAADGRPYPGHRRLHCVTYSQSAGCKVSGSCSVVPVERALMLYCSDQINLTRLMEGDSGTVSLAAQLAGARQRVAELEAQVQRVTDALLLDGGEAPAAVLRRVRELESQLANERRDVDSFEHQLAASAANVAPAAADAWRELVNGVEQLDYDARMLARQLVADTFSKIVVYQSGFQPKIDADAIGLVLVAKRGATRLLNVDRKTGEWRTAEDVNLNG

SEQ ID NO: 4450 - protein, 536 aa, synthetic construct
MQRIDGRRAALYARFSTDLQNDRSIEDQLALCNGYAVREGLTVTHRYEDRAKSSATLFGRDGLLALIADAKERVFDVIVVEALDRISRNPADLHPLFQTLDFVGIRVLEVHRGQADALTVGIQGLFGQMFLDQLKEKTRRGLAGVVRDGRSAGGRAYGYVTVPGQPGQLTVVEGEAKIIRRIFDEYIGGATTREIVARLNAEGIPAPRGSVWRSTVLTGNAARGYGILWNDLYDGKRIWNRVRMVRDPETGKRVSRTNPESEWQIEAAEHLRIVPPATFAAVRKLRLARMELRGEKRKRPARPLSGLMACDCCGGSIVIRARRPNGAVQAACSNAVEAGTCTERKSVRLDQIETAVFAELAQLLREPDVMGEYLKAYHEERQRLAREKGRTRATLERSAAKARGAFDRAHQLYIDGVTDGPKAKASILELRLAAERAEAALAEADPPEVLTLHPDATNRYLAALTDLAPSLSDLDTPEARKAMDTIREWISEIRVRREGDEVHVTVYGYLAALVEPSTRRGEMVAWGGLEPPTPAL

SEQ ID NO: 4451 - protein, 524 aa, synthetic construct
MQIADLYIRVSTDEQADKGYSQRDQEERLRKHCNSQNIQIDRVIFEDHSAKTFDRPEWKKYMFSFRRGKPAKEVRLLLFTKWDRFSRNTSEAYQMISKLTKLNISPQAIEQPLDLRVPENKLLLAIYLSTPEVENDRRALNVIYGMRRAIKEGRMMGTAPYGYINKCTEDGRKYVAVKEPEASNIIWAFKEVAKGHLPSAKVRELMNKREGRKLTRNSFLEALRNVVYCGNIVLKAHGDEEERIIKGKHEPLISEELFMKVQHILRRKSNKDIFLPGGRVINEDRYPLRGLLLCPKCGKNLTASSAKGRSKHYYYYHCILACGFRHNSEIVNELFEAELSKFEFIPAFANLLKTIMMKNFSSVTDGLDDERKILTEQVIRIEQKIAKARDLYLEDKLDEEDFRAVKTKNKDELDRLLFKLNSIKQTKKDNNVELKLDAALKAVTKISERYKKADSVDKRAIIGLIYPEKLTFDGENFQTAKINTFVHTIFLIKKELGNKKNRQRSEKSSNVGFVTSTGFKPVTF

SEQ ID NO: 4452 - protein, 525 aa, synthetic construct
MQAVYLYIRVSTDEQAVKGYSQRSQLDRLVHYCKDHNLIVTKTIFEDYSAKTFNRPEWNKLFAELKLTKNQSALILFTYWDRFSRNIMDAYKMLERLQNMKVSIQAIEQQIDFSIPESKIMLAMYWATSEVENDKRSRNVRLGMQKARLEGRWINKAPLGYRNKITSDGKKYIEIYEPEAYVIREAFIAIVRQNKYCLTEIYKDAVSNGLNCSRSAFYRLVRNPIYCGKIKIPAFEDKAERIVEGTHERLIPVVLFDQVQRIIKGADFNHPKKLTSKRIVNENLIFRGVLQCPNCGNTLTGSGSQGHTKKYYYYHCVGHCSYRIRADAINLSFLSFLKNNRVVEPFLELANSISKEIYGEEHHDYIQKKEEIKKEMEKLIDRGFNAQKLFSNGNIDYDDYILIRSSCQESLKDNTDKLRRQALKIVAEKHTEKGTDYIINHLGEFYENSNTITKQRIIRLFFPEKVKVLEGNIEKMLSESVKTIFGLTASASKIKEIHGQQTEQAIVEFFKELYFLGYEQNLKNI

SEQ ID NO: 4453 - protein, 904 aa, synthetic construct
MKVADLYIRVSTDEQADKGYSQRDQEDRLKKYCSSNNISIGQIIYEDHSAKSFNRPGWIRLLTTLKKKSCKTDLILFTKWDRFSRNAGDAYQMISTLAKLGIEPQAVDQPLDLSIPENKMMLAIYLAAPEVENDRRALNVFYGMRRAKKEGRVMGKAPFGYANKSRENGEKYIVLQEPEASAMNWAFNEIAKGVLASNQIRKRVNELTIKKVSRTSFHVAIRNPIYYGKVFLEKHKDEEAHFVEGQHEALISEELFNRVQEILDGKRRLQRPNTKILSGEHFPLRGFLVCPKCGKNITASASKGRNNRYYYYHCNAACGFRHRAELVNSVFEEGLKQLEMTEPAKKLIEKVFLDNYQKFITAPQDERKKISDEIDRLNSRISLVRNKLLSEVITDEEYLEIKKEYKDQIEKLETQLNDKPIENKVDIPKLLEKALETLTNIWKVYTEGDIAVKRQIIGSIFPEKLEFDENHYRTKRINAVAHYIFQINNGLSQNKNSRNDNNNHFYCYVDSQGFEPQMTEPKSVVLPLHHESLFVLVVQIYSFFLYIQELFEIFFKFTVELFPENMLIDFNNLNINKLSFDTEFEKKVKIFLEEWFSETTKVNVQTSGSTGVPKIFEIEKKKMINSAVMTCNFLGLKEGDSALLCLPVEYISGKMMIVRAIERKLKLRIADPSLKPVEDLEEETDFCAMTPLQVENSLEKLHLIKNLIIGGAAVSESLKNKMLQMKLSNSNRIFETYGMSETLSHIGLKQLMPEQEDYFTVFENVSISLDDRGCLKISAPNVNASELQTNDLVDIKNEKQFKFLGRIDNVINSGGAKIFPETLEALVKKEIPNEALFIGLPDESLGQKLILVIEGNESQEIVKKISEIPFEKNFHRPKEVIFISEMPRTPNGKVNRTELYKKII

SEQ ID NO: 4454 - protein, 522 aa, synthetic construct
MKLSHILQPNMKAAFYGRHSTDKQDMDMQLNSVMEVIRKYNCIHTHSFLDKAVSARKNKITSRKELENMFEAAKRKEFDFVIVYKSDRLARDPLEHQTIRIVMKTLDIPIIISSTEIVYNTDTDLIVQLMEDGFTKYEVDTIIARTRSGLENKAKQGKWLGGKPPFGYTYDKNSGQFIEHPEELCYVKEIFNLYLNGHGFQHIANTLPSGSRRGKDWGKENVKAIVLNPFYCGLLSWRRQTDGKQNARDIWIEAPNHYVKPIISRTTWESCWRIYSEKRNGNMVPKHYKTSFLLQGLLSCEKCQELMKTKNQQTVSSTNKKYGGKIYFCTNCKLRINADLLHDKVVNQTLTDVKISGFQNVYHAIEQKIQYEIQGLNNDIQKHQRLFENYTIKFHNITEELKQRMKNNDDKRFLKSLAIYRLDVQRKLDGVTQQINDFKQQITLKEKVEKSKETWLHTLNEVFQDDVKLQEISDMDKRRFLLPLIQSVSIKENKKRNEYDISLQLRTDFSKRDVQNQISLIL

SEQ ID NO: 4455 - protein, 521 aa, synthetic construct
MKVPVWCYARISTLKQIDGFGIQRQINTINQFLQCVELDHRLPFTLDVDNVTQMVAEGKSAFRDKNWNEKTKLGQYRKLVMDGVISDSVLIVENIDRLTRLDPYMAIEIISGLVNRGTTILEIETGMTYSRYIPESITVLVMQCNRANGESKRKSIMMQKSHANRYGKVSKVRPRWFDVVEIDGIKQYRPNETAKAIQRMYNDYINGIGAAHIVRTYGNTDNGKAWTLVTVLRALSDKRVADDARYPPIIDKELYDSVQALKAATNKKGNTHQKNMLNIFSGMSRCPVCNQSIIVKRNSHGNLFTVCLGKRTNKTCEARSISYFALERPLLTAIRGLDFSEVYKHEDKNVLTLRDQWIQNERDIAAFRERLNKASRHEKFAILDELEIMNREQEELTIRLKSVDVPKDIQLTFDDDKLDLDTNYRIELNNRIKKLIQYINIVREDVTKSSYTIYCTIKYWTDVISHLVIIDVNIKRTGTGGTNTLTTTLRSVSSLNMDGTVSGNPDSDAWEYWKSFLDNLK

SEQ ID NO: 4456 - protein, 488 aa, synthetic construct
MKGVIYARYSSDNQREESIEGQLRECKDYAERNGITILGTYIDRALSAKTDNRPEFQKMIKDSAKGLFDVVLVWKLDRFARNRYDSARYKNLLKKNGVKVISARENISEGSEGIILEAMLEGYAEYYSAELSEKVIRGLTDNALKCKYNGGTVPMGYYIDEQQFYQIDPKTAPVVLEMFTKYSEGATMQELVNLLNSRGMRSIRGGKITLNIMNHLLKNRRYMGEYSYRDVVKEDGIPAIVPKELFERVQERLAKNKKAPARHKAEDDYLLTTKLYCGKCGSFMVGESGTSHTMKVHRYYRCVNTKKKKLCDKKAVKKDWIEDLVVNYTMKAIMNDEVMERLIDTLMELQKKESTDLPLLKKQLAETEKGINNMLNAIQAGIFTPSTKQRLDELEETKSQLEVSILQEEMHKPLLTREQIAFFIYRFRKFDVTKREQRQRLIDSFVNAVYLYEDKIILTFNYKDGSKTITLADVEGSDLSSFGASKKK

SEQ ID NO: 4457 - protein, 560 aa, synthetic construct
MYYQSNTAAALQFPYTAMSSEELTALYCRLSRDDELQGDSNSIVNQKKILEKYAREHGYSNFKFYVDDGISGTTFNRPGFQQMIADIEAGLVKRVIIKDMSRFGRDYLQVGMYTEIMFPEHDIHFIAVNDGVDSTQGDNEFTPFRNIINEWYAKDTSKKIRAVMKVKGNAGEHLTVLPPYGYIKSSDDKKQWVKDEEAAQVVYEIGLYIMDGLGPSQIARKLTERKILTPAAYYASKGRTTNVTKKGSPYAWDSSTIADIMDRWREYLGHTVNFKTRKKSYKSKKTLLNPESEWKIFENTHEAIWTEAIADAARLARQTRRRPTKMGEMGMFSGMMFCADCGSIMYQCRATNFRRDQEYYLCSGYRKSRDVCGQTHSIRTVILEELVLQNLREIVSFASQRKDDFVKMVMDADMRQRNRGLAKRQKTLADAEKRITELDTIFKRLYEDTISGKLSDERFQKLSADYEKEQHQLQEVAAVLRGEIEAEEQKSANVERFLSVVERYTEIPELTPCILHEFVEKIVVHAASDPKGKNRTQEIDIYYKGIGALEVSKVTSSRQE

SEQ ID NO: 4458 - protein, 538 aa, synthetic construct
MLRQATQNLITALYPRLSHEDELQGESNSISNQKRILEAFAKQNGFTNLRWYTDDGYSGANFQRPGFQAMLADIEAGKVGTVIVKDMSRLGRNYLQVGFYTEMLFPQKGVRFIAVNDNVDSANGGMDNDFTPLRNLFNEWLVRDTSKKIKAVKRAKGMSGKPVTSKPVYGYLMDEDENYIVDEETAPVVKQIYQLCLAGNGPTKIARMLTEQQIPTPGTLEYRRTGSTRRYHPGYECKWATNTVVHLLENREYTGCLVNFKTEKPSYKTKHSVENPIEKQAIFPNHHEPIIDTETWERVQELRKQRKRPNRYDEVGLFSGMLFCADCGHVMYQQRYQNKNRKQDCYICGSYKKRTRDCTAHFIRTDLLTAGVLSNLRQVTEYAAKHESRFVKLLIQQNEIGGKRKTAAATKQLEQAQERISEVSRIIKRLYEDNVNGKISDERFMELSADYEQEQRELKDRAAALQAELDKSQAATVNAEKFMGIVRKHLAFEELTPTLLREMIEKIVVHECSYDENGTRRQDIEIYYSFVGKIDLPE

SEQ ID NO: 4459 - protein, 588 aa, synthetic construct
MRIVNKIEAKTPQMPRRKRVAAYARVSMESERLQHSLSAQVSFYSSLIQSNPAWEYVGVYADNGITGTKAEAREEFNRMIADCEAGKIDIVLTKSISRFARNTVDLLNTVRRLKELGVSVQFEKERIDSLTEDGELMLTLLASFAQEEIRSLSDNVKWGTRKRFEKGIPNGRFQIYGYRWDGDHLVIHEEEAKIVRLIYDNYMNGLSAETTEKQLAEMGVKSYKGQHFGNTSIRQILGNITYTGNLLFQKEYVVDPISKKSRINRGELPQYFVENTHEAIIPMEVYQAVQAEKARRRELGALANWSINTSCFTSKIKCGRCGKSYQRSNRKGRKDPNANYTIWVCGTRRKTGNAHCQNKDIPEQMLKDACAEVMGLDTFDEIIFSEQIDHIEIPAPNEMIFYFKDGRIVPHHWESTMRKDCWTDERRAAKGRYVQEHQLGPNTSCFTSRIRCDSCGENYHRQRSRHKDGSFDSVWRCASGGKCQSPSIKEDALKNLCADAMGLEEFSETVFREQIVCIHITAPYQLSIRFFDGHTFETAWENKRKMPRHTEERKQHMREVMIQRWREKRGESNDNTGDDKPIHGNADQ

SEQ ID NO: 4460 - protein, 558 aa, synthetic construct
MKRVIGYIRVSTDNQDLERQRVLIRKYCENKGYSLLRIEEDYAISGTVSNRNGLNSILNITNSVADMVVVSELSRLSRQDDIFETLTQIHTIIRNVDLVILDEPDKVYEAGKTIILSDFLMLAIKAYGAADERKKIVSRMTTGKDSKVQAFPLMLTDSNIPTGFKAVPNPNYIKGATPKMLLVEDEERMQLVRDIFNYVANGLSLGKTAEKLNMLGYRTARNKPFYEQSIRTIINDSIYNGVRYWKGMKLELPVKFISDEIWNLAHKKVQENKNYSGEAQKHYNPLKGIIKCPCGQTSMYGRTSSCITYRCLDRIKMGIKSPCTNVGIKAETLIYAVWKDVRLRTLDETYQAKSNEKIAEIEAENIKLTQNIKEKDSEIAKLQSDLKTVIDNVMASTNITIVKALNGKADSIDSQIKSIEAKKKAIDEEIASNNRRIADEIKSQSRKELDTLSLEGKGEMFRELLSKVVYYSVSLNSGFIVITYKNDLETIIAYHNRNKPFLWALPTTFRFNKVKRTVIVPTLPEQPKMTSFVLERITEKEYTFKQLQESFNLEEWKI

SEQ ID NO: 4461 - protein, 566 aa, synthetic construct
MKQSSKKISTGTAAHYCRLSRDDNMDSESNSIQNQKKILQKAAKDKGYTDTIFFVDDGITGTTMKRPGFQKMIAAIEAGYISAVFVKDLSRLGRNYIEVGKLTEEFFPLHDVRLVAVSDGVDSDEGEDDFTPFKNIMNEYYAKDISKKRRIVNKMKGNAGIPLSPPPYGYIKNPDDPRFWVIDPEAAEVVRRIYRMALDGYGLAETAAALGADGIVNPTYYWRSRGTSRGGSKSTVEPTKWGHTTIKKILTTQEYCGDVINFKSYSKSYKMKRRIENPEENRAIFLNVHEPIIDRPTWEKVQALKAGTRRKRPTVTQEPSVFSGYLKCPECGGNLNFHFNQGNHDIKFFSCQNHNSGLRKCSSTHYIRLDFLEQVVLYEIHRLACFANEYENDFIKAMVGRSAKVAENDRVRKKRELDGLLARDGELDMLFERLYEDNVSGKIDDARFAKMSKRYEQEQGENAKKIKALRLELKKLEDKRMDVDTFLETVRRYTDATTITKRMVAELIEYIEVYPAVKEDGVTNQRVTIHYNCIGAFEVPDRRKIPERDILLETRKGVALSYAPAV

SEQ ID NO: 4462 - protein, 656 aa, synthetic construct
MAGIRMENKIYEVGMYCRLSKDDGTDNESASIATQKSILTDYVKKQGWHLAKTYVDDGYSGTNFQRPSFQNMIKDIESGLINCVITKDLSRLGRNYLDCGLYLEVFFPEHNVRYIAVNDGVDTLNKSAMDITPFRNILNEMYSADVSVKIKSAYRARFQQGKFMGTTAPYGYVKDPADHNHLLIDDKVAHVVREIFDLALAGNGIAKIRKHINKQHILRPAAYAAEQGATGYERYFEENEENRYIWSENSVRGILRSPIYAGNLAGYKRIAANMKSKKRPSKLPEEWEVIPDTHEGIVTQEEFDTVQQLITSRRLPENKGGFENIFAGVIKCADCGYAMRAMSANRRKRPDIIDCVQYSCNNYGRYGNIMCTAHSIEARDLFNAVLTDINRFADMAVNDEKAVRAIEKRLTETDQSKAKALEKEQRKLNKRLAELDRLFSSLYEDKVMERITERNFEMMSGKYQKEQLEIEARLKEVTETLSDSYEKTQGVRDFLSLIRNYQGIKELDATIINALIDKILVSEREKLTDGMVRQEIKIYYKFIGFVGELHITPTKRWTALKPKNCTVCGVEYVPRSGISKYCPACAKKIQREKSNESKRRSRERNRQACIELSAKNDRLILSRGKGVSYAREMIMKKSIYTAISRKRHLTVTSGGL

SEQ ID NO: 4463 - protein, 484 aa, synthetic construct
MKILKYAVYVRVSTDRDEQVSSVENQIDICRYWLEKNGYEWDPNAVYFDDGISGTAWLERHAMQLILEKARRNELDTVVFKSIHRLARDLRDALEIKEILIGHGIRLVTIEENYDSLYEGGNDIKFEMFAMFAAQLPKTISVSVSAAMQAKARRGEFIGKPGLGYDVIDKKLVINEKEAEIVREIFDLSYKGYGFKKIANILNDKGTYTKFGQLWSHTTVGKILKNQTYKGNLVLNSYKTVKVDGKKKRVYTPKERLTIIEDHYPTIVSKELWNAVNSDRASKKKTKQDTRNEFRGMMFCKHCGEPITAKYSGRYAKGSKKEWVYMKCSNYIRFNRCVNFDPAHYDDIREAIIYGLKQQEKELEIHFNPKMHQKRNDKSTEIKKQIKLLKVKKEKLIDLYVEGLIDKEMFSKRDLNFENEIKEQELALLKLTDQNKRNKEEKKIKEAFSMLDEEKDMHEVFKTLIKKITLSKDKYIDIEYTFSL

SEQ ID NO: 4464 - protein, 501 aa, synthetic construct
MKRIAIYSRKSVYIEGSISIETQINMCKEYMLKKFKDCEFKIFEDEGFSGGNTNRPAFQKMLKLAALKQIDVVVCYKIDRIARNTLDFLNILEMFKKSSVELISITEGFDPNTQMGKVMLTLLASFAEMERSNIQQRVKDSMFSLAQKGKWTGGAPPLGFKVKESGGIEIDNKNLILDVFNMKFKKYKNTEIIEYIESKYNHKFVNTTLASTLRKPIYVKSSKEVSIYLKSKGYKILREENNINSYHTYKNDNIDYAIVNNIEGFIEPNIWIAVNKSMDENSNGETNRFSENFWLTKTLRCKYCGKTYCGQTKIVKSKYTTKDGVIKEYTGNYEYYMCRDMLKGRLKTCENTKRIKRETLEVKIEELIYMLQDKKFFEKHYGNKQIDTNFELKEIESKICKINKTIDNLTNKISLLSNDAAMIFIDKIESLVEEKKILNNRIIELELQSLNNLNSKEDFIYENILKFNKNLSVEQKRNIAMNIFKKIIYDYKTDKFEVSFN

SEQ ID NO: 4465 - protein, 537 aa, synthetic construct
MARKKNIAAGLDAVIYARYSSHNQREVSIEQQIAECTKHAAALGLRIVGTYEDRAISGKTDNRPRFQQMMRDAEKGKFQAVVAWKSNRIGRNMLQAMVNEAKLDDYGVKVFYAEEDFDDTAAGRFALRNMMNVNQFYSENMAEDITRGLYDNASKCMANGRQPLGYKRGEDGRVVLDEANAAVVREIFTRVAAGDLFVDIARDLNAQGIKTSKGANWNKGSFQSICQNERYRGIYIYGDVRVADGIPRIVSDDLWYRVQEAMRMKKNPVGTRHRVGAEDYLLTGKLRCGHCGSYMTGVSGTSRNGELHYYYTCQKRRTEHACDKKNIRRDVIEPAVAQAIKMYCLTDDVIAWIADRTVEYWEKHDNDLQIEALEQQLEENKKATSNMLKAIEMGIITEATRTRMVELETEQSRLSVQLNAAKEDVVKIDREQIISYLELLQQGDIHDRDFQMELFKNFLVAVYVYDDNRMKLVFSCMGDQNSVEIPLETGEDPPDGGLSPDAKMFVLTPDSSTKKALYFVGSMVLFFLLKPIFGGLH

SEQ ID NO: 4466 - protein, 521 aa, synthetic construct
MKKVTKIEGAQNNITIKKKLRVAAYCRVSTGSDAQLESLEAQKTHYERYINSREDWQFAGLYFDEGITGTKAEKRPELLRLISDCEAKKIDFVITKSISRFSRNTTDCLALVRKLQSLDIPLFFEKENINTGSMESELFLAILSSMAEGESTSISENAKWSIKRRFQNGTFKLSYTPYGYDWNGENIVVNLEQAKIVKRIFADVLSGKGTQAIADELNADGIASKKNSKWTATTIRAILANEKYTGDVIFQKTYTDENFNRHINYGEVDQYMAPDHHEAIISHEDFDAANALVAQRASEKGIEKGNGKYQQRYAFSGKIICGECGDTFKRRIHPCTTYKYVAWTCNTHLKDTTACSMKYIRDDEIKAAFVTMLNKLIYGHRLILAPYLKALENSSGDEAIQRIQHLELLLAQNSEQRETLTKLMAQGYIDQILYNQETNALLLQAETYRSDIEAITICMTGDSAKVTETNLLLHFVSHADMLTAYSEELFESYADHIEVASRHEIRFVMKCGLTFTERIGD

SEQ ID NO: 4467 - protein, 477 aa, synthetic construct
MKKVAIYVRVSTQDQAEEGYSIEEQIDKLTKYCDIKDWYVYEIYKDPGFTGSTIDRPGMKKLVNDSKQHKFDTVLVYKLDRLSRSQKDTLYLIEDVFAKYNVDFVSLSENFDTSTAFGKAMIGILSVFAQLEREQITERMQMGKVGRARSGKAMGWTRPPFGYEYTEGKYIVDDFKAIVINKIYKEYLSGISITKLRDKLNDEGHLGKDIPWSYRAIRSILDNPVYAGYMNFKGEVYKGNHDAIITKELFDKTKTELDIRQKQAYAQNNNPRPFQGKYILSGLARCGYCGAPLELMLGNIRKDGTRLKKYKCTNRIVKSRVTFYNDNKKCTSGFYHMNDLEDYVINEVSKLQKNPETIFERTEIKNENHTEIYEHRIVVIDKKIKRLSDLYMNDLINLEDMQFKAKALKDEKDHLLNKLNHSEHKLENVKKDKAILFLKDIENNINDETYENKKKIINVLIKKVDVKANEIKVIWNF

SEQ ID NO: 4468 - protein, 508 aa, synthetic construct
MKKAIAYMRFSSPGQMSGDSLNRQRRLIAEWLKVNSDYYLDTITYEDLGLSAFKGKHAQSGAFSEFLDAIEHGYILPGTTLLVESLDRLSREKVGEAIERLKLILNHGIDVITLCDNTVYNIDSLNEPYSLIKAILIAQRANEESEIKSSRVKLSWKKKRQDALESGTIMTASCPRWLSLDDKRTAFVPDPDRVKTIELIFKLRMERRSLNAIAKYLNDHAVKNFSGKKSAWGPSVIEKLLANKALIGICVPSYRARGKGISEIAGYYPRVISDDLFYAVQEIRLAPFGISNSSKNPMLINLLRTVMKCEACGNTMIVHAVSGSLHGYYVCPMRRLHRCDRPSIKRDLVDYNIINELLFNCSKIQPVENKKDANETLELKIIELQMKINNLIVALSVAPEVTAIAEKIRLLDKELRRALVSLKTLKSKGVNSFSDFYAIDLTSKNGRELCRTLAYKIFEKIIINTDNKTCDIYFMNGIVFKHYPLMKVISAQQAISALKYMVDGEVYF

SEQ ID NO: 4469 - protein, 490 aa, synthetic construct
MKNIAIYIRKSVKGDDNSISLEAQTEVIKHYFKNENKFTIYKDDGFSGGNTNRPAFQKLMHDATQNKFEAVACYKLDRIARNTLDFLTTFNTLKEYGIDLICVEDKYDPSTPAGRLMMTLLASLAEMERENIKQRVTDSMLNLARSGRWTGGTPPFGYKVITIDGGKYLELEDKNNVLYIFDEFINGKGILKLSNEFNCDKKKISRILHNITYLKSSTEANTYLKQTLKYEIVGTPNGCGYLPYGKNKVINGKKVKNVDGLKIAAISKHKAIIELETFIKAQEKLKTFEGRKAPRISNKSFLAQMVQCTCGSNMLIVLGHKKKDGTRKLYFSCPNKCGNTFGDVKEIEEDTLLTLKDVNFFDKINQNKPTINNKDNSRIKASLLKELENKKKILDGLVQKLALVDSDLANILIDKMETLNENIKELQSKIDLLEKEEISLSYNKEDLNLKEKNRKHFIKEFENMNMQEKQTSIRKVINKITWTGENIIIS

SEQ ID NO: 4470 - protein, 523 aa, synthetic construct
MFFGIYGRKSVYSDKSDSVDNQHRMCNDYIKAHFKADDITLVTSYSDEDYTGANTKRPDLQRLLEDVKSGAINVLVVYQLDRISRDVRDFSNIYAMLEEYHVMFISIKENIDTTTPIGRAMMYVTVVFAQMERETIATRVRDNMIGLAKKGFWTGGNPPYGYIRKNIVINGKKHVTIEPDPDGVAYNIWIYDSFLKNHCSLQSMETYFRKEGIKTRNGAFFSTTQLYKILTMPYCVEATPEIYDYFAAKGCQMDPDSPREKWDGSVGVMIYGRSTGVNKKHQLQPPEKWLVCLGLHKPFMPAAKWLAVQNQFSENKFDKTQKYDIPLLKGILRCSCGSIMAVSRKKKINGEVSSWYYCLRRMKNGVEACDRKQIKVDIIDQKLLNTLHSIEIDPSMIYRFVQKSELPLPDIKTINNKISSIELRIGRLASSLALADGSAASKYIVAEIERLDSDLQFLKRERAVINVEIKKRDELNESAEGKAQHIQNVMKGLNGFTAEEKNRIMRDILKECVWDGSELSIVL

SEQ ID NO: 4471 - protein, 561 aa, synthetic construct
MKNKKIKCDIYTRVSTTMQVDGYSLDAQKEKLKRYAEFQNMEIVNEYSDEGKSGKSVEGRPEFQRMLDNIENGTDKVQFVLVFKLSRFGRNAADVLNSLQRMQDFGVNLICVEDGIDSSKDSGKLMISVLSAVAEIERENILVQTMEGRKQKAREGKWNGGFAPYGYELVNGELQIAEDEAEIIRLIYDKFIHTNMGISAIAAWLNQHGYKKKKRQNNTLDAFATSFIKGVLDNPVYCGKLAYGRRKNEKVSGTRNEYRIVKQENHMLHDGIHEGIVSETDWELAHQKREKTGVKYEKTHSLDHEHILSGILRCPLCGSGMYGNVNRKKKKDGTLYKDYFYYACKHRRLVDGHKCGYRKQWSEEKINNAVEEVIRKLVKNPKFEDAILNKIGSRIDTEEIEKEIEGLEKQHRQLTGAKARLGQQMDSLDIMDKFYEKKYQDMETRLYRLYDEIEGVENSIEEIKNRLLNIQQQKISEENVYQFLLYFDKLYDKFTDLEKKEFLNSFVEQVDIYEQEQPDGRFLKHIKFRFPVYFGDRETQELYWDNESTVETVCLLSRKDK

SEQ ID NO: 4472 - protein, 535 aa, synthetic construct
MNSYDISFRPEEVIQYLRKSRSDDPNMTIEEVLEKHEHMLRDFAVNHFGAPVPDCNVYREVASSETIDGRPEMLRLLRAIESPDIRAVLVVDVQRLSRGDLEDAGRLMKLLRYTNTQVITPMKTYDLRDEWDRDIFERELKRGNEYLEYFKKIQARGRLQSVQEGNYLGSKPPYGYDRAVIRIGKKNCPTLAVNKEQADVVRLIYELYVNKDWGAQRIANHLDSLGIHPLHNAHWNPAVIKDILRNYHYIGKVVWNRRKTITVVDNQEVYKTRPWNENMLIFDGRHEAIISEELFHAALARQGRSHRCRPDTRVSNVFASILHCSCGYSMSLRHDGRGSLRLSCDDQRHCKSGSIGYEELIDYICKVLTAYIDDFKIKVKHDNANEVDIHRALVTDLEARLTALEAKEVKQWEVYSMEGMPRAIFDKLNKHVKEDKAEVERALKQARKDSPDPVDYRERIAKFGDALNALQNPAASAEIKNQYLKAIINDMIYTRPGAVRLTADNCSDYGINYRDMAKRGGWYSPPFRLEIKFRF

SEQ ID NO: 4473 - protein, 523 aa, synthetic construct
MPNTESFTVNEILVYLRKSRSDSPDMSVEEVLRKHEEMIQQYASTHFHSPIPEKNIFREVVSGETIDSRPQMKNLLKMIESEQFKAVLVVEPQRLSRGDLEDCGRLINILRYTNTTVLTLTHSFNLQEEYERKFFEMEITRGNDYLEYTKRILKRGREASVAKGNYIGSVDPYGYKKTVIKKDGVTCHTLEIIPEEANTVKLIHELYAYTPEGIGFTNIAHKLDAMHIKPKKAAHWTPAIISSILCNPLYLGMVRWNNRKVVKYINEGQLAKARPQNTEAKYYKGLHEPIITQELYDTCMARRGTNPSLRRNKELCNPFAGLLYCGTCGHAMSLKIYKNHNSVSQMMLCNHQAYCHTKSVLYSAFLRRFMSSMEDTLNDFELAQKSDDGRAQAISKTIVVNLENKLKKLNEKDARQKDAYEDGIYSKEEFLKRNVRTQQDIASTIIALEDARAKKADIVDYEEKIRRFKDCLHALNDPELSAAEKNRFLKSCVDKILYYNNMESKAGIGRYIENVFSLEIQYK

SEQ ID NO: 4474 - protein, 547 aa, synthetic construct
MKLLVTYIRWSTKEQDSGDSLRRQTNLIDAFYSKHKNDYYLLPAHRYVDKGKSGFHQQHKAQGSDFRRMFENVMSGAIPEGSLIVVENFDRFSRADIDTAIDDVRQILRKGVSILTLGDGELYDKSALTDPVKLIKHIIIAERAHQESLVKQKRIAQVWNHKTQLARELKKPMGKQAPGWLELSEDGSHYIVDEDKASLVNIIYGKRLSGMSMFAICKWLNEQGYPTINQRKVRISKTKKPDGNWSALSVKHILTSRSVLGYLPAKISTEDRKTVLREEIESFYPQIVTDSKFYAVQQLLEETGKGKTSSGEHWLYVNILKGLIRCKCGLVMTPTGIRKPVYQGTYRCNGNKESRCSYGTVSRKLLDTQLCSRLFSKLSQLHDEATDTAKLDELQRRLNTVDSELEKLTETLIQLPNITQIQEALRVKQEEKDELIVQLSREKARVKSVSSLDLSGLDMESVEGRTEAQIIIKRLVKEIVVSGNEKLVDIYLHNGNMIRGFPLDGKDDHTLTLEEATDEMQPLDDMLIFGEPVTRIYPAGDMEEVDA

SEQ ID NO: 4475 - protein, 452 aa, synthetic construct
MKAAIYIRVSTQEQIENYSIQAQTEKLTALCRSKDWEVYDIFIDGGYSGSNMNRPALNEMLSKLHEIDAVVVYRLDRLSRSQRDTITLIEEYFLKNNVEFVSLSETLDTSSPFGRAMIGILSVFAQLERETIRDRMVMGKIKRIEAGLPLTTAKGRTFGYDVIDTKLYINEEEAKQLQMIYDIFEKEKSITTLQKRLKKLGFKVKSYSSYNNWLTNDLYCGYVSYADKVHTKGVHEPIISEEQFYRVQEIFSRMGKNPNMNRDSASLLNNLVVCSKCGLGFVHRRKDTVSRGKKYHYRYYSCKTYKHTHELEKCGNKIWRADKLEELIIDRVNNYSFASRNVDKEDELDNLNEKLKTEHTKKKRLFDLYISGSYEVSELDAMMADIDAQINYYEAQIEANEELKKNKKIQENLADLATVDFDSLEFREKQLYLKSLINKIYIDGEQVTIEWL

SEQ ID NO: 4476 - protein, 452 aa, synthetic construct
MKAAIYIRVSTQEQVENYSIQAQTEKLTALCRSKDWDVYDIFVDGGYSGSNMNRPALNEMLSKLHEIDAVVVYRLDRLSRSQKDTITLIEEYFLKNNVEFVSLSETLDTSSPFGRAMIGILSVFAQLERETIRDRMVMGKIKRVESGLPLTTAKGRTFGYDVVDTKLYVNKEEAQHLQLIYDIFEEEKSITFLQKRLKKLGFKVKSYSSYNKWLMNDLYIGYVSYGDKVHVKGVHEAIISEEQFYRVQEIFSRMGKNPNMNKESSSLLNNLIVCEKCGLSFVHRVKDTVSRGKKYRYRYYSCKTYKHTHELEKCGNKIWRADKLEEIIINRVKNYSFATRNLDKEDELDSINAKLQVEHSKKKRLFDLYMNGSYEVAELDKMMSDIDAQINYYNSQIEANEELKRNKKVQESLAELATVDFDSLEFREKQIYLKSIINKIYISDEQVTIEWI

SEQ ID NO: 4477 - protein, 477 aa, synthetic construct
MRDSKSKTVIIYNRVSTIMQDKNESLTEQTDECIRYCKTNGYEIYKILKDVKSGTKDDRAGYLELKKHIRRRDFDILVVLETSRIARKMKELVLFFSLLNENNIEYISIREPNYNTTTPDGKFAMNIRLGLIQFERDNTAERVTDRLYFKASKGQWVNGKPPIGYKLVNKRLEIDEEKAEIVKNIYEDFLNGYSLNQINNKLQFSWGSKQVKRILTNPTYKGYIRYGTRSNRKKNNREAFIVKGWHEAIIPEDKWEKVQEMYKSLNRKASNTKPTLLSGLLKCKECGNNYIRKRGGSYDKNLYYGCNLNNLRYSDKFFYKDIPECSSATIKGDLLEKAVIDTLKKQINDLNFNDIEIDKKRQVNIKQIDSSINKFKNRLNKIYELYIEDEIPKDKYLKDKKDIEARIISLEKQKKSFGEIEVEKSNNEMIQEYFSKIDLSNIEEANRILKIIVNKIVVYKKKKTPKDDFEVEIYLNI

SEQ ID NO: 4478 - protein, 539 aa, synthetic construct
MNIIYKGVIKIRAAIYVRKSRLSEKGESINNQIELCKKYFSNLHLEDNIEFIIYQDEGFSGGNINRPEFQKLIKDVKKRRFNYLVCYKLDRISRNVADFTSTLKILEENNVNFISITEQFDTTSVMGRAMINISATFAQMERETIAERIRDNMLELSKTGRWLGGTCPLGFKSIPVVYESNGHKKKMYSLEVIDEEIEIVKLIYNMYIEKHSCSPIARYLCTNSIKGKNGGDFSRNTVLQILTNPVYCTADKKAFEYFKSKGSTIEGNANSSNGIMAYNKRKNGRKDNPMDQWIISTGGHLGVIPSDKWIQCQQILDAVRKKSNNKSGTGNKFLLSGLLKCEHCGSSMCSWSRNNPKNNKYERYYRCELKNRASKRCTCKMLNSDKAEAFVIDLLKNFNIKMLDNFKSKSNSINAASIEKEKNLLNKSLNENNKIISGLIKKIALLDDIDILKAIQSEIKNLKSDNEVIEKNINDLSIKSFIVEDETENKKAFIESLNLFKNTIDFIDDVEIKRNMIKNLVEYFTYNSDTKQIKFKIRL

SEQ ID NO: 4479 - protein, 452 aa, synthetic construct
MKAAIYIRVSTQEQIENYSIQAQTEKLTALCRSKDWETYDIFIDGGYSGSNMNRPALNEMLSKLHEIDAVVVYRLDRLSRSQRDTITLIEEYFLKNNVEFVSLSETLDTSSPFGRAMIGILSVFAQLERETIRDRMVMGKIKRIEAGLPLTTAKGRTFGYDVIDTKLYINEEEAKQLQMIYDIFEEEKSITTLQKRLKKLGFKVKSYSSYNNWLTNDLYCGYVSYADKVHTKGVHEPIISEEQFYRVQEIFSRMGKNPNMNRDSASLLNNLVVCGKCGLGYVHRRKDTVSRGKKYHYRYYSCKTYKHTHELEKCGNKIWRADKLEELIIDRVNKYSFASRNVDKEDELDSLNEKLKTEHAKKKRLFDLYISGSYEVSELDAMMSDIDAQINYYEAQIEANEELKKNKKIQENLADLATVDFDSLEFREKQLYLKSLINKIYIDGEQVTIEWL

SEQ ID NO: 4480 - protein, 476 aa, synthetic construct
MSHLAQRAEGERWAKSRGYEVVGAFEDLGVSAGRTTPFERPDLGKWLAPERLHEWDVLVFSKIDRAFRSTSDCVDFARWAKGNRKIIAFSGDGLVLDYLNPKSDSLDQMMSELFIYIGSFFAQLELNRFKTRATDRISHLRMTDRVSHGVPPLGFRTVPHPSGQGKALERDPEGYALLHEIKGKLLHENYSLTGLVQWLNETGRQTAVAKARKGDAKWSVTSLKRTLTSERTQGLRMSGGKPVLDSQGIPIRMAEPTFTDDEWEQIQQALNQRSTSGRARYMTDNPFAGIVYCVCGYAVAQHRRKSSSGKEHTYVRCGQGCRGAWKLADVHEQLDSSFLAAYGDQEMTRLVFVPGEDRSEELAGIERSITRLRWESDNDLVDDEDLYQSRMAALLSRKREIGQIVVPARWERRGTGKTYQELWADPETDRRQVMRDARIRLVLHFIPKGSDAPFVTHAHFEDMWNPAEEAKALSGN

SEQ ID NO: 4481 - protein, 479 aa, synthetic construct
MAKVKSPGQRVGVRSVAIYARISADVEGTGLGVARQLEDCRKLAADRGWPIGDEYVDNDVSAYSGKPRREYARMLADLTSGARDAVIVYNLDRLHRRPVELEEFVTLCESSGVRDVATVTADIDLGNDDGLFMARIFAAFAAKESGRKSARVRRKLLQNAEQGLPHGSVRPFGYESDKITLRDAEAKVIREMVDRYLAGASIRSLTIWLNDAGIAPAVAKSWQTSAVRQILTSGRIAGLREHHGEVIGPATWTAIITPAERDRILARMATRALTKTRAPRTYLLSGMLRCGRCGNRLFSQARHSNPDNRVRRYVCLKGPDHGGCGRLTVVASPVEELLTDAVLTRLDSPQLAEALAGKSSVDADVAALATQLEADQARLDELAGLYAAGAVSAREWIAARDPITERIAQARRDIAHATDTSSVVDLAGCGEVLRGQWDDLDIDRQQAIIKSVLDHAVIAPGNPGSRSLDINRVQPAWRI

SEQ ID NO: 4482 - protein, 517 aa, synthetic construct
MASVTKLTKPQSKVQATLQVAAYCRVSTNSDEQEDSLANQQDHFKSYIQQQPNWLLHKIYYDNGISGTKAQNRPGLQALLKDCQNGQVDLVLTKSISRFSRNTTDCLRIIRQLKQLDIPVIFEKENINTDSMDSELILSVLGSLAQDESQSIAHNVRLGYQQRASNGVFHYSLPPYGYQKDANRDLIIDPIERKVVLRIFNWTIEGKSPGQIAQTLNEQAISTKRNGKWHDSTIRGILQNTVYLGTTEFQKTFTDDEYHRHPNQGEQGKIIIEEHHPAIIDQATFTQVQKIIMLKRKFYPQAKAKPQRHTFSRKIYCGNCQKLFKRQSRSGKVCWGCQTHIKSAKDCPVKSIREDALHLAFCTMVNKLIFSQKFLLEPLVEQLQADQNQEQAAKLSQVETELKEAKDKQDNLQQLRKQELIEKDFFTKQDAELEQEIANLQSEIERLKQLLGDQNSKLPLTHELLKLCQRSNYLTAFNAELFEQIIESITVDQDHNLTFHLKCGLNLTEGSKHHVKA

SEQ ID NO: 4483 - protein, 528 aa, synthetic construct
MAKVRIIPAQVKQGNRNRQIEESEAKLKVAAYCRVSTLYEDQASSYETQVAHYKEFITKNPKWELAGIYADDGISGTDTKKRNQFNQMIDDAKQGKIDLIVTKSISRFARNTIDCLQYIRELKELHVAVFFEKENINTMDAKGEVLITIMASLAQQESESISRNIKIGLQYRYQRGQVIVNTARFLGYDKDDDGNLVINPEQAKVVKRIFYECLTGKSAIEIARELTKEGIKNGIGRTQWHSSGIIKILRNEKYIGDALLQKTYTVDFLTKKRVKNDGQVPQYYVENNHPAIISRAVFYQVQKLLDMRREGFTTEGGHHHGYTNAYCFSSIVYCGRCKDIYTRCVWYRPRIGEVEKVNVWRCYSRLHWNHKGKRCMGRTITEADLEEASLKAMNELIQQHQLADKQIAANILKVTKGTTGPSLDELDQQLEDQQLLLLNMSTHNKNVEQLTEQVQALRKQREQLIQQEIDHDIKRSNLKNIQSFFQTYQGGLTKFDEKLVRLLIEKITIFKSKIDFTFKDGEVITVKM

SEQ ID NO: 4484 - protein, 560 aa, synthetic construct
MTKLYSYIRFSSMRQGEGSSYERQIKMAKEIADRYGLELVNDYQDLGVSAFKGANSKTGALSRFLDEIGRSIPVGSWLFIENLDRLSRQDIISAQELFLSIIRRGITIVTGMDNKIYSIETVTANPMDLMFSILLFIRGNEESQTKRNRTNSSALLKIKAHQQNPQSPAVAIEEIGKNMWWTDTTSGYVHPHPVYFPILQKIVKMKQEGHSTGSVLDYLNEHHTPPAPTSNKQHRKWSIAMVSRLFKTKALIGVKEVTVDGVQYELKDYYPRVLSDSEYYFLKNNLIKKAWSFGHAQEKTIPLLSGIGLLKCVHCGSPMVKRKAANGKVEQYRYTCDGEGSGRTDCLYPNWGFRASSLEGAVLQLLADKVWIAEDKANPIPEIQVQIDEISRKIDNLINLSAMTGATKELANQITDLNTQREALHEEIRLFEREMYSVDSQGWEKLAQFDLSDVQNEERLQIRLKIKGALRSIECARIDRNKNLFTLVYLDGLRQRLVIENNRGIRKGQIFVDLKTINDRQILESAGMVLHDHIDILIDEKAFYDGLPKEEDGPLSKFGI

SEQ ID NO: 4485 - protein, 499 aa, synthetic construct
MSKAVIYARYSSTNQREESIEGQIRECTDFANRQDITIVGSYIDRALTGKTDARPQFQKMIADSGKQLFDIVIVYTLDRFARNRYDSATYKAKLKKNGVKVISAKENITDNPSGIILESVLEGMAEYYSVELAQKVLRGMTENALECKWLSGIIPLGYKLDDDKHLIIDDHAAPIVRKIFEMYAAGDRIVDIAKYANSTHLKTAKGNNFSRCSFTHMLKNETYIGTYKWRDIVKTKVIPQFIPDDLFHSVQKRIKSRKETNVRGKSENFLLSSKLKCGKCGQFMTGVSGTSKQKRRYYYYQCYASKSKKCDMPLFPREKLEDIILAETIKLLSEPQTIEFIANTVANLPIDENTQISILETEITEIKNKLKNCIKAIESGLISDTISKNISEYEKKLSVLEKDLSIEKVLNEPFKITPDHVKFFLYNILQIKNADERRDMIISTFVRDIVLTKDDIGYTVKITYNYNENPSTSLDNSVQKGSQKSSLVAPTRIELVISP

SEQ ID NO: 4486 - protein, 645 aa, synthetic construct
MALSSHYTEEQICKMDIRDFLAQAHFDDILHSVRTLQVARYARESTKHEEQIMALENQVVRLDTMIESNPKFILDEKHKFTEYGISGRQVDDRVAFNMMLQSASRYEFNVLIVQDTARFARNIEQLFTNIRILKDYGVGVLILNGNHWTYNMTETDILRLAIDAGMAQGESMRTAKRVSDGVESYRARGQLVISGIFGYIYEKNIDKRLNTLTPHPVESITVKRIFDLYTHPDPQKRMGSGKIADYLNENNYKTAVGDLNWSASKVVRVLKNEKYMGYILYGKVKVVDTIKKKKVATKIKPIREDVYDKDGNLIKKCNLVKGNWTPIVSEEVWWLANEIRTKRAKEYIYSEKGNIVTGLREPKDIIAQKSFCQCGYTRSIQYVHVATQKKEAQFRYTCRCQINSGSHKEKSVCHVPAVSEVKLWLMSLKVFGYIFGDSKDEILYTINLLKEAQKYKQKNRTGKSLEDLESELKKVETQIENLYLDKLSGEIDANMFKKLTVRLEEEKDGIEKGIRDRQLEEARDSKETFDIETIEKKLNTYVDFTGRKVSDELIDMFVERIIYRDNDEFVWEMNLSGVRKNTIDYRIKEYSEEFAKSLQNDDNFNILHTFIISTEECQQFMESSRVGRRFVKKYWKPITVKIAIK

SEQ ID NO: 4487 - protein, 465 aa, synthetic construct
MARSITVIPASQPYRVGGRTQQKTRNLRVAAYCRVSTDQEEQLNSFENQVEYYTKYIQDNPLYQMAGIYADEGISGTNTKKREEFKRMIRDCEEGKIDLVITKSISRFARNTQDCLEYSRRLKNLGIGIFFEKEHINTLDASGELLFTILSSLAQDESRNISENCKWGIRSKFKKGIPQVDCTKFLGYDKGEDGKLIVNQEQAKIVKRIYREFLNGYNPAAIAKMLMEDHIKTGTGREEWRSASVRAILKNEKYMGDALLQKTYTADFLTKKVKKNHGEVEQFYVKESHEAIIPKEQWEAAQLELERRDSYMQELGLTFYGYGSEVNPFSCRVVCGKCGAVCGKKSWKSRGVEFWQCNNRSKNHGVKGCASENLPHENLLKGFITAWNQIVAEREQYLPKWEKKKKEGNPLEKLRAEQMIELTLQPPLTKMLPELGQMVLERVIVQGKEIMVIRFLDGTEIKVRI

SEQ ID NO: 4488 - protein, 484 aa, synthetic construct
MKVGLYIRVSTEEQAKEGYSISAQKQKLKSFCISQDWEVAGLYADEGVSAKDINRPELKRMLDDIENKKIDCVLVYRLDRLTRSVFDLYKLLELFEKNNCKFRSSTEVYDTTSALGRMFITIVAALAQWERENMGERIAFGFAEKVRQGKYALNFRPIGYDLDLETGKLTINTSESHIIKLIFDLYLKGYGANRICKYLNANGIKTKAGNNWNDKPLIQILKNPLYKGYIRWNDTIIPSKHDAIIEPEIFDHVQNIIVSRRTADPRRVSSEYIFSGKLKCNSCGNSLVGFYTTSKLSSGEIRKYRQYRCLKKKTGECKGFRNVSERKLEEAFMDYISNEDFSNFIEESASAAENTLNENNSPNGLEKAYLEKELEKIERRKKKWQYAWADDDDAMSYEDFKERMKEAKAEEERLKDLLSTFRVTQLDDINYDKQEIINALKDIRRNWQNLKTNEKKNTIDSLIDQIHIDYVEDKLVIPKIDFYE

SEQ ID NO: 4489 - protein, 528 aa, synthetic construct
MYTPQLLSEHYSQITTPQSEQPLAILYSRFSSRNQVGNDSINRQLEGAQKFCEYHNLKLSEANYSDLGISAYKDNVREGLELLLNAVRDGTIPANSWILCHTTCRLSRKGFQHVLKLVSELVATGCKFCTINDNQVYDSTNINKLSSALPLIISADLAFSESEKKSLMIKHAKEQTRKNRKIVGKQPYWITLQDGKPMLNDFSTIVKTIIDLRLKGYSAQRIAKQLNADGHLSPTGKSWGAAAIRKTIDNHVLYGAKEYSEMKDGKLVPVEIVEDLYPALCSKSIWLQIKYEKGTKEVGKRSKSSPFSKLLRCACCGSAMTTRSTYQKGVKYDYRVCIRSTEGSCDQKSRFRDLDNIILGELKHLKYEVKTHATVEVDSIKVFQDKLTLLNQTKELLQSNPTALAAIYADIAKTEQELHEAKRTKELLESQPNEVNFQAIVDVEDQSQRNVLLRRIIESIEVKRIDKEKLVSQVRVVVRFKNSHTQTFVVCYRYRGYDVKWLTDTEKYKEQLNAFVNDAVKQLEEWER

SEQ ID NO: 4490 - protein, 514 aa, synthetic construct
MNAYSYRRFSSATQSHGDSIRRQIQLAEDYCHKHNLELSTDSFEDLGVSAYHSNNSLEDAGLGQFIAALEEGKIPTPCYLLVESLDRLSRANIDEALQQLLAITNQGVIVVTLFDNQTYKKGMGLAEFITAIVTMARANEESETKSKRLKAVWHKRRTDPNALKTNNKPFWLDLSDDKTSFILNESAELVREIYELSIGGMGSHLISKHLNAKGIPSPKGKTWGDAVITKVLNTKAVLGEYQPNQRVNRKSVPIGEPIQDFYPSVINEQTFYLSQAQIKQRAKSLKRGSTSSHLNILKDVGTCRRCSAPLRLQKQSHLYYFRCPESLKGTCDSKPINIMFLRDWLKEQWLTPAFYKTWSKPKPKLNKLKPLEAKRQSLGEAYETMLEAFGSSSSSSTIKNLQKRDSELQELDKQIELLKQEQAEESNPIKLNMDESIKLIETAFKLEITAETITARNKLRQLMNQFSRFEVDMIDKQAIFEIDSTSSFIFQSIQNPYHYMKSKPMFVWKMLSIK

SEQ ID NO: 4491 - protein, 525 aa, synthetic construct
MSANVIIIPPRKIAGNTVDKHEDKPKLRVVAYCRVSTDSEEQATSYDTQVQHYTDYISRNPLWEFAGIYADDGISGTSTKKRVGFNDMIHDCMSGKVDMVITKSISRFARNTIDCLKFVRQLKDKNIPIIFEKENINTMEASGELLLTIMASLAQQESASLSQNVKLGLKFRYQEGKVQINHNWFLGYTKDDEGNLVILEKEAKVVRRIYREYLEGASLRDIAEGLEKDGIKNGAGHLKWNLSNIKGILQNEKYIGDALLQKTITTDFINHVRIKNDGTEPQYYVKDSHTPIIPRDIFFKVQEEMLRRANMFSGEENKKRRVYSSKYALSSLCVCAKCGDVYRRIAWNNRGVHSVVWRCCTRWENGPSACDASTVKEEELQSAIVKAINKVFSISDEVLDTLNNSIREIIAGNNLSEIETVDKKIADKQAILLTLLKAKKDYTKTANEIDELKGKKQQLLIEKAGQEDAKRRIREMEDFLKSERHDISEYDEKLVRKYIKKIKVYEDRFSVTFKSEISVNIERAS

SEQ ID NO: 4492 - protein, 531 aa, synthetic construct
MKEIIKIDSTMRKTGFEKKTRVAAYARVSSDSDEQLLSLEVQKEHYENYIKSNPCWEYAGLYFDEGISGTKIGKRESLKQLLKDCQSGQIDRIITKSISRLARNTVDCLEIVRKLTGLGIYLYFEKENIDTEHMSSELMLSILSSIAQSESRSISENSMWAIQKRFENGSFIISCPAYGYKNENKKMIIVPEQARVVKEIFNMALSGMGGEAIARVLTDKKIPAKRGAKWSSTTVNAILNNKTYTGDVIFQKTFTDDNFNRHKNCGEKKQYVIENHHEAIISHETFNLVKEIIAWRRNENNIVCGSGKYNKLYAFSGKIRCGECGSKCKRRIIYQHNKAYGIWVCITHLEDIHACSQKSVMESYLKISFLQMLNKLKATSAQILTPFIKSLRNVNSKDGLNKVIELEEKIAKLQEQEQVLSKLFAGGYIEMDSYYLESNQLKAEIDTCLKEKLQLSNSLNGNLTHLNEAQKLQRFVSVTEVFSEFKDEDFLDFVDDVVVKSRTRFLFILKCGLELEEEVKETWHASHMVTE

SEQ ID NO: 4493 - protein, 550 aa, synthetic construct
MNRQSTFSTIRKSTLAFEEAKITALYCRLSRDDELAGDSNSIVNQKAILKKYAEDNGFRNIEFYVDDGVSGTTFDRPDFNRMIADVESGRIGTIIIKDMSRFGRDYLKVGYYTEIMFPEADVRFIAINNGIDSANQADSDFTPFLNIINEWYAKDTSKKIRAVFKSKGQSGKPLCTNPPYGYIKDPEDKLHWIIDEKAAEVVRDIFRLCMAGFGPTQIAKQLEKRCIDTPTVHLRKMGINTPARPPENPYAWSARTVADILAKMEYLGHTVNFKTSKKSYKSKVKILNNPEDWLVFKNTHEAIIDEGTWETVQKIRDGKRRPSRLGEMGMLSGMMFCADCGAKLYQVRGKGWTHDKEYFVCATYRKKKGMCSSHQIRNVVVEQLLLEDLRRVTSFAKDHEQEFIRIVMNNSEKELAKELRQSQKEYEQAQTRIADIDKIIRKLYEDNVMGKIPEERFYKMSAEYEAEQKALEERISKLKHTIDTANEQSLNTDRFLALVKKYTEITELDAEIIREFIDKIIVFKAEKIDGRRTQRIQIFYNCIGAIDLPK

SEQ ID NO: 4494 - protein, 522 aa, synthetic construct
MNENVTLIPARRRAGNRIIKDEKPKLRVAAYCRVSTDSDEQAGSYETQVNHYTEYIGRNKEWELAGIYTDDGISGTNTKKREGFNEMIDDCMAGKIDMVITKSISRFARNTIDCLKYVRQLKEKNIAIIFEKENINTLEASGELLLTIMASLAQQESASLSQNVKLGLQFRYQEGKVQVNHEHFLGYTKDEDGNLIIDENEAKIVRRIFREYLEGASFRDIAEGLERDKIKTGGKRYKWHLSTVKGILRNEKYMGDALLQKTITTSFIEKTRIKNDGTVPQYYVKDSQEAIIPRDVYMQVQEEMVRRTNMTSGIEGKKKRVYSSKYALSSICTCTKCGDVYRRIAWNNRGKHSIVWRCCTRVEEGPDVCDASTIQEKVLQEATVKAINQLLQCSQSLRDILKENIEVAFADDNAGELEKINTILAQKQKELVRLAHAKKDYTVLADEIEILRDKKQEILMQRAETEGVKKRISELSKFLQNTDTELTEYDEQMVRKYIEQIKVYDEKLTVCFKAKVEIDIPR

SEQ ID NO: 4495 - protein, 521 aa, synthetic construct
MARITKIEATKDFIGKKKTRVAAYARVSTRSDEQLLSLETQKEHYDNFISANSEWEYAGLYYDEGVSGTKVEKRDGLLALLKDCEDGKIDRVITKSISRFSRNTTDCLEMVRRLASLNIYLYFEKENIDTEHMSSELMLSILSSIAESESRSISQNSKWSIKHRFEEGTFIISYPPYGYDNKDGKMVIVPKEAAVVRDIFDMTINGMGTYVIARELNDRGLQSKKGAKWHPSTVRGILQNEKYTGDVIFQKTYTDDNFNRHNNYGEKNMYLCKNHHEPIISHEIFDKAAAVIEQRAKEKSIEAGSGKYQRLYAFSGKIICGECGAKFKRRQHYKPSGDYVAWCCNTHITDKNACSMLYIHDEAIKNAFVRMMRKLQTADNRMLKPFVAGLQGTNNKDRLHQVMDLEAAIEKNNEQQAVLINLMSAGYLEPEIFHMEKNQLLIEADELSKEKERISRSINGDLTHLEEAKKLLRFASRKSEIKSFDDDTFLEYVDAITVKSREEIMFNLKCGLHLTERLVEE

SEQ ID NO: 4496 - protein, 531 aa, synthetic construct
MKEIIKIDSTMRKTGFEKKTRVAAYARVSSDSDEQLLSLEVQKEHYENYIKSNPCWEYAGLYFDEGISGTKIGKRESLKQLLRDCQSGQIDRIITKSISRLARNTVDCLEIVRKLTGLGIYLYFEKENIDTEHMSSELMLSILSSIAQSESRSISENNTWSIQKRFENGSFVISCPAYGYKNENKKMIIVPEQARVVKEIFNMALSGMGGEAIARVLTDKKIPTKKGGSWTSSTVNAVLTNKTYTGDVIFQKTYTDDSFNRHKNCGEKKQYVIENHHEAIISHETFNLVKEIIAWRRSENNIVCGNGKYNKLYAFSGKIRCGVCGSKCKRRIIYQHNKAYGIWVCITHLEDIHACSQKSVMESYLKISFLQMLNKLKATSAQMLTPLVESLRGVNNKDGLNKVIELEEKKLKLQEQEQVLSKLLAGGYIEMDSYYLESNQLKTEIDTCLKEKLQLSNSLNGNLTHLNEAQKLQRFVSVTEVFSEFKDEDFLDFVDGIVVKSRTRFLFILKCGLELEEEVKETWHASHMVTE

SEQ ID NO: 4497 - protein, 572 aa, synthetic construct
MASRIAEKLAAKKAAIYIRVSTHWQVDKDSLKVQRRELIAYVTLVLGITDYVVFEDPGYSAKNTDRPEYQAMMDRIRTGEFTHLVVWKIDRISRNLIDFAAMHDELQSLGVTFVSKNEQFDTSSAIGEAMMRIILIFAELERKTTAERVTAVMLSRASDGQWNGGRVPFGYSWSKETKTFSIVPEEAKAIRRMAELYEQYQSLLYVAKYLNDAGIVTKTGGQWTPTTVRTILTNPWYIGQYVYNVHSDGKGIEKRDSDEWITVENHHEPILNEDVFCRMKFLLTRNKRGGVPSHKTYVRKNIHVFAGLLRCGQCGSNMTANLDRRRANGFRPSQYACGSRRRKGTSCTNKYISDTTLGPFVLNYVANIIRASKNSSEATTPEVLERKLLRGEAFEDVASVSTDSLGQLLDAFRSAGDAVEYRPQIAFSGEDNAIREIDTLRARRRKLDNALARLNALYLYDDEAMPEKDFVMQRGQITKQLEEVNARIEELQNQESSEELGDDFIGKASYYIMANKLIEDRYIDYEKYIRAIDPSIPHSFLQQIIDHIVVNDGRVTSITFKNGATHTFTYKT

SEQ ID NO: 4498 - protein, 507 aa, synthetic construct
MKRVISYIRFSSEKQAKGDSLRRQSKMVTDWLKAHPEYYLDESLTFRDLGVSGFTGKHLKGGLGDFLTAIEKGLVKAGDTLLIESLDRLSRQAVDRASELLRNILRSGVDVVTLSDGEHYTRESLKDPLSLIKSILIMQRAHEESLRKSERIQAAWDAKKEAAKAGIKISRRCPAWLKLNDDRKSFSVIPEKVETVKRCFQLRLEGKSIWEIVRTLNDEGHQSMSQYKPGSFGQSSVQDLLKNRSVIGYFTPKGCEEIAGYYPAIIDETTFYKVQQLSYARHGRKPASAKPLSVNLFKGVIRCSECGHALIITGFSDTRNGIYRCPLRNENRCSAKGLSRKQTDGTLLALLSRLDRFDSDTTNTIDTLKLHREHISSNIEKLVQLSLEIEDLSAITSKLRQLKGELSQVDADIEKETQRLKSIDVGCLSDCDLTTKAGRIEAQLIIKSAVKEVVLNTAKRRCKVTFHNGKLIDLPITETPSDNVTEAIQSLSEVTERGLIDVDEVII

SEQ ID NO: 4499 - protein, 546 aa, synthetic construct
MTDFIGRDAIPYARFSSNQQQHGMSLERQSNAFDSFVKKSKANPRYDLAMDDKGKSAYKGQHILENGALGNFIYKLEGGDLKLPTSPKPLLVVEEVDRLTRLEPDDGQELLLRLMRYVDICVVDPSGSSYQLFARKGQGSDIGSIILLTIKIYSAHDHSKKLSKRVGIAHAKSLSEAVVSGKALRYGTYPFWLRKNGDKYELVLKWVEILNEVYVMLSDGIAPADIANTLNEKGYKVPRTQRDHKKEVLEHETNRWNTNRVRVLYSSRTPIGKMKPVNHQTEIDLYPPAISEDLYFKAIAVVNRRKRGSGNKIGRVKSLFAGFTYCYACRKRMHTDTRLRNGISDVRMRCSSRASATLIDRDCDCGYISMDFEERLLILLIDKVALSDLLVAPVDNQVSILSSKISICEQEISEFNKLLKTSIAPALYQGLAVHQDKLKELEAKLVLITPINNNVITENYEEIAELAQASLDPKNETERARMNVLINSIVNRVELYKKVKQSSIIIVNFKSGIRRMYTQSRNVPDWNIIELEPALEQQHQIEHSVT

SEQ ID NO: 4500 - protein, 487 aa, synthetic construct
MGSYAIYVRVSTDRDEQVSSVENQIDICRNWLERNGFIWDEKRVFKDEGISGTLFVNRSAIQLLLQKAKAKEIDMVVFKSISRLARDLKDSLEIREVLLAHNVRIISVEEGYDSVKAGKNDMAFELWSLFSAQYSRTLSSSITAALAVKVRRGEHIGKVPFGYNRENQKLVMHDEEAEVVRKIYSWYTNGWGYKKITNELNRLGIKSKTQKNWQMTSVQRILRNPIYKGTFILNQYTSVKVSGKKKQIRNPKEKWFIFPNHHPAIIDEEIWNQVNPKDTNTNKTKITAWNEFRNLAKCAVCSSNMVIVQSHSKKKNGERTEWKYLKCSQYRRAGKHGCINHVPIQYDDFRQFIISLLVEKGEMLTLNFQNTMEKGKKEKIKRLQQLLKTNEQKKKALLDLYLEQLINKEEFEKKRSDLELEIAKLNQDLFVIQQNNSSSMEIKTIKEAFQQLKQQEQDLLHIFQTLIQEIMIHQDGTVDIAYKFEGN

SEQ ID NO: 4501 - protein, 507 aa, synthetic construct
MKRVISYIRFSSEKQAKGDSLRRQSKMVTDWLKAHPEYYLDQDLSFRDLGVSGFTGKHLKGGLGDFLTAIEKGLVKAGDTLLIESLDRLSRQDIDIASELLRNILRSGVDVVTLSDGEHYTRESLRDPLALIKSILIMQRAHEESLRKAERIQAAWDAKKEAAKAGIKVSKRCPAWLRLNDDRKSFSVIPEKVETVKRCFQLRLEGKSIWEIVRTLNAEGHQTLNQYKAGSFGQSSVQDLLKNRSVIGYFTPKGCEEIAGYYPSVIDETTFYKVQQLSHSRYGRRSVSDKPLSVNLFKGVIRCSECGHALIITGFSDTRSGIYRCPLRNENRCSAKGLSRKQTDGTLLTLLSRLDRFDSDMTNTIDTLKLHREHISSNIEKLVQLSLEIEDLSAITSKLKQLKGELSQVDADIEKETQRLKSIDVGCLSDCDLTTKAGRIEAQLIIKSAVKEVVLNTAKRRCKVTFHNGRAITLPITENPSEDVTEAIQSLSEVTERGLIDVDVVAI

SEQ ID NO: 4502 - protein, 507 aa, synthetic construct
MKRVISYIRFSSEKQSRGDSLRRQSKMVTDWLKAHPEYHLDQDLSFRDLGVSGFTGKHLKGGLGDFLTAIEKGLVKAGDTLLIESLDRLSRQDIDIASELLRNILRSGVDVVTLSDGEHYTRESLKDPLSLIKSILIMQRAHEESLRKSERIQAAWNRKKELISEGIKVSRRCPAWLRLNDDRKSFSVIPEKVETVKRCFQLRLEGKSIWEIVRTLNDEGHQTLNQYKAGSFGQSSVQDLLKNRSVIGYFTPKGCEEIAGYYPAIIDETTFYKVQQLSYARHGRKPASAKPLSVNLFKGVIRCSECGHALIITGFSDTRSGIYRCPLRNENRCSAKGLSRKQTDGTLLALLSRLDRFDSDTTNTIDTLKLHREHISSNIEKLVQLSLEIEDLSAITSKLKQLKNELSQVDADIEKETQRLKSIDVGCLSDCDLSTKAGRIEAQLIIRSAVKEVVLNTAKRRCKVTFHNGKSITLPITENPSEDVTEAIQSLSEVTERGLIDVDEVIV

SEQ ID NO: 4503 - protein, 547 aa, synthetic construct
MKLLVPYIRWSTKEQDSGDSLRRQTNLIDAFYAKHKDDYYLLPAHRYVDKGKSGFHQQHKNQGSDFRRMFENVMSGVIPEGSLIVVENFDRFSRADIDTAIDDVRQILRKGVSILTLGDGELYDKSALTDPVKLIKHIIIAERAHQESLVKQKRIAQVWNHKTQLARELKKPMGKQAPGWLELSEDGSHYIVDEDKASLVNIIYDKRLSGMSMFAICKWLNEQGYPTINQRKVRISKTKKPDGNWSALSVKHILTSRSVLGYLPAKISSEDRKTVLREEIEGFYPQIVTDSKFYAVQQLLEETGKGKTSSGDHWLYVNILKGLIRCKCGLVMTPTGIRKPVYQGTYRCNGNKESRCSYGTVSRKLLDTQLCSRLFSKLSQLHDEATDTAKLDELQRRLNTVDGELEKLTETLIQLPNITQIQEALRVKQEEKDELIVQLSREKARVKSVSSLDLSGLDMESVEGRTEAQIIIKRLVKEIVVSGNEKLVDIYLHNGNMIRGFPLDGKDDHTLTLEEATDEMQSLDDMLIFGEPVTRIYPAGDMEEVDA

SEQ ID NO: 4504 - protein, 455 aa, synthetic construct
MANEIKQVALYIRVSTDQQAKHGDSLDEQQHTLNEYVRQQGNMRVFKTYIDDGISGQKLYRDEFQKLLDDVKKGRIDTILFTKLDRWFRNLRHYLNIQEILDKNNVTWLAVTQPFFNTETAMGRSFVNQSMGFAELEAQMTSERIRAVFDNKIRKGEVVSGKVPLGYDIKDKHLVPNEKAKIVKEIFQYYLETGSMRATVRHLENHFSMTRDYQSVRQMLTNRKYIGELRDNKNFCKPIIDRDVFERVQLQLSKNIRMNKKRDYMFTGLLVCSECGCNYSATAVISRYVRKDGTTNPNERHLYRCTKNRNNAKKCSNKKGIYETTLENFLLENIEKQAEELSVKMQQEPEVKKTKNTNDKIKKKIDRLKKAYLNEVITLEEYKKDREELEALLIPERDNKIAKIDLNSLHNYSTAEFRDGYKQLTISEKSSLWRQVIKNIVVYPDGNLKINFLGY

SEQ ID NO: 4505 - protein, 464 aa, synthetic construct
MDKKAAIYIRVSTQEQATEGYSIQAQTDRLTKYVEAKDFILYKKYIDAGYSASKLERPAMQELIQDVQSKKVDVVIVYKLDRLSRSQKDTMYLIEDIFRPNDVELISMQESFDTSTAFGSATVGMLSVFAQLERKSISERMITGRVERAKKGFYHTGGQDRPPAGYQFNSDSQLIINEYEAAAIKDLFRLYNDGLGKSSISEYLKKNYPGKNKWLPSSIDRMLKNSLYIGKVKFSGTEYDGIHEPIIDEVTFYKTQKEIARRKQTNTKRYNYVALLGGLCECGICGAKMANRRAVGRKGKVYRYYRCYSKKGSPKHMMKTDGCSSKAQQQFIIDEAVINNLKNIDVEAELKRRSAPQTNTSLISSQIESIDKQINKLIDLFQVDSMPLDVISEKIDKLNKEKQSMEKLLERKNKLDKTELQHRFDVLKSFDWDNSSIESKRVVIEMLVQKVIIHDNSIEIILVE

SEQ ID NO: 4506 - protein, 470 aa, synthetic construct
MKGESELDKKAAIYIRVSTQEQATEGYSIQAQTDRLIKYVEAKDFILYNKYIDAGYSASKLERPAMQELIQDVQSKKVDVVIVYKLDRLSRSQKDTMYLIEDIFRPNDVELISMQESFDTSTAFGSATVGMLSVFAQLERKSISERMITGRVERAKKGFYHTGGQDRPPAGYQFNSDNQLIINEYEAAAIKDLFRLYNDGLGKSSISEYLKKNYPGKNKWLPSSIDRMLKNSLYIGKVKFSGAEYDGIHEPIIDEVTFYKTQKEIARRKQTNTKRYNYVALLGGLCECGICGAKMANRRAVGRKGKVYRYYRCYSKKGSPKHMMKTDGCSSKAQQQFIIDEAVINNLKNIDVEAELKRRSAPQTNTSLISSQIESIDKQINKLIDLFQVDSMPLDVISEKIDKLNKEKQSMEKLLERKNRLDKTELQHRFDVLKSFDWDNSSIESKRVVIEMLVQKVIIHDNSIEIILVE

SEQ ID NO: 4507 - protein, 463 aa, synthetic construct
MLTWLRKNRSQEPIVLIDDISRIARGIEAHWKLRSAIGSVGAKLQSPSIEFGDDSDSQLVENMLASVSQHQRQKNGEQVVNRMKARLINGYFPFWVPTGYRYERVKGHSGKMIVRDEPHASLIQEALEGFATGRFQTQVDVKRFLEPHSIFARDNKGEIHPQRIANLLTNKIYVGYYEYKPWNVPLTKGKHEALISWDTFQRIQARLNEGAVIRSGANTESDFPLKGFVTCGCCNKPLTAYYAKGRNKRYPYYECFNKECDECRKTIRKEMIEGEFENLVQSMRPHASLMATAAAMFRAHWNARIAGFAAKLEEQKKALARIKTKISRLTDRLIDTSSPNAISAYENKLDRLEAEKALIAENLAQKPDLNQDFDVSFRTAMNFLANPWKLWTSDNPEHRKTLIKLVFAAPLPYMRNQGFRTAKTTSPFKALVGISGEEKEMADRVGFEPTVRFHARQFSRLLP

SEQ ID NO: 4508 - protein, 557 aa, synthetic construct
MKNKKAYVYTRVSTSMQIDGYSLDAQEERIKQYAKAYGIEIIETYKDAGKSGTSISGRNEFIAMLNDIEAEKDKVDYVMVFKLSRFGRNAADVLQSLQVMENHNVNLICVDDSLDSSKDSGKLVITILSAVAEMERENILSQTMEGRKQKAREGKWNGGFAPIGYSLDNGELVVNEDEAKAVRMIFDLYANSDMGANGVSKYLVSLGINKPIRQNGKNPYFSASLIRQILDNPVYNGKIAYGRRKTIKDKTTGKIKLEKSDHYIIAQGNHEALIDDELWNTVQEKRKSQAKKYEKINRGKDERVHILSNLIKCPYCGAGLYGNKSRKRNKNKEGEHYKDYYYYGCKHRQMMNGHKCTFNKQIRAELIEKEVETIITQVVSNPTFAKKIEEKINIQIDTKEIDEVINKHLAKIRQLTGTKASLINQIDSLNFEDKHYDRKYTDLNLRLDAIYDQLEYAEMQLNDSRKRKEAILEEKITSDNIYKILVNFNSLYTVLSDIDKKRLLNEMIEEIQIYDEKTEKDTWIKSVVFKLPLIDNEIDFGLDNKDNVESVVLMSRK

SEQ ID NO: 4509 - protein, 559 aa, synthetic construct
MKTKLYSYIRFSSMRQNDGSSYERQIRMAREIAAKYDLELVNDYQDLGVSAFKGANSKTGALSRFLDAIGRSVPVGSWLFIENLDRLSRADIVSAQELFLSIIRRGITIVTGMDNKIYSLDTVTANPMDLMFSILLFIRGNEESQTKRNRTNSSALIKIKAHQENPQNPAVAIEEVGKNMWWTDTTSGYVLPHPTYFPVVQEIVELRKNGRSTAEILDHLNETYAPPPAVSNKKHSKWSRAMVERLFHTRALIGIKEISVDGVNYELKDYYPRVIDDPTFYHLKKNIGARAWNFGDKEEVKPIPLLSGIGLLKCDHCGCAMVKVKGTNKRSDQYRYTCDATRSRRLDCEHPNWSFRGDQLEKAVLQLLADKIWIAEDKANPVPALKVQVDEISRKIDNLIALSAMTGATKELADQITTLNSERETLYNQIKMAEEEMYSVDSQGWEKLAEFDLEDVYNEERLKVRFKIKQALKRIGCSRIDRNKNLFVLEYIDGKTQRVVIENSRGTRKGQIFVDLKTINDRQILESNGLVLHPCLDMLTDKNWKPEEEIPGPLQEFGI

SEQ ID NO: 4510 - protein, 497 aa, synthetic construct
MKIRRVQPSPILQKKLRVAAYARVSVDTLHHSLAAQVSYYSALIQNNPAWEYAGVYADEGITGTSTAHRTEFKRLIADCNAGKIDLVLVKSISRFARDTVDCLHTVRRLKEKGIAVRFERENIDSTSEDGELLLTLLASFAQEESRSIGDNIRWGVRRRFAEGIPNGHKAPYGYQWDGEMFRIIPAEGKIVKEIYRRYLAGESAYAIAKRLAGRGITGRQGRPIEQTTVKDILSNISYTGTMALQKNYISEGHIRKRNKGELPMYLVDGMFESLVSKDDFDKVQEIRKLRAAQSCNRNPVLMPFSGMVKCGCCGGGFSRRSAGKYRRWGCNTRERKGSTACDSRPIKEEELMAAVRAVIEKDDFDAAELKRKVSKIVIHGDCVEFHLTNGRIKKTARIYNGQRGSNPFTNKVYCASCGSKCERDTWTKGTKVWACSQPRTKCGLKRLPESELKEAAESLFGDCYEGKIVQNVERIIISDDEVVFHLKEGGAYRWQRQ

SEQ ID NO: 4511 - protein, 532 aa, synthetic construct
MAKTVRVIPASPKIFRSEVTAEPRRRRTAGYARVSTDHEEQASSYEMQMAHYKNYIESRTDWDFVGMYSDEGISGTNTKKRDGFNQMIEDALAGKIDLIITKSVSRFARNTVDSLQNVRKLKENGVEIYFEKENIWTFDSRGELLITIMSSLAQEESRSISENTTWGKRKQFAEGKTSVGYSAFLGYDKDFKINEEQAKVVKLIYKLFLGGRSFYAITKELEKRGIKSPSGKDKWYISTVRSILTNEKYRGDALIQKEYTADFLDKTRRKNTGEIPQYYVEEHHEAIIPPDFFDFVQAEIKRREQNGKHSGVSIFANKIKCGSCGGWYGAKLWHSTDKYRRVIYRCNKKYAHKGKPCSTRHLTEEEIKRIFVKALNSLVEVKEHVIAELRSLVDDVCQTGKLMEERDKVEQELRALAERLEKLIRENARVAQDQTAYLKQENEIRASYLEKQGHLARLDEKIAEREGKRNTLEGMIQVVCGINGEQVEFDEELWGGLLDHIVVKEDGQVVVVFKGGIESGVDGCRGLFYLRK

SEQ ID NO: 4512 - protein, 632 aa, synthetic construct
MVDNCARAVFYARVSTQEEEQLKALPKQVEECKDIIASKGWRLINGYVDEGKSGTKKDGRKAYIKLLEDMQEDKFDIIVVKSQDRLQRNTFDWYKFADLLNKNNKRLYLYMDNKFYEPSEDALITGIKAILAEQYSRDLSKKLNNYHEHRIEKARAGEEVPAMGNGQTYGYQLINGKWVVDESQRELVRKMYELYTDLHSVCKVRDALNEQGYRNQRGNLFTDENIGRIVKNVMHKGWVILNRHHKEFDSKETIKKLEDEWVIVKNDHEAIVSEELWDAVNDEIQSHRNKGNSGTRGKRGGTDPLSGKMVCNCCGRVLWKHASQGSYKSKEGRKYTYKRYTQWYCSGKMGRGELACTDPATISGVKLQKYLVEMADMFLDYSTVEYSKNLLKRRTISWLEDLKDKLTTPNDNGKIEQDLKALEGKRGKLIDLYTDELISKEEFKSRSVDLDAEIEKKRALLVPVEENPDIKAIEDTIANIDAEIGALFEDEAMVEEKKVQFIQEHIKKVYVSKNSDVFIVLDNVAGAFLFIDKEDTRIEVVPVAEYNPEELSEEGITENDFVPFDRESMPFPHGRVHFKRQSRKAASHLPFRDCFRRHLHRRDLERKRQSDLSTGTGRIKTAGNWRDGVHGF

SEQ ID NO: 4513 - protein, 560 aa, synthetic construct
MTKLYSYIRFSSSRQADSSSYERQKRTAKEIADRYGLELVTSYQDLGVSAFKGANSKTGALSRFLDEIGKSVPVGSWLVVENLDRISRQSIIEAQELFLSIIRRGITIVTGMDGKVYSKESVNANPLDLLLSVMMFARANEESQTKRNRTNSSALLKIKAHQQNPQSPAVAIEEIGKNMWWTDTTSGYVLPHPVYFPILQKIVKMKQEGHSTGSVLDYLNEHHTPPAPTSNKQHRKWSIAMVSRLFKTKALIGVKEVNVDGVQYELKDYYPRVLSDSEYYFLKNNLIKKAWSFGHAQEKTIPLLSGVGLLKCAHCGSPMVKRKAANGKVEQYRYTCDGEGSGRTDCLYPNWGFRASSLEGAVLQLLADKVWIAEDKANPIPEIQVQIDEISRKIDNLINLSAMTGATKELANQITDLNTQREALHEEIRLFEREMYSVDSQGWEKLAQFDLSDVQNEERLQIRLKIKGALRSIECARIDRNKNLFTLVYLDGLRQRLVIENNRGIRKGQIFVDLKTINDRQILESAGMVLHDHIDILIDEKAFYDGLPKEEDGPLSKFGI

SEQ ID NO: 4514 - protein, 523 aa, synthetic construct
MAKTVRVIPATPRVFRSEVAAEPRRRRTAGYARVSTDHEEQASSYEMQMAHYKNYIESRADWDFVGMYSDEGISGTNTKKRDGFNQMIEDALAGKIDLIITKSVSRFARNTVDSLQNVRKLKENGVEIYFEKENIWTFDTRGELLITIMSSLAQEESRSISENTTWGKRKQFAEGKTSVGYSAFLGYDKDFKINEEQAKIVRLIYKLFLGGRSFYAITKELEKRGIKSPSGKDKWYISTVRSILTNEKYRGDALIQKEYTADFLDKTRRKNTGEIPQYYVEEHHEPIIPPDLFDFVQSEIKRREQNGKHSGVSIFANKIKCGCCSGWYGAKVWHSTDKYRRVIYRCNKKYAHKGKPCGTRHLTEEEIKQIFVKALNSLMEVKENVIAELRSLIDSVCQMEELTEERNRIEQELGVLTERLEKLIRENARVAQDQTAYLKQENEIRALYVEKQGSLEKLDEQIAERESKRKTLEGMIQVVCGINGEPVEFDEELWGGLLDHIVVKEDGQVVVVFKGGIEIGVWK

SEQ ID NO: 4515 - protein, 499 aa, synthetic construct
MKIRRVQPSPILQKKLRVAAYARVSVDTLHHSLAAQVSYYSSLIQKNPAWEYAGVYVDEGITGTSTAHRTEFKRLIADCNAGKIDLVLVKSISRFARDTVDCLNTVRKLKEQGIAVRFERENIDSMSEDGELLLTLLASFAQEESRSIGDNIRWGVRRRFRQGIPNGHKAPYGYTWDGEMFRIVPSEGEIVKEIYRRYLAGESAYAIAKSLAGRGITGRQGRPIEQTTVKDILSNISYTGTMALQKNYITEGHIRKQNKGELPMYLVEGMFEQLVSKVDFDKAQEIRKRRAEGAANRNPVLMPFSGMVKCGCCCGGFSRRTAGKYRRWGCNTRERKGSTACDSRPIKEEELVAVVRTVMEKDDFDTAELRRKVSKIVIHGDRIDFHLVNGRIKKTARIYNGQRGSNPFTNKVYCGSCGSKCERDTWTKGTKVWSCSQPRTKCRLKRLPESELKEAAESLFGDGYEGKIVQNVKRIVISDDEVIFQLKEGGAYRWQRQCG

SEQ ID NO: 4516 - protein, 523 aa, synthetic construct
MAKTVRVIPASPKIFRSEVTAEPRRRRTAGYARVSTDHEEQASSYEMQMAHYKNYIESRADWDFVGMYSDEGISGTNTKKRDGFNQMIEDALAGKIDLIITKSVSRFARNTVDSLQNVRKLKEHGVEIYFEKENIWTFDTRGELLITIMSSLAQEESRSISENTTWGKRKQFAEGKTSVGYSAFLGYDKDFKINEEQAKVVKLIYKLFLGGRSFYAITKELEKRGIKSPSGKEKWYISTVRSILTNEKYRGDALIQKEYTADFLDKTRRKNTGEIPQYYVEEHHEAIIPPDLFDFVQLEIKRREQNGKHSGVSIFANKIKCGCCGGYYGAKVWHSTDKYRRVIYRCNKKYAHKGKPCSTRHLTEEEIKQIFVKALNSLMEVKENVIAELRALIDSVCQTGELVEEHGRVEQELTLLTERLEKLIRENARVAQDQTTYLKQENEIRALYLEKQGALEKLDKQIAERESKRNILEGMIQVVCGINGEQVAFDEELWGGLLDHIVVKEDGAVVVVFKGGIETAIEG

SEQ ID NO: 4517 - protein, 497 aa, synthetic construct
MKIRRVQPSHILQKKLRVAAYARVSVDTLHHSLAAQVSYYSSLIQKNLAWEYAGVYADEGITGTSTTHRDEFKRLIADCNAGKIDLVLVKSISRFARDTVDCLHTVRRLKEKGIAVRFERENIDSMSEDGELLLTLLASFAQEESRSIGDNIRWGVRRRFRQGIPNGHKPPYGYTWDGEMFRIVPSEGEIVKEIFRRYLAGESAYAIANTLAGRGITGRQGRPIEQTTVKDILSNISYTGTMALQKNYITEGHIRKRNKGELPMYLVEGMFEQLVSKVDFDKAQEIRKRRAAQSSNRNPVLMPFSGMVKCGCCGGGFSRRTAGKYRRWACNTRERKGRESCDSRPIKEEELVAAVRDVMEKDDFDTAELRRKVSKIVIHNDCVEFHLINGHIKKTARIYTGQRGSNPFMNKVYCGSCGSKCERDTWTKGIKVWACSQPRTKCRLKRLPESELKEAAESFFGDCYEGKIVQNVERIIISDDEVIFQLKEGGAYRWQRQ

SEQ ID NO: 4518 - protein, 624 aa, synthetic construct
MIKTFIYSRVSSQEQLSGGGLDRQETDVREYVTRNGLDQYEIVAMVDRGISGYDGSNMRDGELGKWYKDAITGMYWGSHLVLEAIDRFSRRDPMLAMEDFTVLVNKGGIKVHIVKFNTFINGDNLPMLSMMMNLAHSESKQKSDRISKGWQRRRRMALDNGTAITARTPYWIDVRDNEYRLNNSSIAVVEAFAMYKQGLSCGLIAKKLNELKHYFPYMWTKTAVQHIVDGLNTSGIIDAPRAIKTIKAFYKSGFSVEDIAKKMNAEFQFMKEWNAPAVHKLLQNKSVTGLVEIQKRKLIQEFDSDGKPLELRTKSEGEKYFESIYPQIISIDDFELIQKLLESNRKVDTKTGKGQTTGGTVTQNEDGELVKQFILSSLCRCYKCGGAMFNNIVRSKRKNGKVDTYSYLRCLNERDAHCDVKALNYPVIERAIIEHVKGLNFDTMFKGTNNSELELLKSREVELLRDIATYEDAIAARKAAGKNTSPVLVTSLVDAQDDLEALQKKIRAISGVTVNAGELTSLNESVFDVAEYELRNMVELELQKIIKRITFNCTEKNIYFITIQYNTGTVLQHGLKVDKKKGVIETYELHEGNKGYVSNGEVITPALIEAAESKNIGIFEGKVM

SEQ ID NO: 4519 - protein, 602 aa, synthetic construct
MKKLFIYHRVSTDKQAESGTGIERQEEDLQRFIESKNLLEGMDEPTPTVISDRGVSAFKGHNMTRGELGKWVDQVSRGMWDGSILVVESMDRFSRQNPLIVSRYLSTIVEQNVTIWDKALNIAINLDNSAMLPIIIMSTQRAYEESKVKSDRIRDGKKRKRETSLANGDIITSLRPKWIDVKGTKYVLNERAEIVREIFRLYQSGLGTPTIANVLNERGKEWQFDRVWRAEAVHKVLRNKRVTGEITLIETVRHHNDLKNPVTQTKRVMDVYPIVIEREVFDLVQATLKARRPGAGRTEVKDELDSDLVHPNILGGLCRCTKCGSAMYHNKIVANRKSKKNGDFKEEYRYIRCLNERDNLCDNKAVNYGIVEQRLIEHIVGLDFSTILTSTEVNPANELLKMKILKAKEVVQEYEEGIAEMEREGEMVGFKTMKALEKAEANLKELEDSYVDDEVQVDTSLFTQANMDDMLNASKLDIRGRLERELSKVISTIKIQREGKQYYCEIKYKQRPEIKHILVIDSRKKGGVNGFYAEQQEEYEVFYSTTFALFVQPGQMPQFKQLEKPVNQIDYTLLQNHLEYIHGYDSTVAWMRDSVKFVMMDH

SEQ ID NO: 4520 - protein, 589 aa, synthetic construct
MSAHVTILRNTVLPVKFNTMNRPRLYSYIRYSSERQGKGSSIERQKSYIAEMAKQIATEYDLEIFEEYQDLGVSAYKGKNVQEGALSDFIDQVESGLIPKGSFLLIESLDRFSRQNAMQAVNLFTSLLLNGITVITGIDKQVYRQTEVNTETLQQLMFSVMLFSRANEESSTKSHRTIASALSKIRRHQERKPGDPVVAIKELGSDKWWTDSSTGYVNPHPVLFPIAKKIIQLKQDGWSNRMILQHLKNNYDGPVIGNKKSKGIWNMQHCSRILEPAIYGRKVITVNNAEYVLDDYYPAIISKDEYEALKLQVGNKGFAPNRESNPEIPLLSGIGILHCAHCSCYMVKAKSTLKNHPHAYRYQCASRDLHQDCNKWGFRASTLERTILQLIADRIFLQTKYQPSGLEGKIADIQSQIENYVLAIGSAKSPEIINSLTSQIDQLEQEKQSLIVEKRLYDESIVQMNTEGWDKFRKFDIDDALNPLRTKIRANIKTVIMRVDCSRIDKKQNLFTITYRDQHKQRIVIENNSGWKKGKIYVEAQTINDIQILESEGLILHDHIDILINRDKFMTEAKKRLDHPRTLIDELTE

SEQ ID NO: 4521 - protein, 560 aa, synthetic construct
MSKEKIKVYLYTRVSTSIQIEGYSLEAQKSRMKAFAIYNDYEIVGEYEDAGKSGKSIEGRKQFNRMMEDIKSGKDGVSFVLVFKLSRFARNAADVLSTLQIMQDYGVNLICVEDGIDSSKDAGKLMISVLSAVAEIERENIRIQTMEGRIQKAKEGKWNGGFAPYGYKLEDGKLFINEEEAVAIRTIFDQYVNTTIGANGLSKYLENHGIRKIPRQNGKNPLFDAGLIRKILKNPVYNGKIAFGRRTLEKVHGTRNEYKQVEQDEYLISEGIHEAIVSDEVWQAAQVKLKSQAKKYEHVNKGKDTRTHLLSGIVKCPICGVGMFGNKCIKKKKDGTKYKDFYYYGCKHRQMIRGHKCTFSKQIREELLDDAVAEVIVKIVSNPKFASMMQEKINMKVDTSEIEKEIDNYQKELRKSHSTKFKLIEEIDNLDVEDKHYKRRKQDLDDRLYRMYDKIDELESSLIDAKAKKQTIEAEKLTGDNIYKVLIYFDKLYKVMNDVERRQLIIALISEIQVYEEKQPNGQWLKSITFKLPIIDDDLNISLDNDEHVECVVLLQRSKG

SEQ ID NO: 4522 - protein, 559 aa, synthetic construct
MKTKLYSYIRFSSMRQSDGSSYERQIRMAREIAAKYDLELVNDYQDLGVSAFKGANSKTGALSRFLDAIGRSVPVGSWLFIENLDRLSRADIVSAQELFLSIIRRGITIVTGMDNKIYSLDTVTANPMDLMFSILLFIRGNEESQTKRNRTNSSALIKIKAHQENPQNPAVAIEEVGKNMWWTDTTSGYVLPHPVYFPVVQEIVELRKNGRSTAEILDHLNETYTPPPAVSNKKHSKWSRAMVERLFHTRALIGIKEVSVDGVNYELKDYYPRVIDDPTFYHLKKNIGARAWNFGDKEEVKPIPLLSGIGLLKCDHCGCAMVKVKGTNKRSDQYRYTCDATRSRRLDCEHPNWSFRGDQLEKAVLQLLADKIWIAEDKANPVPALKVQVDEISRKIDNLITLSAMTGATKELADQITTLNSERETLYNQIKMAEEEMYSVDSQGWEKLAEFDLEDVYNEERLKVRFKIKQALKRIGCSRIDRNKNLFVLEYIDGKTQRVVIENSRGTRKGRIFIDLKTINDRQILESNGLVLHPCLDMLTDKNWKPEEEIPGPLQEFGI

SEQ ID NO: 4523 - protein, 520 aa, synthetic construct
MTEKNIMVIPARKRVGSTAAKEKIKKLRVAAYCRVSTETEEQNSSYEVQVAHYTEFIKKNTKWEFAGIFADDGISGTNTKKRDEFNRMIAECMDGNIDMVITKSISRFARNTLDCLQYIRQLKDKNISVYFEKENINTMDAKGEVLLTIMASLAQQESQSLSQNVKLGLQYRYQQGKVQVNHKRFMGYTKDEDGNLIIVPEEAEIIKRIYREYLEGQSLVGIGRGLEKDGILTAAGKPRWRPESVKKILQNEKYIGDALLQKTVTVDFLTKKRVKNEGHLPQYYVENSHEAIIPKELFLQVQEEIHRRSNIYTGEGKNKRIYSSKYALSAITFCGDCGDIYRRVYWNIHGRKEFVWRCVTRIEQGPEVCKNRTVKEDELYGAVMTAINKLLAGGNNMIKTLEENIHAVIGETTEYQISEINNSLEEKQKELIKLANKGQDYEHLADEIDELRDKRQTLLVEDASLNSENERIDELIEFIRKNKFRTLEYDDKLVRKIIQNVTVYEDHFVISFKSGIEMEI

SEQ ID NO: 4524 - protein, 520 aa, synthetic construct
MKKITKIDELPQGQLPTTKLRVAAYARVSTDSDEQLESLKAQREHYERYIKSNPEWEFAGLYYDEGISGTKMEKRTELLRMIRDCKQGRIDFIITKSISRFARNTVDCLELVRKLIDIGVYIYFEKENLNTGDMESELMLSILSGFAAEESASISQNSTWSIQKRFQNGSYVGTPPYGYTNIDGEMVIVPEEAEIIKRIFAECLSGKGGGTIARGLNKDKIPARRGNHWSAGTVIDMLRNEKYMGDALLQKTYTDSNYNRHSNTGEKDQYYYKDNHEPIISREDFAKAQDLIDERAKMKCKGVKKNVYLNRYALSGKIVCGECGRNFRRKTNYSAGRSYIAWSCIGHIEDRESCSMLFLRDGEIKATLTTMMNKLAFSHKLILEPLFKSISQIDEESDRERMDAIDKRMEQLMEERNTLITLMAKGFLEPALFNQERNVLDNEIKNLTTERTNLVTNSTSGVLRANEIRNLIDYVSADSFKGDYTEELFEEFVENIIVNSRDELTFNLKCGLSLKEKVVR

SEQ ID NO: 4525 - protein, 402 aa, synthetic construct
MKQIKTIQAQKVTTIKRLKVAAYTRVSHTSLLQSLSNQVSYYSQMIQANPEWDYVGVYSDSAISGRSQAHRRDFQQLLEDCRKGKVDLILTKSISRFGRNTVELLETVRELKRLGISVRFEKEKIDTLTAEGELLLTLLASMAQEESQSISQNIRWRVKKRFEDGKPYIPQDIFGYRWNGDEYVIEPHEASIVRQVFEWYMEGLSAPKIAKKLDDRGERTRLGNRFTKRIIYNMFDQEAYCGRLILQKTFRDHFGSRSIPNDGQMAKYIVENAHEAIVTPEYFQLVNQEKKRRARRRVSKHDALARLQGKVYCEHCGLDMILTLETKSNQEKRVRYYCRTRDGKGVEACLGRTVTEEQLFQAFGESINIEDIHHISFNSVTNEAKVTYRNGEEKHVIIQKGR

SEQ ID NO: 4526 - protein, 521 aa, synthetic construct
MKKVITIEPAKQVTHKVDLPSFTKRRVAGYARVSTDHEDQTTSYEAQMTYYTDYINSRSDWEFVKMYSDEGISGTNTKKRLGFQEMVEDALVGKIDLILTKSVSRFARNTVDSLSTVRKLKEAGVEIYFEKENIWTFDSKGELLITIMSSLAQEESRSISENVTWGRRRQLAEGQVTFSYSQVLGFKKSDTGGFEIDQEEAKIVRYIFHQVLLGNNPNKIARELTAQGIPTPQGKRQWSYGTVKRMLRNEKYKGDALLQKSFTTDFLTKSTKPNEGELPQYYVENNHEAIIKREVFDLVQVELDKLEKKRQTNNIFTGRLFCGDCGSAFGSKVWHSTSKYKRTIYQCNAKYKGEHKCQTPHVTEEEIKGWFLSAMNQLLSNREEIVANTELLIDLAKDTSPLENKIDDLEQQLETIRQDIEDLVDRNARKAQNQDLYQEQYDTLVTAYQERQKELQEATSSLEEQKSKQLSLDGFIQQLKQQEDLITDFNQELWQTSVERLDIKEGKKISLTFKNGVRIDL

SEQ ID NO: 4527 - protein, 497 aa, synthetic construct
MKRAISYIRFSSEKQSRGDSLRRQAKMVTDWLKAHPEYYLDESLTFRDLGVSGFTGKHLKGGLGDFLTAIEKGLVKAGDTLLIESLDRLSRQDVDQASELLRNILRSGVDVVTLSDGEHYTRESLKDPLALIKSILIMQRAHEESLRKAERIQAAWDAKKEAAKAGIKISRRCPAWLKLNDDRKSFSVIPEKVETVKRCFQLRLEGKSIWEIVRTLNAEGHQTLNQYKAGKFGQTSVQDLLKNRSVIGYFTPKGCEEISGYYPAIIDETTFYKVQQLSYARYGRKPASDKPMAVNLFKGVIRCSECGHALIITGFSDTRNGIYRCPLRNENRCSAKGLSRKQTDGTLLALLSRLDRFDSDMTNTIDTLKLHREHISSNIEKLVQLSLEIEDLSAITSKLRQLKNELSQVDADIEKETQRLKSIDVGCLSDCDLTTKAGRIEAQLIIKSAVKEVVLNTAKRRCKVTFHNGKTITLPITENPSDNVTEAILNRPGNPGD

SEQ ID NO: 4528 - protein, 508 aa, synthetic construct
MKKAIAYMRFSSPGQMSGDSLNRQRRLIAEWLKVNSDYYLDTITYEDLGLSAFKGKHAQSGAFSEFLDAIEHGYILPGTTLLVESLDRLSREKVGEAIERLKLILNHGIDVITLCDNTVYNIDSLNEPYSLIKAILIAQRANEESEIKSSRVKLSWKKKRQDALESGTIMTASCPRWLSLDDKRTAFVPDPDRVKTIELIFKLRMERRSLNAIAKYLNDHAVKNFSGKKSAWGPSVIEKLLANKALIGICVPSYRARGKGISEIAGYYPRVISDDLFYAVQEIRLAPFGISNSSKNPMLINLLRTVMKCEACGNTMIVHAVSGSLHGYYVCPMRRLHRCDRPSIKRDLVDYNIINELLFNCSKIQPVENKKDANETLELKIIELQMNINNLIVALSVAPEVTAIAEKIRLLDKELRRALVSLKTLKSKGVNSFSDFYAIDLTSKNGRELCRTLAYKIFEKIIINTDNKTCDIYFMNGIVFKHYPLMKVISAQQAISALKYMVDGEVYF

SEQ ID NO: 4529 - protein, 508 aa, synthetic construct
MKKAIAYMRFSSPGQMSGDSLNRQRRLIAEWLKVNSDYYLDTITYEDLGLSAFKGKHAQSGAFSEFLDAIEHGYILPGTTLLVESLDRLSREKVGEAIERLKLILNHGIDVITLCDNTVYNIDSLNEPYSLIKAILIAQRANEESEIKSSRVKLSWKKKRQDALESGTIMTASCPRWLSLDDKRTAFVPDPDRVKTIELIFKLRMERRSLNAIAKYLNDHAVKNFSGKESAWGPSVIEKLLANKALIGICVPSYRARGKGISEIAGYYPRVISDDLFYAVQEIRLAPFGISNSSKNPMLINLLRTVMKCEACGNTMIVHAVSGSLHGYYVCPMRRLHRCDRPSIKRDLVDYNIINELLFNCSKIQPVENKKDANETLELKIIELQMKINNLIVALSVAPEVTAIAEKIRLLDKELRRASVSLKTLKSKGVNSFSDFYAIDLTSKNGRELCRTLAYKTFEKIIINTDNKSCDIYFMNGIVFKHYPLMKVISAQQAISALKYMVDGEVYF

SEQ ID NO: 4530 - protein, 407 aa, synthetic construct
MKTEKIRVCAYARVSTMTEKQQDSLTNQQAYYSHLYQNKKDVDFIGVYYDQGISGKLAKRPGFQQMLEDCRAGKIDVIHTKSISRFARNTELLLEVSRELKTIQVDIFFEEQNLHTLSNEGEVMLTVLASYAEEELRNMSENQRWAFQNKFQRGELVINTKRFLGYDKDENGELIINPEEAKIVQWIYNLYLSGMGVHAIAKLFNQEKVPTVDGGRWYSSTITNILKNEKYKGDAILQKYYFAEIKAKQRLNQGQVQQYLITDNHEAIVSREDWEAVQKRLKQNRKANLSINCNRRYPLSGLLKCEHCGSTLKRQKYYKGKVVWVCSKYIREGKAACIGMRVPDSAVQDWSIYEPTVVKEENISGKKHYSYSCQENDTSRAGATHSENPNGGLLPSVYRPRRTAIKL

SEQ ID NO: 4531 - protein, 435 aa, synthetic construct
MAAYCRVSTDQDEQLSSYENQVRYYQDYIRQNPLYELVDIYADEGISGTNTKKRTGFNRLIADCRKGKVDRIIVKSISRFSRNTLDCLKYVRELKELGIGVTFEKENIDSLDAKGEVLLTILSSLAQDESRSISENATWGIRKKFERGEVRVNTTKFVGYDKGENGNLIINEEQAKIVRRIFRDFLQGETPESIARTLKEEGVPGWNGKVNWYPTTIQRMLQNEKYMGDALLQKTYTVDFLTKKRSENQGQVNQYYIKGNHEAIIDKEEWELVQLEIERRNQFRQDNHINFYIIQCEQNPFTCKVFCEECGGLFGRKNWTTSRGKRPVWQCNNRYKVKGIQGCTNHHIDEETLQQAFFRAVEVLRENKENLQEKWTNFSEEQKLEKYHAAQLKELLDSEQEAFDGRKMCRVLEKIMLGEDGSITVKFLEGTEVNL

SEQ ID NO: 4532 - protein, 496 aa, synthetic construct
MKAALYIRVSTEEQAKEGFSITTQKERLTAFCESQGWEIYDYYIEDGKSAKDMDRPELQRLLSDVENEKLDIVLVYRLDRLTRSVRDLYELLQTFEQHNVKFKSATEVYDTTTAMGRLFITLVAALAQWERENLAERVRVNMEQMVYEGKRPGAPIPYGYDKDENVIPEEKETLRLLRKLYMDGHGTNTVAKKLNQMGRLKRGVEWTTFTVYYVLDNPYYAGLIRWGSKKKNGKYPSKKKEELVDTITVPGSHEPIFTVEEYEEHKAEMKRRSFKGYNIKNHYWFKGVAKCHKCGSAMTGREKRTKRQDGSVYSVLYYICSRKQSGLTCPMPLIRQELAEKLIMEHIAEIKLDKKEIDKHTVEKMIEQDDLKKELDKLNKQLEEIKKRRKKWQYAFVEDLITADELRERNTEEEEKERIINERIEEIRKEMEPVMSSEEIKNLMFTLPEVWEVLDDKEKNELIRTIFKRIEFDAPEKVTPRKGKFIPARLAKIEYN

SEQ ID NO: 4533 - protein, 508 aa, synthetic construct
MKKAIAYMRFSSPGQMSGDSLNRQRRLIAEWLKVNSDYYLDTITYEDLGLSAFKGKHAQSGAFSEFLDAIEHGYILPGTTLLVESLDRLSREKVGEAIERLKLILNHGIDVITLCDNTVYNIDSLNDPYSLIKAILIAQRANEESEIKSSRVKLSWKKKRQDALESGTIMTASCPRWLSLDDKRTAFVPDPDRVKTIELIFKLRMERRSLNAIAKYLNDHAVKNFSGKESAWGPSVIEKLLANKALIGICVPSYRARGKGISEIAGYYPRVISDDLFYAVQEIRLAPFGISNSSKNPMLINLLRTVMKCEACGNTMIVHAVPGSLHGYYVCPMRRLHRCDRPSIKRDLVDYNIINELLFNCSKIQPVENKKDANETLELKIIELQMKINNLIAALSVAPEVTAIAEKIRVLDKELRRASVSLKTLKSKAVSSLGDFHAIDLTSKNGRELCRTLAYKTFEKIIINTDNKTCDIYFMNGIVFKHYPLMKTISAQQAISTLKYMVDGEVYF

SEQ ID NO: 4534 - protein, 572 aa, synthetic construct
MAHIYSYRRVSTLGQSEGVSLEVQSDENKLRELSEAYSLPVSGRIYSDVGKSAYKGEQLENELGYFLESVHSGEIKAGSILVVYSLDRISRQNIGFAKQIYLDLTNNGVSIYSILDSHLYRAHNAADEILATIIFERANNESKTKGQRNNSTALKVIEGHLQGKRTNDGYAYLVSFGNSPWWIAHREDGAVIEHPVYWDVAKQVYQKIVSGEGNLKILSWLNDNFDAPKTRTNVKAPQRMSEWKFSTIANFHKQQALYGLKNVTINKNKPEQREFALDRYYPQLITESDWLALQAIKKKRRTADSTRKRYSLITGMGIAKCYNCGAVVAASMDKTKDVISTRYYCAGKRNLQNGCEGFSFKAKWVEKAILSCAIGHAFNIQEKDNIQLLALEGERDQAKTKLRKIKDLFVDDIEMMEEFVPQLKAIKNRIKELDVLIASEQREIAKIQEQEHLSYLTGSWNEITDDALNELNQDFRKKTRELVRDTFSKIEIGKLNEQAFCKATMIDGSVFYFVHNGKRRGNSGFIRLSKVSEDDFIEVKKHFNEFHQGYFVDEGSIKVDFDKVNNVQLVKV

SEQ ID NO: 4535 - protein, 574 aa, synthetic construct
MRKCFLYSRVSSDVQISGDGLGRQEDKLKQYLLQNALRLNLSIDDCEILVDSGVSGWKGSNMGDTAALGQLFRRVESGEIDGSVLIVESLDRFSRENPFRVAGYIAKLAEHSIDIIDVEQNLVIGTSNPWSSTIASIIANRAHEESTLKSKRIKAAWNSRRKKAEESGQYMIKNTPFWIDVLDNKYVANADASIVREIFDLYLQGYGSFTIAKKMNEAGKVIRNKRWSTPKICALLRNPRCNGDFISHSLERDYEKGTSSSVEHVIKGLYPKIVTDEEFALVLNRLDDGSKNKRVCNDRKVTILNGLLKCSICGGALTVRSAGAYRYVGCLKTIEKGGCYSKPIRYDALEKIVVNHIRNMDLGKVYESNDSQEVITKERIKSLMSHIEEYKAGITQLRERGKKPSFDMLTELQNSEDELELLKKELEQLSLSKIDLSEFAVSTELFDITQIALRTRLERTISSLLNKIKVYHTKDLSFSLIEMIYVNDVVKHVLVADKKGDVTGDVVIRRNGESTTYESCSVKIIKDEGGLFSLDCNISEVVLNDYLLLMNVVDFVDSEAKEFLNLHLNAVLAH

SEQ ID NO: 4536 - protein, 506 aa, synthetic construct
MRTVITYLRFSSATQGAEGADSTRRQNELFKQWLRKNSDAQVVASFSDEGLSGYKGKHLTGQFGDMLARIEAGEFPAGAILLVESIDRIGRLEHLETEALMNRIIAHGIEIHTLQDGLIYTRDALSDDLGISIIQRVKSYLAHQESKQKSFRVSEKWKQRAKLALAGEQHLTRNVPGWIDPDTFKCNEHAETVRLIFKLLLDGESLHNIARHLQSNDIKSFSRRKDANGFSVHSVRTVLRSESVIGTLPASQRNDRPAIPNYYEAAIDASTFNKAQEILDKNRKGRTPASDNPLTINIFKGLFRCQCGASVHPTGTKNKYAGVYRCNNNPDGRCDVPPLKRKPFDKWMIDNFLGMIDVGNDGEAEGKIASLQHEVEIVTARIKKATALLLEMDDIDELKIQIKELNQRRTELQTTIDNMRRKASLTDKELPQLKDIDLTTKAGRVECQLILSKHLKGLTLGKDSVTVTLQNDTEITIPTNPLPLNDGTSIFEIADKELLDIDAYQL

SEQ ID NO: 4537 - protein, 498 aa, synthetic construct
MEIQIREGNREQKRKLRVCAYCRVSTDADEQENSLENQIRHYETVIKATPSYEYAGVYSDFAISGFKEKRPGLQKMLADAQKGKIDLILTKSVSRFARNTSIVLEATRKLKELNVGVFFELQNINTLSGEGELMLTILAAFAQAESESGSAGAKMVYQRKYEAGIPVQYLERSFGYTKDERGVYIADESEAVWVRKIYEMAADGYTPAAIKRYLNENGVKTVGGTKWSDSTVFRLIENEIYKGDYIMHKHFVNEERKLVRNRGEVDAWYIEDDHEAIVSPELWQKAQDAIEAKRDYLAEGSVIEDFTEENYPYMNRIFCAKCGHPLYRRIYSNGNRLNWGCSGTKRHGKSFCEGINIPDGVLRKAWHFDGNMYIDEKPSVKGTKEFTYLKESSWKRRHKKKVPEAIPENTEEAYPYRKKIFCGLCGSRLVRHVNPKSHKVIWICNGAKRKGVAFCRGTRIPDSVIRGWGEIKKDIYIQRKDDKNGKKRYSYTSKKPTA

SEQ ID NO: 4538 - protein, 464 aa, synthetic construct
MARSVTVIPARNRQRETGRRAVQEKKIRVAAYCRVSTDQEDQLHSFEAQVDYYTKYINDHENYEMAGIYADEGISGTNTKKREQFKRMIADCESSKIDLVITKSISRFARNTQDCLAYSRKLKNLGIGIIFEKENINTLDSTGELLFTILSSLAQDESRNISENCKWGIRTKFKNGEMHLNTFKFLGYDKDENGKLVINKEQAKTVRRIYRDFLIGINPAQIAKELTEEKVSGCNGQTKWYPSTIVGILKQEKHMGDALLQKTYTADFLTKRQVKNNGEIAQVYVKDSHKGIIDKQTWNAVQEEFERRERFMEAHGTDRYSYGADCMPFCEKVFCGECGSLFTRHSWRSRGIVQWQCKNHRKDGKVACTNAYVDNADLEKGFVKAFNRLVADRDKHMERWQQMKSDGTPLEKIRAGQMMEAVGNEPLTRFVPEIAQLVLAEVTVLGAKKYEFFFQEGSKVKVSV

SEQ ID NO: 4539 - protein, 563 aa, synthetic construct
MLILKGDQKLSTDNIMHLIGKINALIYARVSTTDQANKGFSIESQIERCKERAISKFGYKESEIIALVEPGGMGDDPNRPALNHALYLLEKGLGKKFIVLHPDRLTRDNTLQGVVSRRIWGMGVDIEFIEFEVNPHDPESMLMYNIQGSIAQYNKAKIHANSKRGRLAKAKKGEFPSFKRLYGYKFNTVTDLPEYNEEEKQILLEMKDMLLNKKMSSNEIAKELSRRGVPAPNGKTWYQATVSRMLQNEDYTGDFYYGKSKVVQVNSKKKQVPTNRDEWILIKIPPMWDKATREQIIERLKSNFKGRSRTTKDYLLKNKAKCGRCGGACGSGITSKTKSGVYKYYSCRAKTAKGYQNGKKVVSCEGKNWRVDIVDEVFWNWFIKLMKNPEKFLDSFLEEASDQKKIDELKAKASRLENQLSEIDEEIANYVILFGKGKIKESMFDQLSQPLEQNKEHIENEIKIINSQLAANKQTEDKKQKMIEYMGSFSKMIKNEITMEEKRQFLDFFIEKVTLFDDDHMEVVWKSSSLINENSHVDFLNGEQGGEFRNSHKRLNYVQAYGR

SEQ ID NO: 4540 - protein, 556 aa, synthetic construct
MPDALAPDPFTAMAAQLTPKRAVSYIRVSTREQAQRGGSEEGFSLPAQREANKRKAQSMGALVVKEFADRGESARSANRPELQKMLAYLKEDGGIDYVIVHKLDRLARNRADDVEINRAFEEAGVRLVSTSENIDQTPGGMLLHGIMSSIAEFYSRNLANEVIKGMGEKARNGGTLGKAPLGYVNVRAKDERGREIRTIALDEERAPLVRLAFTEYATGNWTVRQLADHLNTLGLSIPPTPRRPAKPITATRLHEILRHPYYKGIVTFQGVEYPGKHEPLVDSQTWQTVQTILASRRYGERQRIHNHFLKSTVVCGQCGARLSVQNAKNSKGTIYPYFVCARRCRLHDCAFTAVLIDVVEDRMVDLYRTIQLSTADRTQIEHYLHDELSQIEGDKAKAVRSLTTRRTNIEDKRRRLLHAHYEGAIPLDLLKEEQAKLTSELNHIERQLTAYQADATEVRQHLTQALDLLEDCHRLYTAAPPHLKKLLNQVFFERVLVNPLVDEEGRVILPGEGTSDAANAGGPVDKDAAGKETVGEGSTSLSADPDHDGSSYLRVF

SEQ ID NO: 4541 - protein, 506 aa, synthetic construct
MKCVIYRRVSSDEQTKGYGLDRQLELAELLANEQDLSIQQIYTDKGKSASKGEHTAKGGQLRQLYDDIESGVIHSGTILITEDLDRLSRQIASIAMGELTTNLINKGIEVWTFLDGLQKYTQTATFTLMLALVKQETAYIESAKKKERGLASHANKRAMLQNGEAPKIRRPFWIDLVKDEYVLNEQGALVKTIFELSLQGNGRINIAKQLNEQGIKPIGWKHDSKRKNEWDSNKVSNILRSVSVMGDWHSPKHDQTFKDVFPQVISRNDFHKVQSLARKNPRKLSKHKISIFQGLLDCPYCGAVYSRRSVVKTDKTYYSYKCSNSQQCAASKQVSESVLDVFVLKYLGDLDWSFMDKDDNTELNAELLELQHERKILNESIKKRSSSAKLDRLDDVEIRIEAIQSQLDRASVSVDTEFDHERIINGDEQTRVRAQQALKLLIERIQVYSVGVLPNELADTLPDKFKLMRKHGAKQAHVLIHFNSGEIRQVGLCSDYVASNRGLLVE

SEQ ID NO: 4542 - protein, 560 aa, synthetic construct
MTKLYSYIRFSSMRQGEGSSYERQIKMAKEIADRYGLELVNDYQDLGVSAFKGANSKTGALSRFLDEIGRSIPVGSWLFIENLDRLSRQDIISAQELFLSIIRRGITIVTGMDNKIYSIETVTANPMDLMFSILLFIRGNEESQTKRNRTNSSALLKIKAHQQNPQSPAVAIEEIGKNMWWTDTTSGYVLPHPVYFPILQKIVKMKQEGHSTGSVLDYLNEHHEPPAPTSNKQHRKWSIAMVSRLFKTKALIGVKEVTVDGVQYELKDYYPRVLSDSEYYFLKNNLIKKAWSFGHAQEKTIPLLSGIGLLKCVHCGSPMVKRKAANGKVEQYRYTCDGEGSGRTDCLYPNWGFRASSLEGAVLQLLADKVWIAEDKANPIPEIQVQIDEISRKIDNLINLSAMTGATKELANQITDLNTQREALHEEIRLFEREMYSVDSQGWEKLAQFDLSDVQNEERLQIRLKIKGALRSIECARIDRNKNLFTLVYLDGLRQRLVIENNRGIRKGQIFVDLKTINDRQILESAGMVLHDHIDILIDEKAFYDGLPKEEDGPLSKFGI

SEQ ID NO: 4543 - protein, 547 aa, synthetic construct
MKLLVTYIRWSTKEQDSGDSLRRQTNLIDAFYSKHKNDYYLLPAHRYVDKGKSGFHQQHKAQGSDFRRMFENVMSGAIPEGSLIVVENFDRFSRADIDTAIDDVRQILRKGVSILTLGDGELYDKSALTDPVKLIKHIIIAERAHQESLVKQKRIAQVWNHKTQLARELKKPMGKQAPGWLELSEDGSHYIVDEDKASLVNIIYDKRLSGMSMFAICKWLNEQGYPTINQRKVRISKTKKPDGNWSALSVKHILTSRSVLGYLPAKISTEDRKTVLREEIESFYPRIVTDSKFYAVQQLLEETGKGKTSSGDHWLYVNILKGLIRCKCGLVMTPTGIRKPVYQGTYRCNGNKESRCSYGTVSRKLLDTQLCSRLFSKLSQLHDEATDTAKLDELQRRLNTVDSELEKLTETLIQLPNITQIQEALRAKQEEKDELIVQLSREKARVKSVSSLDLSGLDMESVEGRTEAQIIIKRLVKEIVVSGNEKLVDIYLHNGNIIRGFPLDGKDDHTLTLEEATDEMQSLDDMLIFGEPVTRIYPAGDMEEVDA

SEQ ID NO: 4544 - protein, 633 aa, synthetic construct
MKKSALYIRVSTQYQIDKDSLPLQREDLINYSKYVLGIDDYEVFEDAGFSGKNTDRPAFQDMMHRIKNHEFSHLIVWKIDRISRNLLDFCTMYDELKEYNCTFISKNEKFDTSSAMGESMLKIILVFAELERKLTSERVSAVMLSRAEKGLWNGASVPLGYKYTKGMKFPVIDDTEAITIKYIYDLYVNNGSTPKVAYQLNQEKVKTKRGGVWTPKTVGDILRNPFYVGTYRYNVKTSGTRRWKEKSEWVVIENNHPGIVPVELFEKVNTMLSDNYKGKRQFQRENTNTHIFSQILVCGKCGSNLTAGLDAPRKDGYRPSRYTCYSSRNDNMNNCNNFISDITLLPFILNYIANFINLQNRITQRHSLRDIEKILLRGKYFADVECIDRKGLEETYLSFSIGFTDSSLNNQLDNSENNTNSELENLKKEKIKYEKALSRLEDLYLFDEQGISKKDYLFKKRDITEHIQKINEDISNVNKKNSNITTDISFLNKAGNFLIHNELSNKKNIDYRELLQTIDISLIKDFVNTVINKIEINDKKVYSITFSNGITHRFLYKVKYLQVIRTKEKFLYRKFEPQIVEYLNENNSITRKDIETITGLSHSSANALLLELLEKQIIEKKGNSVATRYFLRA

SEQ ID NO: 4545 - protein, 452 aa, synthetic construct
MKAAIYIRVSTQEQIENYSIQAQTEKLTALCRSKDWDVYDIFIDGGYSGSNMNRPALNEMLSKLHEIDAVVVYRLDRLSRSQRDTITLIEEYFLKNNVEFVSLSETLDTSSPFGRAMIGILSVFAQLERETIRDRMVMGKIKRIEAGLPLTTAKGRTFGYDVIDTKLYINEEEANQLQMIYDIFEEEKSITTLQKRLKKLGFKVKSYSSYNNWLTNDLYCGYVSYADKVHTKGVHEPIISEEQFYRVQEIFSRMGKNPNMNRDSASLLNNLVVCGKCGLGYVHRRKDTVSRGKKYHYRYYSCKTYKHTHELEKCGNKIWRADKLEELIIDRVNNYSFASRNVDKEDELDSLNKKLKREHTKKKRLFDLYINGSYEVSELDAMMSDIDAQINYYEAQIEANEELKKNKKIQGNLADLATVDFDSLEFREKQLYLKSLINKIYIDGEQVTIEWL

SEQ ID NO: 4546 - protein, 587 aa, synthetic construct
MPQLYSYIRWSSERQQKGTTRQRQVIGAKEFAIANGLELVEIEDPGVSAFRGKNTTHGKLGDFIDAVRQGAIPPDSWLYVENLDRLTRQEVTTAQKLFIELLDLGLTLVTGMDKRVYTLESVNKNPTDLMISLLLFSRANEESKTKQARTIGNVESLIERHRQGLPVNIKSCGKHPFWIDDSGSQYESVKRHAIYWEIAREAIELFLSGYGIYKVKRFLDEKYPNGLNGKEWGYQVLKKMRESRALIGERQINIGSHTYTLRDYYPCLCKNEVEFLHLQELKGQNSYKSKKNPLKEQIKLLSGLAILRCSKCGGTMSSFMNKGKPRYICLNGRHLQKGCVGWSLTAPLVDHCVIIALLMGYMDANRKERQDTSDISALIEAKNTSVGELNVSITNLVAVIEAGVNVSELASRLKVLSTERETFLKEIERLKERKALIDSKGSFEVSMMDFINLIHWNVLSDYAHESRDKIRSTINKIIEHVIIDKTDGCITIKIKCRGSDEQLIFCGIGRKPHWKFDIALYVEQDTDGDTTFEEKSILPMANQLMEEATKQFALIREGYISYFDKICKILAAIGYPDIDGSAFWPNR

SEQ ID NO: 4547 - protein, 587 aa, synthetic construct
MPQLYSYIRWSSERQQKGTTRQRQVIGAKEFAIANGLELVEIEDPGVSAFRGKNTTHGKLGDFIDAVRQGAIPPDSWLYVENLDRLTRQEVTTAQKLFIELLDLGLTLVTGMDKRVYTLESVNKNPTDLMISLLLFSRANEESKTKQARTIGNVESLIERHRQGLPVNIKSCGKHPFWIDDSGSQYESVKRHAIYWEIAREAIELFLSGYGIYKVKRFLDEKYPNGLNGKEWGYQVLKKMRESRALIGERQINIGSHTYTLRDYYPCLCKNEVEFLHLQELKGQNSYKSKKNPLKEQIKLLSGLAILRCSKCGGTMSSFMNKGKPRYICLNGRHLQKGCVGWSLTAPLVDHCVIIALLMGYMDANRKERQDTSDISALIEAKNTSVGELNVSITNLVAVIEAGVNVSELASRLKVLSTERETFLKEIERLKERKALIDSKGSFEVSMMDFINLIHWNVFSDYAHESRDKIRSTINKIIEHVIIDKTDGCITIKIKCRGSDEQLIFCGIGRKPHWKFDIALYVEQDTDGDTTFEEKSILPMANQLMEEATKQFALIREGYISYFDKICKILAAIGYPNIDGSAFWPNR

SEQ ID NO: 4548 - protein, 541 aa, synthetic construct
MAQAATAKKVVVVPIKTMDIVEGIQSIQKKKVAAYCRVSTDSEEQKESYTNQVNHYTKYIQNNLEWEMADIYADEGITGTNTKNRTHFNRMIQDARNGKLDLILVKSISRFARNTLDLLKYVRELKSLGVAVFFERENINTLDTTGEVLLTILSSLAQDESRNISENSRWGILRGFQNGKVFCNTTRFLGYDKDEHGELVINEKEAEIVRRIYEEYLDGKSYQAIARGLMRDHIKTAAGGSRWWDSSITLILTNEKYYGALLQQKTVTVDFLTHKRIKNKGQEQQYFIEDNHEPIVSKEIFEAVQKEKKRRSKLKGSVMGESKRYSNKYALSSKVYCGCCGTIFKRRTWNSNNPSKKVVWQCRTNVNEGKAACDAKSVDEQVLHSAFVRLFNRMYKNKKGFIKTLKANIVSVLSSKPGQEQLLDIEGKIQQLKSDLKELVNLKLRNQMDETVYDEETARLSNELNELRQHKLILEEEEDQKEKIKERVDEIIQVLSSRQDILEQFDDNLFNALVEKITILSPAHFVFTLKSGMSIDEIIED

SEQ ID NO: 4549 - protein, 506 aa, synthetic construct
MRSVITYLRYSSAIQGAEGADSTRRQNDLFKQWLKKNSDAQVVASFSDEGLSGYKGKHLTGQFGDMLARIESGEFPEGTILLVESIDRIGRLEHLETEALMNRILGNGLEIHTLQDGLIYTKDALADDLGISIIQRVKAYIAHQESKQKSFRVSQKWEQRAKLALAGEQRLTKMVPGWIDPDTFKLNEHAETVRLIFKLLLSGESLHNIARHLQSNGIKSFSRRKDANGFSVHSVRTILRSETTIGTLPASQRNDRPAIPNYYEAAIDASTFNKAQEILGKNRIGRTPASDNPLTINIFKGLFRCQCGASVHPTGTKNKYQGVYRCNNHLDGRCDVPPLKRKPFDKWMIDNFLGMIDVGNDGEAEGKIASLQHEVEIVTTRIKKATALLLEMDDIDELKIQLKELNQKRTELQTTIDNMRRKASLTDKELPQLKDIDLTTKAGRVECQLILSIHLKGLTLGKDSVTVTLQNDTEITIPTNPLPLNDGSPIFEIADKELLDIDAYQL

SEQ ID NO: 4550 - protein, 585 aa, synthetic construct
MTEPKAYSYMRFSSKGKQEKGNSTTRQTDYADEYAKAKGLILDDSLSMEDKGLSAYHGVHKSHGTLGVFLRLVEAGKIPQGSILLVEDFDRLSRQEPLTALDQFSLLIHAGIRIVTLNNGIEYDRQSIRDNPGQLYLTMGEMIRANQESELKSKRLKAAWKSKRNALKNGTLTRKVTSRIPAWLTISEDKTEFIPIPEACQTIKRIFEMKLTGMGGTRIASQLNQDSNAWKPPKIPQNKTGGWRSAYVLKILSSKSVIGEFQPCKMVQTPDSKNRKRQAKPVPEGEPIKDYYPAIIEPDLFYAVQEHIKQNGKQPGNAGGRTQKAENLFVRLVKCGRCKGAMHFLNYGPPPRGGQYLRCDASRRNLGTCNARAVRYKEFEELFFDNFEELDLNDILPDQNESQAQAQALKQRIAAGNARSRELAEQENNLIDSITTTSDKRIREALDKRLAKIMDEQETVTEEIKDLTQELGETEKSAKEMSKLIDHATELYSLMDQAADEQARIALRMKLRTQIQKLVDTIEIYPLQQPYKAQQEDKEGIITTMDSKFIEKVRIKFKGSKKSRQLRLLHRFDSLDVDHNSTIRT

SEQ ID NO: 4551 - protein, 514 aa, synthetic construct
MKKVYSYIRFSSTKQAFGDSHRRQSKAIQDWLANHPDHILDESLSFEDLGRSAFHGDHLKEGGALRAFLEAVKQGLIPPDSVLLVESLDRVSRQSISHAQETIRGILEQGITVVTLSDGETYNRQSLDDSLALIRMIILQERSHNESVIKSDRIKKAWSHKRQQFEQDGTKITGNCPGWLKLNSDKKSFSLIPHHIETIHRIFDEKLSGKSLHAIARDLNLENIPTITNKRVDTGWTPTRVRDLLLKESLIGVAYRVSDYFPPAISKEKFHAVQMIRGQGKGKKPTSRQPSSIDILKGICKCAECGSTLRQRNTKKTPEGRYPRGYLECRNRQLGRCNSKAFNRSLIEDILIQKVFPTLQYLSLKSNGDNISVTTLKADITSLEKGINNLISLAEKGLGDLDTLAQRITNNRVELESKKKDLRQAEAILSLRSDNDIQDSDRKTVEGRIKLQLAIKSFVKEIIFDYDKQEITIRLLNGKSFSGISVAREDKDFDHSSMFEVLQKSLLDVDGVCL

SEQ ID NO: 4552 - protein, 506 aa, synthetic construct
MRTVITYLRFSSATQGAEGADSTRRQNELFKQWLRKNSDAQVVASFNDEGLSGYKGKHLSGQFGDMLSRIESGEFPEGTILLVEAIDRIGRLEHLETEALMNRIIAHGIEIHTLQDGLIYTRDALSDDLGISIIQRVKSYLAHQESKQKSFRVSEKWKQRAKLTLAGEQRLTKMVPGWIDPDTFKCNEHAETVRLIFKLLLDGESLHNIARHLQSNDIKSFSRRKDANGFSVHSVRTVLRSESVIGTLPASQRNDRPAIPNYYEAAIDAATFNKAQEILDKNRKGRTPASDNPLTINIFKGLFRCQCGASVHPTGTKNKYAGVYRCNNNPDGRCDVPPLKRKPFDKWMIDNFLGMIDVGNDGEAEGKIASLQHEVEIVTARIKKATALLLEMDDIDELKIQLKELNQKRTELQTMIDNMRRKASLTDKELPQLKDIDLMTKAGRVECQLILSKHLKGLTLGKDSVTVTLQNDTEIIVPTDPLPLNDGTSIFEIAEKELLEIDAYQL

SEQ ID NO: 4553 - protein, 633 aa, synthetic construct
MKRADLYIRVSTDEQADKGYSQRDQEERLRRYCSSHNISVGQIIYEDHSAKTFNRPEWAKLLISLKKKSSKTNLILFTKWDRFSRNAGDAYQMINILTKLGIEPQAVEQPLDLSIPENKMMLAIYLAAPEVENDRRALNTFYGMRRAKKEGRVLGNAPFGYINRSREDGSKYIAIKEPEASTMRMAFEEILKGIFAPDQIRQKIERSGKKILSRASFHTAIRNPVYCGKVFVAKYGDEEAVTVKGQHEAIISEELFYNVQDILHGNKRATVHSTKILSDVNLPLRGYLVCPDCGRNLTGSASKGRNTRYYYYHCIASCGYRQKAEKANEIFEQGLAQFELNEGNKDILKKMVLLNYNQVIKENPRMDKRKIVLEIDKLNEKLSVAREKLLSNVMDDDEYVELKKEYKEKIDKLEEQLARDDTPDSNEMSIQRKLNKALDIVQNISKLYIRGEIETKRTLIGSIFPEKLEFDGTQYRTARINSVIATIFQINNELCNKKNRKSDKNNHFSCVVPSAGIEPARLAALEFESSASTNSANWATRNCECKYRHIFVSEKSFLKKLKNNFLPVKSQLDVRWKFLIHFIVKTNMMAQVGEVCLLRLELLDKFQNLGQNKMCRMGAILSQAVNDKIIQIS

SEQ ID NO: 4554 - protein, 515 aa, synthetic construct
MKAFAIYNDYEIVGEYEDAGKSGKSIEGRIQFNRMMEDIKSGKDGVSFVLVFKLSRFARNAADVLSTLQIMQDYGVNLICVEDDGIDSSKDAGKLMISVLSAVAEIERENIRIQTMEGRIQKAREGKWNGGFAPYGYKLEDGKLFINEEEAVAIRTIFDQYVNTTIGANGISKYLENHGIRKIPRQNGKNPVYNGKIAFGRRTLEKVHGTRNEYKQVEQDEYLISEGIHEAIVSDEVWQAAQVKLKSQAKKYEHVNKGKDTRTHLLSGIVKCPICGVGMFGNKCIKKKKDGTKYKDFYYYGCKHRQMIRGHKCTFSKQIREELLDDAVAEVIVKIVSNPKFASMMQEKINMKVDTSEIEKEIDNYQKELRKSHSTKFKLIEEIDNLDVEDKHYKRRKQDLDDRLYRMYDKIDELESSLIDAKAKKQTIEAEKLTGDNIYKILIYFDKLYKVMNDVERRQLISALISEIQVYEEKQSNGQWLKSITFKLPIIEENLNIGLDNDEQVECVSLLEKRS

SEQ ID NO: 4555 - protein, 547 aa, synthetic construct
MKLLVTYIRWSTKEQDSGDSLRRQTNLIDAFYSKHKNDYYLLPAHRYVDKGKSGFHQQHKAQGSDFRRMFENVMSGAIPEGSLIVVENFDRFSRADIDTAIDDVRQILRKGVSILTLGDGELYDKSALTDPVKLIKHIIIAERAHQESLVKQKRIAQVWNHKTQLARELKKPMGKQAPGWLELSEDGSHYIVDEDKASLVNIIYDKRLSGMSMFAICKWLNEQGYPTINQRKVRISKTKKPDGNWSALSVKHILTSRSVLGYLPAKISTEDRKTVLREEIESFYPQIVTDSKFYAVQRLLEETGKGKTSSGEHWLYVNILKGLIRCKCGLVMTPTGIRKPVYQGTYRCNGNKESRCSYGTVSRKLLDTQLCSRLFSKLSQLHDEATDTAKLDELQRRLNTVDSELEKLTETLIQLPNITQIQEALRVKQEEKDELIVQLSREKARVKSVSSLDLSGLDMESVEGRTEAQIIIKRLVKEIVVSGNEKLVDIYLHNGNMIRGFPLDGKDDHTLTLEEATDEMQPLDDMLIFGEPVTRIYPAGDMEEVDA

SEQ ID NO: 4556 - protein, 453 aa, synthetic construct
MEKAIAYVRQSTLKQQSLATQKSLIIDTAKQHGWSNVTFYDDKKTGGHTKRSGYQKMVEVITSGECKVLCCYRLNRLHRNFKNAIQFFEICKKHHVTIISVNDGYFDLSKEFDCFRLNILMSLAEMESNNISEQTRNGIREKAKQGKLITTHAPFGYHYSKGHFIVNAEEAPTIKAVYRWYLQGLGYKKISQKLDKDMNFISRKPYQVRNILLNPNYCGRVINKYGTFNDIVPPIINVDTFEEAQERRIHKQHNRSNSRNKLKRRIKCPYCQSTLTNLTIKKEHRSLRYYVCPKNMNEAYHTCPFKGINAQMIETEVLNTCKVYCGNQSFHDKLNETILKALKHQQMKHRQSHLTQEQLIEKLAQNQIDIETFKRLSAGFEREERYSNYSSNQIAETIRHVVKDKLTLEIIAPLIDDITITQTKQLQGIYFKNSPLNIVEQSHLITPERNEVI

SEQ ID NO: 4557 - protein, 463 aa, synthetic construct
MNNVAIYCRESTEKQNIDTLVSLCEKEAKKLGYSDYKVYKDIKSGYSKDREEYTKLKEDIKDEKINVVILYESSRITRDEIEHHMFYALLKLYNVKVYTLNHGWIDLTNEDDCFLAGLLNLLDAREGRKTAKRVKDRMEEMAKNGFWTGGPAPFGYKLVDKKLIIEPEEAEKVREIFKLFLEGKTRFSLSALFGFECKRVMRMLVNPVYNGKLKFRQIEFKNKKRIEHKQFDILPGIHEPIIDDYTFKLVQDKVKNIKRETKKDTYIFKDLLICACGEKMYLYKKKYFYKREIPEITNTYLCKSSNKKIRNCSLSYVREEKLFLNVMESLENLILSFAINDIDTNKDGFEKQLRYYQKELSSLSTKEEILVRQLMNGKLSEKLYEKFMSELSENKEFIENKINSLTKVINSREAKKNNKIILKKYFNKIKKEKDPEKLNAFFKLIIDSIEFINDYRFYIHLKF

SEQ ID NO: 4558 - protein, 539 aa, synthetic construct
MQAGESGSIQHQKMILQRYADEHHFLNTKFFVDDGFSGVSFEREGLQAMLQEVEAGRVATVITKDLSRLGRNYLKTGELIEIVFPENGVRYIAINDGVDTAREDNEFTPLRNWFNEFYARDTSKKIRAVKQAQAQKGERVNGEYPYGYIPDPNNRHHLIPDPETAPIVKQVFAMFVSGVRMCEIQKWLAENKVLTIGALRYQRTGQARYQRAMIAPYTWPDKTLYDILARQEYLGHTITAKTHKVSYKSKKTRKNEEEQRYFFPNTHEPLVDEETFELAQKRIATRHRPTKAAEIDIFSGLLFCAGCRHKMYYQQGVNIEPRKFSYSCGAWRNRARTGSECTSHYIRKNVLLDLVLEDMRRVLRYVKEHEQDFICKATEYGDMEARKALAQQQKELFKAQARMTELDTLFRKLYEDNALGRLTDERFVFLTSGYEDEKKSLAARIDELQQQIATVTERKRDISRFIQIVGKYSDIQELTYENVHEFIDRILIHELDRETNTRKIEIHYSFVGQVDTEQEPTQVVNHDRRNMVDVKSIAI

SEQ ID NO: 4559 - protein, 587 aa, synthetic construct
MRGAIYSRVSTEIQDYGKQTDELKDYAARNNIEVKYIFEEKVSGFKDDRTEFKKLEKLTKNDIDIILVWELSRLSRRSIFIQQTVKNFANKGICIFTKKEGLYTLNDDGTENKNAMFTIGVISMIAEQEIETLKERTISSKRRYILKEGHSYTPIAPYGYNYNSITKQLTINEDEAKVVRRMYQLSIDGVSTNRISKILTSEGIKTKKGNPNWSLATVRDILHNPVYKGVPKYTMTIRNKKVVELVSAPPIVSEEVFEQSEKELTERRNRSKSEMVNKPLLRALIFCTDCGRRYICNSGRNIYACQTRFDNIRANYVADCHSAGISATNIEPIIWNLVERLFKSTIASSKAQERIEPYQEQLSKLSESKNNFEMQRDKINKDAAKLFDTLLLIRDTNPTVFTSKMEDFNKMSTEANNYQKEIDIIESKKQAIQRRIKAIEEIKDIDITDESEKYDILHKVIEAIKIYSVKTNQKVFTVLFASGLEYNVLYNVNKPKFRIEYAFASDETITFNKKDKLLINKLHSSVRDILPDFSITAGNNDMFDNDVCGDYSFQEVWDLLEKYNKTEVLREWKPDYTKRTINRRSKK

SEQ ID NO: 4560 - protein, 510 aa, synthetic construct
MKAAIYARYSSDNQREESIEAQIRAINEFAERENIQIVKTYIDEARSATTDDRPQFLKMIKESELGLFDTLIVHKLDRFSRNRYDSAFYKKKLKDNNVRLISVLEHLDNSPESIILESVLEGMAEYYSVNLSREVMKGMRETALQCKHNGGLPPLGYDVAKDKTYIINPNEAKAVKLIYELYSNGVGYNLILSRLNELGYKTKKGKFFGKNSLYSILTNEKYNGIYVFNKSSKKINGKRNSHKHKLDEEIIKIKDGMPKIIDDDLWNEVKKKMDNNKAHRGAAQAKKIYLLSGLIYCGKCGHAMTGNSRHSGRNKTLYETYECSNRKRTKQCDMRAINKSLAEKIVIDALYDNIFSKKAIENLTRKILTYAQEQNKTITEDIITYKKELKDVDSKIDNIVEAIADGLYSPVMKEKLTSLESKKNALLIRIDEAEREAILTSPSKEMIKKYLSKDSDIKEKTPQQQKKVVQNYIKKVTIYDDEVITDTIVTCLGIGEAYRTRVHKLYKTKY

SEQ ID NO: 4561 - protein, 453 aa, synthetic construct
MIKGACYVRVSTDNQLENYSIEEQTDRLKAYCKAKDIQIVKIYTDGGYSGGNINRPALQQMLQDIGKGLIDSVIVYKLDRLSRSQKDTLMLIEDCFLAKNVDFVSVNENFDTSTPFGRAMIGILSVFAQLEKDQITERFTMGRIGRAKNGYFHGGGNTPTGYDYIDGELIINDYEALQVKDLYNRFLKGYSIHNCWQYMHQKYGGWSNEVSVRNVLKNELYIGKVKFKGVAYQGNHQPIISEEIFRQVQDLFNSSRRTSDTFKRSPFKANTLLSSLVYCGKCGARFHGEHGNYSCYSRTKGDKKYIVDPNCKNKKWKIEELDKLVLDYITRLDFSKLQNSHPTPVPVTDYSLRLTEIDKQIEKLIDLYQVSGIPLESIQKKMDALTKEKEALLNVSKPKNVPVTTLAEMITARDTLMSLSDSGSLDEKRACLTMIIDRIIIDDDNVNIKLKQL

SEQ ID NO: 4562 - protein, 416 aa, synthetic construct
MKNIYYMPVKKENMEPLRVAAYCRVSTKKETQLASLAHQIVAYTEQISDHPGWVFSGVFWDCGRCGLRKKGRNGLKHMLESAAEGKFDYIITKSAKRVSRNTVELLQIMRYLKERGIQMYFEIENVNSFNPDAEAAITLSGAMGQEESRNLSENIQWGIQRKFEEGLFSSYKHFMGYRCVEGELVIVPEQAEIVRLIFELYLKGYTFSQIKKHLEESGVKTVTGKTVWSANVIQQMLKNEKYKGDMMLQKTFTEDYLNGIRKKNIGQRTRYYVKGSHPAIISPEIFDKVQEEMLNRARLIRTANGNQISSGNRYSSKYLLSNLLVCGYCGGGFRRRTERGKIVWRCGTRMEKGKAECENSPTLNNQDVREMLGKVVCNGKYDENVVKDRVKRIDVYEKRLIICYAEKEGYQICEFE

SEQ ID NO: 4563 - protein, 639 aa, synthetic construct
MANRQTEEKITALYERLSRDDDLTGDSNSILNQKRYLESYAAQRGYTNIVHYTDDGWSGGNFDRPAWKRLVADIEAGKVAHLLCKDLSRIGRNYLQTGFYTEVMFRQKGVHFVAVANNIDSEEQDSGEFAPFLNIMNEWYLRDQSKKVSAAYRVKGKAGKPTTNNAIYGYKKDPEDKDHWLMDEEAAAVVRRIFRLAVEGHGPHEIAKILTQEKVECPAYYLARNGRGCRKNTVDTSRPYDWYGFTVSSMLAKPEYMGHTVNFRSSKKSYRDKRVKNDPSDWLIFENTHEAIVDPETWQLAQQVKRTVRRTDTTGVANPLTGLVFCADCGAKMYNHRGKRQKDGREYGTDFYNCSTYTLTFERETQMCFSHTVSTKALNALILETIRTTASYAIQNKEEFIQKVRSISQVRQQEVAKELKRKVVKERRRSAELDVLIKKLYETYAMGKLEEKRFELLCAEYEKEQAELEQLLASEQAQLDQFHEDTDRASHFLALAQKYTDFTELTAPMLHEFVEKILVHAPDRSTGERVQEIEIYLNFIGKFEVPMPEPTEEELAAEEKRRQKRIRDHEKYLRQKERKQKIAEGLIVPGEPYQLVCQCCGEPFQSVRPNAKFCKPACREKSYRQEKRKAKETETSQTA

SEQ ID NO: 4564 - protein, 475 aa, synthetic construct
MKTTNKVAIYVRVSTSYQAEEGYSIDEQKDKLEAYCKIKDWKIYDIYVDGGFSGSNTKRPELERLIDDTKRKRFDIVLVYKLDRLSRSQKDTLFLIEDVFLKNDVAFISLQENFDTSTPFGKASIGMLSVFAQLEREQIKERMILGKEGRAKKGKAMSWTTIPFGYDYSKETGILSVNPTQALIVNRIFNEYLNGKSVVKIIRDLNSEGHVGRKRPWGETITKYLLKNETYLGIVKYRGQKYEGQHEPIISQELFELVQLELQKRQIDALKRNNNPRPFQAKYMLSGLLKCGYCGGSLGLYVTSKNRKGKAYQRYQCRHRFDKDKSKRCNSKWYDKQELEEKVIERLSKIKLEPKYRKEMLAKNDETMKVEEIKEQLKKLNNRLDKLTELYLDEIITRKELNAKNEKLKIEKAFLEEQLESKKKNTINIRQRKLARLLKDFNPEKLSYEDASKIVKSVINEIIVTKEEMTITLDF

SEQ ID NO: 4565 - protein, 413 aa, synthetic construct
MAVRLIKAKSEQKKQRVCAYVRVSTTNSSQLDSLENQKTYFETLYANSEDVDFLGVYYDKGISGAKEKRPSFQAMLEACRQGQIDLIHTKSISRFSRNTMTVLEVSRELKVLGVGIYFEEQNINTLSNEGEVMLSVLASLSEEELESMSTNQRWAFQKKFQRGEMVINTKRFMGYDVDDDGELVINEAEAQIVRRIFHLYLDGMGMHRIAKLLNEEGVPTVSNAKWHNTTVGHMLRNEKYKGAALLQKTYLHGVNGKRRLNQGKVAQYLIEDNHEPIVSKEVWQAVQDKLDSNTWKQGPNKHYRFTSMLRCQYCGSTLKRQVSYKKQIVWSCSKYIKEGKASCQGMRVPEKAIEDWRLKTPVTVIERNEYGQKHYSYSSQENAVDSHPSASHQNQSGRLLSSVHRPRRTAIKL

SEQ ID NO: 4566 - protein, 589 aa, synthetic construct
MPKRKRAPKKALRAVGYIRVSTDMQAEEGYSLENQEHQIKEYVEYQNMQLVHIYKEEKGASGKNIEGRPQFQQMLADIAKNRDIDYIVVLNMSRFARNAADALVTLNKLKSYNVNLYLIDDKLDTSSKTGSAMFSLSSIFAELERNNIRENTTAGRYQKARNGLWNGAQAPFGYRRDNGKLVIEESEAEVVRIIFDRYVHTPDGIHKIAVWLNEHGYKKEPRGNGKYVFFSPGTLKNILDNPVYAGKIAYGRRRMEQVEGENNEFRPVRQDKEDWQISEGQHEAIVSPELFNEAQKRCEAESTPFPRKRSDHVNLLTGLLVCPICGRKMIATNTRGKVKKDGTLGKETHAYNCKYSKKAFGPDCTFTKQYRQELIDKEIDDVIGVCLDDKLIAEMLTYMHNEMQDTEAIEGEIAAQEKQVAKFDTAIRSLSATMDSMDGTEPAYERKYRDLQERQDKLYEKIDEAELKLEEAQRRLDGAREGEATVEEVKLFLTEFGKTIGQVDKATRKTLYAELIDTIEIMPDADWKHGEGIVSRIRFKLPMIYGDKRTLEVSRREDGMLKPADKEVGNKYFRVTENTDECVALLVKA

SEQ ID NO: 4567 - protein, 508 aa, synthetic construct
MKKAIAYMRFSSPGQMSGDSLNRQRRLIAEWLKVNSDYYLDTITYEDLGLSAFKGKHAQSGAFSEFLDAIEHGYILPGTTLLVKSLDRLSREKVGEAIERLKLILNHGIDVITLCDNTVYNIDSLNEPYSLIKAILIAQRANEESEIKSSRVKLSWKKKRQDALESGTIMTASCPRWLSLDDKRTAFVPDPDRVKTIELIFKLRMERRSLNAIAKYLNDHAVKNFSGKESAWGPSVIEKLLANKALIGICVPSYRARGKGISEIAGYYPRVISDDLFYAVQEIRLAPFGISNSSKNPMLINLLRTVMKCEACGNTMIVHAVSGSLHGYYVCPMRRLHRCDRPSIKRDLVDYNIINELLFNCSKIQPVENKKDANETLELKIIELQMKINNLIVALSVAPEVTAIAEKIRLLDKELRRASVSLKTLKSKGVNSFSDFYAIDLTSKNGRELCRTLAYKTFEKIIINTDNKTCDIYFMNGIVFKHYPLMKVISAQQAISALKYMVDGEVYF

SEQ ID NO: 4568 - protein, 507 aa, synthetic construct
MKRVISYFRFSSEKQAKGDSLRRQSKMVTDWLKAHPEYYLDQDLSFRDLGVSGFTGKHLKGGLGDFLTATEKGLVKAGDTLLIESLDRLSRQAVDRASELLRNILRSGVDVVTLSDGEHYTSESLKDPLALIKSILIMQRAHEESLRKSERIQAAWDAKKEAAKAGIKVSKRCPAWLKLNDDRKSFSVIPEKVETVKRCFQLRLEGKSIWEIVRTLNDECHQSMNQYKPGKFGQTSVQDLLKNRSVIGYFTPKGCEEIAGYYPAIIDETTFYKVQQLSHSRYGRKPVSAKPLSVNLFKGVIRCSECGHALIITGFSDTRNGIYRCPLRNENRCSAKGLSRKQTDGTLLALLSRLDRFDSDTTNTIDTLKLHREHISSNIEKLVQLSLEIEDLNAITSKLKQLKGELSQVDADIEKETQRLKSIDVGCLSDCDLTTKVGRIEAQLIIKSAVKEVVLNTAKRRCKVTFHNGKIIDLPITENPSEDVTEAIQSLSEVTERGLIDVDVVEI

SEQ ID NO: 4569 - protein, 579 aa, synthetic construct
MTIIDADRTAIDSLVAPTPFPGSFAVSYLRVSTKEQAEKGGQAEGFSIPAQREANQRKADQLGATIIEEFVDAGESARKADRPELMRMIQYVAKHKTNYCIVHKVDRLARNRADDVTIHLALKDAGVTLVSATENIDETPSGMLLHGIMSSIAEFYSRNLATEVVKGLSQKAAQGGTVTKAAIGYRNVGVRDDFGREVRTVEIDEERARLVRWAFQVFASGGWTTSQLHHELVARELTTAASPRRPSRPIGKSSVHRMLTNPYYKGSVRYQGVTYAGAHEAIVPNEVWDQVQTVLGTHRSAADATQVHERYLKGTVFCGQCGSRLLVCNSKSSQGTIYPYFVCASRHAARGDCTRQAMLIEQVERLIERFYAKVQIDPETIEAISAMIHARFDEMMAEGAAELADLASRRTQLEGEQDRITASLETIEHRITAHHGHYADARANLDDSLKLLSNAADLYEHADDPNRRLCNQGLFKAIYIDEDNDVRVGYRNPYDGLSLSGLHADALSWAAEAKKMGQGRTCDQGRTLGRKFTPDPFGVSDGTRTRDSQDHNLVLYQLNYTHHCIRRQPFGGLRLRYRY

SEQ ID NO: 4570 - protein, 515 aa, synthetic construct
MKTAIYLRKSRADLEAEARGEGETLAKHRTTLLKIAKEMNLNVLSVREEIVSGESLVKRPEMLALLEEIEDNKYDVVLCMDMDRLGRGGMKEQGIILETFKRSNTKIMTPRKTYDLNDEWDEEYSEFEAFMARKELKIITRRMQRGRVASVEAGNYLGTHAPFGYDIHRLNKRERTLTINSEEASVVRMIFDWYANEDMGANAIRSKLNDLGYKSKLGNEWNPYSILDILKNNVYIGKVTWQKRKEVKRPDAVKRSCARQDKSDWIIADGKHEPIIPENLFEQVQEKLNSRYHVPYNTNGIKNPLAGIIKCSKCGYSMVQRYPKNRKETMDCKHRGCENKSSYTELIEKRLLEALKAWYINYKADFEKHKQDDKLKETQVIQMNEAALHKLEKELVDVQKQKNNLHDLLERGVYTVDMFLERSNVVSDRITEITSTMENLKKEIKTEIKKEKVKKDTIPQVEHVLDLYFKTDDPKKKNSLLKSVLEKAVYKKEKWQRLDDFELVLYPKLPQDGDI

SEQ ID NO: 4571 - protein, 515 aa, synthetic construct
MKTAIYLRKSRADLEAEARGEGETLAKHRSTLLKIAKEMNLNVLAVREEIVSGESLVKRPEMLALLEEIEDNKYDAVLCMDMDRLGRGGMKEQGIILETFKRSNTKIMTPRKTYDLNDEWDEEYSEFEAFMARKELKIITRRMQRGRIASVEAGNYLGTHAPFGYDIHHLNKRERTLTINSEEASVVRMIFDWYANEDMGASAIRNKLNDLGYKSKLGNEWNPYSILDILKNNVYIGKVTWQKRKEVKRPDAVKRSCARQDKSDWIIADGKHEPIIPESLFEQVQEKLNSRYHVPYNTNGIKNPLAGIIKCSKCGYSMVQRYPKNRKETMDCKHRGCENKSSYTELIEKRLLEALKEWYINYKADFEAHKQGDKLKETQVIQMNEAALRKLEKELVDVQKQKNNLHDLLERGVYTVDMFLERSQVISDRINEITSTMENLKKEIKTEIKKEKVKKDTIPQVEHVLDLYFKTDDPKKKNSLLKSVLEKAVYKKEKWQRLDDFELVLYPKLPQDGDI

SEQ ID NO: 4572 - protein, 467 aa, synthetic construct
MKCVIYRRVSTDMQVEEGISLDMQKLRLEQYAKSQDWIVVNDYCDEGYSAKNTERPAFQQMIRDMKKKQFDIILVYRLDRFTRSVSDLHSILKIMDEYNVKFKSSTEIFDTTTATGRMFITLVATLAQWERETTAERVRDSMHKKAELGLRNGAKAPMGYNLKKGNLYINHTEAEIVKYIFEMYKTKGVVSIVKSLNSRGVKTKQGKIFNYDAVRYIINNPIYIGKIRWGEDILTDIAQEDFETFINKDTWYTVQQIQDSRKVGKVRLQNFFVFSNVLKCARCGKHFLGNRQVRSHNRIAVGYRCSSRHHQGICDMPQVPENILEKEFLNLLEDAVVELDASDEKPVELSNLQEQYNRIQDKKARLKFLFIEGDIPKKEYKKDMLTLNQEENIIQKQLANITDTVSSIEIKELLNQLKDEWNNLNNESKKAAVNAIISSITVDIIKPARAGKNPIPPVIKVMDFKLK

SEQ ID NO: 4573 - protein, 516 aa, synthetic construct
MYRPDSLDVCIYLRKSRKDVEEERRALEEGSSYNALERHRKRLFAIAKAENHNIIDIFEEVASGESIQERPQMQQLLRKLEGNEIDGVLVIDLDRLGRGDMLDAGMIDRAFRYSSTKIITPTDVYDPDDESWELVFGIKSLISRQELKSITRRLQNGRIDSVKEGKHIGKKPPYGYLKDENLRLYPDPEKAWIVKKIFELMCDGKGRQMIAAELDRLGIDPPVTKRGAWDSSTITSIIKNEVYTGVIVWGKFKHKKRNGKYTRHKNPQEKWIMYENAHEPIISKELFDAANEAHSSRHKPAVITSKELTNPLAGILKCKLCGYTMLIQTRKDRPHNYLRCNNPACKGKQKQSVFNLVEEKLLYSLQQIVDEYQAQKVEEVEIDDSKLISFKEKAIISKEKELKELQTQKGNLHDLLEQGIYTVEIFLERQKNLVERITSIENDVEVLQKEIEIEQVKEHNKTEFIPALKTVIESYHKTTNVELKNQLLKTILSTVTYYRHPDWKANEFEIQVYFKI

SEQ ID NO: 4574 - protein, 515 aa, synthetic construct
MKTAIYLRKSRADLEAEARGEGETLAKHRTTLLKIAKEMNLNVLAVREEIVSGESLVKRPEMLALLEEIEDNKYDVVLCMDMDRLGRGGMKEQGIILETFKRSNTKIMTPRKTYDLNDEWDEEYSEFEAFMARKELKIITRRMQRGRVASVEAGNYLGTHAPFGYDIHRLNKRERTLTINPEEASVVRMIFDWYANEDMGANAIRSKLNDLGYKSKLGNEWNPYSILDILKNNVYIGKVTWQKRKEVKQPDAVKRSCARQDKSDWIIADGKHEPIIPESLFEQVQEKLNSRYHVPYNTNGIKNPLAGIIKCSKCGYSMVQRYPKNRKETMDCKHRGCENKSSYTELIEKRLLEALKEWYINYKADFEKHKQDDKLKETQVIQMNEAALRKLEKELVDVQKQKNNLHDLLERGVYTVDMFLERSNVVSDRITEITSTMENLKKEIKTEIKKEKVKKDTIPQVEHVLDLYFKTDDPKKKNSLLKSVLEKAVYKKEKWQRLDDFELVLYPKLPQDGDI

SEQ ID NO: 4575 - protein, 460 aa, synthetic construct
MKCAIYRRVSTDEQAEKGFSLENQLLRLQAFAESQGWEVVHDYMDDGYSGKNMNRPQIKRMLHDLKSNKFDVVLVYRLDRFTRSVKDLNDLLEVFKENEVDFKSATESIDTSTATGRMILNMMVSTAQWERETISERVKDVVRKKKDLGLISTGYPPYGYAMNDGVISQVPHEVEIVKFVFEKAKVYGFQKISKLLNEQGLVTRNGTKWLISTASRIAHNPFYSGEMRYKRDGETSTVPINVEGYEPVITKEEHKEVLKAIKKRNRNQTRAKSNEVYPFSGIVLCPECGHPMKGTRVSSRGYYYKYYRCDRASDHFCNGKLIRYEKLDKAFAEYIHDAFQIDRIEIKEETNTKDIQREIKRCKSKIERLKDLYVDGDISKKKYKNDVGELNEKIYDLEQKLLSAENKISHDHIRENLKRLSEFWGLIDDNTKMESIRGVFDTITVEIQGNDVVITDHTLL

SEQ ID NO: 4576 - protein, 450 aa, synthetic construct
MTKAAIYIRVSTQDQVENYSIEVQRERIRAYCKAKGWDIYDEYIDGGYSGSNLDRPDIKRLLNDLKKIDVVVVYKLDRLSRSQRDTLELIEEHFLKNNVDFVSITETLDTSTPFGKAMIGILSVFAQLERETIAERMRMGHIKRAENGLRGNGGDYDPSGYTRVDGHLILNPNEAKHIKRAFDLYEQYHSITRVQEVLKEEGYTIWRFRRYRDVLSNTLYIGQITFAGKTYKGQHEPIVSLEQFKRVQALLKRHKGHNAHKAKQSLLSGLITCSCCGEKFVAYSTGKSKDIESKRYYYYICRAKRFPSEYDEKCLNKTWSRKKLEEVIFDELKNLTVKKSASQKKEKKINYEKLIKDIDKKMERLLDLFTNTTNISRQLLETKMDKLNLEKEHLILKQQSYEQEFSISKDMITTINESLETMDFKDKQIMINTFIQEIHIDHDVVDIIWR

SEQ ID NO: 4577 - protein, 515 aa, synthetic construct
MKTAIYLRKSRADLEAEARGEGETLAKHRSTLLKIAKEMNLNVLAVREEIVSGESLVKRPEMLALLEEIEDNKYDAVLCMDMDRLGRGGMKEQGIILETFKRSNTKIMTPRKTYDLNDEWDEEYSEFEAFMARKELKIITRRMQRGRVASVEAGNYLGTHAPFGYDIHRLNKRERTLTINSEEASVVRMIFDWYANEEMGANAIRSKLNDLGYKSKLGNEWNPYSILDILKNNVYIGKVTWQKRKEVKRPDAVKRSCARQDKSDWIIADGKHEPIISESLFEQVQDKLNSRYHVPYNTNGIKNPLAGIIKCGKCGYSMVQRYPKNRKEAMDCKHRGCENKSSYTELIEKRLLEALKEWYVNYKADFEKHKQDDKLKETQVIQMNEVALRKLEKELVDVQKQKNNLHDLLERGVYTVDMFLERSNVISDRINEITSTMEKLQNEIKTEIKKEKVKKDTIPQVEHVLDLYFKTDDPKKKNSLLKSVLEKAVYKKEKWQRLDDFELVLYPKLPQDGDI

SEQ ID NO: 4578 - protein, 507 aa, synthetic construct
MKRVISYIRFSSERQAKGDSLRRQSKMVNDWLKAHPEYYLDQDLSFRDLGVSGFTGKHLKGGLGDFLTAIEKGLVKAGDTLLIESLDRLSRQNVDRASELLRNILRSGVDVVTLSDGEHYTKESLRDPLSLIKSILIMQRSHEESLRKSERIQAAWNRKKELISEGIKISKRCPAWLKLNDDRKSFSVIPEKVETVKRCFQLRLEGKSIWEIVRTLNAEGHQTLNQYKAGKFGQTSVQDLLKNRSVIGYFTPKGCEEISGYYPAIIDETTFYKVQQLSHYRYGRKPVSDKPLSVNLFKGVIRCSECGHALIITGFSDTRNGIYRCPLRNENRCSAKGLSRKQTDGTLLTLLSRLDRFDSDTTNTIDTLKLHREHISSNIEKLVQLSLEIEDLNAITNKLKQLKNELSQVDADIEKETQRLKSIDTGSLSDCDLSTKAGRIEAQLIIKSAVKEVVLNTAKRRCKVTFHNGRAITLPITENPSEDVTEAIQSLSEVTERGLIDVDVVEI

SEQ ID NO: 4579 - protein, 566 aa, synthetic construct
MTDPIPLRACAYVRVSTKRQAEHETSLNEQETGIARSAAERGYEIVETYIEAGKSGMTDRRPALQRMIADACARPQRYDAVFVYNFSRFFRDEYECEGYRRKLEKAGVKLISATQDVGEGPHARLIRSIFTSLDAASSEINAEQVKVVMSANAEAGFHNGSAPPLGYRTYVAERRGKKDKKKLEIDPAELPLVELIFRLYLEGDGTSEPLGIGSMVKWLRERGYTHRSQHFHTGLIYAILTRETYAGRHYYGCRDSRTGKVRPRDQWIEVRVPAILSEESFQAVQQRLKARNPHITAPRSHTSPVLLSGLGRCGCNGCTSTMMLMTGKGGRYRYYACSNRRKKGDLSCGGNNVPMDQVDDAVVSALEHRLFQPGRLKALLGEMLDASDVADADRRKRLAVLRTEETEVNASIRALFMMVESGATTPDDPFLKERLATLKLRLSSIGEEMAALERQIGARGGRITPEKVERFAAAMRTKLRDTDDMQVRRRYVRAFVGEVVMSRKRIIIRGPNRALELAAAGDMPADDKVRTFMGNWRTRLDSNQWPLPSEGKAGNERRQPQANEKH

SEQ ID NO: 4580 - protein, 560 aa, synthetic construct
MTKLYSYIRFSSMRQGEGSSYERQIKMAKEIADRYGLELVNDYQDLGVSAFKGANSKTGALSRFLDEIGRSIPVGSWLFIENLDRLSRQDIISAQELFLSIIRRGITIVTGMDNKIYSIETVTANPMDLMFSILLFIRGNEESQTKRNRTNSSALLKIKAHQQNPQSPAVAIEEIGKNMWWTDTTSGYVLPHPVYFPILQKIVKMKQEGHSTGSVLDYLNEHHEPPAPTSNKQHRKWSIAMVSRLFKTKALIGVKEVTVDGVQYELKDYYPRVLSDSEYYFLKNNLIKKAWSFGHAQEKTIPLLSGIGLLKCVHCGSPMVKRKAANGKVEQYRYTCDGEGSGRTDCLYPNWGFRASSLEGAVLQLLADKVWIAEDKTNPIPEIQVQIDEISRKIDNLINLSAMTGATKELANQITDLNTQREALHEEIRLFEREMYSVDSQGWEKLAQFDLSDVQNEERLQIRLKIKGALRSIECARIDRNKNLFVLVYLDGLRQRIVIENNRGIRKGQIFVDLKTINDRQILESAGMVLHDHIDILIDEKAFYDGLPKEEDGPLSKFGI

SEQ ID NO: 4581 - protein, 544 aa, synthetic construct
MSRPRCAIYARYSSDLQSATSAEDQVRICQERADREGWDVVDVYSDLAISGTSNRRPGMSEMLSAAARGSFEIVLSEALDRIARNQADIATIYQQLEFADVRIETLSEGAVNELHIGLKGTMGALFLKELGQKIRRGQRGAAERGSMPGGLCYGYDVVRELDAKGEPIKGKRAVNPEQAEVVRRIYREYAAGRSPKAIAKDLNRDGIPSARGGEWRASAIVGNRARMIGVLHNPIYAGRLVYNRVRMVRDPESRKRVSRPNKAADLQHIDMPDLRIVSDAEWHAVQDARHVRATQPLPLRRRPRHLVSGLVRCGLCDATMIMVVSGRLGCSRYREVGTCANTRRIVASELQHRVVDGLKKELLSEEAMRLVVSEYHAKRSQGAATSARERATLARRLQAAERAIANLVAAISAGAADFADIREALAAKTAERDAAREALDEAAAVNVVTLHPQIAEAYRARIQGLADSLGAGDANSEEVTAQIRDLIDVIYATPLESGEWQIEVVSRLQSVVALATGTDGPTRGRSRVTAMVAKEGLEPPTPGL

SEQ ID NO: 4582 - protein, 559 aa, synthetic construct
MKTKLYSYIRFSSMRQNDGSSYERQIRMAREIAVKYDLELVNDYQDLGVSAFKGANSKTGALSRFLDAIGRSVPVGSWLFIENLDRLSRADIVSAQELFLSIIRRGITIVTGMDNKIYSLDTVTANPMDLMFSILLFIRGNEESQTKRNRTNSSALIKIKAHQENPQNPAVAIEEIGKNMWWTDTTSGYVLPHPVFFPIVQEVVELRRNGRSTAEILDHLNATYTPPPAASHKRHSNWSRAMIERLFHTRALIGIKEISVDGVKYELKDYYPRVLDDAEFYHLKKSIGVRACNFGDKEEVKPIPLLSGVGLLKCEHCGSAMVKVKGTNRRPNQYRYSCDAMRSSRIECVHTNWSFRGDQLEKAVLQLLADKIWIAEDKANPVPALKVQIDEISRKIDNLITLSAMTGATKELADQITTLNSERETLYNQIKMAEEEMYSVDSQGWEKLAEFDLEDVYNEERLKVRFKIKQALKRIGCSRIDKYKNLFVLEYIDGKTQRVVIENSRGPRKGRIFVDLKTINDRQILESNGLVLHPCLDMLTDKNWKPEEEIPGPLQEFGI

SEQ ID NO: 4583 - protein, 689 aa, synthetic construct
MSKVTPEHLARQAVVYIRQSTPDQVAHNLESKRRQYNLPERARQLGWSDVAVIDDDLGRSGGGVARPGFEKLLAAICEVRVGVVVSIEASRLARNGRDWHTLLEFCGLVGTLIADEDGVYDPRQPNDRLLLGMKGTMSEMELSVLRQRSLEALKQKARRGELFMTVAVGYVRVGHNRIEKDPDRRVGEAIALVFAKFTEMQSVRQVHLWFRHERVPLPAVTYGAEGHLVDWKLPVYNTILHILTNPIYAGAYAFGRTGSRISIEAGRKKVVRGFKRERKDWEVLIPNHHEGYLSWADHERNLGLIADNANGKNPMSRGALRRGEALLAGLLRCGHCGRKLHVAYSGKDGNTGRYHCRGGANNHGGDPCISFGGMRIDRDVAAEVVERLQPLGIEAALAAQAARSRANEDKRGQVELALEQARYEVGRARRQYDAVDPANRLVAAELEKRWNDRLAVARNLETELDALTASPAVDLTPADRERLMTLGADLERAWSSASVAPETRKRIVRTLIDEIVVRVEDTTLDLVIRWHGGDHSALKVKKNRSGQHRWSAAGETVDLVRVLARQMPDKAIASVLNRSGKTTGRGNGWTKSRVCSLRSHNDVAAYREGERHDRGEVTLDEAAAALSVSPSTVRRLIKDDQLAAGQLCKGAPWIIKAADLERADVKRAATARCLRRPPSGTPLQKELEL

SEQ ID NO: 4584 - protein, 507 aa, synthetic construct
MKRAISYIRFSSEKQSRGDSLRRQSKMVNDWLKAHPEYYLDQDLSFRDLGVSGFTGKHLKGGLGDFLTAIEKGLVKAGDTLLIESLDRLSRQNVDRASELLRNILRSGVDVVTLSDGEHYTRESLKDPLALIKSILIMQRSHEESLRKSERIQAAWNRKKELISEGIKVSKRCPAWLKLNDDRKSFSVIPEKVETVKRCFQLRLEGKSIWEIVRTLNAEGHRSMNQYKPGKFGQTSVQDLLKNRSVIGYFTPKGCEEIAGYYPAIIDETTFYKVQQLSHSRYGKRSVSDKPLSVNLFKGVIRCSECGHALIITGFSDTRNGIYRCPLRNENRCSAKGLSRKQTDGTLLALLSRLDRFDSDTTNTIDTLKLHREHISNNIEKLVQLSLEIEDLSAITSKLKQLKGELSQVDADIEKETQRLKSIDVGCLSDCDLTTKAGRIEAQLIIKSAVKEVVLNTAKRRCKVTFHNGKAITLPIIEDPSKDVTEAIQSLSEVTERGLIDVDEVII

SEQ ID NO: 4585 - protein, 434 aa, synthetic construct
MKKIIGYVRESTQWQVANGYNLGEQKRKIEEFCKYKYEAGCYELEIKEERGASARNLKRPQIQSIIELIKARSIDILVIHNLDRLTRSVKDLAYLIELLEKYSIELVSITESIDTTTPSGRTFILMIGVISQWEEDSISWRTKRGMAEALERGYYCKPRVPFGYVRDPQDKRYLIIDEEKAEYIRYIFETVARGTKTANEIYLDFKKGKILGKKWGQDDVYRILKNKAYTGDVELFGKVYEGVIPAIVTKELQKEALERVKLRSRKKKYQYPFRGILLCSECGSTLKCDSTHKKIRGKVYKVYQYYFCECCKNRISQNYIQEQVEHKLSRMLDKEHAKEIRKSFLKHLKQVEKDINAVIELILNQGRNEILIKKYEALVHERDELFIEAEKQNEGNTPFIDMDNFRDLIYQYISHIKVDLTRKSIVVEYKKKYK

SEQ ID NO: 4586 - protein, 489 aa, synthetic construct
MIITNKVAIYVRVSTTSQAEEGYSIDEQIAKLKSYCDIKDWTLYKVYKDAGFSGSNIKRPGLQSLIADAKNKHFDTVLVYKLDRLSRSQKDTLYLIEEVFIKQDISFFSLQENFDTSTAFGKAMIGLLAVFAQLEREQIKERMQLGKLGRAKAGKSMMWARTSYGYIYNKETSNVIINPAEAEIVKIIYAEYLAGRSITKLKDYLNEQGLNTKTRPWYYRAIHMILSNPVYAGYNQYMGQLFKGDHQPIISKEDYDRTQEELKRRQIKAAEMNNNPRPFRAKYMLSGLARCGYCGAPLRIEMTAKRKTDGGRTYRYSCMNRTAKRTIGPTVYNNGKKCESGLYYREDLEKYVLNEVAKLQHDPEAIEILIEPSKTTVNEQELKSRLNVLDTKISRLNDLYLNNLTSLEELKEKTAGILREKSILEKQLTESPTLRLKNEKEKINRIQDKADIRSLPYNDQATIVRSLIQKVDVTAEAIKIRWLINNFSD

SEQ ID NO: 4587 - protein, 455 aa, synthetic construct
MANEIKQVALYIRVSTDQQAKHGDSLDEQQHTLNEYVRQQGNMRVFKTYIDDGISGQKLYRDEFQKLLDDVKKGRIDTILFTKLDRWFRNLRHYLNIQEILDKNNVTWLAVTQPFFNTETAMGRSFVNQSMGFAELEAQMTSERIRAVFDNKIRKGEVVSGKVPLGYEIKDKHLVPNEKAEIVKEIFQYYLETGSMRATVRHLENHFSMTRDYQSVRQMLTNRKYIGELRDNKNFCKPIIDRDVFERVQLQLSKNIRMNKKRDYMFTGLLVCSECGCNYSATAVISRYVRKDGTTNPNERHLYRCTKNRNNVKKCSNKKGIYETTLENFLLENIEKQAEELSVKMQQEPEVKKTKNTNDKIKKKIDRLKKAYLNEVITLEEYKKDREELEALLIPERDNKIAKIDLNSLHNYSTAEFRDGYKQLTISEKSSLWRQVIKNIVVYPDGNLKINFLGY

SEQ ID NO: 4588 - protein, 449 aa, synthetic construct
MLKRAALYIRVSTDQQAKHGDSLDAQIATLKDYVSTQDNLTIIDTYIDDGISGQKLYRDEFQRLLEDIKKNRIDIILFTKLDRWFRNLRHYLNIQEILDNSGVTWLAVSQPFFNTDTAYGRSFVNQSMSFAELEAQMASERIKAVFENKIRKGEVVTGSVPFGYKICDKKLIPNENAPIAKDIFKHYSIHNSIRLTVEYLFNEYDITRSSRTIKHMLRNRKYIGEVSGNKNYCPPIVDKETFEKVQNLLDKNISSIAKRTYIFSGLVVCSCCGKKMTGRYRKRKYIKKDSTVMYYTKKVYRCNGNTYKRNKCPNKINIAEEILEEYLLNNIKADAENFEAKQKKIAVSAPEKNNNSKILKKIERLKKAYLNEVISLDEYKKDRKELEQMMIQVKPKETIVFKSNWFNKNIESTYRDFDEEEKRFVWRSVLKNLIVDPHSKITINFLTKN

SEQ ID NO: 4589 - protein, 560 aa, synthetic construct
MSKEKIKVYLYTRVSTSIQIDGYSLEAQKSRMKAFALYNDYEIVGEYEDAGKSGKSIEGRVQFTRMMEDIKSGKDGVSFVLVFKLSRFARNAADVLSTLQIMQDFGVNLICVEDGIDSSKDAGKLMISVLSAVAEIERENIRVQTMEGRIQKAKEGKWNGGFAPYGYQLIDGKLIINEEEAIAIRTIFDQYVNTSIGANGLSKYLENHGIRKIPRQNGKNPLFDAGLIRKILKNPVYNGKIAFGRRTLEKVHGTRNEYRQVEQDDYLVAEGIHEAIIPDELWQAAQVKLKAQAKKYEHVNKGKNMRTHLLSGIVKCPICGAGMFGNKSIKYKKDGTKYKDFYYYGCKHRLMNRGHKCTYNKQIREELLDDAVAEVIIKLVSNPKFASMIQEKINMKVDTSAIENEIDNYQNELRKSHSTKYKLIEEIDNLDVEDKHYKRRKNDLDDRLYRMYDKIEELESQLIEAKAKKETIEVEKLTGDNIYKVLIYFDKLYKVMNDVERRQLIEALISEIQIYEEKQPNGQWLKSITFKLPIIDEDLNISLENDEQVESVTLLTKAVD

SEQ ID NO: 4590 - protein, 588 aa, synthetic construct
MKKDVKVIKGDTTLKRTASGCVQRSIKRVAAYCRVSTDTEDQINSYNSQVEHYTEFIQKNKEWTLAGIYADEAITGTQVDRRIDFQRLINDCMNGDIDMIITKSISRFARNTLDTLKYVRKLKEFNVAVFFEEENINTLTMDGELLLTILSSVAQQEVENISANVKKGLRMKMERGEMVGFQGCLGYDYDPETKSISINEKEAEIVRYIFRRYIEGVGGMVISRELEEQGYLSPRGNKRWTETTVLGIIKNEKYKGDLMMGKTYTVDPISKRRLDNFGEQDKFYIENHHEPIISEEDFEKAQGIRLRRSKNRNTVANNGGKREKYSRKYAFSSMLECGFCGHNLSRRNWHSSSEYTKVIWQCVNATKNGKKYCPHSKGIEEEAIEKAFMESYRQVCHNNVEITNEFLKTVEEELKDNSLAKDLKKITNQLDKILKKEKDLVELRLNESISMDIYQDKYNEIAISKEKLLAEKRTLEVTLTDEKALKKRLEGFKKLLESNKYLEEFDRAVFESIVDKIIIGGTNDEGEIDPAMITIIYKTGKKDSQDGRLFKSRRKNAKEVNEETDNKLYPHSSDEVNNLYSYPIDNTH

SEQ ID NO: 4591 - protein, 449 aa, synthetic construct
MLKRAALYIRVSTDQQAKHGDSLDAQIATLKDYVSTQDNLTIIDTYIDDGISGQKLYRDEFQRLLEDIKKNRIDIILFTKLDRWFRNLRHYLNIQEILDNSGVTWLAVSQPFFNTDTAYGRSFVNQSMSFAELEAQMASERIKAVFENKIRKGEVVTGSVPFGYKICDKKLIPNENAPIAKDIFKHYSIHNSIRLTVEYLFNEYDITRSSRTIKHMLRNKKYIGEVSGNKNYCPPIVDKETFEKVQNLLDKNISSIAKRTYIFSGLVVCSCCGKKMTGRYRKRKYIKKDGTVMYYTKKVYRCNGNTYKRNKCPNKINIPEEILEEYLLNNIKADAENFEAKQKKIAVSAPEKKNNSKILKKIERLKKAYLNEVISLDEYKKDRKELEQMIVQVKPKETIVFKSNWFKKNIESTYRDFDEEEKRFVWRSVLKNLIVDPHGKITINFLTKN

SEQ ID NO: 4592 - protein, 584 aa, synthetic construct
MNTKVKLIKASNTGARNRNALHLDLKRVAAYCRVSTDSKDQLESYKSQVDYYTNLIKNNKNWTLAGIYADEATTGTTATKRADFMRLISDCQNGDIDMIITKSISRFARNTLDTLKYVRLLKENNVGVVFEEENIDTLTMDGELLLTILSSVAQQEVENTSAHVKKGLKMKMEKGELIGFQGCLGYDYDPITKSISINEEEAKIVRYIFKRYLEGNGGSVIGRELEEQGYLTPRGKTKWSDTTVLGIIKNEKYIGDILMGKTFTVDPITKRRLANFGESDKYHIENHHEPIISKEDFEKAQEIRLRRAQNRNTIANKDRKREKLSRQYAFSSMLECGFCGEILSRRTWHTSSIYKKINWQCVRSTKKGKKYCPHSKGIQEAAIEKAFVESYRQLCHADSTVIDDFLKIVEEEINDNTLVKDLKKVESQLNRIISQERKLVDLHLEDSIDEEVYAKKYKKLTKQKEELLDEKKTLELTIKDENSIKERLKQFKKVLENKEIIEEFNRTVFESIVDKVVVGRIDKDGTVHPYDLTFYFKTGVKDSQDSNNFKDKRKNAKDNDTNKLCSHKNDEDKKLCSQAKDNAH

SEQ ID NO: 4593 - protein, 560 aa, synthetic construct
MSKEKIKVYLYTRVSTSIQIEGYSLEAQKSRMKAFAIYNDYEIVGEYEDAGKSGKSIEGRKQFNRMMEDIKSGKDGVSFVLVFKLSRFARNAADVLSTLQIMQDYGVNLICVEDGIDSSKDAGKLMISVLSAVAEIERENIRIQTMEGRIQKAREGKWNGGFAPYGYKLEDGKLFINEEEAVAIRTIFDQYVNTTIGANGLSKYLENHGIRKIPRQNGKNPLFDAGLIRKILKNPVYNGKIAFGRRTLEKVHGTRNEYKQVEQDEYLISEGIHEAIVSDEVWQAAQVKLKSQAKKYEHVNKGKDTRTHLLSGIVKCPICGVGMFGNKCTKKKKDGTKYKDFYYYGCKHRQMIRGHKCTFRKQIREELLDDAVAEVIVKIVSNPKFASMMQEKINMKVDTSEIEKEIDNYQKELRKSHSTKFKLIEEIDNLDVEDKHYKRRKQDLDDRLYRMYDKIDELESSLIDSKAKKQTIEAEKLTGDNIYKVLIYFDKLYKVMNDVERRQLITALISEIQVYEEKQPNGQWLKSITFKLPIIDEDLNISLDNDEQVESVTLLTKAVD

SEQ ID NO: 4594 - protein, 455 aa, synthetic construct
MANEIKQVALYIRVSTDQQAKHGDSLDEQQHTLNEYVRQQGNMRVFKTYIDDGISGQKLYRDEFQKLLDDVKKGRIDTILFTKLDRWFRNLRHYLNIQEILDKNKVTWLAVTQPFFNTETAMGRSFVNQSMGFAELEAQMTSERIRAVFDNKIRKGEVVSGKVPLGYEIKDKHLVPNEKAEIVKEIFQYYLETGSMRATVRHLENHFSMTRDYQSVRQMLTNRKYIGELRDNKNFCEPIIDRDVFERVQLQLSKNIRMNKKRDYMFTGLLVCSECGCNYSATAVISRYVRKDGTINPNERHLYRCTKNRNNAKKCANKKGIYETTLENFLLENIEKQAEELSVKMQQEPEVKKTKNTNDKIKKKIDRLKKAYLNEVITLEEYKKDRKELEALLIPEMDNKIAKIDLNSLHNYSTAEFRDGYKQLTISEKSSLWRQVIKNIVVYPDGNLKINFLGY

SEQ ID NO: 4595 - protein, 507 aa, synthetic construct
MKRVISYIRFSSERQAKGDSLRRQSKMVNDWLKAHPEYYLDQDLSFRDLGVSGFTGKHLKGGLGDFLTAIEKGLVKAGDTLLIESLDRLSRQDVDQASELLRNILRSGVDVVTLSDGEHYTRESLKDPLALIKSILIMQRSHEESLRKSERIQAAWNRKKELISEGIKISKRCPAWLKLNDDRKSFSVIPEKVETVKRCFQLRLEGKSIWEIVRTLNDEGHQTLNQYKAGSFGQTSVQDLLKNRSVIGYFTPKGCEEIADYYPAIIDETTFYKVQQLSYARYGRKPASDKPMAVNLFKGVIRCSECGHALIITGFSDTRNGIYRCPLRNENRCSAKGLSRKQTDGTLLTLLSRLDRFDSDTTNTIDTLKLHREHISSNIEKLVQLSLEIEDLSAITSKLKQLKNELSQVDADIEKETQRLKSIDVGCLSDCDLTTKAGRIEAQLIIKSAVKEVVLNTAKRRCKVTFHNGKVIDLPITENPSDNVTEAIQSLSEVTERGLIDVDEVII

SEQ ID NO: 4596 - protein, 556 aa, synthetic construct
MSNTKRTGQTALYERLSRDDEMQGESNSITNQKQLLESYAKRNGFVNIYHYTDDGVSGTTFDREGFQKMIKAVEENKVSTVIVKDMSRFGRDYLKVGFYTEILFKEKGVRFIAINNGIDSEKQSESDFTPFLNIMNEWYARDTSRKIQSIFRARMEEGKRVSPSVPYGYFRNPKNKQELLVDKESSKVVKRIYRLVIEGYGVTQIADILTKDKVLIPSAYAEIHYPENNHSSKKRGIEDPYFWTPTTVGYILEKQEYMGHTVLGKTICLDYKTKKRRKAKEDELIIFKNTHEAIIDEETWNNAQRLRKTVRRSPKYGTTSHPFTGLLICSDCGGKLSYREPAEHKEKKYDCDYCFVCQHYRHRKGSCSMHYIKVKTVNEILLKSIKEITNFAKEEKQEFLKVMNKLSDEKREEKYQEDKEKLEKLSSRNEELTTLITKLYEDHALGKIPVKYFDRLFNTYDTEQQDLEKQIQYFENEIESYHQRKVDTDKFLKMIEKYTDIEELTVPMINEYIEKVVVHEATGGRKGKDRKQQVDVYFNFIGNCQVPQKVDIEKMA

SEQ ID NO: 4597 - protein, 560 aa, synthetic construct
MSKEKIKVYLYTRVSTSIQIEGYSLEAQKSRMKAFAIYNDYEIVGEYEDAGKSGKSIEGRIQFNRMMEDIKSGKDGVSFVLVFKLSRFARNAADVLSTLQIMQDYGVNLICVEDGIDSSKDAGKLMISVLSAVAEIERENIRIQTMEGRIQKAREGKWNGGFAPYGYKLEDGKLFINEEEAIAIRTIFDQYVNTTIGANGISKYLENHGIRKIPRQNGKNPLFDAGLIRKILKNPVYNGKIAFGRRTLEKVHGTRNEYKQVEQDEYLISEGIHEAIVSDEVWQAAQVKLKSQAKKYEHVNKGKDTRTHLLSGIVKCPICGVGMFGNKCIKKKKDGTKYKDFYYYGCKHRQMIRGHKCTFRKQIREELLDDAVAEVIVKIVSNPKFASMMQEKINMKVDTSEIETEIDNYQKELRKCHSTKFKLIEEIDNLDVEDKHYKRRKQDLDDRLYRMYDKIDELESSLIDAKAKKQTIEAEKLTGDNIYKVLIYFDKLYKVMNDVERRQLITALISEIQVYEEKQPNGQWLKSITFKLPIIEENLNIGLDNDEHVESVTLLTKAVD

SEQ ID NO: 4598 - protein, 546 aa, synthetic construct
MQSDFQTNRVAIYCRLSKDDEFKKGESASIQNQRDMLIDYCKQRNWTIADIYVDDGYTGLNIDRPDFQRMLVDIKAKKIDTVITKDLSRLGRNYLQTGKFTEEFFPKNGVRYIAVNDGVDTNQDNNEIVPFKNVLNEFYSRDVSKKMKSAYYTRAKQGKFTGCLAPFGYKKDENNPHLLVIDEETSWIVEKIFDYAARGYGVQYIRTLLREEKIPTPTWWNRKKGLRNAVTKWEKTMEGGEYVWDCTTLTEMIQNPVYLGHIASQKANHKFKIGWISDKPQEEWLVVEDMHEALIDEDTFEIANEKLKSRKRLFKTGELSLFAGLIKCPDCGKSLNLARNNSKKKEKLFTCNTYRRYGKDFCSQHRIMYDEVYRVVLEDIRSNAKLALKDEKEVLKILELNQEEELDSQVVLAGQMIEEDSLRYKELETKVERLYDDWIDKRINETNFNRLMEKTQKEQDILLERIKVNEEKIKNSESKDINISKWIESIKKYQNIKKLDRHILNELIDKIFVYEKEIIDGEVVQTVEIFYNFLLNTKELNIKYHL

SEQ ID NO: 4599 - protein, 584 aa, synthetic construct
MKKVEVIKASSSISKSKRGKMIECLRVAAYCRVSTDSEDQLNSYKSQKTYYTDLIQKNNEWIFVGIYADEAITGTQVTNRQDFQRMINDCMNGEIDMIVTKSISRFARNTLDTLKYVRMLKEKNIAVFFEDENINTLTMDGELLLVVLSSVAQQEVENISSNVKKGLKMKMKRGELVGFQGCLGYDYHPEDKSITVNKEEAEIVRYIFNRYIEGAGGSVIGKELENLGYLTKYGNATWAPTTVLGIIKNEKYKGDILLGKTFTVDPISKRRLENMGEEDQFYIRNHHEPIISEEVFDKAHEILNRRNKNRGKIGNGNTKREKYSRKYAFSCLLECGFCKGTLTRRKWHSGSEYSKVIWQCVTATKKGKKHCPESKGIPEQAIEDAFIESYRILSDDNKDVLDEFLKIMDETLSSSSINKQLTKVDKEIEAIEKKKSKLVDMRLEDIIDSDTYESKFSNMTNKQENLLKERIKLQETATTEKDVKRRLREFKKTLENNEVLHEFDRHVFESIVEKVIVGGYDEDGNIDPAQLVFVYKTGFKNSLDGNQFKPARKNARGNRKSNKLCSQTNDDVKDLCSYTSTNTH

SEQ ID NO: 4600 - protein, 507 aa, synthetic construct
MKRVISYIRFSSEKQAKGDSLRRQSKMVTDWLKAHPEYYLDQDLSFRDLGVSGFTGKHLKGGLGDFLTAIEKGLVKAGDTLLIESLDRLSRQDVDRASELLRNILRSGVDVVTLSDGEHYTKESLKDPLALIKSILIMQRSHEESLRKSERIQAAWDAKKEAAKAGIKVSKRCPAWLKLNDDRKSFSVIPDKVETVKRCFQLRLEGKSIWEIVRTLNAEGHRSMNQYKPGKFGQTSVQDLLKNRSVIGYFTPKGCEAIAGYYPSVIDETTFYKVQQLSYSRYGRKPASDKPLSVNLFKGVIRCSECGHALIITGFSDTRNGIYRCPLRNENRCSAKGLSRKQTDGTLLALLSRIDRFDSDMTNTVDTLKLHREHISSNIEKLVQLSLEIEDLSAITIKLKQLKGELSQVDADIEKETQRLKSIDVGCLSDCDLTTKAGRIEAQLIIKSAVKEVVLNTAKRRCKVTFHNSKSITLSITENPSEDVTEAIQSLSEVTERGLIDVDEVII

SEQ ID NO: 4601 - protein, 529 aa, synthetic construct
MRKVYSYMRFSRPEQAKGTSIERQSSFAEQYALAHGLELDKSLTMMDKGLSAFHGMHRTKGAFGQFLAAVAAGKVPSGSVLVVESLDRLSREDPLIAQAALTDLILSGITVVTAADNQVYSREEIQQNPFKLIMSLVVMIRANEESETKQRRSNAFLKSALNQYQANGNIRRLGADPSWLDFNKDDNTYSFNARVDVIRRILSLYNQGIGSLKIARQLTEESIPTLSGKRNAWGQTTVANIVKSHALYGMKRINVQGVDYDLEDFYPALITKSKWLALQQHRSKRSKTMHGRGEVVHLITGHGKGFTTCGYCGGGLGAQTQKQYKRSGEYSRTVTRLHCLTHKETSSCCSSVFLQPIESAVLFAVCIGVEPQSLVPTVNNVNYSALIDEVENKVKHIVEQVTAGAPWDLFKDAHDKLKLEKQKLIKERDSQKPDVNQSDVQKWVNKLVELADKARANDKEARLKCRTLINSICKSIVIKLRGHDLKSEPVVTITFVTDEQFEFKVGKNGAVQFVDNGMAVNRRLKPLLA

SEQ ID NO: 4602 - protein, 604 aa, synthetic construct
MELRKAYIYSRVSKGTQTKGDGLRRQVESATKFVEMENTSNRSSGRHTYVVEDNLITDRGLSAYKGLNTEANAGLGAFIEAAKNGDIARGSLLVVEAIDRISRLPADEARKLFGMFKTYGIDVAIVKFGIIIYHNENTKLEHDLLLTAAFHLAHLESDQKSKRIRARFEHKRKLEKNGGEKRTSICPAWMELSHDRTEFVLIPEHTKVLRRMIEMKLSGIGCLRIAKSLNEEGIPNFNGKPWQVKLVEKYLKMEQLIGSFQRVEHVRNESGTIQKLPIGLVEKNYYPAVIDGDTFLRLKKSFKRNGGRQTGAYKNLFSNMLYCPTCGSAMSYFKPNRGKTKIRCRKQIDGRGCNQRALHYGVLEERLIQALAGLDYAKINSDSFVELEKEINTLEATISDLEEQAEIVNNQFLKEDDVRIQSTFREKLKSIFDKIDDNRKRYEQLVTVKQDYDLSVVSELKLEEMKDREKYNQFVRNFVDYIIASDDCEDSPKFVRIKFKADSIGEVHFGFKGELYENEAVLTDFFTRENTSSGVGVKRALSLSKVASNHQKLAEISDVKPPMTKDVREAIRYYFELQQAVKSDLPKWGDIAKVAQLPLEGRVI

SEQ ID NO: 4603 - protein, 621 aa, synthetic construct
MKEIEIIKANRTITDRNKTYSLQLLRVGAYCRVSTDSEDQLNSYKSQVTYYTNLIKKNKDWIFTDIYADEAITGTQVDKRTDFQRLINDCMNGELDMVITKSISRFARNTLDTLKYVRMLKERNIAVYFEDEKINTLTMDGELLLVVLSSVAQQEVENISANVKKGLKMKMSRGELVGFQGCLGYDYHPEDKSISVNEEEAVIVKYIFNRYIEGAGGSVIGRELENLGYKTKRGSSNWAESTVLGIIKNEKYKGDILLGKTFTVDPISKRRLANYGEEDQFYLRNHHEPIITEEVFEKAQEILKKRSIPRGLHASNDGTVKRQKYSRKYAFSCMLECGFCDGTLTRRKWHSGSQYKKDIWQCVVSTKKGKKHCPHSKGIPEEAVEKAFVESYRQLCNGNKDIMEDFLKKLNETLNESSVEKQFTKIQKKIATLDKKKSNLVDMRLDEKIDEDTYEMKFTEISLKLDELLNERTSLENSLDNEHIMKKRLAEFRKTLQNNQVLDEFDRYVFESIVEKVIVGGVEEDGTIDPHKLVFIYKTGLTDSQDGGKFKPKRKNAKKSKGVDITNPDLCSQASDEDSKMCSLASDHTYRSCNRIKLKISKQKPPKWDEWRFLFIECVFD

SEQ ID NO: 4604 - protein, 538 aa, synthetic construct
MTIQSTNNLKITALYVRLSNDDEREGESNSIMNQKKMLSKYASDHNLRKTTFYIDDGVSGTTFNRKGFQAMITDIEAGIVGTVVVKDMSRFGRDYLQVGMYTDIMFPEHDIHFIAINDGVDSEQGDNEFTPFRNIINEWYAKDTSKKIRAVFKAKGMTGAPLTTNPPYGYIKAPDNPTQWLIDDYSASIVRRMFQLTMEGYGPTQIAKKFQTEKILVPTHYAVSQGRKTNTAPSQSPYYWSDRTIAKLLEKPEYLGHTVNFRTTRKSYKDKRKIEREKKDWVIFENTHEAIIEQSVFDTVQELRKHKRRLTKQKELPLFSGLLFCADCGGKLYFCRGKSIARNQENYICSSYRRRTTECTSHYIRSVVLEEVVTNNLRKTMAYIQANGKSFFVDVLKGDQQTRKKEAQNQQKQLHDAQKRITELDAIFPQLYEDMVSGRINSERFDKLSSNYEEEQVLLKQQVMDISKEIQTELDVNVYIRELRKFVHKHVNFDSLTPELLHEMIDKIIVHEDKKIEVHYKFGLGELGNLVDEHIIKK

SEQ ID NO: 4605 - protein, 452 aa, synthetic construct
MKAAIYIRVSTQEQVENYSIQAQTEKLTALCRSKDWDVYDTFIDGGYSGSNMNRPALNEMLSKLHEIDAVVVYRLDRLSRSQRDTITLIEEYFLKNNVEFVSLSETLDTSSPFGRAMIGILSVFAQLERETIRDRMVMGKIKRVESGLPLTTAKGRTFGYDVVDTKLYVNKEEAQHLQLIYDIFEEEKSITFLQKRLKKLGFKVKSYSSYNKWLMNDLYIGYVSYGDKVHVKGVHEPIISEEQFYRVQEVFSRMGKNPNMNKESSSLLNNLIVCEKCGLGFVHRVKDTVSRGKKYHYRYYSCKTYKHTHELEKCGNKIWRADKLEEMITDRVKNYSFATRNLDKEDELDSINAKLKVEHSKKKRLFDLYINGSYEVAELDKMMADIDAQINYYNSQIEANEELKRDKKVQESLAELATVDFDSLEFREKQIYLKSIINKIYISDEQVTIEWI

SEQ ID NO: 4606 - protein, 520 aa, synthetic construct
MKKAVYCYARVSSRGQAKDGYGMSRQQTMLRDYVAAYDDSQHSRGYELGDITWLYAEGVSAYSGKNIEDGSVLKTFIDDVLQKKITNSVLVIENLDRFSRAAPNRAAGLFLSLINAGCDIHEVETEMIHHQYSDLNIISGGLQRAHNESKRKARLSIKNWDERIKNTIDGTSVLTHRVPSWIEVKNNKYVIKKGESEKYNLIFKMYADGFGPAAIRDELKNRRMQINEREPTIHHLMKIIKDKRLIGRFNSTGRKVLDGMPIYPVVVEPELFELVNDLRKQRNPLGKINVKANNLFAGLCICMNCGRYVQINSVDKKGNTYFRCGGSLVKIDKCKERGFKYKIVENALLEHLRNFDFSMLRREDNEIQVKINYLSMELVSNENYSNEILADLEKEDIPDPHDRRILKNIQRRISEIRTEITTLKQSNIGYETFNDLKDSYTDDLLDPKNTKLRLDFNVKVKRVIKNIKMKRYDDTIMLVVSYVGVNEKQAMVINSKTGEVVFMAVQNDDLKSIEYLINND

SEQ ID NO: 4607 - protein, 391 aa, synthetic construct
MRQVITYLRFSSKPQERGDSIRRQKGLFERWLKDNPDAKVVDEFSDEGASAYHGHHLKGDFGRMLQNIQDGKYLSGQTVLLVESETRLNRQKARNTENLVDLITGKGVDVICLESGKIYTSTNIDDLDTSIQLKIAAHIAHQQSKEKSIKVSAAWEHRAQLALEGKQQLTKNVPGWIDPDTRKLNEHSSTVVTIFDLLLSGESLHNIARYLQANNIKSFSRREKANGFSVHSVRTILRSESTVGTLAASKRNDRPAIPNYYEPAIDVATFNKAQEILSKNRVGRAPASDNPITINLFKGIIRCQCGASVHPTGVKATYQGVYRCNNVPDGRCNVPTIKRKPFDKWMLDNIVGFLERDDGNNTDKRKAEIEYQISLVTSKLKKGNHPASRTG

SEQ ID NO: 4608 - protein, 507 aa, synthetic construct
MKRVISYIRFSSERQAKGDSLRRQSKMVNDWLKAHPEYYLDQDLSFRDLGVSGFTGKHLKGGLGDFLTAIEKGLVKAGDTLLIESLDRLSRQDVDQASELLRNILRSGVDVVTLSDGEHYTRESLKDPLALIKSILIMQRSHEESLRKSERIQAAWDAKKEAAKAGIKISRRCPAWLKLNDDRKSFSVIPEKVETVRRCFQLRLEGKSIWEIVRILNDEGHQTLNQYKAGKFGQTSVQDLLKNRSVIGYFTPKGCEEIAGYFPPIIPETDFYKVQQLSYSRYGRKPASDKPLSVNLFKGVIRCSECGHALIITGFSDTRSGIYRCPSRNENRCNAKGLSRKQTDGTLLALLSRIDRFDSDMTNTIDTLKLHREHISSNIEKLVQLSLEIEDLSAITSKLKQLKGELSQVDADIEKETQRLKSIDVGCLSDCDLTTKAGRIEAQLIIKSAVKEVVLNTAKRRCKVTFHNGKVIDLPITEDPSEDVTEAIQSLSEVTERGLIDVDEVII

SEQ ID NO: 4609 - protein, 543 aa, synthetic construct
MKQLKKKRIGLYARVSTEMQTDGYSIQGQLNQLTEYCQFQGYEVVNEYTDRGISGKTTQRPELQRMLKDANDGKLDCIMVYKTNRLARNTSDLLNIVEELYKINVEFFSLTEKIEIASSTGKLMLQILASFSEFERNTIVENVYNGQRQRAIEGYYQGNLPLGYDKVPDSKKELMINQHEANIVKYIFESYAKGHGYRKIANALNHKGYVTKKGKPFSISSITYIISNPFYIGKIQFAKYRHWSDKRRKGLNEEPIIADGKHAPIIDKALWDKVQFKRQESRKKPQVHGKGTNLLTGIVKCPSPKCGAAMAASNTTNTLKDGTKKRIRYYSCSNFRNKGSKVCSANSVRADVLEKYVMDQILEIIKSKKVLKQLVEKVNERSQIDVSSLNHDIAYKQSQCEELKIKMHTLTKTIEDSPDLDSILKPTILNYQDELNQINNQIHQLEQDKQAEAPHYDADMIANILQTIFKDIDKLEKSQLKSLYLTVIDRIDIRKDEHHKKQFYVTLKLNNEIIKQLFNNHPLDEVLLSTSSLFLPQTLYLTI

SEQ ID NO: 4610 - protein, 470 aa, synthetic construct
MKGESELDKKAAIYIRVSTQEQATEGYSIQAQTDRLTKYVEAKDFILYKKYIDAGYSASKLERPAMQELIQDVQSKKVDVVIVYKLDRLSRSQKDTMYLIEDIFRPNDVELISMQESFDTSTAFGSATVGMLSVFAQLERKSISERMITGRVERAKKGFYHTGGQDRPPAGYQFNSDNQLIINEYEAAAIKDLFRLYNDGLGKSSISEYLKKNYPGKNKWLPSSIDRMLKNSLYIGKVKFSGAEYDGIHEPIIDEVTFYKTQKEIARRKQSNTKRYNYVALLGGLCECGICGAKMANRRSVGRKGKVYRYYRCYSKKGSPKHMMKTDGCSSKAQQQFIIDEAVINNLKNIDVEAELKRRSAPQTNTSLISSQIESIDKQINKLIDLFQVDSMPLDVISEKIDKLNKEKQSMEKLLERKNRLDKTELQHRFDILKSFDWDNSSIESKRAVIEMLVQKVIIHDNSIEIILVE

SEQ ID NO: 4611 - protein, 455 aa, synthetic construct
MANEIKQVALYIRVSTDQQAKHGDSLDEQQHTLNEYVRQQGNMRVFKTYIDDGISGQKLYRDEFQKLLDDVKKGKIDTILFTKLDRWFRNLRHYLNIQEILDKNNVTWLAVTQPFFNTETAMGRSFVNQSMGFAELEAQMTSERIRAVFDNKIRKGEVVSGKVPLGYDIKDKHLVPNEKAEIVKEIFQYYLETGSMRATVRHLENHFSMTRDYQSVRQMLTNRKYIGELRDNKNFCEPIIDRDVFERVQLQLSKNIRMNKKRDYMFTGLLVCSECGCNYSATAVISRYVRKDGTTNPNERHLYRCTKNRNNVKKCSNKKGIYETTLENFLLENIEKQAEELSVKMQQESEVKKTKNTNDKIKKKIDRLKKAYLNEVITLEEYKKDREELEALLIPEQDNKISKIDLNSLHNYSTAEFRDGYKQLTVSEKSSLWRQVIKNIVVYPDGNLKINFLGY

SEQ ID NO: 4612 - protein, 507 aa, synthetic construct
MKRAISYIRFSSEKQSRGDSLRRQSKMVNDWLKAHPEYYLDQDLSFRDLGVSGFTGKHLKGGLGDFLTAIEKGLVKAGDTLLIESLDRLSRQNVDRASELLRNILRSGVDVVTLSDGEHYTRESLKDPLALIKSILIMQRAHEESLRKAERIQAAWDAKKEAAKAGIKISKRCPAWLKLNDDRKSFSVIPDKVETVKRCFQLRLEGKSIWEIVRTLNDEGHQTLNQYKAGKFGQTSVQDLLKNRSVIGYFTPKGCEEISGYYPAIIDETTFYKVQQLSHYRYGRKPVSDKPLSVNLFKGVIRCSECGHALIITGFSDTRNGIYRCPLRNENRCSAKGLSRKQTDGTLLTLLSRLDRFDSDMTNTIDTLKLHREHISSNIEKLVQLSLEIEDLNAITNKLKQLKNELSQVDADIEKETQRLKSIDVGCLSDCDLTTKAGRIEAQLIIKSTVKEVVLNTAKRRCKVTFHNSKSITLPITENPSEDVTEAIQSLSEVTERGLIDVDEVII

SEQ ID NO: 4613 - protein, 541 aa, synthetic construct
MPKAISYIRFSTKIQSVGDSTKRQSKYINDWLKRNPDYYLDESLRFQDLGISGFSGANAKSGAFGEFLAAVESGYIESGSVLLVESLDRVSRQDIDTAGEQLRKILRAGVEVVTLVDNEWYTKESLKDSLSMIKAMLVMERAHEESAMKSTRLRSVWAAKRERAANGEIMSKRCAAWLKVSEDRSHFEFIPENVKAVQRVFQLRLEGLSHVKIAKQMNDEGFSTLNQFKSVTGGWSQSSVTELLSNRSVIGFKVPSKSMAVKGVSEIPNYYPSIISDEQFYAVQQLKQGSGRKPSSDLPLLTNLFKGVLRCSECGFIVVVAGVSAKRSGIYKCSMKSEGRCNSVGFSRLQTDRALVQGLLYNTNRLSLNRRNGSAIGALQSELEQLQKQRERLIKLAMLADDTESMAKDLKALNSQIRDAEKAVSEVHQREQSSQLETISHLDLTVKKDRIEAQIIIKRIVKEIRLNTAGKKCDVFLHNGLKLYNFPLDRVVDGAQWLEILPLIDGDEFDFEGLTTKPRHIALEEAPEWVKEMEEQPNQPL

SEQ ID NO: 4614 - protein, 559 aa, synthetic construct
MKTKLYSYIRFSSMRQNDGSSYERQIRMAREVAAKYDLELVNDYQDLGVSAFKGANSKTGALSRFLDAIGRSVPVGSWLFIENLDRLSRADIVSAQELFLSIIRRGITIVTGMDNKIYSLDTVTANPMDLMFSILLFIRGNEESQTKRNRTNSSALIKIKSHQENPQNPAVAIEEVGKNMWWTDTTSGYVLPHPTYFPVVQEIVELRKNGRSTAEILDHLNETYAPPPAVSNKKHSKWSRAMVERLFHTRALIGIKEVSVDGVNYELKDYYPRVIDDATFYHLKKNIGARAWNFGDKEEAKPIPLLSGIGLLKCDHCGCAMVKVKGTNKRSDQYRYTCDATRSRRLDCEHPNWSFRGDQLEKAVLQLLADKIWIAEDKANPVPALKVQVDEISRKIDNLIALSAMTGATKELADQITTLNSERETLYNQIKMAEEEMYSVDSQGWEKLAEFDLEDVYNEERLKVRFKIKQALKRIGCSRIDRNKNLFVLEYIDGKTQRVVIENSRGTRKGRIFIDLKTINDRQILESNGLVLHPCLDMLTDKNWKPEEEIPGQLQEFGI

SEQ ID NO: 4615 - protein, 506 aa, synthetic construct
MRTVITYLRFSSAIQGAEGADSTRRQNDLFKQWLKKNSDAQVVASFSDEGLSGYKGKHLTGQFGDMLARIESGEFPEGTILLVEAIDRIGRLEHLETEALMNRIIAHGIEIHTLQDGLIYTRDALSDDLGISIIQRVKSYVAHQESKQKSFRVSQKWKQRAKLALAGEQRLTKMVPGWIDPDTFKCNEHAETVRLIFKLLLDGESLHNIARHLQANNISSFSRRKDANGFSVHSVRTILRSETTIGTLPASQRNDRPAIPNYYEAAIDAATFNKAQEILDKNRKGRTPASDNPLTINIFKGLFRCQCGASVHPTGTKNKYAGVYRCNNHLDGRCDVPPLKRKPFDKWMIDNFLGMIDVGNDGESERKIAALQHEVEIVTARIKKATALLLEMDDIDELKIQLKELNQKRTELQTTIDNMRRKASLTDKELPQLKDIDLTTKAGRVECQLILSKHLKGLTLGKDTVTVTLQNDTEITIPTDPLPLNDGTSIFEIAEKNLLNIDTFQL

SEQ ID NO: 4616 - protein, 547 aa, synthetic construct
MKLLVPYIRWSTKEQDSGDSLRRQTNLIDAFYSKHKNDYYLLPAHRYVDKGKSGFHQQHKAQGSDFRRMFENVMSGAIPEGSLIVVENFDRFSRADIDTAIDDVRQILRKGVSILTLGDGELYDKSALTDPVKLIKHIIIAERAHQESLVKQKRIAQVWNHKTQLARELKKPMGKQAPGWLELSEDGSHYIVDEDKASLVNIIYDKRLSGMSMFAICKWLNEQGYPTINQRKVRISKTKKPDGNWSALSVKHILTSRSVLGYLPAKISTEDRKTVLREEIEGFYPQIVTDSKFYAVQQLLEETGKGKTSSGDHWLYVNILKGLIRCKCGLVMTPTGIRKPVYQGTYRCNGNKESRCSYGTVSRKLLDTQLCSRLFSKLSQLHDEATDTAKLDELQRRLNTVDSELEKLTETLIQLPNITQIQEALRVKQEEKDELIVQLSREKARVKSVSSLDLSGLDMESVEGRTEAQIIIKRLVKEIVVSGNEKLVDIYLHNGNMIRGFPLDGKDDHTLTLEEATDEMQSLDDMLIFGEPVTRIYPAGDMEEVDA

SEQ ID NO: 4617 - protein, 507 aa, synthetic construct
MKRAISYIRFSSEKQSRGDSLRRQSKMVNDWLKAHPEYYLDQDLSFRDLGVSGFTGKHLKGGLGDFLTAIEKGLVKAGDTLLIESLDRLSRQAVDRASELLRNILRSGVDIVTLSDGEHYTSESLKDPLALIKSILIMQRAHEESLRKSERIQAAWDAKKEAAKAGIKVSKRCPAWLRLNDDRKSFSVIPEKVETVKRCFQLRLEGKSIWEIVRTLNAEGHRSMNQYKPGKFGQTSVQDLLKNRSVIGYFTPKGCEEIAGYYPAIIDETTFYKVQQLSHSRYGKRSVSDKPLSVNLFKGVIRCSECGHALIITGFSDTRSGIYRCPLRNENRCSAKGLSRKQTDGTLLALLSRLDRFDSDMTNTIDTLKLHREHISSNIEKLVQLSLEIEDLSAITSKLKQLKNELSQVDADIEKETQRLKSIDVGCLSDCDLTTKAGRIEAQLIIKSAVKEVILNTAKRRCKVTFHNGKVIDLPITETPSEDVTEAIQSLSEVTERGLIDVDEVII

SEQ ID NO: 4618 - protein, 449 aa, synthetic construct
MLKRAALYIRVSTDQQAKHGDSLDAQIATLKDYVSTQDNLTIIDTYIDDGISGQKLYRDEFQRLLEDIKKNRIDIILFTKLDRWFRNLRHYLNIQEILDNSGVTWLAVSQPFFNTDTAYGRSFVNQSMSFAELEAQMASERIKAVFENKIRKGEVVTGSVPFGYKICDKKLMPNENAPIAKDIFKHYSIHNSIRLTVEYLFNEYDITRSSRTIKHMLRNRKYIGEVSGNKNYCPPIVDKETFEKVQNLLDKNISSIAKRTYIFSGLVVCSCCGKKMTGRYRKRKYIKKDGTVMYYTKKVYRCNGNTYKRNKCPNKINIPEEILEEYLLNNIKGDAENFEAKQKKIAVSAPEKNNNSKILKKIERLKKAYLNEVISLDEYKKDRKELEQMIVQVKPKETIVFKSNWFNKNIESTYRDFDEEEKRFVWRSVLKNLIVDPHGKITINFLTKN

SEQ ID NO: 4619 - protein, 588 aa, synthetic construct
MKKDVKVIKGDTTLKRTASGCVERSIKRVAAYCRVSTDTEDQINSYNSQVEHYTDFIKQNNEWTLAGIYADEAITGTQVDRRIDFKRLINDCMNGDIDMVITKSISRFARNTLDTLKYVRKLKEYNVAVFFEEENINTLTMDGELLLTILSSVAQQEVENISANVKKGLRMKMERGEMVGFQGCLGYDYDPETKSISINEKEAEIVRYIFRRYLEGVGGMVISRELEEQGYLSPRGYKKWTETTVLGIIKNEKYKGDLLMGKTFTVDPISKRRLDNFGEQDKFYIENHHEPIISEEDFEKAQGIRLRRAKNRNTVANNGGKREKYSRKYAFSSMLECGFCGHMLSRRNWHSSSEYKKVIWQCVNATKNGKKYCPHSKGIEEEAVEKAFMESYRQVCHNNVEITNEFLKTVEEELKDNSLAKDLKKISNQLDKILKKEKDLVELRLNESISMDIYQEKYNEISISKEKLLEEKRALEITLTDEKALKKRLEGFKKLLESNKYLEEFDRTVFESIVDKIIIGGTNDDGEIDPAMITIIYKTGKKDSQDGRLFKSRRKNAKAAEENDSNKLYPQSGNEVNKLCSYPIDNTH

SEQ ID NO: 4620 - protein, 611 aa, synthetic construct
MATNKKITALYERLSRDDEMVGDSNSIINQKKMLEDYANKNGYTNIMHFTDDGYSGGSFDRPSWKKLIEGVENNIIDTVIVKDMSRVGRDYLQVGFYTEVMFREKGVHFIAVANSVDSNKTESAEFAPFLNIMNEWYIRDASKKIKTVLKSRGMEGEHHTSNHAIYGYRKDKDNPSKWIIDEEAAEVVRRIFQMSLEGNGPYQIAKILTEEKVERPSYYLAQRGMGNHISNYNSTEPYLWRGTTISNILSRPEYMGHTVNFRTYKESYKSHKSKKTSKDEWVIFENTQEAIIDEETFNTVQKLRKTIRRTDSVGIANPLTGLVFCADCGAKMYNHRGKAGFKRDWLGRKTDKRRPLKDEYICSTYNLARGNFEEKCSSHYIRSEVTNKLVLDTIKEVSEYVKLNEEEFIKKVYSTSKEQQEKTSKLLKKRLAKEEKRISEINSLIRKLYEDNVSGKLSNKHFDMMLKDFETEQTALEKSIEQTKDTLRDFEEDSIRADKFIALVKKYTDFSKLTTQMINEFVDKIVVHEGKWENCERTQEVEIYLNFIGKFEMPKKEPTKEEFEEMEKLRKKREKKREYNYRYMKKVKDRMEAEGICEEMQGKRVTQTGET

SEQ ID NO: 4621 - protein, 464 aa, synthetic construct
MKRAALYIRVSTMEQAKEGYSIPAQTDKLKAFAKAKDMAVTKVYTDPGFSGAKMERPALQEMISDIQNKKIDVVLVYKLDRLSRSQKNTLYLIEDVFLKNNVDFISMQESFDTSTPFGRATIGMLSVFAQLERDTITERMHMGRTERAKQGYYHGSGIVPLGYDYVDGELIINDYEAQIIQEIYDLYVNQGKGQQYITKRMVAKYPDKVKTLTIVKYALTNPLYIGKISWDGKVYDGHHTPIIDKSIYDKAQEIIARKAQKGGEQHGNQLGLLLGITYCGKCGAKVFRYVSGGKKYRYNYYMCRSVKKMLPSLVKDWNCKQPSLRQEVVEKKVIDSLKSLDFKKIERELKQVENKTKSKITTINNQISKKHNEKQKILDLYQYGTFDVTMLNERMKKIDNEINALTANIANLEGTKSESLINKLETLKTFNWETETTENKILIIKEFVERIELFDDEVIIKYKF

SEQ ID NO: 4622 - protein, 538 aa, synthetic construct
MAQAATAKKVVVVPIKTLDIAEGIQSIQKKKVAAYCRVSTDSEEQKESYTNQVNHYTKYIQNNLEWEMAYIYADEGITGTSTKNRTHFNRMIQDARNGKLDLILVKSISRFARNTLDLLKYVRELKSLGVAVFFERENINTLDTTGEVLLTILSSLAQDESRNISENSRWGILRGFQNGKVFCNTNRFLGYDKDEHGELVINEKEAEIVRRIYEEYLDGKSYQAIARGLMRDQIKTVTGGDTWWDSSITLILTNEKYYGALLQQKTVTVDFLTHKRIRNKGQEQQYLIEDNHEPIVSKELFEAVQKEKERRAKLKGSVMGESKRYSSKYALSSKVYCGCCGAIFKRRTWNSNNPSKKVVWQCKTYVNVGKAACDAKSVDEPILHSAFVRLFNRMYKNKKGFMKTLKANIESVLSSKIGQEPLLDIEGQMQQLKSDLKELVNLKLRNQIDETVYDEETNRLSNELNELRQQKLTLEEEEDQKEKIKERVDKIIQVLSSRQDILEQFDDNLFNALVEKITILSPAHFVFTLKSGMSIAKS

SEQ ID NO: 4623 - protein, 455 aa, synthetic construct
MANEIKQVALYIRVSTDQQAKHGDSLDEQQHTLNEYVRQQGNMRVFKTYIDDGISGQKLYRDEFQKLLDDVKKGKIDTILFTKLDRWFRNLRHYLNIQEILDKNNVTWLAVTQPFFNTETAMGRSFVNQSMGFAELEAQMTSERIRAVFDNKIRKGEVVSGKVPLGYDIKDKHLIPNEKAEIVKEIFQYYLETGSMRATVRHLENHFSMTRDYQSVRQMLTNRKYIGELRDNKNFCEPIIDRDVFERVQLQLSKNIRMNKKRDYMFTGLLVCSECGCNYSATAVISRYVRKDGTTNPNERHLYRCTKNRNNTKKCSNKKGIYETTLENFLLENIEKQAEELSVKMQQEPEVKKTKNTNDKIKKKIDRLKKAYLNEVITLEEYKKDREELEALLIPERDNKIAKIDLNSLHNYSTAEFRDGYKQLTISEKSSLWRQVIKNIVVYPDGNLKINFLGY

SEQ ID NO: 4624 - protein, 559 aa, synthetic construct
MKNKKAYVYTRVSTSMQIDGYSLDAQEERIKQYAKAYGIEIIETYKDAGKSGTSISGRNEFIAMLNDIEAEKDKVDYVMVFKLSRFGRNAADVLQSLQVMENHNVNLICVDDSLDSSKDSGKLVITILSAVAEMERENILSQTMEGRKQKAREGKWNGGFAPIGYSLDNGELVVNEDEAKAVRMIFDLYANSDMGANGVSKYLVSLGINKPIRQNGKNPYFSASLIRQILDNPVYNGKIAYGRRKTIKDKTTGKIKLEKSDHYIIAQGNHEALIDDELWNTVQEKRKSQAKKYEKINRGKDERVHILSNLIKCPYCGAGLYGNKSRKRNKNKEGEHYKDYYYYGCKHRQMMNGHKCTFNKQIRAELIEKEVETIITQVVSNPTFAKKIEEKINIQIDTKEIDEVINKHLAKIRQLTGTKASLINQIDSLNFEDKHYDRKYTDLNLRLDAIYDQLEYAEMQLNDSRKRKEAILEEKITSDNIYKILVNFNSLYTVLSDIDKKRLLNEMIEEIQIYDEKTEKDTWIKSVVFKLPLIDNEIDFGLDNKDNVESVTLLTKAVD

SEQ ID NO: 4625 - protein, 533 aa, synthetic construct
MLKQQANNKEKVALYSRLSRDDGLDKESNSIANQREMLKRYAKENKFYVYDEYIDDGFSGTTFNRPALNRMFEDIEAGKVNVVLVKDMSRLGRNNALFMYYVEEVFPDLDVRFIAINDMVDTAQDDNEIMPFKSVLNEYYARDISKKIRSSIRTTALTGGFTGAFAPYGYLVDPENKKKLIVDPETAPIVKRIFELSQQGTSTHQIARILCKDGILVPRAYRAKKKGILEQSKGFTFPTDWVGKNVKMILENQVYLGHMVSHKSQTKSFKNKKIVPVPKEDWIVVENTHEAIIDKETFEIVQKFISVKKQPNKTGKPNIFVGLVKCPDCGRNLAYSNPNGNEPRFRSRTYARNTELCTTHAISYKALYEIVQNDIKNHVNSMEELGDHFIKEMRELSETSGSQKIHQFNQELVSLEKRIDEIDSIFTKLIEQNALGKITDERFSKMSMNYETEQAEVVQSYRELKSKIKSEEEKVQGTDRFLETISKYKDVTELNRSMLCELIDSIYVYQAEGIGKERTQKVEINYRFLAVSH

SEQ ID NO: 4626 - protein, 464 aa, synthetic construct
MDKKAAIYIRVSTQEQATEGYSIQAQTDRLTKYVEAKDFILYKKYIDAGYSASKLERPAMQELIQDVQSKKVDVVIVYKLDRLSRSQKDTMYLIEDIFRPNDVELISMQESFDTSTAFGSATVGMLSVFAQLERKSISERMITGRVERAKKGFYHTGGQDRPPAGYQFNSDNQLIINEYEAAAIKDLFRLYNDGLGKSSISEYLKKNYPGKNKWLPSSIDRMLKNSLYIGKVKFSGVEYDGIHEPIIDEVTFYKTQKEIARRKQTNTKRYNYVALLGGLCECGICGAKMANRRAVGRKGKIYRYYRCYSKKGSPKHMMKTDGCSSKAQQQFIIDEAVINNLKNIDVEAELKRRSAPQTNTSLISSQIESIDKQINKLIDLFQVDSMPLDVISEKIDKLNKEKQSMEKLLERKNKLDKTELQHRFDVLKSFDWDNSSIESKRVVIEMLVQKVIIHDNSIEIILVE

SEQ ID NO: 4627 - protein, 470 aa, synthetic construct
MKGESELDKKAAIYIRVSTQEQATEGYSIQAQTDRLIKYVEAKDFILYKKYIDAGYSASKLERPAMQELIQDVQSKKVDVVIVYKLDRLSRSQKDTMYLIEDIFRPNDVELISMQESFDTSTAFGSATVGMLSVFAQLERKSISERMITGRVERAKKGFYHTGGQDRPPAGYQFNSDNQLIINEYEAAAIKDLFRLYNDGLGKSSISEYLKKKYPGKNKWLPSSIDRMLKNSLYIGKVKFSGAEYDGIHEPIIDEVTFYKTQKEIARRKQTNTKRYNYVALLGGLCECGICGAKMANRRAVGRKGKVYRYYRCYSKKGSPKHMMKTDGCSSKAQQQFIIDEAVINNLKNIDVEAELKRRSAPQTNTSLISSQIESIDKQINKLIDLFQVDSMPLDVISEKIDKLNKEKQSMEKLLERKNKLDKTELQHRFDVLKSFDWDNSSIESKRVVIEMLVQKVIIHDNSIEIILVE

SEQ ID NO: 4628 - protein, 470 aa, synthetic construct
MKGESELDKKAAIYIRVSTQEQATEGYSIQAQTDRLIKYVEAKDFILYKKYIDAGYSASKLERPAMQELIQDVQSKKVDVVIVYKLDRLSRSQKDTMYLIEDIFRPNDVELISMQESFDTSTAFGSATVGMLSVFAQLERKSISERMITGRVERAKKGFYHTGGQDRPPAGYQFNSDNQLIINEYEAAAIKDLFRLYNDGLGKSSISEYLKKNYPGKNKWLPSSIDRMLKNSLYIGKVKFSGAEYDGIHEPIIDEVTFYKTQKEIARRKQTNTKRYNYVALLGGLCECGICGAKMANRRAVGRKGKVYRYYRCYSKKGSPKHMMKTDGCSSKAQQQFIIDEAVINNLKNIDVEAELKRRSAPQTNTSLISSQIESIDKQINKLIDLFQVDSMPLDVISEKIDKLNKEKQSMEKLLERKNRLDKTELQHRFDILKSFDWDNSSIESKRAVIEMLVQKVIIHDNSIEIILVE

SEQ ID NO: 4629 - protein, 546 aa, synthetic construct
MQSDFQTNRVAIYCRLSKDDEFKKGESASIQNQRDMLIDYCKQRNWTIADIYVDDGYTGLNIDRPDFQRMLVDIKAKKIDTVITKDLSRLGRNYLQTGKFTEEFFPKNGVRYIAVNDGVDTNQDNNEIVPFKNVLNEFYSRDVSKKMKSAYYTRAKQGKFTGCLAPFGYKKDENNPHLLVIDEETSWIVEKIFDYAARGYGVQYIRTLLREEKIPTPTWWNRKKGLRNAVTKWEKTMEGGEYVWDCTTLTEMIQNPVYLGHIASQKANHKFKIGWISDKPQEEWLVVEDMHEALIDEDTFEIANEKLKSRKRPFKTGELSLFAGLIKCPDCGKSLNLARNNSKKKEKLFTCNTYRRYGKDFCSQHRIMYDEVYRVVLEDIRSNAKLALKDEKEVLKILELNQEEELDSQVVLAGQMIEEDSLRYKELETKVERLYDDWIDKRINETNFNRLMEKTQKEQDILLERIKVNEEKIKNSESKDINISKWIESIKKYQNIKKLDRHILNELIDKIFVYEKEIIDGEVVQTVEIFYNFLLNTKELNIKYRL

SEQ ID NO: 4630 - protein, 537 aa, synthetic construct
MKQQIYNTALYLRLSRDDELQGESSSITTQRSMLRLYAKEHHLNVIDEYIDDGWSGTNFERPSFQRMIEDIEAGKINCVVTKDLSRLGRNYIMTGQYTELYFPSHNVRYIAIDDGVDSEKGESEIAPFKNIINEWVARDTSRKVKSAFRTKFAEGAHYGAYAPLGYKKHPDIKGKLLIDDETKWIVEKIFSLAYQGYGSAKITKILREEKVPTASWLNFTRYGTFAHIFEGKPESKRYEWTIAHVKAILKNEVYIGNSVHNMQSTVSFKSKKKVRKPESEWFRVENTHEPIIDKEVFYRVQEQIKSRRRQTKEKATPIFAGLVKCADCGWSMRFATNKANKTPYSYYSCSFYGQFGKGYCSMHYIRYDALYQAVLERLQYWANAVQQDEEKVLNKIQKVGNAERIREKKKKASALKKAENRQNEIDRLFVKMYEDRACEKITERNFVMLSSKYQKEQIELEQQITNLREELSKMEQDMIGAEKWIELIKEYSVPKELTASLLNAMIEKILIHEATTNEDNERIQEIEIYYRFIGKVD

SEQ ID NO: 4631 - protein, 449 aa, synthetic construct
MLKRAALYIRVSTDQQAKHGDSLDAQIATLKDYVSTQDNLTIIDTYIDDGISGQKLYRDEFQRLLEDIKKNRIDIILFTKLDRWFRNLRHYLNIQEILDNSGVTWLAVSQPFFNTDTAYGRSFVNQSMSFAELEAQMASERIKAVFENKIRKGEVVTGSVPFGYKICDKKLIPNENAPIAKDIFKHYSIHNSIRLTVEYLFNEYDITRSSRTIKHMLRNRKYIGEVSGNKNYCPPIVDKETFEKVQNLLDKNISSIAKRTYIFSGLVVCSCCGKKMTGRYRKRKYIKKDGTVMYYTKKVYRCNGNTYKRNKCPNKINIPEEILEEYLLNNIKADAENFEAKQKKIAVSAPEKNNNSKILKKIERLKKAYLNEVISLDEYKKDRKELEQMIVQVKPKETIVFKSNWFNKKIESTYRDFDEEEKRFVWRSVLKNLLVDPHGKITINFLTKN

SEQ ID NO: 4632 - protein, 455 aa, synthetic construct
MANEIKQVALYIRVSTDQQAKHGDSLDEQQHTLNEYVRQQGNMRVFKTYIDDGISGQKLHRDEFQKLLDDVKKGKIDTILFTKLDRWFRNLRHYLNIQEILDKNNVTWLAVTQPFFNTETAMGRSFVNQSMGFAELEAQMTSERIRAVFDNKIRKGEVVSGKVPLGYDIKDKHLVPNEKAEIVKEIFQYYLETGSMRATVRHLENHFSMTRDYQSVRQMLTNRKYIGELRDNKNFCEPIIDRDVFERVQLQLSKNIRMNKKRDYMFTGLLVCSECGCNYSATAVISRYVRKDGTTNPNERHLYRCTKNRNNAKKCSNKKGIYETTLEKFLLENIEKQAEELSVKMQQEPDVKKTKNTNDKIKKKIDRLKKAYLNEVISLEEYKKDREELEALLIPEPNNKIAKIDLNSLHNYSTAEFRDGYKQLTISEKSSLWRQVIKNIVVYPDGNLKINFLGY

SEQ ID NO: 4633 - protein, 588 aa, synthetic construct
MKKEVKVIKGDTTLKRTASGCVERSIKRVAAYCRVSTDTEDQINSYNSQVEHYTEFIQKNNEWTLAGIYADEAITGTQVDRRIDFQRLINDCMNGDIDMIITKSISRFARNTLDTLKYVRKLKEFNVAVFFEEENINTLTMDGELLLTILSSVAQQEVENISANVKKGLRMKMERGEMVGFQGCLGYDYDPETKSISINEKEAEIVRYIFRRYIEGVGGMVISRELEEQGYLSPRGNKRWTETTVLGIIKNEKYKGDLMMGKTYTVDPISKRRLDNFGEQDKFYIENHHEPIISEEDFEKAQGIRLRRSKNRNTVANNGGKREKYSRKYAFSSMLECGFCGHNLSRRNWHSSSEYTKVIWQCVNATKNGKKYCPHSKGIEEEAIEKAFMESYRQVCHNNVEITNEFLKTVEEELKDNSLSKDLKKISNQLDKILKKEKDLVELRLNESISMDIYQDKYNEIAISKEKLLAEKRTLEVTLTDEKALKKRLEGFKKLLESNKYLEEFDRAVFESIVDKIIIGGTNDEGEIDPAMITIIYKTGKKDSQDGRLFKSRRKNAKEVNEKADSKLYPQSSDEVNNLYSYPIDNTH

SEQ ID NO: 4634 - protein, 455 aa, synthetic construct
MANEIKQVALYIRVSTDQQAKHGDSLDEQQHTLNEYVRQQGNMRVFKTYIDDGISGQKLYRDEFQKLLDDVKKGRIDTILFTKLDRWFRNLRHYLNIQEILDKNNVTWLAVTQPFFNTETAMGRSFVNQSMGFAELEAQMTSERIRAVFDNKIRKGEVVSGKVPLGYEIKDKHLVPNEKAEIVKEIFQYYLETGSMRATVRHLENHFSMTRDYQSVRQMLTNRKYIGELRDNKNFCEPIIDRDVFERVQLQLSKNIRMNKKRDYMFTGLLVCSECGCNYSATAVISRYVRKDGTINPNERHLYRCTKNRNNAKKCANKKGIYETTLENFLLENIEKQAEELSVKMQQEPEVKKTKNTNDKIKKKIDRLKKAYLNEVITLEEYKKDRKELEALLIPEMDNKIAKIDLNSLHNYSTAEFRDGYKQLTISEKSSLWRQVIKNIVVYPDGNLKINFIGY

SEQ ID NO: 4635 - protein, 557 aa, synthetic construct
MTKIQGEKVLNVIGYGRTSSQNQVDNFSLPGQDDAIRQFSKSKGFNLIDIIHDEAKSGKSMDDRDGLMYILKDMFVKYEVYALIVFKLSRLSRTLKDSLEIVNMLQDLGIKLFVVQENLNTETSEGRLMFHIMGSLAEYEGENIVELGKKGSKKRAELGYYNGNRVLGYDNTVNELNEKVLTVNVEEAKIIKRIFNQYERGYGLRSIANQLNRLGWRTKKGNLFSTTAIRDILDSELYRGNISYNKKENIRQQTKIRKKCREEGREVPPIEQGENYVLTKGKHEAIISNEQWEHVQYLRQKNKVNPDKTRPWGALLTGILFCPQCGAKMTISNSSTKNKHGETVRRKYYVCGNFKSKGRKACSANGVRVEVIEEIVKKAFVDVIMYPSFLKETIVKSNDVMSQQLIPLNRQIEDLNGEIEEIDKNIYRLNRVIGFAPDMKLDAERRISNMQSERMAKQFEQDVIKEKLEVMTQTINPEDAKECLTYVHDVMGAASKESLKVIYRTFIDSIVYDKATKTAQIKLTISQQILSKIEDYNNTKASIPTDGIDAFSLFIVV

SEQ ID NO: 4636 - protein, 516 aa, synthetic construct
MKTIHKLERPKLPETPKLKVAAYARVSTASDEQLSSLKTQITHYENYIQKNDQWEYVGVYYDEGISGTKTDKRDGLHRLINDAEHGKIDLILTKSISRFSRNTVDCLNLVRKLTEIGVTMIFEKENINTSDMESELLLSILSSLAESESYSHSENMKWANRKRMAKGNYKGVPPYGYCRKGIDFHLVPDEAKVVEQIFQWTLNGLSMHQIASKMNVANITTKRGVKWQASGVSIILHNIVYTGTMIFQRYFNDEQFKKRKNNGELPMYRIDNNHPAIVSMEESERVQEIIRIRATSKGNTKDGKNTNRYAFSKKVLCDKCGNTYKRIQTYWKGNTRKVQWGCKGHLKDKNSCDALPITDEKLKIAYLTMLNKLIFAHKVVLEPLLKQQSNAAELERALDEMSNKASEIDEKLEVLASLNASGIVSTKTSFEEQNKLQLELKNLQEEQQKIINSANGKSTQRIELEELYRFTKRSNMLTEWEESLFSRFADQVIVYNRQEVGFKLKCGLILKERLPE

SEQ ID NO: 4637 - protein, 449 aa, synthetic construct
MLKRAALYIRVSTDQQAKHGDSLDAQIATLKDYVSTQDNLTIIDTYIDDGISGQKLYRDEFQRLLEDIKKNRIDIILFTKLDRWFRNLRHYLNIQEILDNSGVTWLAVSQPFFNTDTAYGRSFVNQSMSFAELEAQMASERIKAVFENKIRKGEVVTGSVPFGYKICDKKLIPNENAPIAKDIFKHYSIHNSIRLTVEYLFNEYDITRSSRTIKHMLRNRKYIGEVSGNKNYCPPIVDKETFEKVQNLLDKNISSIAKRTYIFSGLVVCSCCGKKMTGRYRKRKYIKKDGTVMYYTKKVYRCNGNTYKRNKCPNKINIAEEILEEYLLNNIKADAENFEAKQKKIAVSAPEKNNNSKILKKIERLKKAYLNEVISLDEYKKDRKELEQMIVQVKPKETIVFKSNWFNKNIESTYRDFDEEEKRFVWRSVLKNLLVDPHGKITINFLTKN

SEQ ID NO: 4638 - protein, 588 aa, synthetic construct
MKKEVKVIKGDTTLKRTASGCVERSIKRVAAYCRVSTDTEDQINSYNSQVEHYTVFIQKNNEWTLAGIYADEAITGTQVDRRIDFQRLINDCMNGDIDMIITKSISRFARNTLDTLKYVRKLKEFNVAVFFEEENINTLTMDGELLLTILSSVAQQEVENISANVKKGLRMKMERGEMVGFQGCLGYDYDPETKSISINEKEAEIVRYIFRRYIEGVGGMVISRELEEQGYLSPRGNKRWTETTVLGIIKNEKYKGDLMMGKTYTVDPISKRRLDNFGEQDKFYIENHHEPIISEEDFEKAQGIRLRRSKNRNTVANNGGKREKYSRKYAFSSMLECGFCGYNLSRRNWHSSSEYTKVIWQCVNATKNGKKYCPHSKGIEEEAIEKAFMESYRQVCHNNVEITNEFLKTVEEELKDNSLSKDLKKISNQLDKILKKEKDLVELRLNESISMDIYQDKYNEIAISKEKLLAEKRTLEVTLTDEKALKKRLEGFKKLLESNKYLEEFDRAVFESIVDKIIIGGTNDEGEIDPAMITIIYKTGKKDSQDGRLFKSRRKNAKEVNEKADSKLYPQSSDEVNNLYSYPIDNTH

SEQ ID NO: 4639 - protein, 455 aa, synthetic construct
MANEIKQVALYIRVSTDQQAKHGDSLDEQEHTLNEYVKQQRNMKVFKTYIDDGISGQKLYRDEFQKLLDDVKKGRIDTILFTKLDRWFRNLRHYLNIQEILDKNNVTWLAVTQPFFNTETAMGRSFVNQSMGFAELEAQMTSERIRAVFDNKIRKGEVVSGKVPLGYEIKDKHLVPNEKAEIVKEIFQYYLETGSMRATVRHLENHFSMTRDYQSVRQMLTNRKYIGELRDNKNFCEPIIDRDVFERVQLQLSKNIRMNKKRDYMFTGLLVCSECGCNYSATAVISRYVRKDGTTNPNERHLYRCTKNRNNVKKCSNKKGIYETTLENFLLENIEKQAEELSVKMQQEPEVKKTKNTNDKIKKKIDRLKKAYLNEVITLEEYKKDREELEALLIPERDNKIAKIDLNSLHNYSTAEFRDGYKQLTISEKSSLWRQVIKNIVVYPDGNLKINFLGY

SEQ ID NO: 4640 - protein, 470 aa, synthetic construct
MKGESELDKKAAIYIRVSTQEQATEGYSIQAQTDRLTKYVEAKDFILYKKYIDAGYSASKLERPAMQELIQDVQSKKVDVVIVYKLDRLSRSQKDTMYLIEDIFRPNDVELISMQESFDTSTAFGSATVGMLSVFAQLERKSISERMITGRVERAKKGFYHTGGQDRPPAGYQFNSDNQLVINEYEAAAIKDLFRLYNDGLGKSSISEYLKKNYPGKNKWLPSSIDRMLKNSLYIGKVKFSGAEYDGIHEPIIDEVTFYKTQKEIARRKQTNTKRYNYVALLGGLCECGICGAKMANRRAVGRKGKVYRYYRCYSKKGSPKHMMKTDGCSSKAQQQFIIDEAVINNLKNIDVEAELKRRSAPQTNTSLISSQIESIDKQINKLIDLFQVDSMPLDVISEKIDKLNKEKQSMEKLLERKNRLDKTELQHRFDILKSFDWDNSSIESKRAVIEMLVQKVIIHDNSIEIILVE

SEQ ID NO: 4641 - protein, 588 aa, synthetic construct
MKKDVKVIKGDTTLKRTASGCVERSIKRVAAYCRVSTDTEDQINSYNSQVEHYTEFIQKNNEWTLAGIYADEAITGTQVDRRIDFQRLINDCINGDIDMIITKSISRFARNTLDTLKYVRKLKEFNVAVFFEEENINTLTMDGELLLTILSSVAQQEVENISANVKKGLRMKMERGEMVGFQGCLGYDYDPETKSISINEKEAEIVRYIFRRYIEGVGGMVISRELEEQGYLSPRGNKRWTETTVLGIIKNEKYKGDLMMGKTYTVDPISKRRLDNFGEQDKFYIENHHEPIISEEDFEKAQGIRLRRSKNRNTVANNGGKREKYSRKYAFSSMLECGFCGHNLSRRNWHSSSEYTKVIWQCVNATKNGKKYCPHSKGIEEEAIEKAFMESYRQVCHNNVEITNEFLKTVEEELKDNSLAKDLKKITNQLDKILKKEKDLVELRLNESISMDIYQDKYNEIAISKEKLLAEKRTLEVTLTDEKALKKRLEGFKKLLESNKYLEEFDRAVFESIVDKIIIGGTNDEGEIDPAMITIIYKTGKKDSQDGRLFKSRRKNAKEVNEETGGKLYPQSSDEVNNLYSYPIDNTH

SEQ ID NO: 4642 - protein, 548 aa, synthetic construct
MIQTNSNHFSFKAAIYCRLSKDDEQKGESASIQNQKELLENYVKSKGWSIYDVYIDDGYTGLNTNRPSFQRLIRDIENKKVDIVITKDLSRLGRNYLQTGYYTENFFPKNNVRYIALNDGVDTFQENNEIVPFKNVLNEFYSRDVSKKMKSAYMTRARQGKFIGCLAPIGYRKDNDDPHKLVIDDETSWIVEKIFDLAFSGYGVQAIRRRLFEEKIPTPTWWNRKKGLRNKKTKLEMTVDGGEYWWDCTTLKEIIENPVYIGHIASQKVNYKFKVGWLSDKPKEEWIIVENTHEPIISEDIYNIANEKLKSRRRPFKNGEESIFAGIVKCPDCGKSLNLGRNKSKKREKLLTCNTYRRYGKSLCSQHRIYYDTLYEIVLKDIRKNAEIALKDEKEIIKALEKSREIDNEEEQKFIMDKIYEDQIRVEDLTKKIERLYDDWLDNKISESNFQKILEKSQKEQDYLNQRIEDNQKLIVKEDLEDINVKKWIELIKKHRDIKKLDKETLNELISKIYVHEKEVVNGEITQTIDIYYNFIGNTDTLQVFYNL

SEQ ID NO: 4643 - protein, 613 aa, synthetic construct
MRNFEKITALYERLSRDDELEGESNSIVNQKKILEEYASKNNLTNIIHFTDDGISGTQFDRPGFMEMMNGVNTGNIGCIIVKDMSRLGRDYLKVGQCMEILRQKGVRLIAINDNVDSFYREDDFTPFRNIMNEWYARDTSRKIQSTFRSKGESGKHTASTPPYGYIKDEKDKDKWVVDEKAAEIVRRIFNLTMDGAGPYKIAKILEADKIDIPAYHQQKMGYGLHQSKNFEYPYRWCSSTIASILKKKEYLGHTVNFKTRKHFKDKKSKYVSEDKWLIFENTHEAIIDQEIFDNVQRIRGNVKRYPDGWGEYHPLTGLMYCADCGSKMYVHRTNNYKNIPYYNCSNYKKVPCGTLCPSAHRIKAEVVINLIQEILKDIKNYLDEDNEAFIHSIQNEMEEKEKAHIEKKKIRLTESQNRLQELERLMCRIYEDMILNKIPNNRYEILNNQYETEQLTLSKEIKDLEIAISRYEKETDRARKFISLISRYENFDELTTTMINEFIEKIIIHERDRKGSQTSKQKIEIYFNFIGNYEPPKEELTEEERLKIEEEEQKINERKDRLHQNYLKRKANGKQQEYEERYKVRREEKKQEKLKVLKRAGIPGKEYERISNS

SEQ ID NO: 4644 - protein, 539 aa, synthetic construct
MGRTKKYVAGLYCRLSKDDGNSVESMSIWSQKVMLKQYAESNSIAIYDYYVDDGYSGTNFERPSFKKMITDIENGKINCVITKDLSRLGRNYLQSGAYIEMYFPQKNIRYIAITDGIDTLNSNQNDIMPFKNILNEMYAKDTSKKVKSAIQSRMREGTYIGSKAPFGYLKDPNNKRRLIIDEKTKPIIELIYKLCLEGKGTQLISQELMKRKIPRPSAFVENAEKLYGLTEENKYQWSHRMVLNVLRDPVYCGNMARNKRPTLSFKNSKRLYIPKSDYIYAKNTHEGIVSEEIWEQVQTMIDKRKCNNKKGLYYDNIFQGLVRCPKCGYALTPKTDYRLKKKELIDFVHFSCSTYKKYGVNACSSHRIEARDLYNIVLEDIQYHGSMALSAKEDFVEKIIEKIEVEKIDEGKELSNKLELKKNQLAELDRSYEQLYEDRLEGNITERNFNLMNVSISKKQDKLIEEIKVLEGDIEVSFETEDNYKKFMDNISKYAKIKSLNRYILNQIIDKIYVYDKEEIDGQISQKVEIHYKFIGKLN

SEQ ID NO: 4645 - protein, 470 aa, synthetic construct
MKGESELDKKAAIYIRVSTQEQATEGYSIQAQTDRLTKYVEAKDFILYKKYIDAGYSASKLERPAMQELIQDVQSKKVDVVIVYKLDRLSRSQKDTMYLIEDIFRPNDVELISMQESFDTSTAFGSATVGMLSVFAQLERKSISERMITGRVERAKKGFYHTGGQDRPPAGYQFNSDNQLIINEYEAAAIKDLFRLYNDGLGKSSISEYLKKNYPGKNKWLPSSIDRMLKNSLYIGKVKFSGTEYDGIHEPIIDEVTFYKTQKEIARRKQTNTKRYNYVALLGGLCECGICGAKMANRRAVGRKGKVYRYYRCYSKKGSPKHMMKTDGCSSKAQQQFIIDEAVINNLKNIDVEAELKRRSAPQTNTSLISSQIESIDKQINKLIDLFQVDSMPLDVISEKIDKLNKEKQSMEKLLERKNKLDKTELQHRFDVLKSFDWDNSSIESKRVVIEMLVQKVIIHDNSIEIILVE

SEQ ID NO: 4646 - protein, 455 aa, synthetic construct
MANEIKQVALYIRVSTDQQAKHGDSLDEQQHTLNEYVRQQGNMRVFKTYIDDGISGQKLYRDEFQKLLDDVKKGKIDTILFTKLDRWFRNLRHYLNIQEILDKNNVTWLAVTQPFFNTETAMGRSFVNQSMGFAELEAQMTSERIRAVFDNKIRKGEVVSGKVPLGYEIKNKHLVPNEKAEIVKEIFQYYLETGSMRATVRHLENHFSMTRDYQSVRQMLTNRKYIGELRDNKNFCEPIVDRDVFERVQLQLSKNIRMNKKRDYMFTGLLVCSECGCNYSATAVISRYVRKDGTTNPNERHLYRCTKNRNNTKKCSNKKGVYETTLENFLLENIEKQAKELSVKMQREPEVKKTKNTNDKIKKKIDRLKKAYLNEVITLEEYKKDREELEALLIPERDNKIAKIDLNTLHNYSTAEFREGYKQLTISEKSSLWRQVIKNIVVYPDGNLKINFLGY

SEQ ID NO: 4647 - protein, 506 aa, synthetic construct
MRHVITYLRYSSAIQGAEGADSTRRQNDLFKQWLKKNSDAQVVASFNDEGLSGYKGKHLSGQFGDMLSRIESGEFPEGTILLVEAIDRIGRLEHLETEALMNRIIAHGIEIHTLQDGLIYTRDALSDDLGISIIQRVKSYIAHQESKQKSFRVSEKWKQRAKLALAGKQRLTKMVPGWIDPDTFKLNEHAETVRLIFKLLLDGESLHNIARHLQANNISSFSRRKDANGFSVHSVRTILRSETTIGTLPASQRNDRPAIPNYYEAAIDAATFNKAQEILDKNRKGRTPASDNPLTINIFKGLFRCQCGASVHPTGTKNKYAGVYRCNNNPDGRCDVPPLKRKPFDKWMIDNFLGMIDVGNDGEAEGKIAALQHEVEIVTARIKKATALLLEMDDITELKTQVKGLNQKRTELQTTIDNMRRKASLTDKELPQLKDIDLTTKAGRVECQLILSKHLKGLTLGKDTVTVTLQNDTEITIPTDPLPLNDGTSIFEIAEKNLLNIDTFQL

SEQ ID NO: 4648 - protein, 525 aa, synthetic construct
MPSAFSYVRFSSGKQAKGSSEHRQRAMLGQWLEQHPSFTLSDLRFEDLGRSGFSGEHLDHGLGQLLAAIDSGAIKSGDVILVEAVDRIGRLEPLEMLPLFSRIVKAGVSVITLEDGHVYDRSSVNETSLFLLVARIQQAHEYSNRLSRRINASYTARREKAKAGLGIKRETPVWLTTDGQLVPHVAPHIAQAFQDYADGLGERRICRKLRESGLEEFSKTNATTVRRWLKNRTAIGYWNDIPDVYPHVVDPALFYQVQQRLDAPKVDRAKPSAHYLTGLVKCAVCGRNYNYKQRKHTDPAMLCTSRARLAGEGCSNSKTYPVIVLDQVRKLTSLPFLQHAMESASSQADPSSQRLAVIDGEIGELSRKISEATKALLVLGFTPEIQESLEQLKTAREALEEERATLLLPQAEKLTTAQLEAFSNGLLDDEPMKLNHVLQTAGYSMVVHPDGSIDVDGKRFVYEGASRKEKVYKLRLIGEDKQWSLPILTPQMATYKSLFMAAVRLPGDPSEEELRRFEEAKHSER

SEQ ID NO: 4649 - protein, 536 aa, synthetic construct
MTKKCFPYVRFSSTRQEDGSTRTRQNGLIEAFVAKHGLEVDRHLEDAGTSAFHSKHAGSEGVLGQFLKEVRKGEIEKGSYLLIENFDRLSRDKIVRSNKIFTDLLFSGIKIVILDKNKIYDADNLDFGDWITALVEFERANAESQRKSDFSSKAWKLNRDKMHNGEIVTKKVPTWLKVENNTFIIDEVKIDRIRTLFRLSLSKGLQEATKEYNSLYGEKLAIHQAQYLLSNRKLIGEHQPQKIHYNENGRLIRKDEGNPIPDYYPQVIDEDLFLKVQSVITSRKPFSGRYSAQRYNVFRDLIFCRFCGGTIRYMNKGERDYFICTNSMTGKCGLKGQQSIRGKKVFSRFFKFTNGINIGTLLEENTNADEIKNELMKLENQKTKISNRLDGFKSQIKKMILEGETIPETYNEIIVDLENSIIKLDDEIEIKNKELNKIISSFKSFYDLKEIDIEKIIYDKSQEAIEKRVQYNNELKNIIKKIQIDYLNDILHVEFSNGVNRHILNDELANEYNKDEIENAWASVVKSIANKTNPQS

SEQ ID NO: 4650 - protein, 564 aa, synthetic construct
MNIAIYPRVSTERQAEEGMSIDRQTTLMEEWAAHEKHVVVEIFRELGASASEDKHRPVFERMIEKALSPEHPFDAIVVFSQSRFYRDNVARAVLTQRLKRAGVRVISYSQPLPEDESLAYLIENIIGLIDEFQSRETSKFTSGCMRSNADKGFFNGARPPYGYKAVCTDVAGRGHTGFKKKLQIDEEEAEVVKLIFDLAEHGRNGTVVGIRRIAQLLNAKGIGHRGRQWNIRHVEDVLKNRTYIGEHITFQWDSRNNCARPPTEWITTRVPPILLDEKQFFATQEALASRIPPSHPEIKAEQAPTLLTGLLKCGKCGKNLVLMSGKAGRYSYYRCASKQKIGPNECTCPNLPKEELEAAVLNAVRDRVLSPEKMKAVVKSLQNAWERSAEPDMKRLSKLKADIARADEWLGQIYEQVGAKTIAMDDSLQKAIQAKQRLLSNLNGEVVTLQHRQQLPFRKFGPKQIDNFAAAARAELATPISRYAREFLRAVVTEIRVEPEKLRIRGNRAQMASAISHWSGTDDEPVPRVVSDWRARLGSNQQPLPSEGSTLSIELRALTDTLRP

SEQ ID NO: 4651 - protein, 616 aa, synthetic construct
MPTAYSYIRFSTPEQKKGDSLRRQKELSERYAREHDLTLDTSLHLHDLGVSAFDGSNVTRGALGGFLKAVDDGRVAPGSYLLVESLDRLSRDRVMEALNLFLSIVNRGITIVTLSDGRVYNSDTDNTADLIVSITIMARAHEESLTKSRRLKAAWTNKRSQLQEKKLTARCPLWMKLNDDRTRFQFIPERASVVREIISLARNGMGQTIIAKTLNSRAVPSFSGNPKGWHPSYVQKILTSTALFGEYQPGIFEQGRVIPHGDPVADYYPAIITREEFYSLQAYRSQNAVGGGKARKGDTIPNLLSGLLRCGYCGNPMVIAGAAAKRIRSADGKEVIRPPKKVLVCDGGRRGLGCYAVQWGHRDFETSFLSFCRGIEFERILADVRSGHQESRDLTLDEKIRSIEAELSAKGARMKNLTVAIEEGNAPASLVERIRSLEEEVAELTRAKTQLSTELNLHRAARQELASTAEIARSLIDTMGSMASDELFRLRAALAAQFRRTVASVTLYPAGRLFTHEQVERQRASLIDAGLDVDRVDRYVAETYPTEPKRQGRGIRGRYASRKDIGRFFSIETVNGGFRIVYPDFDDPATARIVAGLDETPVFAVEPEVQIPLATP

SEQ ID NO: 4652 - protein, 584 aa, synthetic construct
MNTKVKLIKASNTGARNRNALHLDLKRVAAYCRVSTDSKDQLESYKSQVDYYTNLIKNNKNWTLAGIYADEATTGTTATKRADFMRLISDCQNGDIDMIITKSISRFARNTLDTLKYVRLLKENNVGVVFEEENIDTLTMDGELLLTILSSVAQQEVENTSAHVKKGLKMKMEKGELIGFQGCLGYDYDPITKSISINEEEAKIVRYIFKRYLEGNGGSVIGRELEEQGYLTPRGKTKWSDTTVLGIIKNEKYIGDILMGKTFTVDPITKRRLANFGESDKYHIENHHEPIISKEDFEKAQEIRLRRAQNRNTIANKDRKREKLSRQYAFSSMLECGFCGEILSRRTWHTSSIYKKINWQCVKSTKKGKKYCPHSKGIQEAAIEKAFVESYRQLCHADSTVIDDFLKIVEEEINDNTLVKDLKKIESQLNRIISQERKLVDLHLEDNIDEEVYAKKYKKLTKQKEELLDEKKTLELTIKDENSIKERLKQFKNILENREIIEEFNRTVFESIVDKVVVGRIDKDGTVHPYDLTFYFKTGVKDSQDSNNFKDKRKNAKDNDINKLCSYKNDEDKKLCSQSKDNAH

SEQ ID NO: 4653 - protein, 552 aa, synthetic construct
MNKHSPTTTARAALYLRVSTARQAEHDISIPDQKRQGEAYCEQRGLQLVETFIEAGATATNDKRPEFQRMIEAGTTKPAPFDIVVVHSFSRFFRDHFEMEFYVRKLAKNGVKLVSITQEMGDDPMHQMMRQIMALFDEYQSKENAKHVLRAMNENARQGFWNGARPPIGYRIVAAEQRGSKIKKKLEIDPLHADTVRLIYRLFLEGDGTSGAMGVKAIATYLNERRFFTRDGGRWGLAQIHAILTRTTYIGEHRFNTRSHKDREKKPESEVAIMAVPPLIERETFDAVQARLKSRNPMVTPARVSSGPTLLTGICFCAKCGGAMTLRTGQGSTGATYRYYTCSTKARQGKTGCKGRTIPMDKLDHTVADYIGDRLLLPKRLETVLASVIDRRQERTERRREHLAELQRRITEADQRLGRLFDAIEAGMVDKDDAMAKERMVSLKALRDQAAADAERTQLALDSSGNQGVTPDMLKGFARKARERIKLNDGGYRRDHLRALAQRVEVADDEVRIMGSKSELLRTLVAASSVETAAFGVHSSVLKWRTRQDSNL

SEQ ID NO: 4654 - protein, 464 aa, synthetic construct
MKRAALYIRVSTMEQAKEGYSIPAQTDKLKAFAKAKDMAVTKVYTDPGFSGAKMERPALQEMISDIQNKKIDVVLVYKLDRLSRSQKNTLYLIEDVFLKNNVDFISMQESFDTSTPFGRATIGMLSVFAQLERDTITERMHMGRTERAKQGYYHGSGIVPLGYDYVDGELIINDYEAQIIQEIYDLYVNQGKGQQYITKRMVAKYPDKVKTLTIVKYALTNPLYIGKISWDGKVYDGHHTPIIDKSMYDKAQEIIARKAQKGGEQHGNQLGLLLGITYCGKCGAKVFRYVSGGKKYRYNYYMCRSVKKMLPSLVKDWNCKQPSLRQEVVEKKVIDSLKSLDFKKIERELKQVENKTKSKISTINNQISKKHNEKQKILDLYQYGTFDVTMLNERMKKIDNEINALTANIANLEGTKSESLINKLETLKTFNWETETTENKILIIKEFVERIELFDDEVIIKYKF

SEQ ID NO: 4655 - protein, 407 aa, synthetic construct
MKPGKIRVCAYARVSTMTEKQQESLTNQQAYYNHFYQNKKDVDFIGVYYDQGISGKLAKRPGFQQMLEDCRAGKIDVIHTKSISRFARNTELLLAVSRELKAIQVDIFFEEQNLHTLSNEGEVMLTVLASYAEEELRNMSENQRWAFQKKFQRGELVINTKRFLGYDKDENGELIINPEEAKIVQRIYNLYLSGMGVHAIAKLFNQEKVPTVDGGRWYSSTITNILKNEKYKGDAILQKYYFAEIKAKQRLNQGQVQQYLITDNHEAIVSREDWEAVQKRLKQNRKANLSINCNRRYPLSGLLKCEHCGSTLKRQKYYKGKVVWVCSKYIREGKAACIGMRVPDSAVQDWSIYEPTVVKEENISGKKHYSYSCQENDTSRAGATHSENPNGGLLPSVHRPRRTAIKL

SEQ ID NO: 4656 - protein, 435 aa, synthetic construct
MAAYCRVSTDQDEQLSSYENQVRYYQDYIRQNPLYQLVDIYADEGISGTNTKKRTGFNRLIADCRKGKVDRIIVKSISRFSRNTLDCLKYVRELKELGIGVTFEKENIDSLDAKGEVLLTILSSLAQDESRSISENATWGIRKKFERGEVRVNTTKFVGYDKGENGNLIINEEQAKIVRRIFRYFLQGETPESIARTLKEEGVPGWNGKVNWYPTTIQRMLQNEKYMGDALLQKTYTVDFLTKKRSENQGQVNQYYIKGNHEAIIDKEEWELVQLEIERRNQFRQDNHINFYIIQCEQNPFTCKVFCEECGGLFGRKNWTTSRGKRPVWQCNNRYKVKGIQGCTNRHIDEETLQQAFFRAVEVLRENKENLQEKWTNFSEEQKLEKYHAAQLKELLDSEQEAFDGRKMCQVLEKIMLGEDGSITVKFLEGTEVNL

SEQ ID NO: 4657 - protein, 464 aa, synthetic construct
MDKKAAIYIRVSTQEQATEGYSIQAQTDRLTKYVEAKDFILYKKYIDAGYSASKLERPAMQELIQDVQSKKVDVVIVYKLDRLSRSQKDTMYLIEDIFRPNDVELISMQESFDTSTAFGSATVGMLSVFAQLERKSISERMITGRVERAKKGFYHTGGQDRPPAGYQFNSDNQLIINEYEAAAIKDLFRLYNDGLGKSSISEYLKKNYPGKNKWLPSSIDRMLKNSLYIGKVKFSGAEYDGIHEPIIDEVTFYKTQKEIARRKQSNTKRYNYVALLGGLCECGICGAKMANRRAVGRKGKVYRYYRCYSKKGSPKHMMKTDGCSSKAQQQFIIDEAVINNLKNIDVEAELKRRSAPQTNTSLISSQIESIDKQINKLIDLFQVESMPLDVISEKIDKLNKEKQSMEKLLERKNRLDKTELQHRFDVLKSFDWDNSSIESKRAVIEMLVQKVIIHDNSIEIILVE

SEQ ID NO: 4658 - protein, 455 aa, synthetic construct
MANEIKRVALYIRVSTEQQAKHGDSLDEQQHTLNEYVRQQGNMKVFKTYIDDGISGQKLYRDEFQKLLDDVKKGRIDTILFTKLDRWFRNLRHYLNIQEILDKNNVTWLAVTQPFFNTETAMGRSFVNQSMGFAELEAQLTSERIRAVFDNKIRKGEVVSGKVPLGYEIKDKHLVPNEKAEIVKEIFQYYLETGSMRATVRHLENHFNMTRDYQSVRQMLTNRKYIGELRDNKNFCEPIIDRDVFERVQLQLSKNIRMNKKRDYMFTGLLVCSECGCNYSATAVISRYVRKDGTTNPNERHLYRCTKNRNNAKKCSNKKGIYETTLEKFLLENIEKQAEELSVKMQQEPDVKKTKNTNDKIKKKIDRLKKAYLNEVISLEEYKKDREELEALLIPEPNNKIAKIDLNSLHNYSTAEFRDGYKQLTISEKSSLWRQVIKNIVVYPDGNLKINFLGY

SEQ ID NO: 4659 - protein, 455 aa, synthetic construct
MANEIKQVALYIRVSTDQQAKHGDSLDEQQHTLNEYVRQQGNMRVFKTYIDDGISGQKLYRDEFQKLLDDVKKGRIDTILFTKLDRWFRNLRHYLNIQEILDKNNVTWLAVTQPFFNTETAMGRSFVNQSMGFAELEAQMTSERIRAVFDNKIRKGEVVSGKVPLGYEIKDKHLVPNEKAEIVKEIFQYYLETGSMRATVRHLENHFSMTRDYQSVRQMLTNRKYIGELRDNKNFCKPIIDRDVFERVQLQLSKNIRMNKKRDYMFTGLLVCSECGCNYSATAVISRYVRKDGTINPNERHLYRCTKNRNNAKKCANKKGIYETTLENFLLENIEKQAEELSVKMQQEPEVKKTKNTNDKIKKKIDRLKKAYLNEVITLEEYKKDRKELEALLIPEMDNKIAKIDLNSLHNYSTAEFRDGYKQLTISEKSSLWRQVIKNIVVYPDGNLKINFIGY

SEQ ID NO: 4660 - protein, 449 aa, synthetic construct
MPKRAALYIRVSTDQQAKHGDSLDAQIATLKDYVSTQDNLTIIDTYIDDGISGQKLYRDEFQRLLEDIKKNRIDIILFTKLDRWFRNLRHYLNIQEILDNSGVTWLAVSQPFFNTDTAYGRSFVNQSMSFAELEAQMASERIKAVFENKIRKGEVVTGSVPFGYKICDKKLMPNENAPIAKDIFKHYSIHNSIRLTVEYLFNEYDITRSSRTIKHMLRNRKYIGEVSGNKNYCPPIVDKETFEKVQNLLDKNISSIAKRTYIFSGLVVCSCCGKKMTGRYRKRKYIKKDGTVMYYTKKVYRCNGNTYKRNKCPNKINIPEEILEEYLLNNIKADAENFEAKQKKIAVSAPEKNNNSKILKKIERLKKAYLNEVISLDEYKKDRKELEQMIVQVKPKETIVFKSNWFNKNIESTYRDFDEEEKRFVWRSVLKNLIVDPHGKITINFLTKN

SEQ ID NO: 4661 - protein, 532 aa, synthetic construct
MFNEKKAVIFVRKSLEEKNESCGLEYQAKMCLNKAKEQGYEVVEVIEEENSAYNKSISERPKLQAMLDMATEKKVNAVICWQQSRLARDMSDIIIISGVLSEAECDIIFSDPNEPNFEQEGIGKLYQIIKSWSNEEEVKQLRIRVKEHLRERAKDGRYVGGTYTGYQWDTMRKRMVEVPEEMEVVKLIFQNYLYEGKSVNRIAKILNKEGYRTKNGKKFYPYSIVSILQTKIYCGYYRWGFTTSVRRGKPEEAEGFDAKVDWIEPIITLEEWNKVQEIMISRSGIKRGQKCRTFTTSSFLLSGKVYCGFCEKKMSAQNGSTKYVDKSGSKKVKEYYKYRCCNSELKHPYKKVFDSKQIDLLVFEQLSSEIRQLNKDKLFNKMQEEVKLVTKSLVEEKQSVKGKIDKVYLAIEKLLQHIERTSDYEMVSIYEGRIREHRLEMKTLQVKLKEIEEKVSELTVNEKDIHNLIEMLNKIHLLKECSQEEKRLYVDQLVERVTLEGDKCKITIKYLLRDKNNSNVIAPINFISNTVI

SEQ ID NO: 4662 - protein, 545 aa, synthetic construct
MHVAIYVRVSTTSQVLKGTSLDSQITLCKKKAQELGYLNSQIIIYREAGFSGEDIDIRPEMTRLREDIKKGDIAKIIIQHPDRLSRELIDKLTVCREFEKYGVEIIFVDTEFQNTPEGWLFFNVMSAIATYELGLIKKRTVRGRLKAVEKGKKVMPMRVPPFGYELVNNQLIINEKEADVVQKIYHWYVYNQLTLREIGEKLYQMGIIPKRKEKKEWSASSIRRILTSEIYIGKYTYNKRKTQKVKGEKTATGNPKKTYTIRAEEDWIIIDVPKIVDESLFHSAQKQRNNNTKNSGNNKNQYLLKGLIKCQCGRTWEGTFYSGRKDKLTGEQQKYFIYRCPNRNPKSYGPKIKKCKTPSIKIEELEEYIWKLIVEVFSHPDSYYVYMEEGQTEFINQYEKEVNIRLNKVKEIEKKREKLKLLFFEELISEQEMKFDFKKMNEQINKLKEELQAFQDKINLENKKENTKKRMDQIIESIQNVLKDKTDNKLTFAEKRNIITQLIDEIHLEFDGEGQVNITINGTLDALAHDIVLSTQSLNDMSYKP

SEQ ID NO: 4663 - protein, 507 aa, synthetic construct
MKRVISYIRFSSEKQAKGDSLRRQSKMVTDWLKAHPEYYLDQDLSFRDLGVSGFTGKHLKGGLGDFLTAIEKGLVKAGDTLLIESLDRLSRQAVDRASELLRNILRSGVDVVTLSDGEHYTSESLKDPLALIKSILIMQRAHEESLRKSERIQAAWNRKKELISEGIKISKRCPAWLKLNDDRKSFSVIPDKVETVKRCFQLRLEGKSIWEIVRTLNDEGHQTLNQYKAGKFGQTSVQDLLKNRSVIGYFTPKGCEEISGYYPAIIDETTFYKVQQLSHYRYGRKPVSDKPLSVNLFKGVIRCSECGHALIITGFSDTRSGIYRCPLRNENRCSAKGLSRKQTDGTLLTLLSRLDRFDSDTTNTIDTLKLHREHISSNIEKLVQLSLEIEDLSAITSKLKQLKGELSQVDADIEKETQRLKSIDVGCLSDCDLTTKAGRIEAQLIIKSAVKEVVLNTAKRRCKVTFHNGRAITLPITENPSEDVTEAIQSLSEVTERGLIDVDEVII

SEQ ID NO: 4664 - protein, 547 aa, synthetic construct
MKLLVTYIRWSTKEQDSGDSLRRQTNLIDAFYSKHKNDYYLLPAHRYVDKGKSGFHQQHKAQGSDFRRMFENVMSGAIPEGSLIVVENFDRFSRADIDTAIDDVRQILRKGVSILTLGDGELYDKSALTDPVKLIKHIIIAERAHQESLVKQKRIAQVWNHKTQLARELKKPMGKQAPGWLELSEDGSHYIVDEDKASLVNIIYDKRLSGMSMFAICKWLNEQGYPTINQRKVRISKTKKPDGNWSALSVKHILTSRSVLGYLPAKISTEDRKTVLREEIEGFYPQIVTDSKFYAVQQLLEETGKGKTSSGDHWLYVNILKGLIRCKCGLVMTPTGIRKPVYQGTYRCNGNKESRCNYGTVSRKLLDTQLCSRLFSKLSQLHDEATDTAKLDELQRRLNTVDGELEKLTETLIQLPNITQIQEALRVKQEEKDELIVQLSREKARVKSVSSLDLSGLDMESVEGRTEAQIIIKRLVKEIVVSGNEKLVDIYLHNGNMIRGFPLDGKDDHTLTLEEATDEMQSLDDMLIFGEPVTRIYPAGDMEEVDA

SEQ ID NO: 4665 - protein, 506 aa, synthetic construct
MRTVITYLRFSSATQGAEGADSTRRQNELFKQWLRKNSDAQVVASFSDEGLSGYKGKHLTGQFGDMLARIESGEFSEGTVLLVEAIDRIGRLEHLETEALMNRIIAHGIEIHTLQDGLIYTRDALSDDLGISIIQRVKSYVAHQESKQKSFRVSQKWKQRAKLALAGEQRLTRNVPGWIDPDTFKCNEHAETVRLIFKLLLDGESLHNIARHLQSNDIKSFSRRKDANGFSVHSVRTVLRSESVIGTLPASQRNDRPAIPNYYEAAIDAATFNKAQEILDKNRKGRTPASDNPLTINIFKGLFRCQCGASVHPTGTKNKYAGVYRCNNHLDGRCDVPPLKRKPFDRWMIDNFLGMIDVGNDGESERKIAALQHEVEIVTARIKKATALLLEMDDIDELKIQLKELNQKRTELQTTINTMKRKTSLSDKGLPQLKDIDLMTKAGRVECQLILSKHLKGLTLGKDSVTVTLQNDTEITIPTNPLPLNDGSPIFEIADKELLDVDAYQL

SEQ ID NO: 4666 - protein, 507 aa, synthetic construct
MKRVISYIRFSSEKQAKGDSLRRQSKMVTDWLKAHPEYYLDESLTFRDLGVSGFTGKHLKGGLGDFLTAIEKGLVKAGDTLLIESLDRLSRQAVDRASELLRNILRSGVDVVTLSDGEHYTRESLKDPLSLIKSILIMQRAHEESLRKSERIQAAWDAKKEAAKAGIKISRRCPAWLKLNDDRKSFSVIPEKVETVKRCFQLRLEGKSIWEIVRTLNDECHQSMNQYKPGKFGQTSVQDLLKNRSVIGYFTPKGREEIAGYFPSIIHETDFYKVQQLSHSRYGRKPVSAKPLSVNLFKGVIRCSECGHALIITGFSDTRNGIYRCPLRNENRCSAKGLSRKQTDGTLLALLSRLDRFDSDTTNTIDTLKLHREHISSNIEKLVQLSLEIEDLSAITSKLRQLKGELSQVDADIEKETQRLKSIDVGCLSDCDLTTKAGRIEAQLIIKSAVKEVVLNTAKRRCKVTFHNGRAITLPITENPSEDVTEAIQSLSEVTERGLIGVDEVII

SEQ ID NO: 4667 - protein, 541 aa, synthetic construct
MPKAISYIRFSSRIQASGDSTKRQNKYINEWLKNNPDYQLDESLRFQDLGISGYSGANAKSGAFGEFLAAVESGVIEAGSVLLVESLDRVSRQDIDTARERLRKILLAGVDVVTLADNSWYKKESLNDPLSLIKAVLIMQRANEESATKSKRLRSAWDAKREEAAKGKIMSRRCVAWLRVSDDMSHFELIPDNVKAVQRVFQLRLEGLPFVRIARQMNEEGFYTLNQRNPVKGAWSHTTIKALLDNRSVIGFKVPSNCTVTKGVKEIPNYYPAVISEEHFYAVQQLKQGAGRRPSSEKPLLTNLFKGVMRCAECGFVTIVNCATEKWHGVYRCSMRYEGRCHAKSINRRLADKALVQGLLYNTNRLSLNRGNGSAIGSLQSELEQLQKQRERLIKLAMLADDTESMAKDLKALNSQIKDAEKAVSEVHQREQSSQLETISHLDLTLKKDRIEAQIIIKRIVKEIRLNTAQKKCDVFLHNGLKLLNFPLDRVVDGAQWLEILPLIDGDEFDFEGFTTKPRHLALEEAPKWVKEMEEQPNQPL

SEQ ID NO: 4668 - protein, 514 aa, synthetic construct
MNNNKALAVLYVRFSTKKQEAGDSQRRQIESAEQWCERNNAELSAQTYEDLGVSAFKEGGKRPALEDLINAIRMGKIPRDSYLLIEDHDRLSRRGWRYTQDLVYQLVQLGVRLVMLKTGVVYDADNINNIADNIVLMISAERAHQESERKSHLIKASREKARRDKKVTGKLPAWVSRDGDGFTFNDKKATIQELINCKLSGKSHQSTAKHLNSLKMTTGNDSAWSASGVRAIVQNHALYGAKAYFDTGKDGRMNKEPIEIVSDIFPALITYEQYQVLNKRQQAGRTSKRGAYSRLLKCGACGGAMTTRTSNYKGKPRAYKMCVKATEGSCNQVERIREPEVYLNEALHYLKYESSSTLYVSRTSEYQQRLETLNATVDLLTKNGNIEALARVYTDIKEVSDLIEESKVLDQNNVDVKVDFSLISSIEDVEQRNIELRKVLREIRFYCIEKVGQTSKWKIVIEQINGIKKYLVLDQKYGFGNTVVDYASLLTQGTEDNREPWEIEDSEEWESYSY

SEQ ID NO: 4669 - protein, 537 aa, synthetic construct
MKQQIYNTALYLRLSRDDELQGESSSITTQRSMLRLYAKEHHLNVIDEYIDDGWSGTNFERPSFQRMIEDIEAGKINCVVTKDLSRLGRNYIMTGQYTELYFPSHNVRYIAIDDGVDSEKGESEIAPFKNIINEWVARDTSRKVKSAFKTKFAEGAYYGAYAPLGYKKHPDIKGKLLVDEETKWIVEKIFSLAYQGYGSAKITKILREEKVPTASWLNFTRYGTFAHIFEGKPESKRYEWTIAHVKAILKSEVYIGNSVHNRQSTVSFKSKKKVRKPESEWFRVENTHEPIIDKEVFYRVQEQIKSRRRQTKEKATPIFAGLVKCADCGWSMRFATNKANKTPYSYYACSYYGQFGKGTCSMHYIRYDVLYQAVLERLQYWAKAVQQDEEKVLNKIQKAGNAERIREKKKKASALKKAENRQNEIDRLFTKMYEDRACEKITERNFIMLSGKYQKEQIELEQQITNLREELSKMEQDMIGAEKWIELIKEYSVPKELTAPLLNAMIEKILIHEATTNEDNERIQEIEIYYRFIGKVD

SEQ ID NO: 4670 - protein, 540 aa, synthetic construct
MKQPYNTTIYNTALYLRLSRDDELQGESGSIQTQRMMLRQYAAEHGLTVVDEYIDDGWSGTNFERPSFQRMIDDIEDGKINCVVTKDLSRLGRNYILTGQYTEIYFPSKGVRYIAINDNVDTINGESELAPFLNILNEMHARQTSKKVKAAMHTRFANGAHYGAYAPLGYVKDPDKKGHLLIDPETRWIVEKIFDLAVHGRGAASITRILVEEKVPTPGWLNYERYGTFANIYAGAPAEKAYAWTIAQVKSILKEETYIGHSVHNKQSNISFKNKKKVRKPQEEWYRVENTHEAIISEEVFQKVQELIASRRRRQKNGTTQIFSGLVKCADCGWSLAYGVNSQNKNPYAHYHCSKYGQGLRQCSMHYIRYDVLYAYVLARLQYWSMMVQKDEDKLLKRLLNASDRERNSAKKKQAAELKKAEKRKAEVDGLFAKMYEDWSAGRITEYNFNMLSEKYQNEQKELETKIRQLHETMEAAVQTAADAEKWIALMKQYVNPVELTAELLNTLIEKITVHEAVKGEDGSREQEVEIYYRFIGKID

SEQ ID NO: 4671 - protein, 588 aa, synthetic construct
MKKEVKVIKGDTTLKRTASGCVERSIKRVAAYCRVSTDTEDQINSYNSQVEHYTEFIQKNNEWTLAGIYADEAITGTQVDRRIDFQRLINDCMNGDIDMIITKSISRFARNTLDTLKYVRKLKEFNVAVFFEEENINTLTMDGELLLTILSSVAQQEVENISANVKKGLRMKMERGEMVGFQGCLGYDYDPETKSISINEKEAEIVRYIFRRYIEGVGGMVISRELEEQGYLSPRGNKRWTETTVLGIIKNEKYKGDLMMGKTYTVDPISKRRLDNFGEQDKFYIENHHEPIISEEDFEKAQGIRLRRSKNRNTVANNGGKREKYSRKYAFSSMLECGFCGYNLSRRNWHSSSEYTKVIWQCVNATKNGKKYCPHSKGIEEEAIEKAFMESYRQVCHNNVEITNEFLKTVEEELKDNSLSKDLKKISNQLDKILKKEKDLVELRLNESISMDIYQDKYNEIAISKEKLLAEKRTLEVTLTDEKALKKRLEGFKKLLESNKYLEEFDRAVFESIVDKIIIGGTNDEGEIDPAMITIIYKTGKKDSQDGRLFKSRRKNAKEVNEKADSKLYPQSSDEVNNLYSYPIDNTL

SEQ ID NO: 4672 - protein, 578 aa, synthetic construct
MTKAYSYVRFSTPAQLKGDSLRRQLGKSEKFAAKHGLSLDTSLQDLGLSAFKGAHRHKGALGSFLAKIEAGEIERGSYLIVENLDRLSREQVLDALTLFLSIINAGVVVVTLNDDMIYSQQSIADRPNDLIISIGGMIKGNRESVDKAERLQEVWQEKRDDLGGRRKLTRQGPGWLDLVPDDPSIPLVGVWRFNECAAVVRQIFELCIAGRGCENITRHLNAQRVPSFKHGDGWSASTVRLLLTDRRTIGELQLHTKVGGPRRPVGDPIKGYFANEDGETVVSEETYYLAQAEISKRWSGARAGKKGKVPNLLVGVARCQCGRKMEFRDKSSRNRSGDKSVFLICSGAQRRRACDNRHHFTYLQTESLILDWVSDITMTDDEASRAGVATIKLAAKIAERDDLKRRVREGLEKWATSTVPVIKDSLMATAERDGKTLERVEVEVMELERLANIGKRSVIDDRRSVVRNLRGNLNGLTGDDLFAMRAKLAAALRQVVNRAEFHPDGSFGITLTGGLKLYTFADGAFVASYDLSEANPDGQDKLLTFPQGETIDALNLHPMTLSGIRETLVAFVKDSPGA

SEQ ID NO: 4673 - protein, 576 aa, synthetic construct
MANHKVHVYTRVSKTYQQEGSGIDEQLSRIKQYIETKSELKNSEITYWQDIGLSAFSNKNIINSELAEFLKLVESGEIGEGHCMVIYSLDRLSRRSSWDEDTIQKVVKSGVVIHDVSTPIVLSKDDQFSKIIMELIISRGNNESKIKSERSTAGWEKRLRDAKEHGKVFTKKLPRWLSTNEAGYILIPEQVELIKRIFTEYINGLTSPMIARRLNEEGIKSTGNSLWRPNTITKLIKDERLRGNLRRNNDRSLIPNIFPVVIDDEIFESANRILAVNAAGTKGRPRENNANREVQNILTGLIRCGKCGSKVTTSKNSRGVRYVVCRNRLNFRLCGQSSKKLELLEKWLIIHIKQIDLQKILSFKKNDISQDELITNEILALDSEANSFITEIEARRRENKTPSFRLENSLTEIEDRILELKKQLKEVEIDEPLVEIDLIDVEKLMDFSNVELRMSLRKYLIQIIEKITFQSIRVYNFVEVVYKKDIYKHILIMDKKMETVIHEVAIEFKDKMINYTTKSFSIYENTEEGTCTISGIYNANVKDYALLANYMALLEGKHWIVEWMFAKENFSIVSSN

SEQ ID NO: 4674 - protein, 543 aa, synthetic construct
MQQLKQKRVGIYVRVSTEMQSTEGYSIEGQINQIKEYCQFHHFEVTDIYADRGISGKSMNRPELQRMLQDAKNGHIDCVMVYKTNRLARNTSDLLKIVEDLHKQNVEFFSLSERMEVNTSSGKLMLQILASFSEFERNTILENIYTGQHQRALEGYYQGNLPLGYNNIPDNKKDLMINQHEANIVKYIFESYAKGHGYRKIANALNHKGYVTKKVNPFSISAVTYILSNPFYIGKIQFAKYKDWNDKRRKGLNDKPVIAEGKHTPIISQSLWDKVQARKKQVSEKPQVHGKGTNILTGLISCPQCSASMSASTTVNTLKDGTKKRIRYYSCSNFRNKGSKVCSANSVRADVIEKYVMDQILEIVKSDKVIKQVVERVNQEHQIDTSALNHDIAYKQQQYDEVQIKLDNLIKTLEDNPDLTSVLKNTIHQYEKQLNDITNQINQLKQQQSAPKTIYDANEIATILRHIFKNIETMDKAQLKALYLTIIDHIDIRKDEHHKKQFYVTLKLNQEIIKQLFHNTPLDEVQLSTSSLLLSQTLYLPIS

SEQ ID NO: 4675 - protein, 507 aa, synthetic construct
MKRVISYIRFSSEKQAKGDSLRRQSKMVTDWLKAHPEYYLDESLTFRDLGVSGFTGKHLKGGLGDFLTAIEKGLVKAGDTLLIESLDRLSRQAVDRASELLRNILRSGVDVVTLSDGEHYTSESLKDPLALIKSILIMQRAHEESLRKSERIQAAWNRKKELISEGIKVSKRCPAWLRLNDDRKSFSVIPEKVETVKRCFQLRLEGKSIWEIVRTLNDEGHQSMSQYKPGKFGQTSVQDLLKNRSVIGYFTPKGREEISGYYPAIVDETTFYKVQQLSHSRYGRKPVSAKPLSVNLFKGVIRCSECGHALIITGFSDTRNGIYRCPLRNENRCSAKGLSRKQTDGTLLALLSRLDRFDSDTTNTIDTLKLHREHISSNIEKLVQLSLEIEDLSAITSKLKQLKGELSQVDADIEKETQRLKSIDVGCLSDCDLTTKAGRIEAQLIIKSAVKEVVLNTAKRRCKVTFHNGKAITLPITENPSEDVTEAIQSLSEVTERGLIDVDVVEI

SEQ ID NO: 4676 - protein, 537 aa, synthetic construct
MKQQIYNTALYLRLSRDDELQGESSSITTQRSMLRLYAKEHHLNVIDEYIDDGWSGTNFDRPSFQRMIEDIVAGKINCVVTKDLSRLGRNYIMTGQYTELYFPSHNVRYIAIDDGVDSEKGESEIAPFKNIINEWVARDTSRKVKSAFKTKFAEGAHYGAYAPLGYKKHPDIKGKLLVDDETKWIIEKIFSLAYQGYGSAKITKQLRAEKVPTASWLNFTRYGTFAHIFEGKPESKRYEWTIAHVKAILKSEVYIGNSVHNMQSTVSFKSKKKVRKPESEWFRVENTHEPIIDKEVFYRVQEQIKSRRRQTKEKATPIFAGLVKCADCGWSMRFGTNKTNKTPYSYYACSYYGQFGKGNCSMHYIRYDVLYQAVLERLQYWAKAVQQDEEKVLNKIQKAGNAERIREKKKKASTLKKAENRQNEIDRLFAKMYEDRACEKITERNFVMLSSKYQKEQIELEQQITSLREELSKMEQDMIGAEKWIELIKEYSVPKELTAPLLNAMIEKILIHEATTNEDNERIQEIEIYYRFIGRVE

SEQ ID NO: 4677 - protein, 527 aa, synthetic construct
MEQQKKVTTIPASRSRFSSTPITEKKKRKVAGYARVSTDHDDQFTSYEAQIDYYTNYIKGRDDWEFVNVYTDEGISGTGIKKRIGFQNMIEDAVAGKIDLIVTKSVSRFARNTVDSLTTIRKLKENGVKCYFEKENIWTFDGKGELLITIMSSIAQEESRSISENCTWGQRKRFADGKVTVPFHRFLGYDRGPNGELIVNQQEAETVRRIYRLFLQGLTYNGIAKQLTNDGIKTPGGKDYWSISTVKSILGNEKYKGDALLQKSYTVDYLTKKTKVNEGEIPQYYVEGDHEAIIAPETFDLVQREMKKRGNGIMYHSGVHVFSSKIRCGQCGSFYGSKVWHSNSKYRKTIWRCNHKYDGGTKCTTPAIDDSEVKTAFLSAVNKLLETKAEVIANGKEMLPLLFKTDELEAERDRLMDKAQVVADAVQQNIAENARTALDQSAYQKRYDDLADRYDKLKARIDELSEKIEETQSRKAGYEDFLKAFENTPDSLTEFSLDAFNGLVDHLTVYAKDDIRFTFRNGQEIRA

SEQ ID NO: 4678 - protein, 597 aa, synthetic construct
MSKITKIEPKIKTLPQRKKAAAYARVSMETERPHHSLSAQVSYYSELIQKNPEWEYAGVYADEGITGTSTMKRPEFQRMMADCEAGKIDIILTKSISRFARNTVDLLETARHLKELGIEVQFEKEHINSLSGDGEVMLTLLASFAQSETESISNNVKWGIRKRMQAGIPYANGHMNVYGYRWENDEMVIVPEEAAIVRRIYQNFLDGKSRQETEKEFAAEGITTRGGYRWVDSNLKVILTNVTYTGNMLYQKEYITDPVTKKVKKNHGELPQYYVENTHPAIISKETFDYVQSEMARRRELGCFGNKALNLNCFSTKIKCGLCGRSFVRSTRRNRAKMSRLGEKYTFWACTSHKKTNCSSCSSGIIREDVLKEECAKVLGIPEFDEDTFSEKVKQITVPETGTMIFEFTDGTTLEHHWYRNAKKESWTDENRQRASQYRRRHPVTRDDITCFTTKIRCEECSCNYRKQTCVMADGHRNAYWKCADKKTHPGKSLREDHLKEIINEVLCIDEFDENIFLERIDHISVRNLTHLTFHFKDGTTAERDYDYRKEGVPWTDESRENRTKAIRDSFTPERRKKISENMKRIRSKKHWSSKRK

SEQ ID NO: 4679 - protein, 626 aa, synthetic construct
MRNEKITPLYERLSRDDELQGESNSISHQKQMLEDFARRNGLPNPTHFTDDGVSGTRFDRPGFLAMMEEVEAGRVEAIVIKDMSRLGRDYLKVGQVMEILRQRGVRLIAINDGVDSLKGDDDFTPFRNIMNEFYARDTSRKIRSVFKSKGMSGKHLTGTVIYGYLWDKKREHWLVDEEAAEVVRRIFSLTMEGYGPYQISKLLSEAKIEIPAVHLARFDEGVNRTKPVKDPYGWGSSTIVNILKKREYLGHTINFKTRKHFKDKKSHYVDESEWTIFENTHEAIIDQETFDNVQRIRANVRRYPDGWGEAHPLTGLMYCADCGGKMYVHRTYNGKRDPQFTCSQYTKVPCGTLCGTQHRIRAEAVLTLITDMLRAIAEYSKNDRAEFIRTVQETQAAQQTADISKKRKRLAAAQKRAGELERLICKIYEDNALGKLPDARYEALDAQYAKEQDALHAEITELEKAVTGYEQSRKSAEKFIALIDKYENFDTLTNTMLNEFVEKILVHERARKGSQDTTQEVEIYFNFVGRYIPPALQPVPLTPEEQEELRKKEERKDRLHQNYLRRKANGKQKEWEERYNAKRKAQVEAAKAAIRAEDMEKGVFIPVSQLPRQEPRKATLPASAAV

SEQ ID NO: 4680 - protein, 687 aa, synthetic construct
MMHEKIGPHHLERKAILYVRQSSAHQVLHNRESSTLQYAMRDRLTALGWSRIETVDDDLGRSAAGGVTRAGFDRMVAEVCLGKVGAVAAREVSRFARNSRDWQQLIEMCRVVDTVLIDQEAVYAPRQGNDRLLLGLKGSLNEYELDLLRQRSLSARYEKARRGELVVTVPVGFLKVGDRIEKDPDRRIQDAIALVFNKVAELGSARQALLWFLEHGLDLPVRRADGDVIWRRPNYATIHRMIANPIYGGAYAYGKSRSVPGYGGRSGIRRKARDEWLALIPDAHEGYVSWERAEEIRKMVSDNVPASRHHGAPKHGDALLAGLFRCKRCGRKLTVRYTGANHNIPRYSCWRGLLDNGEPRCIAFGGLRVDDAIEEALLGVVEPGAIAAAIEAERRMASQRDQVQDALLRDLEAARYSADRAFRQYDAADPENRLVTSELEARWNKALARAGEIEAKIAKHRTVAPQPIPMSASQVAALAGNLRAVWTAPTTDARLKKRIVRALINEVVADLDDGTSEIVLIIHWVGGVHTELRLPKRRRGQRNATPDDIVDAVRQLVLIANDDVIAGVLNRNGLTTGNGNRWTRERVTALRSYRKIPVFRPQVDGVEPWLNLGGAAKLLGITPKTLRLAAEAGQIEGAHPLPDGPWIFSRSKLATPQAHQILDRARQNSRHPTGSHPDQENLFPSTT

SEQ ID NO: 4681 - protein, 537 aa, synthetic construct
MKQQIYNTALYLRLSRDDELQGESSSITTQRSMLRLYAKEHHLNVIDEYIDDGWSGTNFDRPSFQRMIEDIEAGKINCVVTKDLSRLGRNYIMTGQYTELYFPSHNVRYIAIDDGVDSEKGESEITPFKNIINEWVARDTSRKVKSAFKTKFAEGAHYGAYAPLGYKKHPDIKGKLLVDDETKWIIEKIFSLAYQGYGSAKITKQLRAEKVPTASWLNFTRYGTFAHIFEGKPESKRYEWTIAHVKAILKSEVYIGNSVHNMQSTVSFKSKKKVRKPESEWFRVENTHEPIIDKEVFYRVQEQIKSRRRQTKEKATPIFAGLVKCADCGWSMRFGTNKTNKTPYSYYACSYYGQFGKGNCSMHYIRYDVLYQAVLERLQYWAKAVQQDEEKVLNKIQKAGNAERIREKKKKASTLKKAENRQNEIDRLFAKMYEDRACEKITERNFVMLSSKYQKEQIELEQQITSLREELSKMEQDMIGAEKWIELIKEYSVPKELTAPLLNAMIEKILIHEATTNEDNERIQEIEIYYRFIGRVE

SEQ ID NO: 4682 - protein, 507 aa, synthetic construct
MKRVISYIRFSSERQAKGDSLRRQSKMVNDWLKAHPEYYLDQDLSFRDLGVSGFTGKHLKGGLGDFLTAIEKGLVKAGDTLLIESLDRLSRQAVDRASELLRNILRSGVDIVTLSDGEHYTSESLKDPLALIKSILIMQRAHEESLRKSERIQAAWDAKKEAAKAGIKVSKRCPAWLRLNDDRKSFSVIPEKVETVKRCFQLRLEGKSIWEIVRTLNAEGHRSMNQYKPGKFGQTSVQDLLKNRSVIGYFTPKGCEEISGYYPAIIDETTFYKVQQLSHSRYGKRSVSDKPLSVNLFKGVIRCSECGHALIITGFSDTRNGIYRCPLRNENRCNAKGLSRKQTDGTLLALLSRLDRFDSDMTNVIDALKLHREHISNNIEKLVQLSLEIEDLSAITIKLKQLKGELSQVDADIEKETQRLKSIDVGCLSDCDLTTKAGRIEAQLIIKSAVKEVVLNAAKRRCKVTFHNSKSITLPITENPSEDVTEAIQSLSEVTERGLIDVDEVII

SEQ ID NO: 4683 - protein, 537 aa, synthetic construct
MKQQIYNTALYLRLSRDDELQGESSSITTQRSMLRLYAKEHHLNVIDEYIDDGWSGTNFERPSFQRMIEDIEAGKINCVVTKDLSRLGRNYIMTGQYTELYFPSHNVRYIAIDDGVDSEKGESEIAPFKNIINEWVARDTSRKVKSAFKTKFAEGAYYGAYAPLGYKKHPDIKGKLLVDEETKWIVEKIFSLAYQGYGSAKITKVLREEKVPTASWLNFTRYGTFAHIFEGKPDSKRYEWTIAHVKAILKSEVYIGNSVHNRQSTISFKSKKKVRKPESEWFRVENTHEPIIDKEVFYRVQEQIKSRRRQTKEKATPIFAGLVKCADCGWSMRFATNKANKTPYSYYACSYYGQFGKGTCSMHYIRYDVLYQAVLERLQYWTKAVQQDEEKVVNKIQKAGNAERIRAKKKKASALKKAENRQNEIDRLFAKMYEDRACEKITERNFIMLSGKYQKEQIELEQQITNLREELSKMEQDMIGAEKWIELIKEYSVPKELTAPLLNAMIEKILIHEATTNEDNERIQEIEIYYRFIGKVD

SEQ ID NO: 4684 - protein, 465 aa, synthetic construct
MAREVVHIPARPQVVGTRTMPEKKIRLAAYCRVSSEQDEQLNSFENQVSYYKEYISSHPDYELAGIYADEGISGTSTKRRDEFNRMIADCEAGLIDMVITKSISRFARNTQDCLMYSRRLKDLGIGIRFEKENINTMDSTGELLFTILSSLAQDESRSISENCQWGIRSLFKRGIHHLNTNRFYGYDSDENGKLIINPEQAKVVKWIYESFMEGINPDVIVKILNEKEVPTCMGKSKWTCNQIKSILRNEKHMGDAVLQKTYTPDYLTHKSVKNEGQLPQYYIKEDHPPIVSQQLWEAVQLELDRREAFMKKHFLTSMGQYTDVNPLSHRIICGICGHTFSRRTITRLEGRIKVWQCGQHYAKKGEHLCDGRTIREEDLYKAFQLAWDHLVEEGDNKAKDWKKKMAEGNALEAYRAEQFLRLTADGGRIKEGKPLVSAVLDHIVFEKSGDLTIYFLDGSQVCVEP

SEQ ID NO: 4685 - protein, 537 aa, synthetic construct
MQIKVIQPSAERELERKKVCAYVRVSTDSDEQEDSYDNQMRYYKDKIESNPDWNFVGIYSDLGISGYKEKRPGFLNMIQEARNGGIDLILVKSVSRFARNTETVLKYSRELKRLGVGIYFELQKINTLSGEGELLLTILAAFAQAESESDSGNVSMSIRRKFEKGELNFPISKIYGYTEDADGNPIIDEEKAKIVRLIFDLAEKGIWVTKISDYLNKKQIPGIAAEKWNYGQVAKMLRQEAYMGDRILQKTYRDSRRRTRKNKGQVDQWYVKDTHPAIVTREQWYRVQDILLERNKELYDATPISEEKNLSTHSTYPLSGMLYCPYCGRVLMHRWEGKKRYENWVCGLHRKVSKDACPGICIPNRIASSWGELKEPMTVMKYTDEYGMERFTAIPKVEYEASEDCPYEVIKPEPKPERPKKPTYKKAPKPETPRYTRNVYLLSGKLFCPNCGKVLTHKWNKGVEYWVCSTNRNKHRAENFVRCKGMYFPAEAAKDWGEITEPVTVIAYKNEYGHRLYTAMPKEEYERSQDCPYRKED

SEQ ID NO: 4686 - protein, 452 aa, synthetic construct
MKAAIYIRVSTQEQIENYSIQAQTEKLTALCRSKDWDVYDIFIDGGYSGSNMNRPALNEMLSKLHEIDAVVVYRLDRLSRSQRDTITLIEEYFLKNNVEFVSLSETLDTSSPFGRAMIGILSVFAQLERETIRDRMVMGKIKRIEAGLPLTTAKGRTFGYDVIDTKLYINEEEAKQLRLIYDIFEEEQSITFLQKRLKKLGFKVRTYNRYNNWLTNDLYCGYVSYKDKVHVKGIHEPIISEEQFYRVQEIFARMGKNPNMNRDSASLLNNLVVCGKCGLGFVHRRKDTVSRGKKYHYRYYSCKTYKHTHELEKCGNKIWRADKLEELIIDRVNNYSFASRNVDKEDELDSLNEKLKTEHAKKKRLFDLYISGSYEVSELDGMMADIDAQINYYEAQIEANEELKKNKKIQENLADLATVDFDSLEFREKQLYLKSLINKIYIDGEQVTIEWL

SEQ ID NO: 4687 - protein, 492 aa, synthetic construct
MKQQAKRALVVVRLSRVTDETTSPLRQREACFELCEQRGYEVIGTAEDLDISAGKTSPFDRPQLGDWLTNRRGEFDVLVTFRMDRIVRRLLDLADLIRWCQSNSVSLVSATETFLDLDSAFGDIIALLVAKVAEMELAAISERNRSAAQHNMRQGKYRGGPPPWGYTTEKVDGDWRFVQDEEQVTVINEVVRRVLDGEPLRQVAADLTDRAVLTPRDRVNQLKGRPIHGYRWHSAKLREMLTSKSLLGHAVTANGSIRNDDGSPIIRATPILERDVFEQVQVELAGRENRKEPTKRSSSLLLRVLYCGVCGKPAYKLKGGKGRQDRYRCASAQYKSTCGNGMVLVADANEVLTDAVMFELGDKYRRDRVWDAGSDYAAELAEIDDTLADLTDQLGTGAFRKGTRQRERLDARIADLAERQAQLAAQATRPAGWTWVPTTELFKDWWKSQTVEQLNLWLRSMDIQMWWNHQGIQTDMLHLEKMAEQWSNPAIG

SEQ ID NO: 4688 - protein, 514 aa, synthetic construct
MRRKKVKGGNRLVAYYRYSGGSGQTEQSIEGQRRDCVNYAKLHGLTIVHEYIDRHISGKTDDRAAFQQMMNDGDKGAFDMVICWKTDRFARNRYDSAVYKKRLRDNGIEILYAAESNVEGAEGIIIEGLMEALAEYYSAELAEKMRRGMRESALKGQAINRCRSLGLTTDENKKYVIDEKTAPTVRFIFEHYAAGESSASIVEQLNAKGLRTSQGNPFNKCSIPRIIQNEMYRGVYTSKAYNVRIEGAIPAIIDDDLWKRAQAMMKTNRQLKAKYEPKAEYLLSGKLFCAKCGCTMKGVSGHSGGNDEVYRYYACSNPQCRKRNIPKDDLEGKVIRSICDHLLQPETMELLAETMVDVQKADMEKPNAERDVLEQELWDVRRRSKNIMDAIETGSANPQLVARLDDLTQQENTLTYQLSTMEAEKPLLFTKEQYLFLLQQFYAQPTEQDDAYKRRLINTFVTNIEVSDSELLIYFNVSEETENKNKNASQSNFDKSSSTEKRLVRVARIELTAS

SEQ ID NO: 4689 - protein, 526 aa, synthetic construct
MALVKAAIYARYSSDNQRDESIDAQVRACEEHAQRNGMQIVKIYIDRAKSATSDKRPEFQRMIEESSTEAFSTLIIHKLDRFSRDKYDSAKYKRKLKQNGVRLISVTENLDGSPESIILESVIEGMAEYYSKNLAREVMKGLTENALKCQHTGGIPPLGFDVDRVTKKYIINEREAETVRKIFDLYLAGYGYKPIIDQLNEGQHVTKLGNPFGKNSIHDLLKNEKYCGVYTFNRSTSKNYDGKRNNHMSKVDEDVIRIPGGVPAIVSQEVFDKVQEKMNKNKHQPGAYKAKETYLLSGLIVCGECLKREGKTHSMMGNVKHSGRAKTKHVTYRCANRDRTKQCDNKELRREYIENYVLTQLEKNIFSEKAIPFLVKKLNDYQDTVCSDQAKEITRLNDTLKELNGQINNIVDAITNGFAHSSLVEKLTVLEQQKAAIEITIMERNRKQPKDIVTEDMVRSLFTMFRQFVAEKNILEVKKFISNYIEKVIIYRDHVEVVFFFSWGDICKAEAYHFSSVVTRSKLLAG

SEQ ID NO: 4690 - protein, 539 aa, synthetic construct
MHGRRAAIYARYSTELQDGRSIDDQVALCREHAARSGLTVVATYDDRAKTSASIFGRDGLARMMEQARARQFDVVIVEALDRLSRDQEDLAHIHKRLSFARIDILTVHEGVADSVSVGLRGLMGTMFLEALKAKTRRGLAGVIRDGRHAGGQTYGYRGVPGEPGKREIVAHEAEIIREIFAAYVEGKSPRTIAGELNARGIAAPRGPKWNASTLNGNPQRGYGILRNPMYDGRLVWNRVTMVRDPDTGRRVNRENPLDARQEVEAEHLRIVPRPLFEAAVRRHAQQAEAVRTGKITKAPPRPFSGLIRCACCGGGMSIHDRCGEAIRIRCSTANESGSCENKARYRLEKIEEAIFLRLRAQLDRPDYLKEFVRVYAEERRRLTETARRDRARLERAAADSRARYMRLVDMMARGLIEGEEADAQVLQAKQAAEIARSELEIASSEDNVVELHPQATAAYTRAIADLSAALQRGDGTFDATSVEALRRIITEITVHPKDEAGDVLVEVRGNMERLLGIGQQIVGGPMVARGGLEPPTPRL

SEQ ID NO: 4691 - protein, 515 aa, synthetic construct
MSKIADLYIRVSTDEQAEKGFSQRNQEEMLRKYCGINRIQIRNVIYEDHSAKTFNRPQWKKFLADIKKRKHKISLVLFMKWDRFSRNAGDAYQMINQLRALGVEPQAIEQPLDLSVPENKMMLAFYLAAPEVENDRRALNTFQGLRRGKKEGRHMGMAPYGYANKVTEDGKKYIAIVPDKAANVVWVYEQIAKNIFSTESIYQTAKEKGMGISKNNMWLIIRNPLYCGMIVVPKYRDEEERLVKGQHDPIISQDLFYKVQDILNSKARTYRPKIKTIENFPLRGFFVCPKCGQKLGGSKCRGRSRDYFYYHCDKVCKWRVNSEMANSVFKGHLNKFKPLAEVRKLYSAVLLEAYREHTGLVINEKKKSLEQIGVYEKKLAVARNLLVTEKIDADDYHLMKTEYNAEISRLENEIGNVDEDRADIESLMNTGLQNLIKLGEAFGDGSLVDSREIIGLIFPENFTFQNNKIQTARVNEMFKCIYLVNNRLRAKKNGTKDDIFLLSRVVTSTGNKHML

SEQ ID NO: 4692 - protein, 556 aa, synthetic construct
MAMMNEMEYRTIGSALAGGYRAAVYCRLSKDDDLQGESASIANQRDMLEKYCEKQGWEVVAVYQDDGFTGLNMERPDLQRMLRAIERRQINLVITKDLSRLGRNYLQTGHLIEDFFPRNGVRYIAMNDGIDTLRDNNDIAPFKNILNEMYSKDISKKVHSSYLLKAQKGQFTGCLAPFGYRKDPEDKNHLLIDEETAPIVRLIFGYALNGHGPNYIRRRLEEEKIPCPTWWNRERGLRNTRTKWEKKDPENGRYMWDFSVIKDLLMNPVYTGAIASQKKDYRFKIGTIGEKKPEDWIVVEGQHEPLIDRMSFDIVQNKLKSRQRPGQTNEISLFAGLIKCGECGKSLTVRYTNAKHPQQIYSCKTYNAFGKNHCTQHRIDYDTLYSHVLRKIRECARAALMDGKAVADRLTNTCEAEQREQREAMERSLTRDEERIEVLDKMVMRLYEDMIAGRISEQNFNTMLEKTQTEQTELKTKVSEGRKRLSDEVQLANDAKQWVEAIQEYANITELDAATLNRLIKEIVVHERIDEDKTRHISIEIHFNLKPIPEVEQVTA

SEQ ID NO: 4693 - protein, 354 aa, synthetic construct
MNKIIPYGYLRVSSLEQVRTGGGLDTQDEEVRRYITQNSEKFDIDRMVVMSDAGMSAYTGSNIKEGELGRFLADVNAGLIPTGSALICYSVDRLSRQNPWVGTHLISTLIGAGIEIHSVAENQILRSDDPVGAIMSTIYLMRANNESVIKSERAKKGYEKRLNESITNKKVLTRQMPRWLFDCDGKYAIDPNMQNVINFTFDSYIAGQSTGFIAKELNNRGLMYGNTSWRGSYVAKLIRDERLIGKHIRYSKQIKGVKRVVIETIPNFYPVVVDVEKFFLANNMLTSVAKNIRGRTRVTYGDDSILRNLFNGVIKCGVCGGDTSVVQNTRKKLSMGRLHIFHIKLFFVVELAMN

SEQ ID NO: 4694 - protein, 547 aa, synthetic construct
MKLLVPYIRWSTKEQDSGDSLRRQTNLIDAFYSKHKEEYYLLPAHRYVDKGKSGFHQQHKAQGSDFKRMFENVMSGAIPEGSLIVVENFDRFSRADIDTAIDDVRQILRKGVSILTLGDGELYDKSALTDPVKLIKHIIIAERAHQESLVKQKRIAQVWNHKTQLARELKKPMGKQAPGWLELSEDGSHYIVDEDKASLVNIIYDKRLSGMSMFAICKWLNEQGYPTINQRKVRISKTKKPDGNWSALSVKHILTSRSVLGYLPAKISTEDRKTVLREEIESFYPQIVTDSKFYAVQQLLEETGKGKTSSGEHWLYVNILKGLIRCKCGLVMTPTGIRKPVYQGTYRCNGNKESRCNYGTVSRKLLDTQLCSRLFSKLSQLHDEATDTAKLDELQRRLNTVDSELEKLTETLIQLPNITQIQEALRIKQEEKDELIVQLSREKARVKSVSSLDLSGLDMESVEGRTEAQIIIKRLVKEIVVSGNEKLVDIYLHNGNMIRGFPLDGKDDHTLTLEEATDEMQSLDDMLIFGEPVTRIYPAGDMEEVDA

SEQ ID NO: 4695 - protein, 537 aa, synthetic construct
MKQQIYNTALYLRLSRDDELQGESSSITTQRSMLRLYAKEHHLNVIDEYIDDGWSGTNFERPSFQRMIEDIEAGKINCVVTKDLSRLGRNYIMTGQYTELYFPSHNVRYIAIDDGVDSEKGESEIAPFKNIINEWVARDTSRKVKSAFKTKFAEGAYYGAYAPLGYKKHPDIKGKLLIDDETKWIIEKIFSLAYQGYGSAKITKILREEKVPTASWLNFTRYGTFAHIFEGKPESKRYEWTIAHVKAILKSEVYIGNSVHNRQSTISFKSKKKVRKPESEWFRVENTHEPIIDKEVFYRVQEQIKSRRRQTKEKATPIFAGLVKCADCGWSMRFATNKANKTPYSYYACSYYGQFGKGNCSMHYIRYDVLYQAVLERLQYWAKAVQQDEEKVLHKIQKVGNAERIREKKKKASALRKAENRQNEIDRLFAKMYEDRACEKITERNFIMLSGKYQKEQIELEQQITNLREELSKMEQDMIGAEKWIELIKEYSVPKELTAPLLNAMIEKILIHEATTNEENERIQEIEIYYRFIGKVD

SEQ ID NO: 4696 - protein, 537 aa, synthetic construct
MKQQIYNTALYLRLSRDDELQGESSSITTQRSMLRLYAKEHHLNVIDEYIDDGWSGTNFDRPSFQRMIEDIEAGKINCVVTKDLSRLGRNYIMTGQYTELYFPSHNVRYIAIDDGVDSEKGESEIAPFKNIINEWVARDTSRKVKSAFKTKFAEGAHYGAYAPLGYKKHPDIKGKLLVDDETKWIIEKIFYLAYQGYGSAKITKQLRAEKVPTASWLNFTRYGTFAHIFEGKPESKRYEWTIAHVKAILKSEVYIGNSVHNMQSTVSFKSKKKVRKPESEWFRVENTHEPIIDKEVFYRVQEQIKSRRRQTKEKATPIFAGLVKCADCGWSMRFGTNKTNKTPYSYYACSYYGQFGKGNCSMHYIRYDVLYQAVLERLQYWAKAVQQDEEKVLNKIQKAGNAERIREKKKKASTLKKAENRQNEIDRLFAKMYEDRACEKITERNFVMLSSKYQKEQIELEQQITSLREELSKMEQDMIGAEKWIELIKEYSVPKELTAPLLNAMIEKILIHEATTNEDNERIQEIEIYYRFIGRVE

SEQ ID NO: 4697 - protein, 529 aa, synthetic construct
MKQQIYNTALYLRLSRDDELQGESSSITTQRSMLRLYAKEHHLNVIDEYIDDGWSGTNFDRPSFQRMIEDIEAGKINCVVTKDLSRLGRNYIMTGQYTELYFPSHNVRYIAIDDGVDSEKGESEIAPFKNIINEWVARDTSRKVKSAFKTKFAEGAHYGAYAPLGYKKHPDIKGKLLVDDETKWIIEKIFSLAYQGYGSAKITKQLRAEKVPTASWLNFTRYGTFAHIFEGKPESKRYEWTIAHVKAILKSEVYIGNSVHNMQSTVSFKSKKKVRKPESEWFRVENTHEPIIDKEVFYRVQEQIKSRRRQTKEKATPIFAGLVKCADCGWSMRFGTNKTNKTPYSYYACSYYGQFGKGNCSMHYIRYDVLYQAVLERLQYWAKAVQQDEEKVLNKIQKAGNAERIREKKKKASTLKKAENRQNEIDRLFAKMYEDRACEKITERNFVMLSSKYQKEQIELEQQITSLREELSKMEQDMIGAEKWIELIKEYSVPKELTAPLLNAMIEKILIHEATTNEDNERIQEIEIY

SEQ ID NO: 4698 - protein, 602 aa, synthetic construct
MKKNNVEIIKADSLVRRRGDNFERESKRVAAYCRVSSDSEDQKNSYESQVRHYKDYISQRSDWELAGIYADEGISGTQVGKRQDFQRLINDCVNGEIDYIVTKAIARFARNTLDTLKYVRMLKDMQIGVYFEEENIDTLTMDGELLLTILSSVAQQEVENTSAHVKKGLKMKMQRGELIGFQGCLGYDYDVETKQLSINKKEAKIVRYIFERYLEGIGGKVIARELDELGYKSPRGLDHWNDTTVLGIIKNEKYKGDILMGKTFTVDPISKRRLSNFGEEDKYYIKDNHEPIISKEDFEKAQEIRLRRAGNKKTAANVNGKRERYSKMYAFSSMLECGFCGSILSRRSWHCRSDYRKVVWHCVTSIKKGKKFCKHSKGLEELAIEGAFMEAYRQLYHSNENLMTDLLETIESELNDNSLNKELKRITNKLRTLLKKEENLVNLRLEGKISDTIYNEKYNEISSEKEFLAEEKVNIETTLKSEIDVKKRLTEFKHLLSSQKMLTEFDRAVFESIVEKIIVGGVNSDGEIDPAMLTIIFKTGETQNKDGKQFKSKRKNAKLETDKLCPQNSDEDKKLYSQGTDYTRRVCCSARKSLETFERKGY

SEQ ID NO: 4699 - protein, 479 aa, synthetic construct
MNKVAIYVRVSTKGQAEEGYSIDEQIAMLTSYCSIHKWTVYETYVDAGFSGATIDRPALSKLSRDAQKKRFNTVLVYDLKRLGRSQRNNIAFIEDILEKNDIGFISLTENFDTSTPLGKAMVGILSAFGQLDRDTIRERMMMGKIGRAKSGKPMMTSTIAFGYTYDRLTSTLNINQAEAIVVKTIFKEYLGGRSLTKLRDYLNENNILRNGKLWNYQGISRILRNPVYMGMIRFRGEVYQGNHEPIIDAETFETTQAELKKRQIETYQFNKNSRPFRAKYMLSGMIRCGYCGSPLEIILGTKRKDGSRYRRYQCVNRFPRTTKGITVYNDGKKCNSKYYEKEDIEVFVLGQVRLLQLNQAKLDKMFETVNEIDVEGIEKQIDQLSNKLKRLNDLYLNDMIDLDELKRQSYALLTQKELLEKELENNPDIQKKIDKENFQRLLDTKDVTTLDYDSQKHILNRLINKVFVKDGHVKIEWKI

SEQ ID NO: 4700 - protein, 411 aa, synthetic construct
MRTVRRIQPIKSPCKPRFKVAAYARVSDSRLHHSLSTQISYYNRLIQAHPDWELVGIYYDEGISGKEQSNRQGFQNLIKDCDDGKIDRIITKSIARFGRNTVELLTTVRQLRLKNIGVTFEKENIDSLSSEGELMLTLLASVAQEESQNLSENIRWRIQKKFEKGIPHTPQDMYGYRWDGEQYQIEPNEARVIRKVFKWYLDGDSVQQIVDKLNQEQVLTRFGNPFTVASIREFFKQEAYFGRLVLQKTYRESFSRNPKRNKGQRNKYIIENAHEPIVTKEYFDLVLHEKERRYQLMHQENHLNKGIFRDKISCSECGCLMIVKVDSKQVNKTVRYYCRTRNRFGASSCSCRTLGEKRLLASFKSKLGIVPDKEWVDNNIKHIDYDFGHRIIWVTPVKGKKYPIEIREGRY

SEQ ID NO: 4701 - protein, 520 aa, synthetic construct
MKKVITIQATPSIIRSSSDDFSLQKRRVAGYARVSTDHEDQATSYESQMRYYSEYINGRDDWEFVKMYSDEGISGTNTKLRTGFKAMVEDALNGKIDLIITKSVSRFARNTVDSLTTVRQLKEVGVEIYFEKENIWTLDSKGELLITIMSSLAQEESRSISENVTWGLRKQFAEGKVHFPYTNVLGFKAGEDGAIVVDQDEAKTVRYIFQQALIGKSPYHIAKDLTEQAIPSPSGKSHWNATTIKRMLRNEKYKGDALLQKTYTIDFLTKKKNINRGELPQYYVENNHEAIVDRETFDAVQQVLDNKGRKSSTTIFSSKLVCGDCGHFFGSKVWHSTSKYRRVIYRCNEKYNGSSKCSTPHVTEEEVKQWFVLAVNQVIDNRFEVIDNLSVLLSIGSLEVIDEQIKILETEAEVVSQLVANLVSENAIIRQDQDKYLKKYNQLTTKYEGIVQDIESLELQRMQKSKRNKELRVFINALEKQEGLLLEFDEFLWETMIEHVTVAGAKEISIKFKNGQIIRV

SEQ ID NO: 4702 - protein, 476 aa, synthetic construct
MDRNKVAIYVRVSTQGQANEGYSLDEQVDLLTNYCKLKNWDIYDVYVDPGFSGKNMDRPEIERLSIDAKKKVFDIVLIYDLKRFGRSQRENIVLVEDVLQKNDIRLMSFTENFDTSTPVGKMVFGILSAHAELDRGNIAERMLMGKIGRAKAGKAMSWGMPPFAYDYNKETGDLELDEVKAPIVEMIFSDYLSGSSVNQIVQKLNSMSYHGKNHNWRHHAVTVIIDNPVYCGMMKYMGQTYQARHTPIIDKKTFELTQIERKKRLSKYHDADWVGPFQRKYIGSKVCYCGLCGANLKSEKDKKNKQTGIRPISFYCPNTRSRGAGGCTNPRFKQSVLEGYILNEVAKLQQNPERLKDIKPAEDNELHNKIATYEKKIKQNSSKLSKLNDLYLNDLISLDDLKKQSKSLLNENEYLEEQIELLSATTREDELRKKIDTFLAFPDILTADYDTQKQAVELVISRVEATKEGIDIFFNF

SEQ ID NO: 4703 - protein, 521 aa, synthetic construct
MKKVITIEPAKQVSHKVDLPSFTKRRVAGYARVSTDHEDQTTSYEAQMKYYTDYINNRSDWEFVKMYSDEGISGTNTKARIGFQRMVEDALDGKIDLILTKSVSRFARNTVDSLSTVRKLKEAGVEIYFEKENIWTFDSKGELLITIMSSLAQEESRSISENVTWGRRRQLAEGQVTFSYSQVLGFKKSDTGGFEIDHEEAKIVRYIFHQVLLGNNPNKIARELTAQGIPTPQGKRQWSYGTVKRMLRNEKYKGDALLQKSFTTDFLTKSTKPNEGELPQYYVENNHEAIIKREVFDLVQVELDKLEKKRQTSNIFTGRLFCGDCGSAFGSKVWHSTSKYKRTIYQCNAKYKGEHKCRTPHVTEEEIKGWFLSAINQLLSNRDEIIANTELLIDMAKDTSPLESRIDDLEHHLETIRQDIEDLVDRNARKAQNQDLYQEQYDTLVTAYQEIQKELQEATLSLEEQKSRSISLDGFIQELKQQDSLITDFNQELWQTSVERLDIKVDKHISLTFKNGVRIDL

SEQ ID NO: 4704 - protein, 402 aa, synthetic construct
MKRIKTIQAQKLTAIKKLKVAAYTRVSHTSLLQSLSNQVSHYSQLIQSNPEWSYVGVYSDSAISGRCQAHRRDFQNLLEDSRKGKIDLILTKSISRFGRNTVELLETVRELKRLGISVRFEKENIDTLTAEGELLLTLLASMAQEESQSISQNIRWRVKKCFEEGKPYIPQDIFGYRWSGEEYVIEPHEASIVRQVFEWYMEGLSAPKIAKRLDARGERTRLGNRFTKRVIYNMFDQEAYYGRLILQKTFRDNFGSRSIPNDGQMAKYIVENAHEAIVTPEFFQQVNQEKKRRAKRRPSKHDALAKLQGKVYCEHCGLDMLLSVETKSNQEKRVRYYCRTRDAKGVEACLGRTITEEQLFQAFGETLKAEDIHHISFNSVTNEAKATYRNGEEKHIIIQKGR

SEQ ID NO: 4705 - protein, 520 aa, synthetic construct
MKKVITIDATPSITRSSSDDFTLKKRRVAGYARVSTDHEDQATSYESQMRYYSEYINGRDDWEFVKMYSDEGISGTNTKLRTGFKAMVEDALNGKIDLIITKSVSRFARNTVDSLTTVRQLKEVGVEIYFEKENIWTLDSKGELLITIMSSLAQEESRSISENVTWGLRKQFAEGKVHFPYTNVLGFKAGEDGAIVVDQDEAKTVRYIFQQALIGKSPYHIAKDLTEQGIPSPSGKSHWNATTIKRMLRNEKYKGDALLQKTYTIDFLTKKKNINRGELPQYYVENNHEAIVDRETFDAVQQVLDNKGRKSSTTIFSSKLVCGDCGHFFGSKVWHSTSKYRRVIYRCNQKYKGTERCSTPHVTEDEVKQWFISAVNQMLENKYEVLENIDILIQMVNTDSIDERISSLETETEVVGQMVSNLIMGNARMSQNQDEYQIKYRQISDKYESLIKEIENLEVQKFSIAKRHKELLDFHNVLRMQDGLLTAFDEFLWESIVESVKINSGKEIYIQFKNGTVATL

SEQ ID NO: 4706 - protein, 411 aa, synthetic construct
MRTVRKIQPIKSPCKPRFKVAAYARVSDSRLHHSLSTQISYYNRLIQAHPDWELVGIYYDEGISGKEQSNRQGFLNLIKDCEDGKIDRIITKSIARFGRNTVELLTTVRQLRLKHIGVTFEKENIDSLSSEGELMLTLLASVAQEESQNLSENIRWRIQKKFEKGIPHTPQDMYGYRWDGEQYQIEPNEAKVIRKVFKWYLDGDSVQQIVDKLKQEQVLTRLGNPFTVASIREFFKQEAYFGRLVLQKTYREAFSRNPKRNKGQRNKYIIENAHEPIVTKEYFDLVLHEKERRYQFMSQESHLNKGIFRDKISCSECGYLMIVKVDSKQVNKTVRYYCRTRNRFGASSCSCRTLGEKRLLASFKSKLGIVPDKEWVENNIKHIEYDFGHRIIRVTPVKGRKYPIEIREGRY

SEQ ID NO: 4707 - protein, 633 aa, synthetic construct
MAGIRTENKIYEVGIYCRLSKDDGTDNESASIATQKSILTDYVKRQGWHLAKTYVDDGYSGTNFQRPSFQNMIKDIENGLINCVITKDLSRLGRNYLDCGLYLEVFFPEHNVRYIAVNDGVDTLNKSAMDITPFRNILNEMYSADVSVKIKSAYRARFQQGKFMGTTAPYGYVKDPADHNHLLIDDKVAHVVREIFDLALAGNGIAKIRKHINKQHILRPAAYAVEQGATGYERYFEDNEENRYIWSENSVRGILRSPIYAGNLAGYKRIAANMKSKKRPSKLPEEWEVIPDTHEGIVTQEEFDTVQQLMTSRRREQNAGGFENIFSGVIKCADCGYAMRAASANRRKRPDIIDCVQYTCNNYGRYGNVMCTAHSIEARDLFNAVLADINRFADMAVNDEKAVRAIERRLTETDQSRAKSLEKEKKKLNKRLAELDRLFSSLYEDKVMERITERNFEMMSGKYQKEQLEIEARLKEVTETLNDSYEKSQGVRDFLSLIRNYQGLKELDATIINALIDKILVSEREKLADGTVRQEIKIYYKFIGFVGELHITPTKRWTALKPKNCTVCGVEYVPSSGISKYCPACAKRIQREKSNESKRRSRERNRRACIELSAKNDRLKKEANAVWYLANFN

SEQ ID NO: 4708 - protein, 413 aa, synthetic construct
MSVKKIRVNKQKHKQRICAYIRVSTTNGSQLESLENQKHYFENLYSNRDDIDFVGVYHDRGISGSKDNRPNFQAMIENCRKGMIDIIHTKSIARFARNTVTVLEISRELKAIGVDIFFEEQNIHTLSSEGEVMLSVLASIAEDELRSMSGNQRWAFQKKFQRGELVINTKRFLGYDIDENGELIINPEEALIVRKIFALYLEGYGTHRIAKLLNEKGVATVTGAKWHDTTIRQMLSNEKYNGSVLLQKYFHDGVNGPKKLNQGELEQYLIEDNHEAIISMEDWQAVQVKLNSRRWQQGRNKTYKFTGLLKCQHCGSTLKRQVSYKKKIVWCCSKYIKEGKAACQGMRVPEVDISNWTVTSPVKVIERDRDGEKYYSYSGQESADQRSTSGQKESQCSRILPSVHRPRRTAIKL

SEQ ID NO: 4709 - protein, 484 aa, synthetic construct
MNKVAIYVRVSTTMQAEEGYSIDEQIDKLTSYCKIKDWTVYDIYKDGGFSGGNIERPAMERLISDAERKKFDTVLVYKLDRLSRSQKDTLFLIEEVFGKNDISFLSLNESFDTSTAFGKAMIGILSVFAQLEREQIKERMLLGKIGRAKTGKAMMFSKVSFGYTYDKLKDELVVNQAESIIVRKIFEAYLGGLSLNKLRDYLNSNGIYRGDKPWNYQGLRRILSNPVYIGMIRYRGEIYPGNHQAIIDIDDYNKTQEEIKKRQITALEFSNNPRPFRAKYMLSGIAKCGYCGTPLRIILGSKRKDGSRNMRYQCINRFPRNTKGVTVYNDGKKCNSGFYEKADVEEFVINQIRDLQFNINKLDNLFDKHPSIDIKSIERQISSLDNKLKRLNDLYLNDMIDLEDLKKQTQLLRQQKTMLEDELLNNPAITQEKNKKYFKEFLATKDITKLDYETQKNIVNNLINKVFVKSGYIKIEWKIPFKKM

SEQ ID NO: 4710 - protein, 484 aa, synthetic construct
MNKVAIYVRVSTTMQAEEGYSIDEQIDKLTSYCKIKDWTVYDIYKDGGFSGGNIERPAMERLISDAERKKFDTVLVYKLDRLSRSQKDTLFLIEEVFGKNGISFLSLNESFDTSTAFGKAMIGILSVFAQLEREQIKERMLLGKIGRAKTGKAMMFSKVSFGYTYDKLKDELVVNQAESIIVRKIFEAYLGGLSLNKLRDYLNNNGIYRGDKPWNYQGLRRILSNPVYIGMIRYRGEIYPGNHQAIIDIDDYNKTQEEIKKRQITALEFSNNPRPFRAKYMLSGIAKCGYCGTPLRIILGSKRKDGSRNMRYQCINRFPRNTKGVTVYNDGKKCNSGFYEKADVEEFVINQIRDLQFNINKLDNLFDKHPSIDIKSIERQISSLDNKLKRLNDLYLNDMIDLEDLKKQTQLLRQQKTMLEDELLNNPAITQEKNKKYFKEFLATKDITKLDYETQKNIVNNLINKVFVKSGYIKIEWKIPFKKM

SEQ ID NO: 4711 - protein, 402 aa, synthetic construct
MKQIKTIQAQKVTTIKRLKVAAYTRVSHTSLLQSLSNQVSHYSQMIQANPKWDYVGVYSDSAISGRSQAHRRDFQQLLEDCRKGKIDIILTKSISRFGRNTVELLETVRELKRLGISVRFEKEKIDTLTAEGELLLTLLASMAQEESQSISQNIRWRVKKRFEEGKPYIPQDIFGYRWNGEEYVIEPHEASIVRQVFEWYMEGLSAPKIAKKLDDRGERTRLGNRFTKRIIYNMFDQEAYCGRLILQKTFRDHFGSRSIPNDGQMAKYIVENAHEAIVTPEYFQQVNQEKKRRARRRVSKHDALAKLQGKVYCEHCGLGMILTLETKSNQEKRVRYYCRTRDAKGVEACLGRTVTEEQLFQAFGERINTEDIHHISFNSVTNEAKATYRNGEEKHVIIQKGR

SEQ ID NO: 4712 - protein, 560 aa, synthetic construct
MSKEKIKVYLYTRVSTSIQIDGYSLEAQKSRMKAFALYNDYEIVGEYEDAGKSGKSIEGRVQFTHMMEDIKSGKDGVSFVLVFKLSRFARNAADVLSTLQIMQDFGVNLICVEDGIDSSKDAGKLMISVLSAVAEIERENIRVQTMEGRIQKAREGKWNGGFAPYGYQLIDGKLLINEEEAIAIRTIFDQYVNTSIGANGLSKYLEKHGIRKIQRQNGKNPLFDAGLIRKILKNPVYNGKIAFGRRTLEKVHGTRNEYRQVEQDDYLVAEGIHEAIIPDELWQAAQVKLKAQAKKYEHVNKGKNMRTHLLSGIVKCPICGAGMFGNKSIKYKKDGTKYKDFYYYGCKHRLMNRGHKCTYNKQIREELLDDAVAEVIIKLVSNPKFASMIQEKINMKVDTSAIENEIDNYQKELRKSHSTKFKLIEEIDNLDVEDKHYKRRKNDLDDRLYRMYDKIEDLESQLIEAKAKKETIEAEKLTGDNIYKVLIYFDKLYKVMNDVERRQLIEALISEIQIYEEKQPNGQWLKSITFKLPIIDENLNISLDNDEQVECVALLQRSKG

SEQ ID NO: 4713 - protein, 539 aa, synthetic construct
MLRQATQNLITALYPRLSHEDELQGESNSISNQKRILEAYAKQNGFTNLRWYTDDGYSGANFQRPGFQAMLADIEAGKVGTVIVKDMSRLGRNYLQVGFYTEMLFPQKGVRFIAVNDNVDSANGGMDNDFTPLRNLFNEWLVRDTSKKIKAVKKAKGMSGKPVTSKPVYGYLMDKDENYIVDEEAAPVVRQIYQLCLAGNGPTKIARMLTEQQIPTPGTLEYRRTGSTRRYHPGYECKWATNTVVHLLENREYTGCLVNFKTEKPSYKVKHSVENPIEKQAIFPNHHEPIIDTETWERVQELRKQRKRPNRYDEVGLFSGMLFCADCGHVLYQQRYQNKNRKQDCYICGSYKKRTRDCTAHFIRTDLLTAGVLSNLRQVTEYAARHESRFVKLLIQQNEIGGKRKTAAATKQLEQAQTRIAEVNRIIKRLYEDNVSGKISDERFMELSADYEQEQRELKDRAAALQEELSKSQAATVNAEKFMGIVRKHLAFEELTPTLLREMIEKIVVHECSYDENGTRRQDIEIYYSFVGKIDLPEA

SEQ ID NO: 4714 - protein, 588 aa, synthetic construct
MRIVNKIEAKTPQIPHRKRVAAYARVSMESERLQHSLSAQVSFYSSLIQSNPAWEYVGVYADNGITGTKAEAREEFNRMIADCEAGKIDIVLTKSISRFARNTVDLLNTVRRLKELGVSVQFEKERIDSLTEDGELMLTLLASFAQEEIRSLSDNVKWGTRKRFEKGIPNGRFQIYGYRWEGDHLVIHEEEAKIVRLIYDNYMNGLSAETTEKQLAEMGVKSYKGQHFGNTSIRQILGNITYTGNLLFQKEYVADPISKKSRINRGELPQYFVENTHEAIIPMEVYQAVQAEKARRRELGALANWSINTSCFTSKIKCGRCGKSYQRSNRKGRKDPNANYTIWVCGTRRKTGNAYCQNKDIPEQMLKDACAEVMGLDTFDEIIFSEQIDHIEIPAPNEMIFYFKDGRIVPHHWESTMRKDCWTDERRAAKGRYVQEHQLGPNTSCFTSRIRCDSCGENYRRQRSRHKDGSFDSVWRCASGGKCQSPSIKEDALKNLCADAMGLEEFSETVFREQIVCIHITAPYQLSIRFFDGHTFETAWENKRKMPRHTEERKQHMREVMIQRWREKRGESNDNTCDDKPIHGNADQ

SEQ ID NO: 4715 - protein, 591 aa, synthetic construct
MKEVEVIKARNDLQTRTRGKTIELMRVGAYCRVSTDSADQLNSYKSQVAYYTDMIKKNKEWVLADIYADEAITGTQVAKREDFQRMINDCMNGEIDMVITKSISRFARNTLDTLKYVRVLKERNIAVYFEDEKINTLTMDGELLLVVLSSVAQQEVENISANVKKGLKMKMKRGELVGFQGCLGYDYHKDTKTITVNEEEAEIVRYIFNRYIEGAGGSVIAHELENLGYKTKYGSSTWVQSTVIGIIKNEKYKGDLLLGKTFTVDPISKRRLENFGEEDKFYIRNHHEPIISEEVFEKAQEILSRRNVNRGKIGEGNTKREKYSRKYAFSCMLECGFCGGTLTRRNWHSSSQYSKVIWQCVTATKKGKKFCKHSKGIPETAIEEAFVESYRLLCDDNKDVLEEFLQRMDDTLSCSAVSKQLAKAEKEIDALEKKKSKLVDMRLEEIVDKETYESKYADLVSKQEQLVEERQKLQETSDNEKDIKKRLKEFKKTLEQNEVLDKFDRYVFESIVEKVIVGGLDENGNVDPAQLTFVYKTGLKNSVDGAKFKPQRKNARGRHRTDELCSHDSNEVDKMCSDSSNDTYRISRFIR

SEQ ID NO: 4716 - protein, 576 aa, synthetic construct
MTKAYIYTRVSTLQQIDGFGIDRQINTLMDFLENAVLPKELGYQLDPKNYEILDSDEGLSGYKGHNFTKGSLGKFKSRVASGEITSGCLLIESVDRFSRRQGYDAIDEFTFLLKRNIDIIEVETEQIFSYRLDHKLTQLSTSIERAYQESKRKSRLITKSWANLKRKAVDEGVALKRNVPYWLVIDGDKYQLNKSEVERIRTIFDDYANGKGVTAIVRDLNKAGGKYDKKAFSTNFINVMLRDRRLIGWLTGKRRKNETIADWKLREIKIYPEIIDANLFELVQRKIDANDVTKKVRTSSKQISLFNGVARCGICNEPLVGHFTQKGSYLRCLGKRSKLGTCNSSLIRYKECEYAVINYVKNIDFKTIYGNNKNNTPMINSLQQRMAVVTTEINGIESLLNTSDNSSEIVALTKARRERVKERDKISYELIDLMRTIDVSDEEFMLDLESICDHNNVELRERFNAALKKVIKSIKIIQDNSNDDKIFIIKFEYHTDYAMHCVALNLNGDLIGYSYIVDKGELCLKSSCMDVNFKTGEITTKHAPNYIEGLIVKSAFENIEKVISGYDNGLAIADII

SEQ ID NO: 4717 - protein, 558 aa, synthetic construct
MTKLYSYIRFSSMRQSDGSSYERQIRMAKEIADRYNLELVNDYQDLGVSAFKGANSKTGALSRFLDEIGRSIPVGSWLFIENLDRLSRQDIISAQELFLSIIRRGITIVTGMDNKIYSIETVTANPMDLMFSILLFIRGNEESQTKRNRTNSSALLKIKAHQQNPQSPAVAIEEIGKNMWWTDTTSGRVLPHPVYFPVLQKIVQLRQEGHSAGAILDYLNEHHEPPAPTSNKKHGKWSRAMVSRLFNTKALIGVKTVNVDGVEYELRDYYPRVLSDSEFYFLRKNIIKKAWDYSHDKEKVIPLLSGIGVLRCVHCGATMVKQTAANGKREQYRYCCDGRKSGRTDCPYPNWGFRAVTLEGAVLQLLADKIWIAEDKTNPIPEIQVKIDEISRKIDNLINLSAMMGATKELANQITDLNSQREALHEEIRLFEREMYSVDSQGWDKLAQFDLSDVQNEERLKVRMKIKGALHEIECSRIDSKKNLFVLVYLDGLRQRLVIENNRGLKKGQIFVDLKTINDRQILESAGMVLHPCIEMIIDSDWKAPEEIPGLLSEEFGI

SEQ ID NO: 4718 - protein, 526 aa, synthetic construct
MINMVSFDNIIIYLRKSRSDDPAQTVEEVLAKHERILQDYCIKEYGKVIPEKRIYREVVSGETIQDRPVMQKLLKELETNNIYGVLIVEPQRLSRGDLQDCGQIINSFRYTNTAVITPGKTYNLQDEYDRKFFEMELTRGNDYLEYTKKILNRGRVASVKQGNYICSVRPYGYKKVVIGTGKDKCHTLEIIPEEAEAIKLMYHLYLDENMGFTNIARTLDSMHIKPLKSSNWSAATIRDMIDNPIYIGKIVWNNRKVVKKWENEQIIKVRPRNKGDDVICVDGKHEAIIDEETFNAARQKRGLTPKVRKFKELRNPLAGILFCSTCGHSMSMKKYVDKRSHTGKITTIMLCNKQAVCHTKSAQYEQIVAKIKESLADAIANFEIKMKEQENNNIDIHKQRITSLKDELNRLYNKDVRQKDAFEDGIYTKEEYIERNSKLQSQILNIKAEIENEKNNTPVIIDYQNKITTFTECLTSLDDDSISAADKNSLLKNCIDKIIYHNDMPSLPGIGRYIENSFRLEIFLKM

SEQ ID NO: 4719 - protein, 498 aa, synthetic construct
MTPIKMTTASKPKAILYSRFSSSQQADGDSIRRQEEAAYKFCEREGLELIESQFKDLGFSGWKRHVKREGLESLLMAVENGTIPSGTWLLVEATDRLSRQGWDHVVSLVKSLVSTGCTFVTLDNNQIYNSSNIQDLMSALPLMISADLAFKESQKKSERLRAVKTNKRSNRVIQGNQPFWIDVVDGKPVLNDKAPLARRIVDMALEGIRPLAIVRQFNTEGIKSPKGKDWEVAVIRRILKNTILYGAKTYFEARDGEYKDVETVAGLYPKICTLAEFEQITIKKKKDDTSYNTAGPFSNLLKCQCGKPLVAKQKRGDDYYKVCSGMQNKTCNYKGYYKNIDFYLTKWLGTLSMEEIAHNSNVIDNSPRITELEQLLIDLEAMRVENKGKTRILQRIYEDIEEAESELEQLQAQKSLSEGDTKTTLRDALSFSDNPTKQNMIFRRYISSIVCRKETKDIIVGEVHFKSGASYEVWVHHDSKLKNTSESISYKYNLKTNR

SEQ ID NO: 4720 - protein, 494 aa, synthetic construct
MLYHIYSRISSTKQTQGVGLDRQEQLALDYAKRNNFEVANISSDVASAYHSKHMEGKLGAFMESIATKEIVVPCGLIVESLDRLGREHELTALSRFIDIVQSGVEIHEVSTGIIYNQKDTHLLHVALSIMTRAYNESLMKAKRSNDAIQRKLGEAQNGKIIRTNVPAWIDVQGDKLVLNEHQTTVKSIFDMYLSGMSLRPIARTLNTGNVPYMAPKIAKKGPNNGSYNWTSSRILTVLASSAVYGVYTPKTGEPIENYYPACVDEATWLKAKEIRESRKVHAAKVNDLLSVLSSCCVCSLCGLSYIANLRSWETKEGKQTSVGMRCNSRQMGSTCKGKLVPNEHLEKYILPLVPNLDITKLNRTKMKTLDNLKARHQQLTEQQSTLLDLVVMGSAAAKEKFIQLEEKIEILKEKIEKAQARIVVDATEDVSLLALDTQNLEIRRKVNTALQLMELKVHVECTQTGTAKIKMQLKNVTVHEGTLKWSRKKRIDSK

SEQ ID NO: 4721 - protein, 441 aa, synthetic construct
MLARIESGEFPEGTILLVESIDRIGRLEHLETEALMNRILGNGLEIHTLQDGLIYTKDALADDLGISIIQRVKAYIAHQESKQKSFRVSQKWEQRAKLALAGEQRLTKMVPGWIDPDTFKLNEHAETVRLIFKLLLSGESLHNIARHLQSNGIKSFSRRKDANGFSVHSVRTILRSETTIGTLPASQRNDRPAIPNYYEAAIDASTFNKAQEILGKNRIGRTPASDNPLTINIFKGLFRCQCGASVHPTGTKNKYQGVYRCNNHLDGRCDVPPLKRKPFDKWMIDNFLGMIDVGNDGEAEGKIASLQHEVEIVTTRIKKATALLLEMDDIDELKIQLKELNQKRTELQTTIDNMRRKASLTDKELPQLKDIDLTTKAGRVECQLILSKHLKGLTLGKDSVTVTLQNDTEITIPTNPLPLNDGSPIFEIADKELLDIDAYQL

SEQ ID NO: 4722 - protein, 522 aa, synthetic construct
MRKVTRIDGNNALQAFKPKVRVAAYCRVSTDSDEQMATLEAQKDHYESYIKANPDWEFAGIYYDEGISGTKKENRTGLLRLLADCENKKIDFIITKSVSRFARNTTDCIEMVRKLTDLGVFIYFEKENINTQRMEGELVLTILSSLAENESLSIAENSKWSIRRRFQNGTYKISYPPYGYDYVDGKLFINKEQAEIVKRIFSEALDGKGTQKIADGLNSDKIPTKRGSHWTATTIRGILSNEKYTGDVLLQKTYTDENFKRHYNHGEKDQYMIKDHHEAIISHEEFEAVKEILKQRGKEKGVIKGSSKYQNRYPFSGKIKCAECGSSFKRRIHGSGNHKYIAWCCTKHIKDASSCSMKFVREDAIHQAFVVMINKLIFGHKFILRPLLQSLKKTNYSDNITKIQELETKIKENTEQVQVIMGLMAKGYLEPALFNTQKNELLKEAALLKEQREALKRVIDGGMTTLVEVEKLFKFATKAEKQIDAFDSDIFENFIEEIIVFSQEEIGFKMKCGLNLRERLMK

SEQ ID NO: 4723 - protein, 522 aa, synthetic construct
MTTRNVTIIPARKRIGNSAKAEELPKLRVAAYCRVSTDSEEQATSYEAQIEHYTNYIKSNPEWELAGIFADEGITGTNTKKREEFNRMIEECMQGKIDMIITKSISRFARNTLDCLKYIRQLKEKNIPVYFEKENINTLDSKGEILLTIMASLAQQESQSLSQNVKLGIQYRYQQGKIHINHNRFLGYTKDKDGNLVIVPEEAEIVKRIYREYLEGSSMLQIARGLEADGILTGAGNHRWHTSTINKILRNEKYIGDALLQKTYTVDFLSKKRVANNGIVPQYYVENSHEPIIPREIYMQVQEELVRRRCVHISKNGKKRNYSNNHPLSQMVFCGKCHEVFRRVHWNNRGKKSIVWRCVSRLENTGLFCTASTILEDTLKEKIVEAINIAVSGKNSFLAILKKNIETVLNEDLDESTADIDKRLEELQAELIQLANSKEAYDNIVNEIYRLRDLRQETLSRNALRQDKRDRIAEMTDFLNMQTGGITEFDDKLVRKLIEKATVYNDRLVVEFKSGLEIEVNL

SEQ ID NO: 4724 - protein, 495 aa, synthetic construct
MKKVITIEPAKQVTHKVDLPSFTKRRVAGYARVSTDHEDQTTSYEAQMTYYTDYINSRSDWEFVKMYSDEGISGTNTKKRLGFQEMVEDALVGKIDLILTKSVSRFARNTVDSLSTVRKLKEAGVEIYFEKENIWTFDSKGELLITIMSSLAQEESRSISENVTWGRRRQLAEGQVTFSYSQVLGFKKSDTGGFEIDQEEAKIVRYIFHQVLLGNNPNKIARELTAQGIPTPQGKRQWSYGTVKRMLRNEKYKGDALLQKSFTTDFLTKSTKPNEGELPQYYVENNHEAIIKREVFDLVQVELDKLEKKRQTNNIFTGRLFCGDCGSAFGSKVWHSTSKYKRTIYQCNAKYKGEHKCQTPHVTEEEIKGWFLSAMNQLLSNREEIVANTELLIDLAKDTSPLENKIDDLEQQLETIRQDIEDLVDRNARKAQNQDLYQEQYDTLVTAYQERQKELQEATSSLEEQKSKQLSLDGFINNSNSRKTSYRFQSRTLAD

SEQ ID NO: 4725 - protein, 402 aa, synthetic construct
MKQIKTIQAQKVTTIKRLKVAAYTRVSHTSLLQSLSNQVSYYSQMIQANPEWDYVGVYSDSAISGRSQAHRRDFQQLLEDCRKGKVDLILTKSISRFGRNTVELLETVRELKRLGISVRFEKEKIDTLTAEGELLLTLLASMAQEESQSISQNIRWRVKKRFEDGKPYIPQDIFGYRWNGEEYVIEPHEASIVRQVFEWYMEGLSAPKIAKRLDDRGERTRLGNRFTKRIIYNMFDQEAYCGRLILQKTFRDHFGSRSIPNDGQMAKYIVENAHEAIVTPEYFQQVNQEKKRRARRRVSKHDALAKLQGKVYCEHCGLDMILTLETKSNQEKRVRYYCRTRDAKGVEACLGRTVTEEQLFQAFGESINTEDIHHISFNSVTNEAKATYRNGEEKHVIIQKGR

SEQ ID NO: 4726 - protein, 555 aa, synthetic construct
MPTAYSYIRFSSDQQQHGASLARQEDMVGKWLVAHPEYRRSTQRFEDLGISGFKGKHLDNAFGRLRAAVESGVIEPGDCILIEAIDRAGRLAPSIMLNLLTEIVNVGVSLVSLDDGIVYDSNPANSNNLFLLVAKVQQAHQYSDALSRRVRDAYARKRENASKGEFTERRTPLWLENTGTKVRLVEDIAPFIVQIFQDYADGIGERRILARIRGQHPLLETLNPTTIKKWLKNPTAIGRWQPWPVDGVEQAPIEDVYPAVVSRELWYRVQKRLAAGAKIKSASKVYLLSGLVKCGRCGKNFGVVNTKRSPAVMLCMGRHRLGEAGCTNSRSIPYAVLDFIRSRTMQSAMLRATASQKLTVGERRQIEIDGELTELHKQESNAVALLVKYGEVASITAELDKVMGSIKKLEQERAFLNVVPSQDTLSDMVDMENILMDDDQQRLNALLQGAGYSIVCEGPTITVGEEHLLTGGVHQVYEYRGSHRPTETYRLIENSHTEHHLDMPNSKRVAAESAALLEQEARYESGELVRQHLQWNGEAFVDVTTGLVVEGVTGS

SEQ ID NO: 4727 - protein, 581 aa, synthetic construct
MTRARKKNNVKRGFHARLEELETVRVAIYTRRSTDDDHQPYSIDAQTTRLEAYVASQPGWHIVRRFSDDASGATTNRKDLHEALRAARDGQIDVLLVYRVDRFSRNLRDMVTLLDDLEQYDVVFRSATEPFDTSTPMGRMLVQMLGTFAQFERDTIIDRVIAGMERKAAKGLWKGGRRPFGYTADKTAHTLIPHPDESPIVRLIFQLYTNDRLGSTTIARMLNTRGHRNSVGGTWSGYSVLRILANRIYLGELTFREITTTDCHEPLIDPATFAEAERITTQRTTEPARLRANSYDYDLTGKMRCPTCGSAMVGSRSHGQNKKIYRYYFCHNRNRYGTEKCDGYRIDADAAETAVLHALAAFYRDNDSLIADAVTEAQRQHHAGQATDHQELTTVRAKITDTNTKIDRYLTAFENGTMDPELVSSRLTELRDSSRQLTTRRDELLATIDNAPTLPSPATLTDIADHIATIIASGNDQTRKAIIDTLIAKIKITGPDTIVPVFRIPQPGTDHDTPVNVPTNASGALTSGKPSVGAPEGLVRTTTNLVELRGIEPLTFSMRTRRATNCAIAPCGSGGNRAVTL

SEQ ID NO: 4728 - protein, 562 aa, synthetic construct
MNAPQRTDPADPAVAVSYIRVSTKEQAERDGDPEGYSIPAQREANRRKATAIGAVVMEEFVDRGESARSADRPELQKLLRFIAANPVDYVVVHKVDRLARNRVDDVEINLAIRKSGATLVSATENIDETASGMLLHGIMSSIAEFYSRNLATEVLKGMEQKAKTGGTPGKAPLGYRNVAALNAEGREVRTVAVDPDRAPLITWAFQAYATGDWTLRRLAGALEARGLTSRPTTRSPGGPLALNSVHKILRAPYYKGEVTYRGVQYPGRHQPLIDDATWTRVQEVLDARATGERSREHPHYLKSSVFCGGCGSRLIVTMSKNRYGTLYPYFICLGRHSKSNGCMRKAVLISVVEELVEDAYRTIQLDPEVRRQIETRLRAEIAATRASIEAEVRDLTTQQERLMAERTRLLQAHYAGAVPLDLLKSEQDRIARQLGAIEERLSAANVTIDDVEANLQRALDYATHCYQGYLAAGPHVRRLYNQAFFEKIYVEDDDVRVTLQEPFKTLAGPVAIGDAEERVTGTAEPSAPSLTEVMSRNNKPSSWDEGLNELILVPPAGIEPAT

SEQ ID NO: 4729 - protein, 597 aa, synthetic construct
MARRNLPNRAHTNEKAVLLLRVSTKKQLDTAIDIDPDGLSIATQRDHGNAKANAMGVEVATEFIEPGYSAKSIDKRPVFRDLLKYLTEHPEVRYVIVYMRSRAFRNRFDAAIIETQLNKMGVRLISAKEDFGEGPHAVAMEGMLDVMNHLMNTLQGLDIQEKMRTKALNGGTLGFAKVGYLNTRVEYEGKQINTITLDPERAPLVRRAFELYATGEYGLEHLEATMADLGLTARARGAIPQRPLSFKLLHRMLKDPYYAGWVSVDDQLRPGRHEPIVSQELFDRVQDVMDMRSRRGQRDRVLQHYLKGDLFCDRCRRHNRTSRLIYTEARGRNGHYYGYFLCRGRQERVCDLPHLPAERVEHAIVDHYATLRLPTSFHSALRELLDEALADEQASVRAMHASLTARLKELDAKEERLVDLAADGTLPQAKIKARLRAIHTDRAKVQVSLTATSAELAVGVDVLKRGLDLLIDPAQLYRTRTDTVRRHLNQAFFQRFYLDVGGVSRDQLHQPFGDLHHAAGTRPACTQPAATPQDPAGQKPKNGLTLTQVLTDPGSSKAAVVELPGIEPGSSAASSGLLRVQFAVSLLGSLGHANKPR

SEQ ID NO: 4730 - protein, 505 aa, synthetic construct
MSNPSLRAICGARVSVLTGPQKVSHLAQHETAAAWVAREGHTVVGTFTDLDVSASIPPEKRPDLGPWLTPEKSWEWDVLVFSKIDRAFRSTRHMVKLAEWCEQNRKMLVFAEDGLVLNYRNPQAGLEHMMAELFVYIGSFFAQLELGRFKSRAEDSHRILRFTERWPGGVPPFGYTTVPAEDGKGRVLAVDPEAKAVLEEMANHLVEDDWSLLQIARWLNDQGIKSNMGKVKTNGSGWRPTSVRQVLSNLSTQGVKISAPGKTEGCKACEPTKGGCKAHRERVPVLDKEGRMIRMAEPIFSEERWGEIQDALSRRKINRTVKTRSDNPMRDGVGICGKCGLGLTIHRSPRPGGGYYLYTRCGSGCRGVSMKMDEAVDLLGQTFLENYGHKEAVEKVFVPGSDNSAELERVSKSIERLRAESDAGLITDDSEYLSRLTGLTARKRELEANPITPPHTVDLPTGETYAQTWERSDPEERRQLLVKWKIQFVLYGKNNFELRVPSETH

SEQ ID NO: 4731 - protein, 597 aa, synthetic construct
MARRTQPSRSQRSDKAVLLLRVSTKKQLDTAIDIDPDGLSISTQRTQGHAKADAMGVDVVEEFIEPGYSAKTIDKRPVFRELLKYLADHPEVRYVIVYMRSRAFRNRFDAAIIETQLNKMGVRIISAKEDFGEGPHAVAMEGMLDVMNHLMNTLQGLDIQEKMRTKARNGGTIGFAKVGYLNVRVEYEGKQINTIALDPERAPLVHKAFELYATGDYGLEQLEATMTDLGLTARARGTIPERPVSFKLLHRMLQDPYYAGWIEVDSELRPGRHEPIVTQELFDRVQDVVDMRSRRGQRDRIHQHYLKGDLFCDRCHNRGRTSRFIYTEARGRNGHLYGYFLCRGRQDNHCDMPHIPAEQVERAIVDHYATLSLPSSFHTTIRGLLDEALADEQSSVRTMHATLTTRLKELDAKEERLLDLAADGTLPQAKIKSRLRAIETDRSSVQASLAATGAELAVGVEVLKRGLDLLNEPAQLYRTRTDAVRRHLNHTFFERFYLDIDGVRTDRLRQPFADLHNAAGTRSICEHPGTSPRQATSRNGKSGPTLHDVLTDPVSSKAAVVELPGIEPGSSAASSGLLRVQFAEPLLGSLGHANKPR

SEQ ID NO: 4732 - protein, 606 aa, synthetic construct
MTDNTTTGPQIAVSYLRVSTTRQMDTGADVDAEGNSIATQREANNAKAARMGAIIEKEFVEPGASAQTIDKRPVFKQLLAYLGEHPEVSLVIIYMRSRAFRNLGDAVITKRRLEAMGVKLVSAKEDFGEGIMADAMEAVTDIINEVQVRMSGEDIKVKMRHKAQMGGTNGRAPIGYRNVRLDHAGRQVNGIAVDEERAPLIKQAFELYATGDYSIDRLQETMADLGLKARPQGRGGTKQLSRSHLHRILSDPYYIGIVRYKGETFPGRHQPIISADLFERVQKVIEDRSARGQRDRVLYHYLKGLLYCERCRANGRTSRLVYTEAKGNGGNYAYYLCLARQRGECDLPHLPVPDVEWYVLDHYAKLGLPPKFLDYIREAIDRAMADAQAHVRGLHVTYRKKLDKLAQQEERLLDLAADGDLAPDKIRVRLRKIQAERTRAQQGLDETGEQLELGARKLQQYLDLLDDPQSLYVRAPEDGRRDLNTASFRKLWLDDAGVVTDELTPAISELHEAARAFTRHNSTSEADCATDNQQGPDQGETPKLPGDSREFRLDHRFRLADMFRVGSSKNVLVPSVGLEPTRPFGQRFLRPSRLPVPPTRRTGCEL

SEQ ID NO: 4733 - protein, 597 aa, synthetic construct
MARRTQPSWSKVSDKAVLLLRVSTKKQLDTAIDIDPDGLSISTQRTQGHAKADAMGVDVVEEFIEPGYSAKTIDKRPVFRELLKYLADHPDVRYVIVYMRSRAFRNRFDAAIVETQLNKMGVRIISAKEDFGEGPHAVAMEGMLDVMNHLMNTLQGLDIQEKMRTKARNGGTIGFAKVGYLNVRVEYEGKQINTIALDPERAPLVHKAFELYATGDYGLEQLEATMTDLGLTARARGTIPERPVSFKLLHRMLQDPYYAGWIEVDGELRPGRHEPIVTQELFDRVQDVMDMRSRRGQRDRIHQHYLKGALFCDRCHNRGRTSRFIYTEARGRNGRLYGYFLCRGRQDNHCDMPHIPAEQVERAIVDHYATLSLPSSFHTTIRRLLDEALAHEQSSVRTMHTTLTTRLKELDAKEERLLDLAADGTLPQAKIKSRLRAIETDRASVQASLAATGAELAVGVDVLKRGLDLLTEPAQLYRTRTDAVRRHLNHAFFERFYLDIDGVRTDRLNQPFADLHHAAGTRSICEQPTTSPSQATSRNGKSGPTLHDVLKDPVSSKAAVVELPGIEPGSSAASSGLLRVQFAEPLLGSLGHANKPR

SEQ ID NO: 4734 - protein, 506 aa, synthetic construct
MRSVITYLRYSSAIQGAEGADSTRRQNDLFRQWLKKNSDAQIVASFSDEGLSGYKGKHLTGQFGDMLARIEAGEFPKGTILLVEAIDRIGRLEHLETEALMNRILGNGIEIHTLQDGLIYTKDALADDLGISIIQRVKSYLAHQESKQKSFRVSQKWEQRAKLALAGEQRLTKMVPGWIDPETFKLNEHAETVRLIFKLLLDGESLHNIARHLQSNGIKSFSRRKDANGFSVHAVRTILRSETTIGTLPASQRNDRPAIPNYYEAAIDALTFSKAQEILDKNRKGRTPASNNPRTINIFKGLFRCECGATVHPTGVKNTYEGVYRCCRRFDGRCDIPQLKRKPFDKWMIENLLSMIAVGDDGESERKIASLQHEVEVVTARIKKATALLLEMDDITELKAQVKELNQKRTELQTTIDNMRRKASLTDKKLPQLKDIDLTTKAGRVECQLILSKHLESLTLGRGQVTVKLSNGTEIIVPTDPLPLTDGTAIFEIAEKNLLNIDVFQL

SEQ ID NO: 4735 - protein, 506 aa, synthetic construct
MRTAITYLRYSSAIQGAEGADSTRRQNDLFKQWLKKNSDAQIVASFSDEGLSGYKGKHLTGQFGDMLARIEAGEFPAGTILLVESIDRIGRLEHLETEALMNRILGNGIEIHTLQDGLIYTKDALADDLGISIIQRVKAYIAHQESKQKSFRVSQKWGQRAKLALAGKQRLTKMVPGWIDPETFKLNEHAETVRLIFKLLLDGESLHNIARHLQSNGIKSFSRRKDANGFSVHSVRTVLRSGSVIGTLPASQRNDRPAIPNYYEAAIDAATFNKAQEILDKNRKGRTPASDNPLTINIFKGLFRCQCGASVHPTGTKNKYQGVYRCNNHLDGRCDVQPLKRKPFDKWMIDNFLGMIDVGNDGESERKIAALQHEVEIVTARIKKATALLLEMDDIDELKIQLKELNQKRTELQTTIDNMRRKASLTDKELPQLKDIDLTTKAGRVECQLILSKHLKGLTLGKDTVTVTLQNDTEITIPTDPLPLNDGTSIFEIAEKNLLNIDTFQL

SEQ ID NO: 4736 - protein, 547 aa, synthetic construct
MKLLVTYIRWSTKEQDSGDSLRRQTNLIDAFYSKHKNDYYLLPAHRYVDKGKSGFHQQHKNQGSDFRRMFENVMSGAIPEGSLIVVENFDRFSRADIDTAIDDVRQILRKGVSILTLGDGELYDKSALTDPVKLIKHIIIAERAHQESLVKQKRIAQVWNHKTQLARELKKPMGKQAPGWLELSEDGSHYIVDEDKASLVNIIYDKRLSGMSMFAICKWLNEQGYPTINQRKVRISKTKKPDGNWSALSVKHILTSRSVLGYLPAKISTEDRKTVLREEIEGFYPQIVTDSKFYAVQQLLEETGKGKTSSGDHWLYVNILKGIIRCKCGLVMTPTGIRKPVYQGTYRCNGNKESRCNYGTVSRKLLDTQLCSRLFSKLSQLHDEATDTAKLDELQRRLNTVDGELEKLTETLIQLPNITQIQEALRVKQEEKDELIVQLSREKARVKSVSSLDLSGLDMESVEGRTEAQIIIKRLVKEIVVSGNEKLVDIYLHNGNMIRGFPLDGKDDHTLTLEEATDEMQSLDDMLIFGEPVTRIYPAGDMEEVDA

SEQ ID NO: 4737 - protein, 547 aa, synthetic construct
MKLLVTYIRWSTKEQDSGDSLRRQTNLIDAFYSKHKNDYYLLPAHRYVDKGKSGFHQQHKNQGSDFRRMFENVMSGAIPEGSLIVVENFDRFSRADIDTAIDDVRQILRKGVSILTLGDGELYDKSALTDPVKLIKHIIIAERAHQESLVKQKRIAQVWNHKTQLARELKKPMGKQAPGWLELSEDGSHYIVDEDKASLVNIIYDKRLSGMSMFAICKWLNEQGYPTINQRKVRISKTKKPDGNWSALSVKHILTSRSVLGYLPAKVSSEDRKTVLREEIEGFYPQIVTDSKFYAVQQLLEETGKGKTSSGEHWLYVNILKGLIRCKCGLVMTPTGIRKPVYQGTYRCNGNKESRCSYGTVSRKLLDTQLCSRLFSKLSQLHDEATDTAKLDELQRRLNTVDSELEKLTETLIQLPNITQIQEALRVKQEEKDELIVQLSREKARVKSVSSLDLSGLDMESVEGRTEAQIIIKRLVKEIVVSGNEKLVDIYLHNGNMIRGFPLDGKDDHTLTLEEATDEMQSLDDMLIFGEPVTRIYPAGDMEEVDA

SEQ ID NO: 4738 - protein, 506 aa, synthetic construct
MRTVITYLRFSSATQGAEGADSTRRQNELFKQWLRKNSDAQVVASFSDEGLSGYKGKHLTGQFGDMLARIEAGEFPAGTILLVESIDRIGRLEHLETEALMNRILGNGIEIHTLQDGLIYTKDALADDLGISIIQRVKAYIAHQESKQKSFRVSQRWGQRAKLALAGKQRLTKMVPGWIDPETFKLNEHAETVRLIFKLLLDGESLHNIARHLQSNGIKSFSRRKDANGFSVHSVRTILRSETTIGTLPASQRNDRPAIPNYYEGVVDIPTFNKAQEILDKNRKGRTPASDNPLTINIFKGLFRCQCGASVHPTGTKNKYAGVYRCNNHLDGRCDVQPLKRKPFDRWMIDNFLGMIDVGNDGESERKIAALQHEVEIVTARIKKATALLLEMDDITELKTQVKGLNQKRTELQTTIDSMRRKTSLSDKGLPQLKDIDLTTKAGRVECQLILSKHLKGLTLGKDTVTVTLQNDTEITIPTNPLPLNDGSPIFEIADKELLDIDAYQL

SEQ ID NO: 4739 - protein, 506 aa, synthetic construct
MRSVITYLRFSSATQGAEGADSTRRQNELFKQWLRKNSDAQVVASFNDEGLSGYKGKHLSGQFGDMLSRIESGEFPEGTILLVEAIDRIGRLEHLETEALMNRIIAHGIEIHTLQDGLIYTRDALSDDLGISIIQRVKSYIAHQESKQKSFRVSQKWEQRAKLALAGEQRLTRNVPGWIDSETFKLNEHAETVRLIFKLLLDGESLHNIARHLQSNGIRSFSRRKDANGFSVHSVRTILRSETAIGTLPASQRNDRPAIPNYYEAAIDASTFNKAQEILGKNRIGRTPASDNPLTINIFKGLFRCQCGASVHPTGTKNKYQGVYRCNNHLDGRCDVPPLKRKPFDRWMIDNFLGMIDVVSDGETERRIAALQHEVETVTARIKKATALLLEMDDITELKAQVKELNQKRTELQTTIDTLKRKTSLTDKELPQLKDIDLMTKAGRVECQLILSKHLKGLTLGKDSVTVTLQNDTEITIPTNPLPLNDGTSIFEIADKELLEIDAYQL

SEQ ID NO: 4740 - protein, 457 aa, synthetic construct
MRVACYDRTSVYEEAKISNDAQYDAVKEYVLEKYEQIPQRFSDKGESGGKADRPAFRQLRAWVCASEEEGVIYVWRYDRLARQAKIALEFIELCQQHQVQVYSISEPLPASFSHASTNKLFVQLLFTFAEQQRNVIIENVRAGLAYKKQQRQYLSSAVPYGYRLVNGKIQQEAHEAKVVCRIFQLYLTKKYGYKKLCQRLTQQRIFFRERPFQPYHIYSILKNPLYYGEIKGGSLGKYLGTFEPILSKATFLQAQEIRQSRCTAKKDTYPYLLRQKIKCPFCGRHLSSKYQWNTKKTKMLHYYHCTDRSCQGIFLRAERVESEVLEKIQAFFQHEGVYQALIAQLTQQLAEKRKDEKHKVIQQKKQEAQWLKAFEEGNCSLEELKQQLQALQKPRSTSSFLSLQQCEAKVKEWLQLKDLSSRQLLCDHVCRIEVTKEKTVCGIYFRQMTQNILEGNE

SEQ ID NO: 4741 - protein, 489 aa, synthetic construct
MSKPLRALVGARVSVLRGEQKVSHIAQKETGTKWVLDRGHEIVGTFEDLDVSASVSPFNRPDLGPWLTPEREHEWDVLVFSKIDRMFRSTRDCVRFAEWAEDHKKILVFAEDGMTLNYRDKDTSNSLESMMSELFIYIGSFFAQLELNRFKTRTMDSHRVLRGMDRWAGGTAPLGYRVVDHPSGKGNALDTDPESKAVLHDIAGKLLDGWSIIRITQWLNDNHVLSNRDKARMAKGKEAKERPWAVSTVTRALTSLKTQGYKMHRQKPLLDGNGEMIRMAPPTFDDDTWRRIQETVALRQATKSRTNSSNPMLGIGYCDECGASLAQKILRKNGKEYRYYRCGRSPMQCSGVNYKADDADKLLEESFLARYGHRNVTRRVFVPGEDNSHELEQVRATIERLRRESDAGLVVTPEDEEIYLQRMRSLIDRRTALESTPVRSAGWVTETLNTTYADAWGDQDHHKLLTERGVKFYLSPGHPRMYVPELEGE

SEQ ID NO: 4742 - protein, 488 aa, synthetic construct
MEKARAVAYIRVSTERDAQLHSYEFQEHYWQSAFEDDPDTELIGIYADKGISGHSVQKRPKFLVMMQDAREHKFDKIYTKSVSRFARNTTQLLEAVRELRDLGIEVVFENENIHTFQPTSEIFLTIAATIAENDLEVDSARQRWSIQRRCENGWISVGSGLFGLKLTADNELEIVPEEAAVIRYIYESYVDGGIGSKRIADALNAAGVQSRNGYPWDAKHIIGLLRNEKYKGDVIMGKSVRHFGEYHKNPNAEYAPRYYMEGTHEAIVDKDMWEAAQRILEERSRNHCRTRIAHSFTGMIECGCCGKNYLHKVNNSQCKWQTDIWACRTYLRDGKKACGNSRIKDTVLKEKFISAYNEFIERRPQGDSMVALQEVLEDLRQQEQELAELMMQRLITKAAYEEERKNVKMQITDISEKISERRAKRVPESEYVPIREFSEEKTKRFLSKVVVTMFTVTFVFYNGAKITRTYDNGQPGNKVGWNKKKEES

SEQ ID NO: 4743 - protein, 540 aa, synthetic construct
MATATRRVVRTMPQMFIDVADNQSERLQVAAYARVSTEKEEQEDSFERQVEHYKQLIYSKPDWQFVDVYADPGISGTRAEKRPDFLRMIEDCRAGKIKKVLVKSISRFARNTVDALQYIRELKDLGISVYFESENIDTLTPGGEVLLTILAAMAEQESRTISSNIKWAWQRKFQKGDIILNTGLMLGYRKVGKDDEGHDVYEINEEEAEIVRRIYREFIAGYSITQIAKRLQAEGVKTKLGRESWRHNVIESILTNEKYTGNALLGKTFKPDVLTKYRQKNDGKKAPIYYVEGSHPAIIEKGLFDLAQQEMQRRRDANDNKVGGGRYSSRYPFSGMLVCGICGSKLRRQVRTMGSGKRTASWGCCNRINNGRAVCDSHHVNEDVLEAAYLTAMRRLVDSAEEVVEAVRDGAELALEPENKAAMDRIDEETIQLQEAALALHKAKQRMEIGSVEYASRVKEYSERMKELEAERNELQGTAAKYAEVRLWLDTFIEQTMQSDTLTTVDGTTMKMLVDRIHVRNDGVVVEFKCGVAIEQEYVK

SEQ ID NO: 4744 - protein, 524 aa, synthetic construct
MNKLRAAAYCRVSTDRTEQSGSLASQRSFFDNYIRNSDSMTLVGVFYDEGTSGTTTLNRYGFNKMISLAVSGGIDIILTKEVSRFARNTVDTLNITRMLRAKGVGIIFINDNIDTRDSDGELRLSIMATIAQEESRKISERVKWGQQRKMEQGVVFGRSCLGYDVKDGKITVNADSAEIVKRIFTEYTVLLKGAESIADGLNAEQIRTVNGGRWSGAFIRKVLRNVKYVGDLEQKKTCTPDFLTHKKKLNSSEHIYIRNHHEPIISRELWEQTQAEISRRKPTDTSRHSDRYVFSGKVYCGVCGSVMVSRVKTLKNGKIYHALRCSGRIGGKSCNNETLNVTALKACVKRIFTDIPIDKTAVINAVIKGLSRTDKPDIPALRRKIETLNAKKRRAVDLMLDGLITQQELIEQKSYYDSIIEKLSQEISSDRSVFETDKIRKNAERFLDFTSDPLWLLVIRADYIHGTLTVYLKDIEKGFTTCFTATGRGDSYRVITGNTVRSQGIISGTMQVQKNWFRHDVNDK

SEQ ID NO: 4745 - protein, 533 aa, synthetic construct
MKQQIYNTALYLRLSRDDELQGESSSITTQRSMLRLYAKEHHLNVIDEYIDDGWSGTNFDRPSFQRMIEDIEAGKINCVVTKDLSRLGRNYIMTGQYTELYFPSHNVRYIAIDDGVDSEKGESEIAPFKNIINEWVARDTSRKVKTKFAEGAHYGAYAPLGYKKHPDIKGKLLVDDETKWIIEKIFSLAYQGYGSAKITKQLRAEKVPTASWLNFTRYGTFAHIFEGKPESKRYEWTIAHVKAILKSEVYIGNSVHNMQSTVSFKSKKKVRKPESEWFRVENTHEPIIDKEVFYRVQEQIKSRRRQTKEKATPIFAGLVKCADCGWSMRFGTNKTNKTPYSYYACSYYGQFGKGNCSMHYIRYDVLYQAVLERLQYWAKAVQQDEEKVLNKIQKAGNAERIREKKKKASTLKKAENRQNEIDRLFAKMYEDRACEKITERNFVMLSSKYQKEQIELEQQITSLREELSKMEQDMIGAEKWIELIKEYSVPKELTAPLLNAMIEKILIHEATTNEDNERIQEIEIYYRFIGRVE

SEQ ID NO: 4746 - protein, 492 aa, synthetic construct
MAAIDFNNVVDLYIRVSTSEQAEEGYSVAEQEERLRSYCAAYNYTINAVHVDPGFSGASLDRPAIKKVMYDVEHGRCKKVIVWKLDRLSRSQKDTLILLEDVFLANDCNFISLMESFDTSTPFGRCIVGILAAFAQMERENIKIRTMMGRQARIREGHFHGSRCPLGYKFQYAPDGTLLSNDLVVDPYTSKLVQEVYRLSLGGSSFSSIAAHMASTYGCSLYDWSRNTAIRRILSNPIYMGKVKVGNELYPGIHEPLVSETDWYMVAAMLKHNKEQQKRTYAYQISCGVYADNLLTGLLFCGDCGARMYARRVSQNKKKYICHSVAKTSPAMIKSDHCTNRLHPFTVHQLDEMVIDEILKLSLDRPGFDMLCEQPDDSSKSEDKKIYEERLAEVNRQLDRLVKLYQTGLIDLDNISARLGDLNQEKNFLEGNLATINEVTPAEIRETAWKSIQSLQSVLNNGDMDEVHRIIHTLIDKVVVLNTDVTIYWSFC

SEQ ID NO: 4747 - protein, 569 aa, synthetic construct
MSRLVKAYSYIRFSTPKQAQGDSYRRQIQQAIDYCAKHKLELDEKAIEDFGVSGFRGSNWTDGALGRFIEAVKSGAIAKGSYLLVESMDRLSRQTVLKAFTQFIEILNAGIVVVTLSDGEIFRTTDDGKNCDFAKLIISIVYMARANDESEMKSRRSRAAWSNGRKEARESNKVMTNSRLPTWLTREGERIVPIPERAAIVNEMFEMAKSGCGYEQIAKAFLEKGYKTFGKEADWRPAGIQAVIKSQAVIGVFQPHVIENGERVPDGEPILGYYPTIVSPALFEEVQHLIGTRSKHSGSYRKGTYSNLFSGVLRCQCGELLRYHNKGKAGNPRNYLVCPKQNITGCNLPNMLYDKVAPQLLQAVSLLTAVMRQRGAASEKTLALKDELAILQRKLELEAKKRNKAAQSMLELDDDAVFRELFTQCKANCQALEVQIHQLEDDIMGRELSEKTLGKMIVPDDLKNTEQRQRFNSQLKAAVKEISIIRTGDSVAAVFKDLDGQFMLEQAFKPKLAGSSIRDISGEELLRTTAEEPYIDADWVKAESNEFESIHHKSDSEFDDDFEDLKASK

SEQ ID NO: 4748 - protein, 450 aa, synthetic construct
MKRVALYMRVSTEQQAKHGDSLREQKETLYEYIDQHKDLKVANEYIDGGISGQKINRDEFQKLLQDVKENKIDIILFTKLDRWFRNLRHYLNTQEILEKHNVSWNAVSQQYYDTTTAYGRTFIAQVMSFAELEAQIDSERIKAVMANKIAQGEVVSGKTPLGYSIENKKLVINDDAPIVIDIFNYFLSSGSLRKTVYYLGSQYGIVRDYQSVKNMLTNKKYIGELRNNKNYCPPIIDKKLFYAVQKTLPKNLKTNAKRDYIFKGLLKCSDCQGSVAGQTIKARYKKKDGTESIYERTCYRCVKRRNNKLRCTNKHAFYEKNLESYIFEATKQKFEQIQINYSKKQPKTIKKKNSKKNIENKLDRLKKAYLNEVIDLEEYKKDREILMKELNEIEVEPAKIDMKNVEFILSKEFDEVYKESSKEEKNALWRSIIDTIVVSPDGNITVNFFI

SEQ ID NO: 4749 - protein, 461 aa, synthetic construct
MTVGIYIRVSTEEQAKEGFSISAQREKLQAYCIAQGWGEFKFYVDEGLSAKNMERPLLKSLLKHIETGLIDTVLVYKLDRLTRSVVDLHNMLNFFDKYDCSFKSATEVYDTSSAMGRFFITIISSVAQFERENTSERVSFGMEERARQGKYIPLAPFGFEKGEDGVLVIYEEEATLVLELVDRLQKGYSIRQCCTYLDNLGVKTRRSNTVWKNTTLKRILENHALYGATSWAGKVFKNTHPGIITEEEYLELQNILKARTGHVSSRKRALTHVFAGKIVCAECGYRMVCTRTKYQDRYNNDYRCPNCKIYYTHTSISERKLLKAFDDYIGSFRLSSFEIKNEAKKENNTLKIERQIVNLSKKREKYQKGWALDLIEDNEFSKLMKETQSELDQLEAELPKKIPTSEKSFDAIAIKNIVKNIKKNWKELTIEERKDFVNMFIQDIHYVKVDNIATITKIDFY

SEQ ID NO: 4750 - protein, 506 aa, synthetic construct
MRSVITYLRFSSATQGAEGADSTRRQNELFKQWLRKNSDAQVVASFNDEGLSGYKGKHLSGQFGDMLSRIESGEFPEGTILLVEAIDRIGRLEHLETEALMNRIIAHGIEIHTLQDGLIYTRDALSDDLGISIIQRVKSYIAHQESKQKSFRVSQKWEQRAKLALAGEQRLTRNVPGWIDPETFKLNEHAETVRLIFKLLLDGESLHNIARHLQSNGIRSFSRRKDANGFSVHSVRTILRSETAIGTLPASQRNDRPAIPNYYEAAIDASTFNKAQEILGKNRIGRTPASDNPLTINIFKGLFRCQCGASAHPTGTKNKYQGVYRCNNHLDGRCDVPPLKRKPFDRWMIDNFLGMIDVVSDGETERRIAALQHEVETVTARIKKATALLLEMDDITELKAQVKELNQKRTELQTTIDTLKRKTSLTDKELPQLKDIDLMTKAGRVECQLILSKHLKGLTLGKDSVTVTLQNDTEITIPTNPLPLNDGTSIFEIADKELLEIDAYQL

SEQ ID NO: 4751 - protein, 464 aa, synthetic construct
MKRAALYIRVSTMEQAKEGYSIPAQTDKLKAFAKAKDMAVTKVYTDPGFSGAKMERPALQEMISDIQNKKIDVVLVYKLDRLSRSQKNTLYLIEDVFLKNNVDFISMQESFDTSTPFGRATIGMLSVFAQLERDTITERMHMGRTERAKQGYYHGSGIVPLGYDYVDGELIINDYEAQIIQEIYDLYVNQGKGQQYITKRMVAKYPDKVKTLTIVKYALTNPLYIGKISWDGKVYDGHHTPIIDKSMYDKAQEIISRKAQKGGEQHGNQLGLLLGITYCGKCGAKVFRYVSGGKKYRYNYYMCRSVKKMLPSLVKDWNCKQPSLRQEVVEKKVIDSLKSLDFKKIERELKQVENKTKSKITTINNQISKKHNEKQKILDLYQYGTFDVTMLNERMKKIDNEINALTANISNLEGTKSESLINKLETLKTFNWETETTENKILIIKEFVERIELFDDEVIIKYKF

SEQ ID NO: 4752 - protein, 464 aa, synthetic construct
MKRAALYIRVSTMEQAKEGYSIPAQTDKLKAFAKAKDMAVTKVYTDPGFSGAKMERPALQEMISDIQNKKIDVVLVYKLDRLSRSQKNTLYLIEDVFLKNNVDFISMQESFDTSTPFGRATIGMLSVFAQLERDTITERMHMGRTERAKQGYYHGSGIVPLGYDYVDGELIINDYEAQIIQEIYDLYVNQGKGQQYITKRMVAKYPDKVKTLTIVKYALTNPLYIGKISWDGKVYDGHHTPIIDKSMYDKAQEIIARKAQKGGEQHGNQLGLLLGITYCGKCGAKVFRYVSGGKKYRYNYYMCRSVKKMLPSLVKDWNCKQPSLRQEVVEKKVIDSLKSLDFKKIERELKQVENKTKSKITTINNQISKKHNEKQKILDLYQYGTFDVTMLNERMKKIDNEINALTANIANLEGIKSESLINKLETLKTFNWETETTENKILIIKEFVERIELFDDEVIIKYKF

SEQ ID NO: 4753 - protein, 464 aa, synthetic construct
MKRAALYIRVSTMEQAKEGYSIPAQTDKLKAFAKAKDMAVAKVYTDPGFSGAKMERPALQEMISDIQNKKIDVVLVYKLDRLSRSQKNTLYLIEDVFLKNNVDFISMQESFDTSTPFGRATIGMLSVFAQLERDTITERMHMGRTERAKQGYYHGSGIVPLGYDYVDGELIINDYEAQIIQEIYDLYVNQGKGQQYITKRMVAKYPDKVKTLTIVKYALTNPLYIGKISWDGKVYDGHHTPIIDKSMYDKAQEIIARKAQKGGEQHGNQLGLLLGITYCGKCGAKVFRYVSGGKKYRYNYYMCRSVKKMLPSLVKDWNCKQPSLRQEVVEKKVIDSLKSLDFKKIERELKQVENKTKSKITTINNQISKKHNEKQKILDLYQYGTFDVTMLNERMKKIDNEINALTANIANLEGTKSESLINKLETLKTFNWETETTENKILIIKEFVERIELYDDEVIIKYKF

SEQ ID NO: 4754 - protein, 457 aa, synthetic construct
MRVACYDRTSVYEEAKISNDAQYDAVKEYILEKYEQIPQRFSDKGESGGKADRPAFRQLRAWVCASEEEGVIYVWRYDRLARQAQIALEFIELCQQHQVQVCSISEPLPASFSHASMNKLFVQLLFTFAEQQRNVIIENVRAGLAYKKQQRQYLSSAVPYGYRLVNGEIQQEAHEAKVVRHIFQLYLTKKYGYKKLCQQLTQQKFFFRERPFQPYHIYSILKNPLYYGEIKGGSLGKYLGTFEPILSKATFLQVQEIRQSRCTAKKDTYPYLLRQKIKCPFCGRHLSSKYQWNTKKTKTLHYYHCTDRSCQGIFLRAERVESEVLEKIQAFFQHEGVYQALIAQLTQQLAEKRKDEKHKVIQQKKQEAQWLKAFEEGNCSLEELKQQLQALQKPRSTSSFLSLQQCEAKVKEWLQLKDLSSRQLLCDHVCRIEVTKEKTVCGIYFRQLTQNILEGNE

SEQ ID NO: 4755 - protein, 668 aa, synthetic construct
MAYAKAKKHLKIWTKKKAALYVRVSTRYQVDKDSLPFQRKKLKEYCKFLGLEDYVIFEDDGYSAKNTERPHFQEMMSRVRSGEFSHLIVWKVDRVSRNLLDFAAMYQELKDHKVTFISMNEQFDTSTAIGEAMLKIILIFAELERNMTSERVTGIMLDRAEQGLWNGARMPVGYRWNDETKFPEPDPEEVKIVQLIFDKYEEWKSSIKIARYLNNNNFKSKRGGQWTSKLIHDIIRNPFYIGTYRYNLRESGRGPLKPESEWIVRENNHPAIIDKAQFDRCNKIMDQNGSSRDTSDLRARKYVHTFSGHLVCGKCGANMIASKDRARANGWRPSMYRCAQRSRMLDCDNSRTINESYIGPFIFNYIANLARVQKNFKNIATPEKLKRELLKGETFDGVAGILPEGLNLTFQALSFRQVGNGTYIPDIDFLGDSDGASDRDQIELLKSEIEKSKNAVTRLTDVYLFDPDSMTKEEFATKKKELAKKIEGMERQLADLLDDSGNDDLADMSFIKKASAFLVAQRIVSKSFVDYVGMAQELDNEILKDFIDQIVDQIVVLDGRVQSITFINGLKHEFRYTAPAELPVCKKCGGRIGSTCGCRTRTFDFSSKRYQRIKVGDPRDMLRGKKNPVCPECFAQEGRWHHWNCKIETCPICGGRLAECEHGPNSKN

SEQ ID NO: 4756 - protein, 506 aa, synthetic construct
MRTVITYLRFSSATQGAEGADSTRRQNELFKQWLRKNSDAQVVASFSDEGLSGYKGKHLTGQFGDMLARIESGEFSEGTVLLVEAIDRIGRLEHLETEALMNRIIAHGIEIHTLQDGLIYTRDALSDDLGISIIQRVKSYVAHQESKQKSFRVSQKWKQRAKLALAGEQRLTKMVPGWIDPDTFKCNEHAETVRLIFKLLLDGESLHNIARHLQANNISSFSRRKDANGFSVHSVRTILRSETTIGTLPASQRNDRPAIPNYYEAAIDAATFNKAQEILDKNRKGRTPASDNPLTINIFKGLFRCQCGASVHPTGTKNKYAGVYRCNNNPDGRCDVPPLKRKPFDKWMIDNFLGMIDVGNDGEAEGKIAALQHEVEIVTARIKKATALLLEMDDITELKTQVKGLNQKRTELQTTIDNMRRKASLTDKELPQLKDIDLMTKAGRVECQLILSKHLKGLTLGKDSVTVTLQNDTEIIVPTDPLPLNDGTSIFEIAEKELLEIDAYQL

SEQ ID NO: 4757 - protein, 502 aa, synthetic construct
MKREKEIKRVAVYLRKSREDENEVDTLLKHRIQLLDFVKSKGWEYEVYEEIGSSDTIEFRPKFSRLLQEVERGVYDAVVVVAFDRITRGDTWDYARIKAAFAKNQTLIVTPYGDKIDLSDNTNILNDIMATISRAELVRTKQRLHEGKKRGARLGHWVNGPAPLGYDYDRNTKKLKVNSEEKEIIRLIFDKYLAGEPMYEIAFYLNNLGYRTKNGSYFQDAQIQRILTNLVYTGTVVYGKTEGSGHLNRKTKPLRVKDEDEWIITPNAHEPIVTQEEFNKVQRMMALRNRVPVKARQGAFALSGLLRCGKCGYAMRFTYTKKKKGTVVYVAKCQKSDPFGNRCGNQGIELNVLLQAIEDKIVSYFRQLDPTSNDEEYSKRLERFHREIAAIQKEIKNVENAKERIEFLFIKNRIDIDRYDELIEEENRKLDKLNKELKNLERQFNKTKDDYPEERYQRLKNFISKYSIFNEPNQVNQVLKTIIDRIYYKRDGDNIRLKIIYL

SEQ ID NO: 4758 - protein, 452 aa, synthetic construct
MKAAIYIRVSTQEQVENYSIQAQTEKLTALCRSKDWDVYDTFIDGGYSGSNMNRPALNEMLSKLHEIDAVVVYRLDRLSRSQKDTITLIEEYFLKNNVEFVSLSETLDTSSPFGRAMIGILSVFAQLERETIRDRMVMGKIKRIEAGLPLTTAKGRTFGYDVIDTKLYINEEEAKQLRLIYDIFEEEQSITFLQKRLKKLGFKVRTYNRYNNWLTNDLYCGYVSYKDKVHVKGIHEPIISEEQFYRVQEIFSRMGKNPNMNRDSASLLNNLVVCGKCGLGFVHRRKDTVSRGKKYHYRYYSCKTYKHTHELEKCGNKIWRADKLEELIIDRVNNYSFASRNVDKEDELDSLNEKLKIEHTKKKRLFDLYISGSYEVSELDSMMSDIDAQINYYEAQIEANEELKKNKKIQENLADLATVDFDSLEFREKQLYLKSLINKIYIDGEQVTIEWL

SEQ ID NO: 4759 - protein, 558 aa, synthetic construct
MTKLYSYIRFSSMRQSDGSSYERQIRMAKEIADRYNLELVNDYQDLGVSAFKGANSKTGALSRFLDEIGRSIPVGSWLFIENLDRLSRQDIISAQELFLSIIRRGITIVTGMDNKIYSIETVTANPMDLMFSILLFIRGNEESQTKRNRTNSSALLKIKAHQQNPQNPAVAIEEIGKNMWWTDTTSGRVLPHPVYFPVLQKIVQLRQEGHSAGVILDYLNEHHEPPAPTSNKKHGKWSRAMVSRLFATKALIGVKTVNVDGVEYELRDYYPRVLSDSEFYFLRKNIVKKAWDYSHVKEKVIPLLSGIGVLRCVHCGATMVKQTAANGKREQYRYCCDGRKSGRTDCPYPNWGFRAVTLEGAVLQLLADKIWIAEDKTNPIPEIQVKIDEISRKIDNLINLSAMTGATKELANQITDLNSQREALHEEIRLFEREMYSVDSQGWDKLAQFDLSDVQNEERLKVRLKIKGALHEIECSRIDSKKNLFVLVYLDGLRQRLVIENNRGLKKGQIFVDLKTINDRQILESAGMVLHPCIEMIIDADWKAPEEIPGLLSEEFGI

SEQ ID NO: 4760 - protein, 449 aa, synthetic construct
MKQVIGYLRQSTMKQQSLAAQKQAIEAIAEKHHIQHINFYSDKQSGRKDNRSGYRQLTQLIQQGQCDILCCYRLNRLHRNLKNALKLIKLCQTYHVHILSVHDGYFDMDQAFDRLKLNIFISLAELESDNIGEQVRNGLQEKAKQGRLITTHAPFGYDYHNGTFIINQNESPTVKAVFNYYIKGHGYKKIAQLLEEDNTYINRQPYQVRNIIINPNYCGRVNNQYGQFDNMFPSIVSTSIYEQAQRLRSQKQTKQTSSDNQLKQKIKCPCCNATLTNMTVRKKNHILRYYVCPKNMNASRFVCDFKGINAQTLEDKVLKVCQDFYQDQHIYVKIKNAIDKRIKRQRNIEKHHTLTQEQLIEKLAQGIIDAETFRKQTQSLRQQPQRTTSINGHQIQHTIQNIIQKRFTLNILYPYIETIHITKDKNLIGIYFKNEPLNIVNQAMQSSIA

SEQ ID NO: 4761 - protein, 541 aa, synthetic construct
MDKMKKKLVGGYIRVSTERQVEGYSIEGQITQIEQYCQFNGYELVDIYADRGISGKSMNRPELQRMLNDAKNGKLDCVMVYKTNRLARNTSDLLTIVEELHRQNVEFFSLSERMEVKNSTGKLMLQILASFSEFERNTILENIYNGQHQRALKGYYQGNLPLGYNNIPDNKKELMINQHEANIVKYIFESYAKGHGYRKIANALNHKGYVTKKGNPFSINSITYILVNPFYIGKIQFAKYKDWNEKRRKGLNDKPIIADGKHPPIISQELWDKVQSRKKQVSQKPQVHGKGTNLLTGIIHCPQCGAPMAASNTTNTLKDGTKKRIRYYSCSNFRNKGSKVCSANSVRADVIEKYVMDQILEIVKSDKVLKQVVERVNQDNQVDVAALNHDIAYKQQQFDEVNIKLKNLVQTIEDNPDLTSALKPTIHQYETKLNDITNQMNQLKQQQNQEKPSYDTKQIAALLQRIFQNIESMDKSQLKALYLTVIDRIDIRKDENHKKQFYVTLKLNNEIIKQLFNNNNLDEVLLSTSSLFLPQTLYFQI

SEQ ID NO: 4762 - protein, 449 aa, synthetic construct
MKQVIGYLRQSTMKQQSLAAQKQAIEAIAEKHHIQHINFYSDKQSGRKDNRSGYRQLTQLIQQGQCDILCCYRLNRLHRNLKNALKLIKLCQTYHVHILSVHDGYFDIDQAFDRLKLNIFISLAELESDNIGEQVRNGLQEKAKQGRLITTHAPFGYDYHNGTFIINQNESPTVKAVFNYYIKGHGYKKIAQLLEEDNTYINRQPYQVRNIIINPNYCGRVNNQYGQFDNMFPSIVSTSIYEQAQRLRSQKQTKQTSSDNQLKQKIKCPCCNATLTNMTVRKKNHILRYYVCPKNMNASRFVCDFKGINAQTLEDKVLKVCQDFYQDQHIYVKIKNAIDKRIKRQRNIEKHHTLTQEQLIEKLAQGIIDAETFRKQTQSLRQQPQRTTSINGHQIQHTIQNIIQKRFTLNILYPYIETIHITKDKNLIGIYFKNEPLNIVNQAMQSSIA

SEQ ID NO: 4763 - protein, 604 aa, synthetic construct
MAKIIGYARVSTTKQDLSRQKLKIKEFCENNNYELIEIIEDFGISGVVADRKGYIELQSKTYKDADMIVISELSRLSRQEDVTETVYNIQQIINKGLSVILLDSPSKIYEANKLLDITEILILTIKAWAAAQERLDIKKKNQDGKQALFQSYPYAVVDQKIPYGYKAVPNPNGKRPKYILEEVPEEVENIKRLFALVNSGKTLGAVARYFNERNITFRGYYSTVAILSNYIHSDIYRGIRRRTQKLGREEPYTIEVRIKPIISEEDFMKAQELIKNNYKNTPTGKVNHNPLKGIIRCRCGRAMTVKDKKPAAGISKLTYRCSCVDRKSHPDFCKYNIDEVSYDLTNEILYSLFKSMHTAEYINFFRNQTDNRVTELQEEVAGIEKRLSTLYLDKENLSNESKENANKFLLTTNPTLLNIIQERQNQLDEKIKSIDKEIIRYKKSQSKKIADIERIKDNNGKEKLQNLTIEEQGELYHKYLERVNYIPVTTMQGYYIVQFLNGIKFYIAITKVRSIAMASLLLDNWTIDEKGIITANYDTLKSNSMKNFSIETIRKTKTMTLQEYLKSDLAKERALHLDLSYRKRYLEELHKAGLDGRLRPLKKE

SEQ ID NO: 4764 - protein, 539 aa, synthetic construct
MLRQATQNLITALYPRLSHEDELQGESNSISNQKRILEAYAKQNGFTNLRWYTDDGYSGANFQRPGFQAMLADIEAGKVGTVIVKDMSRLGRNYLQVGFYTEMLFPQKGVRFIAVNDNVDSANGGMDNDFTPLRNLFNEWLVRDTSKKIKAVKKAKGMSGKPVTSKPVYGYLMDKDENYIVDEEAAPVVRQIYQLCLVGNGPTKIARMLTEQQIPTPGTLEYRRTGSTRRYHPGYECKWATNTVVHLLENREYTGCLVNFKTEKPSYKVKHSVENPIEKQAIFPNHHEPIIDTETWERVQELRKQRKRPNRYDEVGLFSGMLFCADCGHVLYQQRYQNKNRKQDCYICGSYKKRTRDCTAHFIRTDLLTAGVLSNLRQVTEYAARHESRFVKLLIQQNEIGGKRKTAAATKQLEQAQTRIAEVNRIIKRLYEDNVSGKISDERFMELSADYEQEQRELKDRAAALQEELSKSQAATVNAEKFMGIVRKHLAFEELTPTLLREMIEKIVVHECSYDENGTRRQDIEIYYSFVGKIDLPEA

SEQ ID NO: 4765 - protein, 772 aa, synthetic construct
MRYNPFVYIRSEKDVLKVVNTLIVNTKGEGEKSAEDFWVKAERLLYCALIGYIWYEAPAEEMNFTTLLELINASEAREDDEEYQSPVDLLFADLEERSPDHFAVKQYKKYKLAAGVVCSKRLLNQAVGKSLRTHNLKPKKGAQAMRKNEKITALYERLSRDDFGKDDDQQRESNSISNQKAMLEEFAARQGFTNIVHFTDDGISGTCFDRPGFLALMREVEAGNVEYLCLKDMSRMGRDYLKVGQIMEILRQRGVRLIAINDGVDSARGDDDFTPFRNIMNEYYARDTSRKIRSTFQSKGKSGKHLTGTVIYGYLWNEARDQWLVDSEAAEVVKRIFAMTIDGYGPYQIASKLKSEKVLIPSAYLAQHGEGVNKNKTFKDVYGWGSSTICNILEKREYLGHTINFKTRKHFKDKKSHYVPEDEWTIFENTHEAIIDQQTFDLVQKIRSKVRRYPDGWGEAAPLTGLLYCADCGGKMYVHRTNNGKRISQYTCSQYSKIPVGKLCATQHRINEEVVLSLISDMLKAIAEYAKHDRAEFVRVVQEAQSSQQTAAVRKHRTRLAAAKQRVSELEVLLCKIYEDNILGKLSDSRYATLDAQYAKEQSELNSEIASLEKAVDGYEKHEKDVDHFIALIDKYESFDKLTIAMLNEFVEKILVHERDRKGSTQTTQEVEIYFNFVGRFVPPSFGEVELTPEELEEIRKREERKDRLHQNYLKRKASGAQKRYENKIKEKRKAEIEAKKAAIRAEDIAKGVFVPVSQLPAKEPKKGVQTA

SEQ ID NO: 4766 - protein, 561 aa, synthetic construct
MEREKIKVYIYTRVSTAMQIDGYSLDAQKSRMKAFAEFNDYEIVGEYEDAGKSGKSIEGRLEFNRMMEDIKTGKDGVSFVLVFKLSRFGRNAADVLSTLQVMQDFGVNLICVEDGIDSSKDAGKLMISVLSAVAEIERENIRVQTMEGRIQKAREGKWNGGFAPYGYSLEKGQLFINEEEAEAICVIFDQYVHTDIGANGLAKYLENHGIRKIPRQNGKNPLFDAALIRRILKNPVYCGKIAYGRRRTEKVHGTRNDYKLVEQDDYLLVDGLHEGIVSEELWHEAQVKLLAQAKKYEKVNHGKDNKIHLLSGIVKCPVCGAGMYGNKSIKHKSDGTKYKDFFYYGCKHRTMTRGHKCDYKKQVNEELLDDAVAEVIVKLVSNPKFAAMMQEKINMKVDTSVIEQEIAAHEKQLRQSYSTKTRLMEEIDSLDPDDKHYIKRKADLNDRLYKMYDKIEDTENLLIAARAKKMSIEAEKLTGDNIYKVLIYFDKLYAVMNEQEKRQVMESLISEIQIYPERQENGQWLKSIKFKLPIIEEDMNISLDNDTHIETVVLLSRLKQK

SEQ ID NO: 4767 - protein, 611 aa, synthetic construct
MNTAVNEYNYRFKLTDYAQFDRNRARNVAIYGRVSTEHEAQLSALENQLQWYDDQVKYHPNWTVCERYIDEGITGTQAKKRPAFLKMIEDAKQGKFDLIVTREVCRFARNVVDTLVVTRELKGIGVEVFFIDDNIWTMDGDGELRLSLMATLAQEESRKTSERVKAGQKISRDNGVLYGNGNILGYDRVGDTYVINEEQAETVRMIYDLYLQGYGSMKIAKILTERKRKTASGLIKWSVSNIMRAIKNATYTGTKCYNKSRSNNFLEQKRINNLDMSTYEYVEGDFPAIISQEIWDKAQAIRESRVKPVCVSAGKNTHSKRDSRDIWVNKLRCSCGSSYRKNKWHTKLDGKTSYGYQCYNQLNNGIKRKRAEIGLDTEGYCDSRMITDWKLDFMAKALLEHLWTERKESVLIALDLIKCYYKEEKSNETQSDTVTIQAKLDKANSRLTNLIAMRADGEISKDEYQAMRSPVDEEIKKLQKALDEIPQEKSNPKGLDIEGIRSTLNSLVDFSGSTISHDVVNRFVYLITPTSDTTFDWYVNLNGTADVKATFTAEGRKKNCIIKLEEIEKISSVHRGENEDNAHFIKNPHIFTYLHRLQSLRRMQNKHIQIL

SEQ ID NO: 4768 - protein, 575 aa, synthetic construct
MENFELKGFAKGKKQQKEQVGGNAIIYTRVSSSEQVDGQSLEVQIDKCREYANMHSYNIVGEFGGTYESAKSDKERKEFSRMLTFIKQSNKKGSNQIVKTVIVFSTSRFSRTGSTTIIEEVEARGAYVVSATSNYDPRTPVGKYMQLMELANARFQNDEKRATTVENSVKALLKGRWIGKAPRGYDQKTTKKEQIITINEEGKLIRKAFLWKANNKLSNEEIRHRLAAEGFHICKQKLSEVFKNPFYCGYMAHKFLQGDIVQGNHPPLIPKEIFLKVNGELSKNHSGYEQKIDKEYAPLLGSIKCPCCGNNLSASISTKMRKKFGRTDIGYYVCSRKGCKYNSSTKNVHEAFEEEANKYVLSDKVSELLKLQLTITFENMNKENKERAQSIKSNIKAKEKELEQVETNYVLCSDTKKQEICVKVMTRLEEEIRGLQAEYSKVNTKILNLDKFIDYAFAMRSNLFNLWELQGLEGRRRLQKLVFPDGFIYDKNNEHIEPKTVNQFFLLNYSFPTNNGDKKRETNSENHRSSLQVLEAGLEPAQPQWPKDFKSFVSTIPPFEHPFKESGKRDSNSRP

SEQ ID NO: 4769 - protein, 678 aa, synthetic construct
MVKKAAILARVSRDRQETESQIKDLQFDAELEGYVVPEEYIFSEKITGMDSYDKEERESLQNLKSVIETKQDIEVVFMWELTRLSRNPYFLIEQLRWFNYRKIPIYFHDLEKWTINRETLVEDFETTNRIFGAATYGQQEWEKIKKRTKRGRDAKARKGLFVGHIADGYKVALVGLEKHIVLDEERVPLIKDIFNMYTEQQMSTDRIARELNERGILTFNALEAKRNEGNDRFSQVYKKKNTNIELLKSEIKWTASSIGQLLKNRWYIGERQYNKVTYGVPSIISEEQFEKVQHQLIYNKKVITKRRESVYPLKGLLVCGKCGQLMYGHKVRINSSYYCSSLETGKKCGAEGICKQNIDGIIWDYIQYIQFYMLRHYGMAKLSTIFGLENIDKELLQESIDKKKLKIKQKKQRIEDLSIGLAELIIQKSSSVNATIINVFSKKQIQIEKDIDSIENEIKELEVQIAEDERIIDRNASIDETISDKIGEVERSHDMKRVYDIIHQLILRVTLYNLEDYYKLIEIEVSSHRKFYAIYNSRKLKGRYIQVPFTNDDFSYNKETNRFQHRYKFIGMLNTMEIEKEGKMLTREMISKHSEGDIDKLIEVSRERSLPYLLCDFSTTELIGFLGNWHYIRNIRRIELEPSDEEFQKWKEDYKKWDKVRNMRKKEKRKLLKSEVKE

SEQ ID NO: 4770 - protein, 591 aa, synthetic construct
MKEVEIIKKNDHLENRRRGKYIDRKRVAAYCRVSTDSEDQLNSYKSQVSYYTDLINNNIEWCMVDIYADEAITGTQVNKREDFQRMINDCMNNEIDMIITKSISRFARNTLDTLKYVRMLKEKNIAVYFEDEKINTLTMDGELLLVVLSSVAQQEVENISANVKKGLNMKMRRGELVGFQGCLGYDYHKEDKTLTINEKEAEIVKYIFNRYIEGAGGSIIGQELENLGYKTKYGSTTWSNSTVLGIIKNEKYIGDVLLGKTFTVDPISKRRLDNLGEEEKYYVKNNHEPIISREIFDKAHEILNRRSKNRGKYEEGVTKREKYSRKYAFSCMMECGFCGGTLTRRNWHSGSEYSKVIWQCVVATKKGKKYCTESKGIPERVIENAFVESYRLLCDEKKSVLEELLSRINDTVGSSEVNNKIRKIEKELSVIEKKINNLVDMRLDDIIEKETYEKKYQELIDNQEKLLNERNKLNVVAKNEKSMKQRLKEFKKTLEENEVLDKFDRGVFESVVEKVIIGEKNKDGENDPTKITFIYKTGFKNTLSSNEFKIPRKNARGRHKRKELCLHGNNEVENLCSHSSSNTRRDSCKIK

SEQ ID NO: 4771 - protein, 536 aa, synthetic construct
MLRQTNQQPITALYPRLSHEDELQGESNSISNQKRILETYAKQNGFSNLRWYTDDGYSGANFQRPGFQAMLADIEAGKVGTVIVKDMSRLGRNYLQVGMYTEMIFPQKGVRFIAINDGVDSAQGDNDFAPLRNIFNEWLVRDTSKKIKAVKRSKGMSGKPITSKPVYGYLMDEDENFIIDEEAAPVVKQIYNLCLAGNGPTKIARMLTEQQIPTPGTLEYRRTGSTRRYHPGYECKWATNTVVHILENREYTGCLVNFKTEKLSYKVKHSVENPPEKQVIFENHHEPIIDTQTWERVQELRKQRKRPNRYDEVGLFSGILFCADCGSVMYQQRYQTDKRKQDCYICGSYKKRTHDCTAHFIRTDLLTAGVLSNLRKVTSYAAKHEARFMKLLIEQNEDGGKRRNAAKKKELEAAEKRIAELSAIFKRLYEDSVTGRISDERFTELSADYEAEQRELKERAAAIQAELSKAQEATVNAEKFMNVVRRHTSFEELTPTLLREFVEKIVVHECSYDENKTRRQDIEIYYSFVGKVDLPE

SEQ ID NO: 4772 - protein, 481 aa, synthetic construct
MKRVAIYVRVSTLNQAEEGYSISEQTDKLKAYCVAKGWTVAEIYTDAGFTGSNIDRPGLQQLINDISVQKFDTVLIYKLDRLSRSVRDTLYLAKDVFAKNNIDFVSLSENIDTSSAMGGLFLTILSAISEFERETIKERMQLGKLGRAKSGKSMMWSRTAFGYLHNTDTGVLEIEPLQAEVVKQIFQEYLNGMSITKLRDKLNSEGHTGKDKPWSYRALRATLANPVYTGKVKYNNQIFDGLHQAIISPELFQAVQSELEIRQKEAYQKNNNPRPFQSKYILSGIAKCGYCKTPLQVILGSVRKDGSRDIKYQCKNRFPRKTKGVTIYNDNKKCDSGFYYMSDIEAEVIDQISLLQLNNGALENLISINSEPVIDTTEFEKQLINIDNKIKRLSDLYINDMISLDEMKQRSENLKKDRDALKNKITSSNKTSSTDRLKTARKLIGKKPIESLSYEQQKNIINRIISRVYVTAETVDITWSL

SEQ ID NO: 4773 - protein, 540 aa, synthetic construct
MKQPYNTTIYNTALYLRLSRDDELQGESGSIQTQRMMLRQYAAEHGLTVVDEYIDDGWSGTNFERPSFQRMIDDIEDGKINCVVTKDLSRLGRNYILTGQYTEIYFPSKGVRYIAINDNVDTINGESELAPFLNILNEMHARQTSKKVKAAMHTRFANGAHYGAYAPLGYVKDPDKKGHLLIDPETRWIVEKIFDLAVHGRGAASITRILVEEKVPTPGWLNYERYGTFANIYAGAPAEKAYAWTIAQVKSILKEETYIGHSIHNKQSNISFKNKKKVRKPQEEWYRVENTHEAIISEEVFQKVQELIASRRRKRRNGTTQIFAGLIKCADCGWSLAYGENKQNKNPYGYYHCSKHGQGLRQCSMHYIRYDVLYAYVLARLQYWSMLAQKDEDNLLKRLLNASDRERNSAKKKQAAELKKAEKRKAEVDGLFAKMYEDWSAGRITEYNFNMLSEKYQNEQKELETKIRQLHETMEAAVQTAADAEKWIALMKQYVNPVELTAELLNTLIEKITVHEAVKGEDGSREQEVEIYYRFIGKID

SEQ ID NO: 4774 - protein, 576 aa, synthetic construct
MRGAIYSRVSTIDQDYNRQTNELKEYAKYMGIEITHVFEEKESGFNDDRPEFAKLKELTKDDIDIVLVWELSRLSRRSLYLQQQIEYFTKKGICVYAKKENLRTLDENGEEDRNTKFIIGIIAMIAEQEVATLKSRSISSKRNKIIKEGNSYTYKAPYGYDYSTETKKLSINEEEAKTVRRVIELSANDYSSARIALILNAENIPTRSKTKIWTMGTINTMLSNPVYKGEAEYMLKGTEPKKGKRYKRPIEVAIVKTPTIVSAELFDLSREKMKGRAFRSKSTGVKHFQLLRGLIYCPYCKIKYTYEGGRDLYVCHDKHKKAKNKPDCFSKAIKATRIEKIVWELVRLLFSQELATGKAQEQEEPLRQEIEAHKKLLIGIEDKLNDLTAQANAIVNAAIDIKREMPNMPDLYINKLREAASLDKESKKYQYEKDRLNKLILSCEDKIKAINSLSNEKVLVDSITDDMERYELIHKVIDHMVIYGEDSIYSLVVVTFKTGQEVYIGYKSKGYQYYTIFHPSQSVWFDTEKRLGYITTMKSPDSLVLSLETVTKEYSVTNFIKVLDVPKNRRYYENQS

SEQ ID NO: 4775 - protein, 556 aa, synthetic construct
MAMMNEMEYRTIGSALAGGYRAAVYCRLSRDDDLQGESASIANQRDMLEKYCEKQGWEVVAVYQDDGFTGLNMERPDLQRMLRAIERRQINLVITKDLSRLGRNYLQTGHLIEDFFPRNGVRYIAMNDGIDTLRDNNDIAPFKNILNEMYSKDISKKVHSSYLLKAQKGQFTGCLAPFGYRKDPEDKNHLLIDEETAPIVRLIFGYALNGHGPNYIRRRLEEEKIPCPTWWNRERGLRNTRTKWEKKDPENGRYMWDFSVIKDLLMNPVYTGAIASQKKDYRFKIGTIGEKKPEDWIVVEGQHEPLIDRMSFDIVQNKLKSRQRPGQTNEISLFAGLIKCGECGKSLTVRYTNAKHPQRIYSCKTYNAFGKNHCTQHRIDYDTLYSHVLRKIRECARAALMDGKAVADRLTNTCEAEQREQREAMERSLTRDEERIEVLDKMVMRLYEDMIAGRISEQNFNTMLEKTQTEQTELKTKVSESRKRLSDEVQLANDAKQWVEAIQEYANITELDAATLNRLIKEIVVHERIDEDKTRHISIEIHFNLKPIPEVEQVTA

SEQ ID NO: 4776 - protein, 546 aa, synthetic construct
MARKKKFAPNDNNLAIAYYRFSSHSQNDASIDQQRELAHEWADAHGFKIVQEYEDAAISGTTDARPGFQQMLSEVAKIRPHTLIMWKTDRLGRDKYVLAMAKKKIRDAGCEIHLLAENIPTEGPEGVLIEGLMEAMAEYYSRQLSQNIQRGMDYNAQHALYNGHKLFGYDVDRSTKKYIPDPNTAPFVQWAFGEYASGKPLKTIAEEMNAQGLRTPRNAKFSVNMLNKMLKNRAYIGEYHHGDITVEGGMPVLVDEATFDRAQRRFAENKRKGSQRAHGMDDAEAPRYWLTGKLYCGECGSTMQGVSGTSKTGRTYYYYYCSAQRRKECHLHKARKQDLEDMVLFALHNIVDDEENVTALALDAAEYYEKSHDDTAYLEALEAKRREVEKSLANLVKVIEKGVVSDTVTQRLAQLEEQKSALNDAIGTENVRASLCEDRHSIQAYFDKFLHADVNDPEIRDQVFEYFVDKVYLYDDKLVVSMWFSEDDKQEITWRDWFSLDEYWTDESPFVKGGGVEFDCFPLGSTEQNAPPSGRGVSFFRAYNRR

SEQ ID NO: 4777 - protein, 523 aa, synthetic construct
MRQVITYLRFSSKPQERGDSIRRQKGLFERWLKDNPDAKVVDEFSDEGASAYHGHHLKGDFGRMLQNIQDGKYLSGQTVLLVESETRLNRQKARNTENLVDLITGKGVDVICLESGKIYTSTNIDDLDTSIQLKIAAHIAHQQSKEKSIKVSAAWEHRAQLALEGKQQLTKNVPGWIDPDTRKLNEHSSTVVTIFDLLLSGESLHNIARYLQANNIKSFSRREKANGFSVHSVRTILRSESTVGTLAASKRNDRPAIPNYYEPAIDVATFNKAQEILSKNRVGRAPASDNPITINLFKGIIRCQCGASVHPTGVKATYQGVYRCNNVPDGRCNVPTIKRKPFDKWMLDNIIGFLERSDGNNTDKRKAEIEFQISLVTSKLKKAATLLLELDDVTELKEQVKELNIQRINMQSELDDLNQRETLSDKPLHHLSEIDLTTKAGRVEAQLILSKFVQSIELQREMIIITLRNGAVIGKSRDLSPALSQDLMKQVVSSSSPRDIDMFSVITSDEEFRKSGKPVTKRS

SEQ ID NO: 4778 - protein, 540 aa, synthetic construct
MKQPYNTTIYNTALYMRLSRDDENYGDSVSIETQRTILQQYAKEQGLHVVGEYVDDGWSGTNFERPDFQRMMDDVDAGKVNCIVTKDLSRFGREHVMMDYYLEFLFPEKRVRYIAVAENEDTEKGLSDFVPFKNLFNEWFAKDTSRKVKAAFKAKFATGQRIGAYAPIGYRKHPEIKNKLIIDEETRWIVEKIFDLAIHGRGAASITRILIMEKVPTPGFINFQRDGTFANIYAGAPEKKSYAWTIAQVKSIMKDETYIGHTIHYRETNISFKNKRRVRKPQSEWVRVENTQEPIISEQVFRQVQEQIANRRRKCKDGTTQIFSGLVKCADCGWSLSYGENRQNSKPYGHYHCSKYGQGTRQCSMHYIRYDVLYAYVLSRLQYWSGLVQHDEERLLKRLLNATDKGQAAARKKQAAELKKAEKRKAEVDTLFARMYEDWAAGRITEYNFSMLSGKYQSEQAELDEKIERLQSAIATESQNAADAEKWIALMKECVNPTELTAELLNTLIEKIVVHEAVKGEDGSREQEVEIFYRFIGKID

SEQ ID NO: 4779 - protein, 556 aa, synthetic construct
MAMMNEMEYRTIGSALAGGYRAAVYCRLSKDDDLQGESASIANQRDMLEKYCEKQGWEVVAVYQDDGFTGLNMERPDLQRMLRAIERRQINLVITKDLSRLGRNYLQTGHLIEDFFPRNGVRYIAMNDGIDTLRDNNDIAPFKNILNEMYSKDISKKVHSSYLLKAQKGQFTGCLAPFGYRKDPEDKNHLLIDEETAPIVRLIFGYALNGHGPNYIRRRLEEEKIPCPTWWNRERGLRNTRTKWEKKDPENGRYMWDFSVIKDLLMNPVYTGAIASQKKNYRFKIGTIGEKKPEDWIVVEGQHEPLIDRMSFDIVQNKLKSRQRPGQTNEISLFAGLIKCGECGKSLTIRYTNAKHPQQIYSCKTYNAFGKNHCTQHRIDYDTLYSHVLRKIRECARAALMDGEAVADRLTNTCEAEQREQREAMERSLTRDEERIEVLDKMVMRLYEDMIAGRISEQNFNTMLEKTQTEQAELKAKVSEGRKRLSDEVQLANDAKQWVEAIQEYANITELDAATLNRLIKEIVVHERIDEDKTRHISIEIHFNLKPIPEVEQVTA

SEQ ID NO: 4780 - protein, 679 aa, synthetic construct
MNNMDKKVLIYCRVSTQQQTTDRQKEELLKFVEDNHWNVEEEDIFIDVISGFKKGEFRPEYAKMLERVEYGDIDIILFSEFSRLARNATELLEQIKLFIDKGINLYFDKQKLWVRDSNKDVGSLILLHVLAVMSSYEIELFVERSLSGKITKVQAGHGGGDERAYGYMHNENKQIVINPIESKIVARIFEMYVGGYSSIQISEILNAEKVPAPYIRKLNEYKKNREAKGLEVKEYKFDTDNLKWRISTINRLMHNELYKGNRRITFYKPDPTNPLPLSERQDREIVYEYSEHVESLRIVSDELFQQAQDKLSKAHYNKNNAVRHENLLKHLMVCGECGANFSVGKSNETSKNYISGGRTYKCYGRVNRKDKPRTCTNGAELRQWKLDGLVLQLSIQMFAEINIQQSNILKIENLGKEIEELVQIKSSKNTELVEAENLYKKTLKRLIAIEDDEVAKNLISDAKHKYDETKNVLNKTMDKLSREITTKRITIDNLRRLNANPLLINKMDEIRKNRDLVKTMVDEYIDKITIFRLHELWLLVVVSYKGGEEMWGTIKCARYKKEEMFYDELHCHYGVEFQGWLLNNTEHCFSYDKSTRIITYHGGSKIYVEFKSGEYDYDTFNQMIQETGWMGCFPFYAYEDSDKDLSVPFNEKFRKSLQENRVDWKARNDKVLERLLSES

SEQ ID NO: 4781 - protein, 540 aa, synthetic construct
MKQPYNTTIYNTALYLRLSRDDELQGESGSIQTQRMMLRQYAAEHGLTVVDEYIDDGWSGTNFERPSFQRMIDDIEDGKINCVVTKDLSRLGRNYILTGQYTEIYFPSKGVRYIAINDNVDTINGESELAPFLNILNEMHARQTSKKVKAAMHTRFANGAHYGAYAPLGYVKDPDKKGHLLIDPETRWIVEKIFDLAVHGRGAASITRILVEEKVPTPGWLNYERYGTFANIYAGAPAEKAYAWTIAQVKSILKEETYIGHSIHNKQSNISFKNKKKVRKPQEEWYRVENTHEAIISEEVFQKVQELIASRRRKRRNGTTQIFAGLIKCADCGWSLAYGENKQNKNPYGYYHCSKNGQGLRQCSMHYIRYDVLYAYVLARLQYWSMLAQKDEDKLLKRLLNASDRERNSAKKKQAAELKKAEKRKAEVDGLFAKMYEDWSAGRITEYNFNMLSEKYQNEQKELETKIRQLHEMMEAAVQTAADAEKWIALMKHYVNPVELTAELLNTLIEKITVHEAVKGEDGSREQEVEIYYRFIGKID

SEQ ID NO: 4782 - protein, 558 aa, synthetic construct
MKRVIGYIRVSTDNQDLERQRVLIRKYCENKGYSLLRIEEDYAISGTVSNRNGLNSILNITNSVADMVVVSELSRLSRQDDIFETLTQIHTIIRNVDLVILDEPDKVYEAGKTIILSDFLMLAIKAYGAADERKKIVSRMTTGKDSKVQAFPLMLTDSNIPTGFKAVPNPNYIKGATPKMLLVEDEERMQLVRDIFNYVANGLSLGKTAEKLNMLGYRTARNKPFYEQSIRIIINDSIYNGVRYWKGMKLELPVKFISDEIWNLAHKKVQENKNYSGEAQKHYNPLKGIIKCPCGQTSMYGRTSSCITYRCLDRIKMGIKSPCTNVGIKAETLIYAVWKDVRLRTLDETYQAKSNEKIAEIEAENIKLTQSIKEKDSEIAKLQSDLKTVIDNVMASTNITIVKALNGKADSIDSQIKSIEAEKKAIDEEIASNNRRIADEIKSQSRKELDSLSLEGKGEMFRELLSKVVYYSVSLNSGFIVITYKNDLETIIAYHNRNKPFLWALPITFRFNKVKRTVIVPTLPEQPKMTSFVLERIKEKEYTFKQLQESFNLEEYKI

SEQ ID NO: 4783 - protein, 637 aa, synthetic construct
MAGIRTENKIYEVGIYCRLSKDDGTDNESASIATQKSILTDYVKRQGWHLAKTYVDDGYSGTNFQRPSFQNMIKDIENGLINCVITKDLSRLGRNYLDCGLYLEVFFPEHNVRYIAVNDGVDTLNKSAMDITPFRNILNEMYSADVSVKIKSAYRARFQQGKFMGTTAPYGYVKDPADHNHLLIDDKVAHVVREIFDLALAGNGIAKIRKHINKQHILRPAAYAVEQGATGYERYFEDNEENRYIWSENSVRGILRSPIYAGNLAGYKRIAANMKSKKRPSKLPEEWEVIPDTHEGIVTQEEFDTVQQLMTSRRREQNAGGFENIFSGVIKCADCGYAMRAASANRRKRPDIIDCVQYTCNNYGRYGNVMCTAHSIEARDLFNAVLADINRFADMAVNDEKAVRAIERRLTETDQSRAKSLEKEKKKLNKRLAELDRLFSSLYEDKVMERITERNFEMMSGKYQKEQLEIEARLKEVTETLNDSYEKSQGVRDFLSLIRNYQGLKELDATIINALIDKILVSEREKLADGTVRQEIKIYYKFIGFVGELHITPTKRWTALKPKNCTVCGVEYVPSSGISKYCPACAKRIQREKSNESKRRSRERNRRACIELSAKNDRLIWSSVPVELSVRAMKIRR

SEQ ID NO: 4784 - protein, 679 aa, synthetic construct
MNNMDKKVLIYCRVSTQQQTTDRQKEELLKFAAENHWNVEEEDIFIDVISGFKKGEFRPEYVKMLERVEYGDIDIILFSEFSRLARNATELLEQIKLFIDKGINLYFDKQKLWVRDSNKDVGSIILLHVLAVMSSYEIELFVERSLSGKITKVQAGHGGGDERAYGYMHNENKQIVINPIESKIVARIFEMYVGGYSSIQISEILNAEKVPAPYVRKLNEYKKNREAKGLEVKEYKFDTDNLKWRISTINRLMHNELYKGNRRITFYKPDPTNPLPLSERQDREIVYEYSEHVESLRIVSDELFQQAQDKLSKAHYNKNNAVRHENLLKHLMVCGECGANFSVGKSNETSKNYISGGRTYKCYGRVNRKDKPRTCTNGAELRQWKLDGLVLQLSIQMFAEINIQQTNILKIENLGKEIEELVQIKSSKNTELVEAENLYKKTLKRLIAIEDDEVAKNLISDAKHKYDETKNVLNKTMDKLSREITTKRITIDNLKRLNANPLLINKMDEIRKNRDLVKTMVDEYIDKITIFRLHELWLLVVVSYKGGEEMWGTIKCARYKKEEMFYDELHCHYGVEFQGWLLNNTEHCFSYDKSTRIITYHGGSKIYVEFKSGEYDYDTFNQMIQATGWMGCFPFYAYEDSGKDLSVPSNEDFGKSLQENRTDWKAHNDKVLERLLSKS

SEQ ID NO: 4785 - protein, 563 aa, synthetic construct
MKRAALLLRCSTNIQDYNRQKLELEKVANRFKLKVAKVFGEHVTGKDDIRKGNRKSVDELINACENDEIDVVLISEVSRLTRNFLYGVTLVDKFNRDYSIPIYFRDKRKWTIDVETGEVNLEFEKELRKAFEQAEEELASIRFRMASGKRDSAGLGQWFAGFPPFGYTRQKNGYLVKNEYAPIVKEMFDKYLEEGQALITTTRYIYGKYPDIKKLKSIGNTKFILNNRAYTGRAEANIYDEIDKVTDTFYFDIPAIIDEETYNKVQKKLANNRTTTPYPRATKYLLQKLIKCSICGAFYTRLHSNKRDTVHFKCTSDKNSLTGCKSQVYLNERIVNPIIWNFVKEQLFYVGKMNAEQRLEAIAGENDNKSKAIEEQEALKISYKEQENKLTRLEDLYLDNDIDKNRYKERKSKIEKELSSIKAQMDRLTDRIRLSDFNIKRFNSTDFTEQYFKEVEADLEKQMKVLREYVKGIYPLYIDKVYCFLKVDTIEGMFNIFYEPRKAQQKCAYFIKDTLAQYHPDIRNFYTPNNTLLTDSDEVDAYYTLEEMKEICSRNGFEVRYRE

SEQ ID NO: 4786 - protein, 530 aa, synthetic construct
MIAAIYSRKSKFTGKGESIENQIQLCMDYAKNLGINEFLVYEDEGFSGKSMDRPKFKEMLKDAKDKKFNYLICYRLDRISRNVSDFSTLIEDLNKLNISFVSIKEQFDTSTPMGRAMMYISSVFAQLERETIAERVRDNMYELARTGRWLGGMPPYGFISTQINYYDENMNQRKMYKLKVDEGTIEIVKLIFNKYLELRSLSKLYKYMYENGIKGTRGGNLDPSALSLILKNPAYVKADKSVVDYLRKSNIDVMGDIDNIHGILTYAKNTDSPIAAVAKHKGVIDSDKWIEAQRLLNANKAKAPRAGTGSKALLSGLLKCSKCGSNMRITYKNSKSGTIYYYICGTKKSLGVSACDCRNIRSDKAESKVIDELKNKSIKSIMSSYKDSKLENSKNSKNIKTEINSINNQIKEKETYIDNLVMQLAKVTESSASTFIINKLESLNNDLSNLKSQLESLNTMSMENKQVDININMLIDNLNKFNKEIDTSDINKKRLLLSTVVDYMTWDSDTDTIKVNLIGINSSNTIASGK

SEQ ID NO: 4787 - protein, 549 aa, synthetic construct
MKNKLKSSLNIESPKIAIYMRVSTSKQADNQSLDTQEKTINSYIASRHDWINPICYKYVESHSASLKPKASNNLKESSFDSLKRPKLRELFLDATIGKFDYVLCASHDRLTRNTNEGIILKHLFSRLNITLIYCRPGETISSENEALNKFFENLLVNIAALESNITGGRVAIANKHKIQNNFWAGGPPPFGYNLVSQPNNKRNSFLEINFEEARIVKKIFELYNLGCSYNEILTRLNRDFTLPPKRLWTHNTLKEILRNPVYTGFLVWNKRGGARKPNRHSHNDFVKSNLVEKNIIIPENEFLETQKLRNILSKDSKFLSTDFLLRDFLYCDKCNKKLLAKNYGNNKRFYYCHSHNNMEINKKCRSIKASKIESTILSNINDLINSSLQSEVQIEKFYDNYIENFNAELLDNKKSLEITTNQLKSSTDLLELCVNEINISKDNLTVDYENFNSNSTEFSFINALSEFQVITQTEIKSLKARKEYLTYKINSSPKSFDDFKSNLNKSFKLFKYDEEKQKLISSPRSFRLFLFKVVKKIILSDHEITIIFK

SEQ ID NO: 4788 - protein, 626 aa, synthetic construct
MRNEKITPLYERLSRDDELQGESNSISNQKQMLEDFARRNGLPNPTHFTDDGISGTRFDRPGFLAMMEEVEAGRVEAIVIKDMSRLGRDYLKVGQVMEILRQRGVRLIAINDGVDSLKGDDDFTPFRNIMNEFYARDTSRKIRSVFKSKGMSGKHLTGTVIYGYLWDENREHWLVDEEASEVVRRIFSLTLEGYGPYQIACKLSADRIEIPVVHLARFNEGVNRSKPVKDPYGWGSSTIVNILKKREYLGHTINFKTRKHFKDKKSHYVSEDEWTIFENTHEAIIDQQTFDLAQKIRSNVRRYPNGWGEAAPLTGLLYCADCGGKMYVHRINNGRRISQYTCSNYTKVPCGTLCPTQHRINESAVLTLVSDTLRAIAEYSRNDRTEFIHTVQETQVAQQSADISKKRRRLAAAQKRTGELEKLICKIYEDNALGKLSDARYRALDAQYAKEQDALEIEIAELEKAVTGYEQSQKSAEKFIALIDKYENFDTLTNTMLNEFVEKILVHERARKGSQDTTQEIEIYFNFLGRYIPPSLQPVPLTPEEQEELQKKEERKDRLHQNYLKRKASGAQKQYEDKIKAKKKAEMDAKKALIRAEDMKKGVFSTVGQLPKEEPRKGSIAASAAV

SEQ ID NO: 4789 - protein, 706 aa, synthetic construct
MSRTSKITALYERLSRDDDLNGESNSITNQKQYLEDYARRNGFGNIRHFTDDGFSGVNFNRPSFQELIKEVEAGNVATIIVKDMSRLGRNYLQVGFYTEVLFPQKDVRFLAINNSIDSNNASDNDFAPFLNIMNEWYAKDTSNKIKAVFDARMKDGKRCSGSIPYGYNRLATDKQTLVVDPVASAVVKRIFLLANEGKSPRAIAELLTEEKVLIPAAHAKEYHPEQYNGTKFSDPYLWGMSTIRAILSRQEYLGHTVLRKSVSTNFKLHKRKNTDEDEQYVFYNTHEPIISQELWDSVQKRKKRANRTAAKGTHSNRLSGYLYCADCGRRMTLQTHYSKKDRSVQYSYRCGGYASKVNSCSAHSISADNVEALILSAVKRLSRFVLNDEEAFAKELQALWNEKQTEKPKHNKSELHRFQKRYDELSKLIRGLYENLVSGLLPERQYKQLMKQYDDEQAELETKIEEMEKELTEEKVNAVDIKHFISLIRKCKEPTEISDLMFAELIDKIVVYEAEGVGKARTQKVDIYFNYVGQVDIAYTEEELAEIKAQEEQIEMERLAKQREREKAYREKRKAKKLAENGGEIVKTKICPHCQKEFVPTSNRQIFCSKDCCYQARQDKTKADREAEKGNHYYRQRVCAVCGSTYWPTHSQQKFCSEECQKINHNEKSLEFYHKKQKEKSECKDLLQTKELVSSTNSSEIITIPA

SEQ ID NO: 4790 - protein, 537 aa, synthetic construct
MTKKLRVAAYARVSTDKDDQANSLDNQRTYFASYITRHEGWQLVNVFYDEGISGTQTKKRKGFMEMITEAESGEIDLIITKEVSRFARNTVDTLSYTRELKKFGVGVIFTLDNIDTRQSDGEFRLTIMASIAQEESRKTSERVKWGQRRQMEKGVVFGRDLLGYTVKDGKLYVNEEEAEIVRAIFHKYTNEGKGTHVIARELQEEGMRPKRIALWSNVVILRVLKNEKYVGDLMQKKTITPDYLTHKKKYNRGEENMVYIKEHHEPIISRDLWERTQEELLRRSPSEKQKSKYSNRYWCSGKVFCAECGRRYISRIRKRKDGSASKTWRCIAAAQYGRKKQDADGKEIGCDNTSVNEESLKTCMNYCISLIQSERESLKKEILEEINYIRKKQDQTLDVKKLEKKIDQIAFKKTKAIDLMLGGIISKEDLQSQTEWYNEKLEHLNKELTDAKCREKLDNSQTDIMEQYIKALDDIMDIHGDNELIYKEILERIDLHKGNILDIWLKEIPVGIRLKIKTSGKKASYKTEILETTFIEK

SEQ ID NO: 4791 - protein, 565 aa, synthetic construct
MGFKKLVNDIKVKKRRKLIAIYCRVSTEEQSENGYSIDEQERLLEEWCKKMGYVIYKCYSDRGISGKNIKDRPALKELLSDAKAGKFDMVISWKINRVSRKLEDVLKIVNLLEKNNITFKSYSEPFETDTPAGRMQFQMMALIGEFERGTIAQNVKMGMIAKAKSGNWCGGRVLGYDLVPNNSPEEEKKGKNKLKINEKEAEIVRFIFNEYSKGKGYKAITNQINKLGYKTKKGNDFSVGSIRDILTNPVYIGEIRYNVRQNWSEKRRRNINPNPIRVKGKHEAIIDRELWDKVQLILESKKGKPSRIYDGEYPLTGILRCPKCGAGMVISRTTNTLADGSKKRIAYYCCGNWKNKGTSVCNSNTIRVDKANEYVFKKIEELVSNEAMIKAVVKNINKERKDKVKPAKRLLGDIDKELEKLDKRKRKIFEAYEDDILTKEEFQTRKNELNEKIRILEEEKKPLLNTISEEVSEEIPYEFIKDILMNFSKILNSSVSREQQKKLLHMIISEITMNESREIESIKLNINDKLVEYLVKEGGVPIKGIPSSFMLINVGLKVLNLDVVI

SEQ ID NO: 4792 - protein, 545 aa, synthetic construct
METTPTKRVALYIRVSTQEQALEGHSIQAQEQNGRQFAERMGYEVVEVYADEGISRKSTKNRFAYQRMMSDARNHRFDLLVIWKLTRLGRNMLDVLQTVEELLRYDVGLHSISEQFDVTTSTGKLMLQLLGSFGEFERNQIAENVQMSMQSLVKDKKRYAGGRRLGYVSGIDTNGQKQLVIEPEEAKIVRLIYAKYLGGAGYRAIANFLNRQGYQTVKKNAFSTTAVKDILRNKIYAGYLEYARYINWETKRRKGKNPKPILVKGTHEPIISEGDYQKVQERLALEGKQPKWNHTGENVLTGLLRCPECGAPMAASNVTNTLKDGTKKRIRYYSCSVFRNKGASVCHANSIRAEQAETFVADRLKEIVQLPEVLPRLVAALNEEIVRQSQPLEQELVVLLERKEELKTKIEKWEAALEDSPELFPMLKDRLDELTEKRRQLHIRENEILGIFQQQGEPIQVKDVQRILTSLDRFLAQSEKKQVKALYRTFIEKITFDPNHKEMLEITMKFTPAVVQQLNEQYQIAVSKTKDTAIFVLKTPFTLTI

SEQ ID NO: 4793 - protein, 575 aa, synthetic construct
MENFDLKGFAKGKKQQKEQIGGNAIIYTRVSSSEQVNGQSLEVQIDKCREYAKVRSYTVVGEFGGTYESAKSDKERKEFNRMLAFIKQSNKKGSSQPVKTVIVFSTSRFSRTGSTTIIEEVEARGAYVVSATSNYDPRTPVGKYMQLMELANARFQNDEKRATTIENSVKALLKGRWIGKAPRGYDQKTTKKEQIITINEEGKLIRKAFLWKANNKLSNEEIRHRLEAEGLHICKQKLSELFKNPFYCGYMAHKFLQGDIVQGNHPPLISKEIFLKVNGELSKNHSGYEQKIDKEYAPLLGSIKCPCCGKNLSASISTKMRKRFGRTDIGYYVCSRKGCKYNSSTKKVHEAFEEEVNRYALSDKVSELLKMQLTITFEYMNQENRERAKSIKANIKAKEKELEQVETNYALCTDAKKQSICEKVMTKLEKEVRDLKTEFSKVNTEILNLDKFIDFAFKMRSNLFELWELQGLEGRRRLQKLVFPDGFIYDKNNEHIEPKKVNQFFLLKHSYPTGNGDKKKETNREKHDSSLRVLEAGLEPAQPQWPKDFKSFVSTIPPFEHPIKESGKRDSNSRP

SEQ ID NO: 4794 - protein, 533 aa, synthetic construct
MIAAIYSRKSRLSEKGESVENQIELCKQYGNNLGITDFLIYEDEGFSGGNTNRPNFQKLLGDAKKKRFNYLICYRLDRISRNVADFSTTLEMLQKNNIEFVSIKEQFDTSSPMGRAMVYISSVFAQLERETIAERIKDNMLELAKTGRWLGGTPPLGFKSVPVEYSGKENIKKMYKLEVVENEMSIVKNIFSLYLEKRSTSTVSRYLCTNNVKGKNGGNFSRNTVLQILINPVYTFADDKIYSYFNEFGATLCNEFDGEHGLMVYNKREGGRKDKPVSEWIISAALHPGIIPSSEWLKCQEILKSNLSKPSPRSNTSNSFLLSGLVKCANCGSSMTAWSHLNKKINKLEKYYRCELRNRASTRCSTKMLNAYAAEDAIINALKNIDTKTIVNLYSSNENSEATKQELQNESNNLKKTISHNNMIIQGLIRKLALIEDSDTIKLIESELKTIKSENLSHEKRLSQINLDQMAAEDIDSKIISISSHIKTIKEFFDYIEDIDAKRVIIKEVIENITWDNETLEINLVGANASLNV

SEQ ID NO: 4795 - protein, 556 aa, synthetic construct
MAMMNEMEYRTIGSALAGGYRAAVYCRLSKDDDLQGESASIANQRDMLEKYCEKQGWEVVAVYQDDGFTGLNMERPDLQRMLRAIERRQINLVITKDLSRLGRNYLQTGHLIEDFFPRNGVRYIAMNDGIDTLRDNNDIAPFKNILNEMYSKDISKKVHSSYLLKAQKGQFTGCLAPFGYRKDPEDKNHLLIDEETAPIVRLIFGYALNGHGPNYIRRRLEEEKIPCPTWWNRERGLRNTRTKWEKKDPENGRYMWDFSVIKDLLMNPVYTGAIASQKKDYRFKIGTIGEKKPEDWIVVEGQHEPLIDRMSFDIVQNKLKSRQRPGQTDEISLFAGLLKCGECGKSLTVRYTNAKHPQRIYSCKTYNAFGKNHCTQHRIDYDTLYSHVLRKIRECARAALMDGEAVADRLTNTCEAEQREQREAMERSLTRDEERIEVLDKMVMRLYEDMIAGRISEQNFNTMLEKTQTEQTELKAKVSEGRKRLSDEVQLANDAKQWVEAIQEYANITELDAATLNRLIKEIVVHERIDEDKTRHISIEIHFNLKPIPEVEQVTA

SEQ ID NO: 4796 - protein, 587 aa, synthetic construct
MRGAIYSRVSTEIQDYGKQTDELKDYAARNNIEVKYIFEEKVSGFKDDRTEFKKLEKLTKNDIDIILVWELSRLSRRSIFIQQTVKNFANKGICIFTKKEGLYTLNDDGTENKNAMFTIGVISMIAEQEIETLKERTISSKRRYILKEGHSYTPIAPYGYNYNLTTKQLTINEDEAEVVRRMYQLSIDGVSTNRISKILTSEGIKTKKGNPNWSLATVRDILHNPVYKGVPKYTMTIRNKKVVELVSAPPIVSEEVFEQSEKELTERRNRSKSEMVNKPLLRALIFCTDCGRRYICNSGRSIYACQTRFDNIRANYVADCHSAGISATNIEPIIWNLVERLFKSTIASSKAQERIEPYQEQLSKLSESKNNFEMQRDKINKDAAKLFDTLLLIRDTNPTVFTSKMEDFNKMSTEANDYQKEIDIIESKKQAIQRRIKAIEEIKDIDITDESEKYDILHKVIEAIKIYSVKTNQKVFTVLFASGLEYNVLYNVNKPKFRIEYAFASDETITFNKKDKLLINKLYSSVRDILPDFSITAGNNDMFDNDVCGDYSFQEVWDLLEKYNKTEVLREWKPDYTKRTINRRSKK

SEQ ID NO: 4797 - protein, 563 aa, synthetic construct
MLILKGEERLTTEQIMGLIGKINAIIYVRVSTTDQAEKGYSLESQIERCKERALTKFKYKDSELIVLVEPGGMGDDPNRPALNHALYLLEKGLGKKFIVLHPDRLTRDNTLQGIVSRKIWGMGVDIEFIEFEVDPTNPESMLMYNIQGSIAQYNKAKINANSKRGRVAKAKKGEFPSFKRLFGYKFNKETDLPEYNEEERQILIEMKDMLLNRDMSSNEIAKELSKRGVPAPDGDTWYQATVSRMLKNEDYTGDFYYGKTKVVQINGESKQVPTPEEEWILIEIPPIWDHETRDQILKKLKENYKGRSRKTRDYLLKGKAKCGRCGSACGSGFTSKTKSGVYKYYSCRKKNAKAYQNGKKIIDCPGKNWRVDIVDDVFWKWFKKLLKNPTDFLEQFLSETSNEKKVEELQHKVKNLTKQIEEIDSEVSNYVILFGKGKINEDMFDKLTQPLDQKKEYIETELEIINSQINANKDVEDKNQKLKEYVSSFSEMVDKDLSMDEKRKFIDFFIEKVTLFDDDHMEIVWKGDGLNNNDDKASLCNEGVAMKLNNSHKRLNHVQTYGR

SEQ ID NO: 4798 - protein, 575 aa, synthetic construct
MRGVIYSRVSTIDQDYSKQTNELKDFAKKNNIDIVHIFEEKESGFNNDRPEFKKVQQLTKDEVDILLVWELSRLSRRSIYIQQQVRNFADKGICIYTKKENLYTLNEDGTENKSAMLLIGFTSIIAEQEVATLKERTISSKRNRIIKEGYSYTYNAPYGYIYDKETKKLSINPIEAEVVKRIFELSANGYSAYRIPVLLNADGIPTKTGKKWTLPTIATILTNTVYKGEAHYKLKGEKPKEGKRYSRTTEYAVVETPAIVTSELFDLSRKMMKERLSRSKSSGVKYNPLLRGLIVCPYCNVKYIFNRRDNLYSCHERYEKATNKTTQCFSKSISINKIDEIIWNLVKILFSKELAAGKTDEQIEPINRELENYKLQVVNLEHKQNELTQKANIIANAAIDIKIQFPNLPDLYLNKLKEVESINKEAGRYLNEIKHLEKLMESCRNKIQAINTLSDESIVVESIVDETEKYDLVHKVIDNIVVYGEGHYTLVVVTFQTGQVAYIGYYSFKRYKYYTIFYPSQSVWFDTEKRLGYIMTMKDSKSLKLSLETVTKEYSITDFINMFDVPENRHYYENQ

SEQ ID NO: 4799 - protein, 570 aa, synthetic construct
MREAALLLRCSTNLQDYNRQKNDLLALADKLGFNVREEYIFGEYVTGKDDIRKGNRQSIQSLIDVCLESMVDAVLIWEVSRLSRNFIYGVTTIDKFNRDYKIPIYFRDKRKWTIDIETGKIDIDFEKDLRKYFEQAEAELITLRSRLASGKRDAAGLNQVIGSVAPFGYDRVNKRNVINPVTSLVVKEMYEKYLEEGATLLSVSSYLSAKYPQYIVKLRSAGSIRNILVNKANTGILVYTIYDEIDDIGYRYEVMQPSIISVEVYNAVLAKLKKNRAITAYPHSKKHLLQKMLFCYECGTCYTPSESLKRGTCYYRCGQKTAHIKPCNNSMSLNESIIDSVIWKFLKEQLFSESELNKEQREIAIEKEEENRKNIVTDIEIVEGAIANTYKDLDSLEDMLITRRITSERFDKKKAKIDTKLGELKHQKDKLRERINAIDFNIKRLNNLDYTQSFFNEVENDLEKKIALLKEYVQFIYPYMIGKNIVLLKTHTVDGIYYIFYRIYKGNFSKDKIQRTAYYIHEALAEFKPNGNNNFYVPNPSILGIDNEYLYYFVDEMREVCENNGFEFEY

SEQ ID NO: 4800 - protein, 576 aa, synthetic construct
MKKNFKMPGSGSETPIRVAIYVRVSTVYQIDKDSLPMMKQDLTSYCKYILNTDDFVIFEDAGYSGKNTDRPAYQKMMSQIRQGLFTHLLVWKIDRISRNLLDFANMYTELKDLGVTFVSKNEQFDTSTAIGEAMLKIILVFAELERNMTSERVTATMINRASNGVWNGGRIPYGYSYDKPTQVFSIDPEENKVYNFLVETYEDTQSIVHTSRRLNEAGYRSRNGNMWSPVAVWTILRNPWYKGVYRYNYYKIPGRKAIKDESEWVIVENHHPASIDPDRFDRIQATLDKNARYRNAPGRKTAQKNVHVFSGLVWCAECGSAFTASPGKLHVSGYRPSKYGCPNVRKTKTCHAKYTSDVVLGEFLLNYILNILNAQKQFAYIHSTDDLQKRLLHGSTFSNVDHVDPDGLASLLNMLEKCSGSDPVLLKRPRSKPKMDPELKRMMADQKKQQRALDRLNDLYLYSDDSISEREYLVRKQQITDRLQEINEAIGMTSQEPWMRTMNDEEFIRQASSFILTQKLADKQYIYYENLAESLDPEILKNFFVSILDSIILRDGRPETVVFRNGLSHTFTYKDS

SEQ ID NO: 4801 - protein, 549 aa, synthetic construct
MAYRKITDIRDTIGMRAVFYARVSTAEEEQLNAIELQIEENRGCIKDHGWKLVGEYIDRSKSGTMVKGRDDYQRLYEDLYEDLFDIVVIKDQERLQRNTLDWYLFINRVVQTGKLLFMYMDGKFYSPDDALITGVRAIIAEEFSRNLSKKLHNYHDHRIEKARQGQEIALQGSGNVYGWDKKDGKYYINPEQAKVRRLMCEGIMARKGSTLIAKELNDAGYRNTVGKPWKPMDIPKFVYDCKNVGTMIINKERHDFESKQTIKLPKEEWVYVENALPPIVTQEEWDLICKIHEERVIATGSDRRGKKTSGYSFSGKLVCGICGAPYWRKQRVSKDEYWVCSTKQTKGRRTRKRDSTMGKAGEINPLGCDNENISYNSLMEIMGVVSERLQANTDTIKQDMINWLTKLRKQLLEANGGHTEADLQRELSRKSKLLDAYLDGILNKQEYQKKAEELDERIIQLKAETEKNKANSGDIAEIDKVLANIDEEVSRYVDGNEKLKVEYLLEHLEQVQIFPDKVIVIVPILSEGIVVEKTQYVSMEKRRRKKYGN

SEQ ID NO: 4802 - protein, 426 aa, synthetic construct
MRVRIIQPVKEVNKKKRVCAYARVSTGSEKQGESLENQITYYKKLISDNPNYEYAGIFADRGITGTVDKRPEFQKMMELCREGKIDLIITKSISRFARNTVITLQIARELKNMDVEIRFEKENINTLSGDGELKLAILSSFAQEESKNVSDNLKWRVRKKFQQGELIINTARFLGYDKNEYGELVINLKEAEIVKRIFSEYLSGSGSFTIAKGLNRDSIPTVGNKKWHDNTVREILKNEKYKGDAILQKYCILDHLKKKKIRNNGEVDSYYIEDNHSPIISRDVWEKVQKEIRIRAEAKGNFKGDKYKRRYALTGKMYCSKCGAVLRRRTWNSKFSCRKIVWQCSNYIENGKNACRGTVIDDETAVRLNIKEEIVVREEFIDGKKHYSYSCKNKQKQFITEYKAPEKENGSLLQSVYRPIRTVIKL

SEQ ID NO: 4803 - protein, 443 aa, synthetic construct
MAAYCRVSTDQLEQLSSYEAQVNYYTAFINGHPDYELAGIYADEGITGTNTKKREQFNKMIEDCRTGKIDMIITKSISRFARNTLDTLNYVRQLKDLGIGVIFEKENINTLDSKGEVLLTILSSLAQDESRNISENSTWGIRRRFEQGKLHINHKKFLGYDKDKNGNLIINEKQAKTVRRIYREFLDGKGINSIARDLEKDKVPKWNGTFKWYESTIRKMLGNEKYKGDALLQKTYTVDFLTKKRAENKGQVPKYYVEENHPAIIDKEMWEAVQLEIERRRAFAEKYNLKKSNYATTDNPFAAKIICGKCGSYFGRKTWRSTKETPRVKVWICSSRYRIKGKKGCDNKHIYERVLYQAFINTFNAMIENRDYFMQKWKEHLKSENALVRYKAGQFIKIIGDAEPIKKFDMNLFCKITEKMTVFEGKEIIVSLLDGTEVEVVIE

SEQ ID NO: 4804 - protein, 628 aa, synthetic construct
MKAAFLIRCSTKNQDLNRQTRDLTRLAKSMGYEYDLENLVYGEKITGKDDVTKKNRDSIDRLLRAAKEQRFDVVLVSEVSRMSRDPASGRIYVRLLINMNIPVYFKDIDLWTINPETGKKVRDAELVIGAAFDAAWKYLKSMKTQIASARRNELDNNRISIGQPYFGYKRYEGTDKSKKNQIVVNEEEAEVVQAVYNEYLKEGATLKSTALAITDKYGEQLNRKFSLGTIEHILTYESYATGIKKVNLKDPDTDEVEVFDVSTPIIIDKELYEAATNKRKKNRVKDEPYPNQQVYLLSKLIKCPDCGYTLTPRRKAGEFGQTYRLVNGKPAVSWFCMSGINNITNCTNRTSIANEKLEPIIWELVKKELIGYANMNDEKREEQIRECEEKIEYQNYSIQNFTKEIDKLKKRLSTAYQFSINAAEMAGDDEDMRTMAMEEFNRTAKGVRQEMKNFEKSIEQAKGELEKLRDLKTFYSQPTLPKDYLEQIEGNFTEKRNLVKQLITKIVPYRITTFKKKERESGVKTCNKMITVKNGAVLLEVYTIGGVYNVFYNANSKFQVKTAYYVHGEYATFQNGIRKYPAYNEGEYFVISNANMVMETDDIDEVVTVNEFVDIAIANNWVIEYQYI

SEQ ID NO: 4805 - protein, 517 aa, synthetic construct
MKTIHKLARPQLPEPPKLKVAAYARVSTSSNEQLASLQTQITHYENHIQNNDQWEYVGVYYDEGISGTKVEKRDGLHRLIKDAELGKIDLILTKSISRFSRNTVDCLNLVRKLTDIGVTIFFEKENINTGDMESELLLSILSSLAESESYSHSENMKWANRKRMVKGIFKTVPPYGYQRREADFYLIPDEAKVIEQIFKWALEGVSAYQVAKRLNEKNIFTRKGSKWQASGINNILHNIVYTGTMIHQRYFNDDQFRKKKNNGELPMYRIDNNHPPIISWEDYERVQELITLRANAKGTSKGSQKYSQRYAFTKRIICDKCGCNYKRVHTAGKGNTKVVKWSCTGHLKNKDGCDALPITDESLKTAYLTMLNKLILGHTIVLEPLINTPVEGKASKQELEKLSIEITKIDEKLEVLASLNASGVVSTKTALEEQGRLQMELNKLQEKQHKIMESVNGTSTQRIQLEQLHQFTKRSEMLTEWDEDLFLRFAERIVVYSRQEVSFELKCGLLLKERLEA

SEQ ID NO: 4806 - protein, 560 aa, synthetic construct
MYYQSNTAAALQFPYTAMSSEELTALYCRLSRDDELQGDSNSIVNQKKILEKYAREHGYSNFKFYVDDGISGTTFNRPGFQQMIADIEAGLVKRVIIKDMSRFGRDYLQVGMYTEIMFPEHDIHFIAVNDGVDSTQGDNEFMPFRNIINEWYAKDTSKKIRAVMKVKGNAGEHLTVLPPYGYMKSSDDKKQWVKDEEAAQVVYEIGLYIMDGLGPSQIARKLTERKILTPAAYYASKGRTTNVTKKGSPYAWDSSTIADIMDRWREYLGRTVNFKTRKKSYKSKKTLHNPESEWKIFDNTHEAIWTEAIADAARLARQTRRRPTKMGEMGMFSGMMFCADCGSIMYQCRATNFRRDQEYYLCSGYRKSRDVCGQTHSIRTVILEELVLQNLREIVSFASQRKDDFVKMVMDADMRQRNQDLAKRQKTLADAEKRIAELDTIFKRLYEDTISGKLSDERFQKLSTDYEKEQHQLQDVAAALRDEIEAEEQKSANVERFLSVVERYTEIPELTPCILHEFVEKIVVHAASDPKGKNRTQEIDIYYKGIGALEVSKVTSSRQE

SEQ ID NO: 4807 - protein, 565 aa, synthetic construct
MGFITLTNDVTMEQVRKRVAIYCRVSTIEQAEEGYSIDEQQRLLIEWCKKMDYTVYKCYSDRGISGKDIKNRPELKQLLNDAEDKQFDMVISWKINRISRKLADVLKIVDVLEQNNITFKSYSEPFETDTPAGKMQFQMMALIGEFERGTIAQNVKMGMCAKAKSGEWCGGTVLGYDLVAVESLEGAKRRKTKLTINEKEAETVRFIFNEYGNGKGYKAITNQLNKLGHKTKKGNNFSVGSIKDIITNPVYIGKVRYNVRQNWSEKRRRNINANPIITDGVHEAIIDEKLWDKVQAILENKKGKPSRVHDGEFPLTGILRCPKCGAGMVISRTTNKLADGTKKSIAYYACGNWKNKGTAVCTSNSIRVEKANEYVFNKLSELLSNDKMVKTIVSNINKERIRKVNPTKKELTRIDKELEKLDKKKGKLFEAYEDEILTKEEFQARKNELTERVKKLEEEKAPLLVTLSDDIKEELPYEFIKSILENFSKVLTESTSREQQKKLLHMIISEITINELREIDSIKININDNLVNYLSKEEGVSIKGTPSSFILKNVGISTLSLNIAI

SEQ ID NO: 4808 - protein, 571 aa, synthetic construct
MLKVAVYSRKSKFTGKGDSIENQIEMCKDYITNTIGKDVEFTIYEDEGFSGGNLDRPNFKKLMSAIKNKKFNILVCYRLDRISRNVADFSSTLEILQSNNCSFISIKEQFDTSSPMGRAMIYIASVFAQLERETIAERVKDNMLEIAKNGKWTGGKIPLGFTSDKVEYIDEKGITRTAPQLIINEKEMEFVNFLYNKYLELGSLHKLEVYIHENNIRSRNDVLYEKSSLKTILQNPIYVKANDDVVEYLNNSNWTVYGEPDNIHSLLTYNKTEQTKKDGKYTKVKKDLSERLAAVSSIKGYIDPELWLSVQRQFDKNKDTFPRLGKTHNALLVGKIRCGKCKEYMLISHGRISKTTGEKLFYYTCSLKKKSRKKLCDNGNAKAADLEKLVLLSLKQLSLNKKDFLSKIRDKYKTDENYKNIDLEKLSLNKSLKEKKMQIDNLVTKLSLCNDIEDIILNKIKTLKDECNNIEKTLTELETKTLTLKNNLLNLDLIESLLNKCSMIDKLDRSEQKLIVDNLIDTIYWYSNGPGKGKIKIKFVGTEDNQKEISFTIKEMQQLMLHFCSHSMSSI

SEQ ID NO: 4809 - protein, 617 aa, synthetic construct
MNGNEKYIAIYSRKSKFTGKGESIGNQIELCKEYIQTHYTEIPQDHILVYEDEGFSGGNLNRPDFKKMMEAARQRKFKAIIVYRLDRISRNISDFSSLIEELSRLDIAFISIREQFDTGTPMGRAMMYIASVFSQLERETIAERIRDNMHELAKTGRWLGGTTPTGYASESVQKVTIDGKAKKACKLKLIPEESEIVRLIYSLYIEHDSLTSVEAELIKRGLKTKNNKLFTRFSIKSILQNPVYMIADVNAYNFFVKENADLNSAKDEFDSVHGMMVYNRTKQEKGKAVTYLPPDEWIVAVGLHQGIVPGKVWISVQESLDRNKSKAYRKPRNNEALLTGLLYCTCGSRMYPKISKRKTADGKPIYTYVCKLKERSKRSMCNSKNANGNTLDLAVIEQIKLLEDDKGFFIDQLEQSRKFYTGNRAAYEDQLASIRHEKEELEKKIEGLVDSLADLGDSTVRNQVARRIEQLNQKCEETDTRIHELEALTSQHTFSDIEFDVMRQLLSVFKTSIDEMTVEQKRAAIRTLVRKVVWDGVNAHIILFGVQDDEIEYPPLSYQANEADSTEDDLEELERFSDVDYEDEIADGSKTHWGEDSKRNPDASARTEKDVKRDFFI

SEQ ID NO: 4810 - protein, 540 aa, synthetic construct
MKQPYNTTIYNTALYLRLSRDDELQGESGSIQTQRMMLRQYAAEHGLTVVDEYIDDGWSGTNFERPSFQRMIDDIEDGKINCVVTKDLSRLGRNYILTGQYTEIYFPSKGVRYIAINDNVDTINGESELAPFLNILNEMHARQTSKKVKAAMHTRFANGAHYGAYAPLGYVKDPDKKGHLLIDPETRWIVEKIFDLAVHGRGAASITRILVEEKVPTPGWLNYDRYGTFANIYAGAPAEKAYAWTIAQVKSILKEETYIGHSVHNKQSNISFKNKKKVRKPQEEWYRVENTHEAIISEEAFQKVQELIASRRRKRRNGTTQIFAGLIKCADCGWSLAYGENKQNKNPYGYYHCSKNGQGLRQCSMHYIRYDVLYAYVLARLQYWSVLAQKDEDKLLKRLLNASDRERTSAKKKQAAELKKAEKRKAEVDGLFAKMYEDWSAGRITEYNFNMLSEKYQNEQKELETKIRQLHETMEAAVQTAADAEKWIALMKQYVNPVELTAELLNTLIEKITVHEAVKGEDGSREQEVEIYYRFIGKID

SEQ ID NO: 4811 - protein, 449 aa, synthetic construct
MKQVIGYLRQSTMKQQSLAAQKQAIEAIAEKHHIQHINFYSDKQSGRKDNRSGYRQMTQLIQQGQCDILCCYRLNRLHRNLKNALKLIKLCQTYRVHILSVHDGYFDMDQAFDRFKLNIFISLAELESDNIGEQVRNGLQEKAKQGRLITTHALFGYEYHNGTFIINQNESPTVKAVFNYYIKGHGYKKIAQLLEEDNTYINRQPYQVRNIIINPNYCGRVNNQYGQFDNMFPSIVSTSIYEQAQRLRLQKQTKQTSSDNQLKQKINCPCCNATLTNMTVRKKNHILRYYVCPKNMNASRFVCDFKGINAQTFEDKVLEVCRDFYQNQRIYTKIKGAIDKRIKRQRNIEKHHTLTQEQLIEKLAQGIIDAETFREQTQSLRQQPQRTTSINGHQIQHTIQNIIQKRFTLNILYPYIETIHITKDKNLIGIYFKNEPLNIVNQTMQSSIA

SEQ ID NO: 4812 - protein, 542 aa, synthetic construct
MKQLKKKRIGLYARVSTEMQTDGYSIQGQLNQLTEYCQFQGYEVVNEYTDRGISGKTMQRPELQRMLKDANEGKLDCIMVYKTNRLARNTSDLLNIVEELYKINVEFFSLTEKIEIASSTGKLMLQILASFAEFERNTIVENVYNGQRQRAIEGYYQGNLPLGYDKVPDSKKELMINQHEANIVKYIFDSYAKGHGYRKIANALNHKGYVTKKGKPFSISSITYIISNPFYIGKIQFAKYRHWSDKRRKGLNEEPIIADGKHAPIIDRNLWDKVQFKRQESRKKPQVHGKGTNLLTGIVKCPKCGAAMAASNTTNTLKDGTKKRIRYYSCSNFRNKGSKVCSANSVRADVLEKYVMDQILEINKSKKVLKQLVEKVNEKSQIDVSSLNHDIAYKQSQCEEIKAKMHTLTKTIEDSPDLDSVLKPTILSYQDELNQINNQIYQLEQDKQAEAPHYDADMIANVLQAIFKDIDKLEKSQLKSLYLTIIDRIDIRKDEHHKKQFYVTLKLNNDIIKQLFNNHPLDEVLPSTSSLFLPQTLYITIE

SEQ ID NO: 4813 - protein, 507 aa, synthetic construct
MKRVISYIRFSSEKQAKGDSLRRQSKMVTDWLKAHPEYYLDESLTFRDLGVSGFTGKHLKGGLGDFLTAIEKGLVKAGDTLLIESLDRLSRQAVDRASELLRNILRSGVDIVTLSDGEHYTSESLKDPLALIKSILIMQRAHEESLRKSERIQAAWDAKKEAAKAGIKVSKRCPAWLRLNDDRKSFSVIPEKVETVKRCFQLRLEGKSIWEIVRTLNAEGHRSMNQYKPGKFGQTSVQDLLKNRSVIGYFTPKGCEEISGYYPAIIDETTFYKVQQLSHSRYGKRSVSDKPLSVNLFKGVIRCSECGHALIITGFSDTRSGIYRCPLRNENRCSAKGLSRKQTDGTLLTLLSRLDRFDSDTTNTIDTLKLHREHISSNIEKLVQLSLEIEDLSAITSKLKQLKNELSQVDADIEKETQRLKSIDVGCLSDCDLTTKAGRIEAQLIIKSAVKEVVLNTAKRRCKVTFHNGRAITLPITENPSEDVTEAIQSLSEVTERGLIDVDVVEI

SEQ ID NO: 4814 - protein, 383 aa, synthetic construct
MRSVITYLRYSSAIQGAEGADSTRRQNDLFKQWLKKNGDAQIVASFSDEGLSGYKGKHLTGQFGDMLARIEAGEFPEGTILLVESIDRIGRLEHLETEALMNRILGNGIEIHTLQDGLIYTKDALADDLGISIIQRVKAYIAHQESKQKSFRVSQKWGQRAKLALAGEQRLTKMVPGWIDPETFKLNEHAETVRLIFKLLLDGESLHNIARHLQSNGIKSFSRRKDANGFSVHSVRTILRSETTIGTLPASQRNDRPAIPNYYEGVVDIPTFNKAQEILDKNRKGRTPASDNPLTINIFKGLFRCQCGASVHPTGTKNKYAGVYRCIRRQLVLPTRANYTGRTLQCDIKSRLLLPSLSFSCSFHLSVRTYIRDGSAGLPPPPP

SEQ ID NO: 4815 - protein, 416 aa, synthetic construct
MPKAISYIRFSTKIQSVGDSTKRQSKYINDWLKRNPDYYLDESLRFQDLGISGFSGANAKSGAFGEFLAAVESGYIEAGSVLLVESLDRVSRQDIDTAGEQLRKILRSGVEVVTLVDNEWYTKESLKDSLSMIKAMLVMERAHEESAMKSTRLRSVWAAKRERAAKGEIMSKRCAAWLKVSEDRSRFEFIPENVKAVQRVFQLRLEGLSHVKIAKQMNDEGFSTLNQFKSVTGGWSQSSVTELLSNRSVIGFKVPSKSMAVKGVSEIPNYYPSIITDEQFYAVQQLKQGSGRKPSSDLPLLTNLFKGVLRCSECGFIVVVAGVSAKRSGIYKCSMKSEGRCNSVGFSRLQTDRALVQGLLYNANRLFLNRDNGSAIGALQGELEQLQKQRERLIKLAMLADDTESMAKDLNESPRV

SEQ ID NO: 4816 - protein, 450 aa, synthetic construct
MKQALGYLRQSTTKQQSLAAQKQTIKALAEKHNIQHITFYSDKQSGRTDKRNGYQQITELIQQGQCDILCCYRLNRLHRNLKNALKLMKLCQTYHVHILSVHDGYFDMDKAFDRLKLNIFISLAELESDNIGEQVKNGIKEKAKQGKMITTHAPFGYHYHNGTFTIDTVKAPTIKAVFNYYLQGYGYKKIAQYLEADDKFINRKPYQVRNIILNPNYCGRVINQYGQYENMFPAIVSTTIYEEAQVTRTQKQVKRKPSENQLKQKIKCPYCHSTLTNMTVRKPNHYSLRYYVCPQNMNNARFVCEFKGINAQELETSVLATCQDFFQNQQLYSKINHTIQQRLKRQRDIETKTTLNHEQLIEKLAQGKIDEETFREQTQSLHQQSKPISSISAYQIRKAFQNIIQQRFTLNMLYPYIDEINISKNKSLAGIYFKNEPLNIVKQTMKLSIV

SEQ ID NO: 4817 - protein, 542 aa, synthetic construct
MQQLKQKRVGIYVRVSTEIQNTEGYSINGQINQIRDYCQFHHFEVTDIYADRGISGKSMNRPELQRMLKDANEGHIDCVMVYKTNRLARNTSDLLKIVEDLHKQNVEFFSLSERMEVNTSSGKLMLQILASFSEFERNNIVENVFMGQTRRAQEGYYQGNLPLGYDKIPDSKHELMINQHEANIVKYIFESYAKGHGYRKIANTLNHKGYVTKKGKPFSISSITYILSNPFYMGKIQFAKYKDWNEKRRKGLNDKPIIAEGKHAPIISQALWDKVQARKKQVSQKPQVHGKGTNLLTGIVHCPQCGAPMAASNTTNTLKDGTKKRIRYYSCSNFRNKGSKVCSANSVRADVIEKYVMDQILEIVKSDKVIKQVVERVNQENQVDVAALNHDIAYKQQQFDEINAKLKNLIQTIEDNPDLTSALKPTIHQYETQLNDITNQINQLKQQQNQEKPSYDTKQIALLLQRIFQNIESMDKSQLKALYLTVIDRIDIRKDGNHKKQFYVTLKLNNEIIKQLFNNTQLDEVLLSTSSLFLPQTLYLKI

SEQ ID NO: 4818 - protein, 520 aa, synthetic construct
MIKITKIDEFRTLPQDNKTRTAAYCRVSTDSDEQMESLDTQRSHYERYIKTNPEWDFAGVYFDEGVTGTKKEIRKGLMSLISDCEKGLIDLILTKSISRFCRNTTDCLELVRKLLDLNVCIYFEKENLNTGSMESELMLSILGSLAENESVSISENEKWSIKKRFQNGTYVISYPPYGYINVDRKMIIVPEQAEIVRQIFSDCLDGKSTHLIAKELNERGITAKKGGKWSSGSVLAIIRNEKYTGDVIFQKTYTDSSFNRHTNYGEYDRYLCKDHHEAVISHEIYDKANELVDRRGQEKGNGTNTERYLNRYEFSGKIKCGECGSTFKRRKHSKPSGNYIAWCCSRHIEDKTACTMKYITDDAVKAAFVTMMNKLIFSQQTVLKPLLRNMQGYDEEGRLQQIENIEAAIEKVKEKKQVLVSLMTSGLLEPPIFQKENNALIVENERLKERKENLLSSVSIDNEKADALKNLIKFVSGHEMLTEYDEGLFESHVKEITVISRKEIIFGLHCGLNLKERLDG

SEQ ID NO: 4819 - protein, 522 aa, synthetic construct
MNKSVTLIPARKRTGSTEQEEEKPKLKVAAYCRVSTDSDEQATSYETQVEHYTSFIKKNPDWEFAGVFADDGISGCNTKNRNEFNRMINECLAGNIDMIVTKSISRFARNTLDCLKYIRQLKEKNIPVFFEKENINTMDTKGEVLLTIMASLAQQESQSLSQNVKLGLQYRYQNGQVQVNHNRFLGYTKDEDGHLIIEPAEAEVVKRIYREYLQGSSLKQIGESLESDGILTAAGKPTWRAETLKKILQNEKYIGDALLQKTYTVDFLTKKRVKNNGIVPQYYVTGNHEAIIPRDLYMQVQEEMQRRANLHSGKDRKKRVYSSKYALSSIVYCSKCGDIYRRIAWNNRGKRSNVWRCVTRVESGPDACDADTIQETELQEAVIKAINSVLSQKSTAIGVLQENIEEVLKQENSPTKDVDGKLEELQKQLLQKANRNEQYDDLVEEIYKLREEKQQILADKAEMEGVKQSIFNMKAFLNSQTTEIEEYDEQLVRRLIAKVTVFDDKFEVELKSGLSVDIRRSK

SEQ ID NO: 4820 - protein, 458 aa, synthetic construct
MKNKELPPLVRVALYIRVSGEEQKIKGLSLEAQQERLEAYAREKGWIVTGVYIDAAKTARKNIHKRAEFQKMIESVKRDEVDLLLFCRLDRWFRSVADYYKVMEILQAHGCDWKTIDEEYDTTSANGRLYINVKLSIAQNEADICGERIDVVFDSKIAHGTVVSGSCPFGYRVNEEKRLEVVPEEAGIVQDAFSFFESKVSQLSTVKHIRETYGVNWCTATFRRMLSETLYTGIYDRGGRRNEDFCPAIISQEQFDRVQALLKRNARSAPSGRVYIFTSILKCAECNHNMVGRIAYKGSGLYYYRCNQHFQRGRCSHKSEAREDVIEKWLFDNLESELNRVRLEWEVKAAEKKKAALRTDKAALKRKLTKLKELYVNELIDIEDYKKDYEIYTAALRQLPEPVAEAPPDFEAVEKLLQSDFKNIYESLTREEKRTLWRSAISEIRIDSENNITGISFG

SEQ ID NO: 4821 - protein, 559 aa, synthetic construct
MKTKLYSYIRFSSMRQNDGSSYERQIRMAREVAAKYDLELVNDYQDLGVSAFKGANSKTGALSRFLDAIGRSVPVGSWLFIENLDRLSRADIVSAQELFLSIIRRGITIVTGMDNKIYSLDTVTANPMDLMFSILLFIRGNEESQTKRNRTNSSALIKIKAHQENPQNPAVAIEEVGKNMWWTDTTSGYVLPHPTYFPVVQEIVELRKNGRSTAEILDHLNETYTPPPAVSNKKHSKWSRAMVERLFHTRALIGIKEVSVDGVNYELKDYYPRVIDDATFYHLKKNIGARAWNFGDKEEVKPIPLLSGIGLLKCDHCGCAMVKVKGTNKRSDQYRYTCDATRSRRLDCEHPNWSFRGDQLEKAVLQLLADKIWIAEDKANPVPALKVQVDEISRKIDNLIALSAMTGATKELADQITTLNSERETLYNQIKMAEEEMYSVDSQGWEKLAEFDLEDVYNEERLKVRFKIKQALKRIGCSRIDRNKNLFVLEYIDGKTQRVVIENSRGTRKGRIFIDLKTINDRQILESNGLVLHPCLDMLTDKNWKPEEEIPGPLQEFGI

SEQ ID NO: 4822 - protein, 509 aa, synthetic construct
MKTCIYLRKSRSDEEAENQSEFETLSRHRSTLLKVAKEQNLNIVEIKEELVSGESIAYRPKMLELLDEVKNGFYDSVLVMDIDRLGRGNMQDQGLILETFKKSNTKIITPRKTYDLNNEWDEEYSEFEAFMARKELKLITRRMQRGRVKSVEEGKFIASNPPYGYKFVFDESGNKSMVIDEDKAEVVRMIFDLYVNKHYGGVKIATHLNSLGLKTTTGRTWYDKGVRDILKNKTYAGYVVWNKVERGKNSSKTRPIDERIEAKGIHEPIIDESVFLEAQSLFKSNFIPSTKQHTTITNPLAGLIVCSECGHKMIAQQSTYKNKEIVKFVKCLNCGKNRGVRLDILEKDIINELADWVDAYNVSIKDLDSNENKNPNLESYYSIIKSLESEYQTLMKQKENLHNLLEQGIYDVDTYLDRSKILTDKIDLNRSNLSQAKKDLENEKESVFSIADIIPQIKKVLELYYQSNDMQERNELLKEVIDYIDYSREPKKRTSRFNIKIYPRLIKNK

SEQ ID NO: 4823 - protein, 542 aa, synthetic construct
MQQLKTKRVGIYVRVSTEMQSTEGYSIDGQINQIKEYCDFHHFEVKDIYADRGISGKSMNRPELQRMLKDAKEGNIDCVMVYKTNRLARNTSDLLKIVEDLHKQNVEFFSLSERMEVNTSSGKLMLQILASFSEFERNNIVENVFMGQTRRAQEGYYQGNLPLGYDKIPDSKHELMINQHEANIVKYIFECYAKGHGYRKIANALNHKGYVTKKGKPFSISSITYILANPFYIGKIQFAKYKDWSEKRRKGLNDKPVIAEGKHSPIINQDLWDKVQMRKKQVSQKPQVHGKGTNLLTGIIHCPQCGAPMAASNTTNTLKDGTKKRIRYYSCSNFRNKGSKVCSANSVRAGVIEDYVMKQILEIVKSDKVIQRVVTHVNQENQVDGAALHHDIAYKQQQYDEVQIKINNLIKTIEDNPDLTSVIRPSIQKYEKQLNDITNQINQLKNQQNEDKTLFDAKEISKLLQHIFHDIKHIEKSRLKALYLSVIDRIDIKKDGNHKKQFYVTLKLNNEIIKQLFNNKQLDEVHLSTSSLFLPQTLYLTI

SEQ ID NO: 4824 - protein, 430 aa, synthetic construct
MNGKIDMIITKSISRFARNTLDCLKYIRQLKDKEIPVFFEKENINTMDAKGEIMLTIMASLAQQESQSLSQNVKLGIQYRYRQGEVQVNHNRFLGYTKDENNKLVINPEQAKIVKRIYREYLEGASLVQIARGLEADEILTAAKRTKWRPESIKKILQNEKYIGDALLQKTYTVDFLTKKRVVNNGHVPQYYVENNHEAIIPREIYLQVQEEMMRRANIRNGKTGKKRVYSSKYALSSIVFCKECEDVFRRVHWNNRGCRSIVWRCVSRLEGKTHLCNPETIREDELHHTIVQAINEVLGNKDDYLSILLENIETVLNENADKPTTDIDEKLEELQMELLRLANSKEDYDDVAEEIYRLRELKQEVMMKNAAREGLRQRIEEMTKFLKEQPQKLETYDDLLVRRLIEKITIHERLLTIVFKSGIEVKKEI

SEQ ID NO: 4825 - protein, 449 aa, synthetic construct
MKQVIGYLRQSTMKQQSLAAQKQAIEAIAEKHHIQHINFYSDKQSGRKDNRSGYRQMTQLIQQGQCDILCCYRLNRLHRNLKNALKLIKLCQTYRVHILSVHDGYFDMDQAFDRLKLNIFISLAELESDNIGEQVRNGLQEKAKQGRLITTHAPFGYDYHNGTFIINQNESPTVKAVFNYYIKGHGYKKIAQLLEEDNTYINRQPYQVRNIIINPNYCGRVNNQYGQFDNMFPSIVSTSIYEQAQRLRLQKQTKQTPSDNQLKQKIKCPCCNATLTNMTIRKKNHTLRYYVCPKNMNASRFVCDFKGINAQTLEDKVLEVCRDFYQNQRIYTKIKGAIDKCIKRQRNIEKHHILTQEQLIEKLAQGIIDAETFREQTQSLRQQPQRTTSINGHQIQHTIQNIIQKRFTLNILYPYIETIHITKDKNLIGIYFKNEPLNIVNQAMQSSIA

SEQ ID NO: 4826 - protein, 542 aa, synthetic construct
MQEYKHKRVGIYVRVSTEIQSSEGFSIQGQVNQIKEYCNFNNFKVIDVYADRGISGKSMNRPELQRMLQDAKNGHIDCVMVYKTNRLARNTSDLLKIVEDLHKQNVEFFSLSERMEVNTSSGKLMLQILASFAEFERNNIVDNIFMGQTIRAQEGYYQGNLPLAYDKVPYNKHELMINQHEANIVKYIFESYAKGHGYRKIANALNHKGYVTKKGNPFSISAVTYILSNPFYIGKIQFAKYKDWNDKRRKGLNDKPVIAEGKHTPIISQDLWDKVQARKKQVSKKPQVHGKGTNLLTGIIACPQCSASMSASITVNTLKDGTKKRIRYYSCSNFRNKGSKVCSANSVRADVIEKYVMDQILEIVKSDKVLKQVVERVNQENQVDVAALNHDIAYKQQQFDEINAKLKNLIQTIEDNPDLTSALKPTIHQYETQLNDITNQINQLKQQQNQEKPSYDTKQISIILRRIFQNIESMDKSQLKALYLTVIDHIEIRKDGNHKKQFYVTLKLNNEIIKQLFNDTPLDEVLLSTSSLFLPQTLFLQI

SEQ ID NO: 4827 - protein, 467 aa, synthetic construct
MRRAALYIRVSTLEQAQEGYSVGEQRERLIAYCKAQDWLIADIYVDGGYTGSNLNRPGIQKLMSETEKFDVVLVYKLDRLSRSQRDTLYLIEEIFRPNKVDFVSMQESFDTSSPFGKAMIGLLAVFAQLEREQIKERTWMGRVARAKTGLHHGGGNIPIGYDYEDGKLIVNPYEAEQVRKIYEWYLSGSSLKAITDKLQDAGYTNKYSSYNSWSSVRNILENETYIGRLHFGDVVVDHAHEAIITEEQFNAAQILRGKRREQFGSHAFQSKHVLTGLLFCGHCGGRYYLRNTGKYSYYACYSRTKQMKNMIKDPNCQNKIWRAQDLEPIIEEKILALLRNPKIAEELAAGKPKAAAPVSKNTDIERRIREIDRQIGKLMELYQQDDIPPELLGEKINRLYGEKTALENSIAPVEETNAMPLDLVAELITNAAEIWDFADENQKRRILQSLISRIVLTDDQVDIEWAF

SEQ ID NO: 4828 - protein, 549 aa, synthetic construct
MPDDCAVIYARYSSHAQRDVSIEDQVADCRIYAERLGLTVLEVYADHATTGRSDDRCQFQRMIQDAKKGRWKTVLTWKTDRFARNRYDSAVYKARLKRYGVHVQYAKESIPDGPEGILMEGMLESYAEYFSANLAQNVRRGLNSNAQKCKLNGPAPLGYRRGSDGGYEIVESEAAVVRRIYQSITQGTGYAELVRELNAAGIKTKRGSSWTKNSFHKILRNEAYIGVYQYGEHRTEDAIPPIITKEEFAAVQNKLETYKKHNAHTGEIREYLLTGKLFCGNCGEGMVGICGTSKSGVRHYYYMCKGHQAHRCDLKNVKAAQLEDQVVSYTMQYVLQDDVIAELVDKLLEYQAQQQDSGMLEALRAELADVQGRLDNLMEAIEAGIITKTTKARLSELESEQERLTHSITVETCRNTGLSREQLIFLFDMFRAGDMRDLDFRRRLIDTFVNAVFVYDDGRLKIVYNFREGNETVTKEFVDSVESGAVDSVRMVVNSVYHGHPKGCPFSFSLKASSPISNGRSGCFNINIVSKQEVIGGITAEALLLTAPD

SEQ ID NO: 4829 - protein, 543 aa, synthetic construct
MEKLKQKRVGIYVRVSTEMQSSEGYSITGQINQIEEYCQFNNFKVVDVYADRGISGKSMNRPALQRMLQDAKNGHIDCVMVYKTNRLARNTSDLLKIVEDLHKQNVEFFSLSERMEVSTSSGKLMLQVLASFAEFERNNIVDNIFMGQTIRAKEGYYQGNIPYAYDKVPDSKHELMINQHEANVVKYIFESYAKGHGYRKIANALNHKGYVTKKGNPFSISAVTYILSNPFYVGKIQFAKYKDWNDKRRKGLNDKPVIAEGKHTPIISQTLWDKVQARKKQVSEKPQVHGKGTNLLTGLISCERCGAAYVASNTTNTLKDGTKKRIRYYSCSNFRNKGSKVCSANSVRADVIEKYVMDQILEIVKSDKVIKQVVERVNQEHQIDTSALNHDIAYKQQQYDEVQIKLDNLIKTLEDNPDLTSVLKNTIHQYEKQLNDITDQINQLKQQQSAPKTIYDANEIATILRHIFKNIETMDKAQLKALYLTVIDHIDIRKDEHHKKQFYVTLKLNHEIIKQLFHNTPLDEVQLSTSSLLLSQTLYLPIS

SEQ ID NO: 4830 - protein, 563 aa, synthetic construct
MMKPPHPMKGSRDPLWREPFIGYIRVSTYYEDKISPQIQRAAIEAWASRNGKRIIEWVEDLDVTGRSFKRRIMGAIRAIEDGRARGIAVWRYSRFGRSRHGNAINLHRLEQAGGKLESATEAVDTSTAFGRLQMGLSFKFAEFESERIGEQWKETRENRLARGLPTTGGKRWGYDWSRRRLDDAGLLHPETYTPTQELDLVVRDVYERIADGEPVNSACLWLGRNGHFGTRGKPWRQTGLTRYLDSGFAAGWIRTHPEDCECPPGDPDDPTHRAAKCSNRIFLPGAQEVTVKEDVWEAYGRRRKEVSGGKREKTPAYALSWLVPCARCGGNSSISGSSTRGAGKVLIRKNGYQFRCSEHKDSDTCDGVYIRRSVAEAALLDRLTEWADEIEAEAAALAAEQESADHVRPQHPAVPRSDTGRTQAQLQSRLAELATEQDRQTSLVSRGVIPEDSYVRERDRLTREQLAVTKELSALKNAQPEVESSDRAALVPVMRGLVSRWEITPVETRRNLLRELIHGVWAYPPGVGPDGEAFAAYAVPVPLWEPKPTPIGRRTPGIPPAKP

SEQ ID NO: 4831 - protein, 547 aa, synthetic construct
MKLLVPYIRWSTKEQDSGDSLRRQTNLIDAFYSKHKNDYYLLPAHRYVDKGKSGFHQQHKNQGSDFRRMFENVMSGAIPEGSLIVVENFDRFSRADIDTAIDDVRQILRKGVSILTLGDGELYDKSALTDPVKLIKHIIIAERAHQESLVKQKRIAQVWNHKTQLARELKKPMGKQAPGWLELSEDGSYYIVDEDKASLVNIIYDKRLSGMSMFAICKWLNEQGYPTINQRKVRISKTKKPDGNWSALSVKHILTSRSVLGYLPAKISTEDRKTVLREEIEGFYPQIVTDSKFYAVQQLLEETGKGKTSSGDHWLYVNILKGLIRCKCGLVMTPTGIRKPVYQGTYRCNGNKESRCNYGTVSRKLLDTQLCSRLFSKLSQLHDEATDTAKLDEIQRRLNTVDSELEKLTETLIQLPNITQIQEALRVKQEEKDELIVQLSREKARVKSVSSLDLSGLDMESVEGRTEAQIIIKRLVKEIVVSGNEKLVDIYLHNGNMIRGFPLDGKDDHTLTLEEATDEMQSLDDMLIFGEPVTRIYPAGDMEEVDA

SEQ ID NO: 4832 - protein, 546 aa, synthetic construct
MKQADGSSYERQKRTAAEIAAKYDLELVTSYQDFGVSAFKGANSKTGALSRFLDEIGRSVPVGSWLVVENLDRISRQSIIEAQELFLSIIRRGITIVTGMDGRVYSRESVNANPIDLLLSVMLFARANEESQTKRNRTNSSALIKIKSHQENPQNPAVAIEEVGKNMWWTDTTSGYVLPHPVYFPVVQEIVELRKNGRSTAEILDHLNETYAPPPAVSNKKHSKWSRAMVERLFHTRALIGIKEVSVDGVNYELNNYYPRVIDDATFYHLKKNIGARAWNFGDKEEAKPIPLLSGIGLLKCDHCGCAMVKVKGTNKRSDQYRYTCDATRSRRLDCEHPNWSFRGDQLEKAVLQLLADKIWIAEDKANPVPALKVQVDEISRKIDNLIALSAMTGATKELADQITTLNSERETLYNQIKMAEEEMYSVDSQGWEKLAEFDLEDVYNEERLKVRFKIKQALKRIGCSRIDRNKNLFVLEYIDGKTQRVVIENSRGTRKGRIFVDLKTINDRQILESNGLVLHPCLDMLTDKNWKPEEEIPGPLQEFGI

SEQ ID NO: 4833 - protein, 450 aa, synthetic construct
MTKAAIYIRVSTQDQVENYSIEVQRERIRAFCKAKNWNVYDEYIDGGYSGSNLERPGIKKLLNDLKNIDVVVVYKLDRLSRSQRDTLELIEEHFLKSNVDFVSITETLDTSTPFGKAMIGILSVFAQLERETIAERMRMGHIKRAENGLRGNGGDYDPSGYTRENGYLIIKTDEAKHIKRVFDLYEQYHSITRVQEILKEEGYPIWRFRRYRDILSNILYIGRVTFAGKEYEGQHEPIISSEQFKRVQVLLERHKGHNAHKAKQSLLSGLITCSCCGENYVAYSTGKSKDVESKRYYYYICRAKRFPAEYEERCMNKTWSRKKLEEVVISELKSLTEEKKQTHKKEKKINYAKLIKDIDKKMERLLDLFMNTTNISRNLLEQQMEKLNLEKEKLLLKQQRSEESLSREVTLTAIDDLFETLEFKEKQIIINNFIEQIYINNENVEIIWRF

SEQ ID NO: 4834 - protein, 506 aa, synthetic construct
MRSVITYLRFSSAIQGAEGADSTRRQNDLFKQWLKKNSDAQVVASFSDEGLSGYKGKHLTGQFGDMLARIESGEFSEGTVLLVEAIDRIGRLEHLETEALMNRIIAHGIEIHTLQDGLIYTRDALSDDLGISIIQRVKSYIAHQESKQKSFRVSQKWEQRAKLALAGEQRLTRNVPGWIDPDTFKCNEHAETVRLIFKLLLSGESLHNIARHLQSNGIKSFSRRKDANGFSVHSVRTILRSETTIGTLPASQRNDRPAIPNYYEAAIDASTFNKAQEILGKNRIGRTPASDNPLTINIFKGLFRCQCGASVHPTGTKNKYQGVYRCNNHLDGRCDVPPLKRKPFDKWMIDNFLGMIDVGNDGEAEKEIASLQHEVEIVTTRIKKATALLLEMDDIDELKIQLKELNQKRTELQTTIDNMRRKASLTDKELPQLKDIDLTTKVGRVECQLILSKHLKGLTLGKDSVTVTLQNDTEITIPTNPLPLNDGSPIFEIADKELLDIDAYQL

SEQ ID NO: 4835 - protein, 540 aa, synthetic construct
MNRVAVYARVSSEDQAERGTIENQIEFAAKYCDLHQLEIIEWYKDDGVTGTIPLEQRPEGQRLLEDAKKRKFDLLLIYRLDRLGRSARIILNAVYELEQHGVKIRSMTEPFDTGDPNGRFLLTVLAGVADLERETILERMWHGANRAARAGKWLGGIVPYGYRVNEDGYLEINEDPLPGMDMSEADVIRLIYRLVAEEGYSTIKVADYLNALGVPPAYVKDGRQVKRGKRKVNTAGIWRPARVRNMIVNPTYKGIHYYGRRTNKKRELIPREVPAIVSEEIWEKAQQVLRENQLEAVKNSKHRQYLLRGLIKCGICGLTYHGTAFGGPGGKPKVYYVCGGKTAYRGPLQGRCTSKNVPAEWIEDLVWQECVNFIENPGEAIQELAATMEVRKSQRAALEAEKQKALMALNEKEAEKQSILDLYRKRIISSLDVEQQLQKITQERKALEERVRELDRQIAAEETLINQFNTAEELLADLRAKLHSDPPFEVRREIVRALVKEIIVDTKPAENGRPIAVVTARYTFSKDVIRTATGCRPPQA

SEQ ID NO: 4836 - protein, 526 aa, synthetic construct
MIFDRVLLHLRKSRSDIEAEARGEGETLAKHEKFLLKYAKENSINIIQVRKELESGEFLVHRPKMLLTLNEVSEGMYDGVLCMDIDRLGRGNKQDQGIILETFKNSNTKIITPRKIYDLSDEWDEEYVDFEQFMAHKELRYINRRLQRGRIASIENGNYLSPLPPYGWLIKSEGKGNRYLIPHPEQGPVLKMIYAWYNEDDPDKWKGSTKIADELNAMNIPSYTGKPWEPSAVLNIIKNSANCGYIAWKKKKIQKSLTPGKKKDCKTRPKEEQIIVKGKHYPGLVSEEEYIKAQTRLSNKYHVPYQLVNGIRNPLAGLIRCDICGASMVYRPYSHQQYPHLICQHCENKSSRFMYVEDKLIQGLREWLAQYKADWKRNQKATKKVDPLEFLNKSLAKLEKDLEEIDKQKNSLHDFLEKGIYSTETFLERSKILADRTEATETAIQEVRSRIEVEQNIYTANEKVIPLLENIIDVYYKTDDPGQRNALLKSVLNYATYRKEKHQKDDDFTLVLYPKLQRATLFKESH

SEQ ID NO: 4837 - protein, 500 aa, synthetic construct
MREAAIYARVSSNEQANKDISIPAQLEKLHEYASKNNLMIVKKYIDDGISAKTADKRDEFLKMIAEAKKDPKPFDVILYHKGDRMFRNMYDAVVYKKLLREDRNIDLICVTQDIDTNTPHGMFAERMMDAVAEYFSANLSEEVMKGMNQQAKKGVALGEPPYGYSIDRETGKYKIYEPEAKVVRYIFKQYIKGNSLREIGVDLRANGVNLFGDSALLKVSKAIDNKGKHNDQKISWAPKTIRNTLSNEVYIGNYIWNDTQIENNHPAIIDKDQFELVQELLKRNKKSKKNASKDYLLKGLVTCMECEGNLSQLTQRYKPVGADKEQITRKLRCTRHVRFKDCYPNYWSMEEVEQGLVSYLKEIIRDKVDISTLQITKTNNNDLIKELNQLEQKYENFDNRFDKQMQAFEAGVIDLEQLQGYKERLKEEKEEIEDRIAELEDAINSTSTDHEGFKQQINRLIHTLENDDISLNKKKNILIQAISEIQLSKRQDLMKIIFKT

SEQ ID NO: 4838 - protein, 553 aa, synthetic construct
MKKLRIRAALYARYSSDNQREESTIAQLRAGREHAKKKDYVIVAEYKDEELTGRNDRRDDFQRMIRDAKRGLFDVVIIHKFNRFARNRYDSAVYKRMLKKAGVRVESVLQPLDDSPESVLLEALLEGMDEYYSLDLGREVMKGMFENADQGIHTGGRPPYGLKVNPETRRYEIDETKYKAVQIYFECRRDGVSRKNIAKKLNDLGYRTQTGKKFTRDSFYGWDTNRKYQGDYVFNVASSKDLDGRRNTNKKKPIEEQVIKKGIIPKILNPKLFGEVNEMIKQRQFKPGQMKAQVNYLLTGKVFCGQCGATYNGNSYRNSKSKDNTILSYYKCSGRCKNASVRKENLERIVIEQLTYHCFSRQAMDNIVVKVKELYDERRKETQADISPIKKEIKNLEATIENWIQALGKGIRGLEERIVEAQNRIALLNEELEHITMLQEETTINDKMIIQLLTEKKDALYSDDENEKKRIIQEYVDKVIINPSDNINTLDVEITYRVFNGGGEGNCTPVSKSCHKSVYACILLFKLRLMGSRRQDPSEAISIILANDSENCH

SEQ ID NO: 4839 - protein, 547 aa, synthetic construct
MSTPDSRPRPRLRRRGQPKPATPATASATGGPRRVAIYLRRSTDDEHQPYTIEAQRQALENYIASQPGWTLAATYTDDASGATTNREGLQNALRAAAAGRYDVFLVYRLDRLSRKVADVIALLAALDQAGVAFASATEPFETSTPAGRMFIQLVGAFAEFERETIIDRVINGMTMKASQGKWAGGTRPYGYLVDKTTSKLIPHPDEAPVLKDIFTLYTRDRIGTRAIAAELNRRGIPNRTGKPWSGHTINRILDNPAYTGDIAYRDVYVENAHEPLIDRDTFRQANDIAEARASATTHRAASGSDYHCTGLLTCPKCGGAYIGTAANGRSRTYRYYTCHNRNRYGTAGCDAPRLPADDLDLAVLHALHDFFTRHHTLIAEAITHARTQHQDGQQDLRAERDAIASQIHTKNAAVNRYLTAFENGTLDGTTTGQRLTQLRTDIDKLTNRHDDLTHAIATEPTAPAPALLGEIQANISQAITAGTPGERKAMIESFIDEIRITDEGIIPMFKIPHGNDEAPAEDTTSAGASTNTVSAMTRVVGRQGLEP

SEQ ID NO: 4840 - protein, 547 aa, synthetic construct
MTQSEGEDPSLLIDLFCRKSRAKASKGKREISISAQETRGRLIADRLGLTVRHVWREVGSASRFRTGKKARTDQDAALRALERGEVGALWVFRLDRWDRRGAGAILRIIEPADGRPRRILFDNGDPDNPGVGLDSSNPRDRKELIRRAEDAREETEVLSERVRNTKTHQRANGEWVNHSAPYGLKVVLVEVEDEDGDLLVERKLALDDAPAAQGADAPSKANIAFKVAYELPVQKESGRAIAQAMNRAHIPSPSGGEWAHATVRDMVRNPAYAGWQTTGRQDGRSRRVLFRDEAGRRVSVMHGPALLTDEQQTEAIAAMRGTDGRGVSSAGPHDTRAKYLLTGLLMCGGCGGPMSFSGTGYRCWKPAAGKTCPAPASVVRHLADAFVHHRWEARLAGAEPDDPLVYAVAERWAARVQPVATEESRAALEALTAAEKALSRVWADRKAGLYEGPSEAFFAPALREVTEDVVAAKKRVEATTARRGVDVSFLLDPAMCEGAWEAADGQLRRTLLRLAIDSVTVTKARSRGVMFDGWKQTRFKWADGEED

SEQ ID NO: 4841 - protein, 468 aa, synthetic construct
MARNITVIPAKQNLTAGEGNAVLRKKLQVAAYCRVSTDQEEQLLSYENQVRFYTESINSNPEYECAGIYADEGISGTNTKKRDEFNRMIMDCRAGKIDRIITKSISRFARNTLDCLNYVRELKGLGIGVTFEKEAIDTLDAKGEVLLTILSSLAQDESRNISENSTWGIRKRFEIGQHKMSTKRFLGYDADENGKLVVNKQQAKIVKRIFMEFLWGKTTDYIKRIFEREGVINWDGGTKWQSTTIDSMLENEKYKGDTLLQKSYTVDFLTKKRVQNEGEVQQYYIENDHEAIIEPWIWECVQLEMKRRERYLEEHNITRFSQNTEANPFSSKIICGECNRAFARKGWRTPNGDRKVWQYSERYKVRGVLGCGNRHIYEDTLIEIYLRAWNRMVECREMLVPGWEEKMQGEDLLAKFRAMDFMEITKDAQPIKGLDIDLMLRTVDYIKVYESGMVVTVFLDGTEIEWIN

SEQ ID NO: 4842 - protein, 540 aa, synthetic construct
MTMKKSKEEYFMYLRKSRKDRDAEMRGEGETLARHEKLLTELGNKMGLNITRVYKEVVSGETIDSRPEIQRLLHDIEDGHCAGVLVVEVERLARGDTKDQGVIAEAFKYSDTKIITPIKTYDPNDEYDEEYFEFGLFMSRREFKTINRRIQRGRIASVQEGKFISSVAPYGYRKVKVHNGKGYTLEIDQERAEVVKMMYDWYTKGVPDENGTYRPLGATAICRRLDAMHIKPMLNSTWSKASVSDILKNPVYIGKIRWSYRKEIRKMSNGVLVKTRPDNHNDYILVDGLHPPIISEEIFSAAQHMSIRNRKTPLKVNSRLQNPLSGLVYCKKCGSRMTRLGPTTHTPYATLKCSNRYCDNISSPLYLIEKKLLTLLNDWLTNYNLNWEGCSSSLPSDSELKVKKQSINDINESLATLEEQLDNAYAFLEKGIYTPEIFIQRKEKLTEEMAALHTDLQSMIERYENILTIQRSQEEFLPKVRGVIDAYWTVSDMQTRNDMLKELLEKIEYKKGIANTRGKRENANFTLDIYPRLPRKSPIS

SEQ ID NO: 4843 - protein, 534 aa, synthetic construct
MSTSIPEESGPNDLELRGTPAGLPPYADLVAANPNAIFVGAYSRISDDWRKNKSKKAAASRWSAGKGVANQHRRNDMNAGRHQVIVVHRYTDNDLVASRLDVFRPDFAQMLKDLKLGRTKDGYRLDGIICVHQDRLQRTDTDWEHFVHALLAKPGRLLWTPSGSSDLTDEGEIVKTGIMAVLNKAESMKKKRRIRDWHQDLILDGLPHSGPRPFGWNEDKMTLRAEEADYLAWAIRERIKGKALSTLCAEAKKRGLKGTKGGEIAPTTLSQMMTAPRVCGYRANRGTLALDENGAPIVGKWDTICKPEEWEAVCATFSPGSTYMHRGPGAPRVTGKPKTVKYLASQLLRCMNKVERDGETRICNGTLTGSPTKSARSPYTYRCGSCNKNSIAGPMVDRQITRLLLGKLGEAQITYRRPELAWHLESTLKTLADRLAGLENRWMAGEVDDEQFYRLSPGLQAEVRKLRAERARWELENAAGSEEPADIIRKWRSGELDLAQRRRILFDVFAAIQVTPGQKGSKTPNPHRLKPIWG

SEQ ID NO: 4844 - protein, 491 aa, synthetic construct
MGLAAIYLRLSRNEEQLNIDEILSNHRNALTKLAKQQKLTYDIYQEISSGVNTDRPQLNLLLSRLDDYDALLVMDIDRISRDNAHAEEIKKMLILHDIKILTPQGAIDLSQESNEMLFSFQAMMANFEYKQIRKRLGRGRLAAAEQGKWTMSNRVPLGYKKNEEKRLEIVEDEAKIIRFIFQKTLERVSANEIAKQLDTLGWRSRNGKVLTSAHISQVRRNVVYYGVVQACRRVNGRVVDEVFVENAHEPIISKQTFLEVQEILAENTTGNFFHKLKAKRRLQNLIYCNCCGRKRYLQSDGAGKEFIKSCSYKIDNNVCQDRGHKYEPVEQYVLQRVKERKQKVEKALEKLKSLDIVDEEKELIVRREALEKQLNKFEKRQRNLKTMRMDGEISKAEFYEMRDENEGKIKSIRQQIDLIDIQLEDLSNTDEKQCEYEYIIGMLERLEELEPEACNAFLKRFIKKIWFSSNTETNHDTTKPRKKATIKIEWL

SEQ ID NO: 4845 - protein, 515 aa, synthetic construct
MKTAIYLRKSRADLEAEARGEGETLAKHRSTLLKIAKEMNLNVLSVREEIVSGESLVKRPEMLALLEEIEDNKYDVVLCMDMDRLGRGGMKEQGIILETFKRSNTKIMTPRKTYDLNDEWDEEYSEFEAFMARKELKIITRRMQRGRIASVEAGNYLGTHAPYGYDIHRLNKRERTLTINLEEASVVRMIFEWYANEDMGANAIMRKLNELGYKSKLGNDWNPYSILDMLKNNVYIGKVTWQKRKEVKRPDATKRSCTRQDKSEWIIADGKHDPIIPESLFEKAQEKLNTRYHVPYNTNGLKNPLAGIIRCGKCGYSMVQRYPKNRKHTMDCKHRGCENKSSYTELIEKRLLEALKEWYINYKADFEKNKQDESTKETQIIQMNETALRKLEKELVDVQKQKNNLHDLLERGVYTVDMFLERSNVVSNRINEITETMENLRKEIKTEITKEKVKKDTIPQVEHVLDLYFKTDDPQKKNSLLKSVLEKAVYTKEKWQRLDDFKLVLYPKLPQDDDK

SEQ ID NO: 4846 - protein, 522 aa, synthetic construct
MKLSLILQPNMKAAFYGRHSTDKQDMDMQLNSVMEVIRKYDCIHAHSFLDKAVSARKNKMTSRKELENMFEAAKRKEFDFVIVYKSDRLARDPLEHQTIRIVMKTLDIPIIISSAESVYNTDADLIVQLMEDGFTKYEVDTIIARTRSGLENKAKQGKWLGGKPPFGYTYDKSSEQFIEHTEELCYVKEIFNLYVNGHGFQHIANTLPNGSRRGKDWGKENVKAIVLNPFYCGLLSWRRQTDGKQNARDIWIEAPNHYVKPIISRTTWESCWRIYSEKRNGSMVPKHYKTSFLLQGLLSCEKCQELMKTKNQQTVSSTNKQYGGKIYFCTNCKLRIDADLLHDKVVNQTLTDVKISGFHNVYHAIEQKIQYEIQELNNNIQKHQRLFENYTIKLYNSTEELKQRMKNNDDKRFLKSLAIYRSDIQRKLDGIIQQMNDFKQQIILKEKIEKSKETWLHTLNEVFQDDVKLQEISDMDKRRFLLPLIQSVSIKENKKCNEYDISLQLRTDFSKRDVKNQISLIL

SEQ ID NO: 4847 - protein, 612 aa, synthetic construct
MRNFEKITALYERLSRDDELQGESNSIINQKKILEEYASKNNLSNIIHFTDDGISGTQFDRPGFMAMMNGVNQGNIGCIIVKDMSRLGRDYLKVGQCMEILRQKGVRLIAINDNVDSFYREDDFTPFRNIMNEWYARDTSRKIQSTFRSKGESGKHTASTPPYGYIKDEKDKNKWIVDEKAAEIVRRIFNLTMQGNGPYRIAKILESEKVDIPAYHQQKLCYGLYQSKNFEHPYRWCSSTIASILKKQEYLGHTVNFKTRKHFKDKKSKYVSEDNWLIFENTHEPIIDQETFDNVQRIRGNVKRYPDGWGEYHPLTGLMYCADCGSKMYVHRTSNYKNIPYYTCSAYTKTPCGMLCPSAHRIKAEVVLNLIQDTLKDIKKYLDEDNEAFICSIQNEMEEKEKIEIEKKKVRLTESQNRLRELERLMCRIYEDMILNKIPNSRYEILNNQYETEQITLSKEIKDLEQQVSRYEKETDRARKFISLISRYENFDELTTTMINEFVEKIIVHERDRKGSQTSKQKIEIYFNFIGNYELPQAELSEEKKQKLEEEERKIEERKDKLHQNYLKRKASGKQKEYEDKYKARREQKKQEKIKVLKRVGIPVSEYIKTNI

SEQ ID NO: 4848 - protein, 571 aa, synthetic construct
MDNNSDIRVAIYIRVSTLYQIDKDSLPMQREDLTNYCKYIFNTEDYEIFEDAGYSGKNTGRPAYQEMMLKIRKKQFTHLLVWKIDRISRNLLDFSNMYEELNKYNVTFISKNEQFDTSSAMGEAMLKIILVFAELERKLTSERVSSTMISRATKGLWNGANVPLGYKWNEEKKYPSPDEKEAKVVQYIYSTYIQCKSCSKVSKILNEEDIPTKRGGKWTSKTVNDILRNPFYKGTYRYNYKESARGKKKDESEWIVIDNNHEAIIDKAIWQLANETLDTNAGLVGRRYVGKIHTHIFSRKLVCSKCKSGYNASKDTMRENGYTPSKYVCSGKVRKFICDAKLVSDVVLGPFVLTLIKNIILAGNMCIDTTDELEDILLDGSPFEDVLSINQEDLEMLYVALYKVPTQKSNITYSHIKDKQPKSLEDQENEYVKKRIEKFKKEKTKYINALERLEELYMFSEEGISKVDYVIKKKEYESKLNNSEENLKQFYRMNDTEKNIQDMTFILNYENIIFNRAMNDNNELDFKMLMTNVNNKVVKDLIDMVIKNIYMNDKAVDIIEFQNGLALHFNY

SEQ ID NO: 4849 - protein, 520 aa, synthetic construct
MSQQAVALIRVSSEEQAQEGLGGIERQRRDIAAIAARENLTIAETFTLEGVSGSTVKLNPQFQRMLKAVSGAGIAGLIVSSPDRLMRCSDLSDLAVLAPFGTEALPRLIWTADTTYNLSRFESQIMFVMHTLMGGHEKRQIIKRTQDGKILSRERGDKCAEKPPIGVEFVVLDPKARTGVYRYTAESKRIQKAFYRVLDRDISIKSLAKEVGFSCYQSLRLQLMNPIWTGVREYTKKREKLSPGPDGQLRSRKVPRLTPLRVKMNLEGEPLIPQNVFDEVQQILAGINKQHVSRRSGKSKFELSGLLRCPCGQRYYSKHDERDGKSGYYVCKSGYFSAPKGCGYPILARATTDATVTDTIVSLLGTQETLTAMLTVATTPKDHHALKAERDQIRHHVETLTNRRTKLIDRIADGIITEDEAGRSMAKIRSEIETANGRLAEIESKLRGAQIPDIGSVVTAVVKLFHRLKFQPADRRKVVIRQIVQEVHMGPNKQVLALRIKVGEGQSVVLQPEPAKVVAA

SEQ ID NO: 4850 - protein, 577 aa, synthetic construct
MSINRNNTSETPKKAALYVRVSTNYQIDRDSLPMQRQELITYAQLIFGINDYVIFEDAGYSGKNTDRPEFQNMMRRIRAGEFTHLLCWKIDRISRNLLDFASMYQELKDLGVTFVSKNEQFDTSTAIGEAMLKIILVFAELERNMTSERVTATMLSRAQNGLWNGGRVPYGYDYDKDSKTFSINQEEAFLVRKMYDLYSEHRSLVMVSRTLNEDGYASRAGNDWSPVSIFIILTNPFYTGIYRYNHYKIPGLKIEKDPSEWIEVPDHHPRIISDEQFDNVNRILQSNSRSKRLPGQQHTSKGTHIFGGLLYCGTCGSQYVSTPSRLLASGYRPSKYACPNLRKKKTCNTKSISDPVIGEFVLNYVLNMMHARAAFSSIHDTSELQDALLSGGTFQNVDHIGKDGLDSCFHMFSSTPLDGKRFRKPKKATTIDPELKRLRAEKRKTERALDRLMNLYLYADNPISEKDFVIRKQALDDYLKEINENLGMIDRGRGIETISDENFIKRASYFIMSKELAGKDYIYFKKLAMDMDAEILRDFFQEIIDSIVMEGSNVKEIVFRNGLAHTFFYKDAEKPEA

SEQ ID NO: 4851 - protein, 534 aa, synthetic construct
MKTAAIYARRSKVVETGDSIENQIQLCTNYLKNIGINNTLIYSDEGFSGKNTERPGFVRLMNDARQKKFDTLVCYKVDRLSRNIGDFSNLINELEKNEISFISVIEQFDTRAAMGKAMMYICSVFSQLERETISQRVCDNMYSLATNGYWLGGEFPFGFSSSRKNFTDSSGKNRSYSELIPIEKEINLVKLIFNKYIELGSLSQVEKYLLQNNIKTRRGKDWSKASIKNIISNPVYVKANDKTIEYFKSQGIKTYGEPDDIHGILIYKKRKGKSGKIRNPDEWIYAVSTHEGIIDSDSWLEVQKIAEINKYKAPALGSSHKALLSGIIRCAQCGSSMRVSYGVPNKLTKKRKHYYMCTLKHNSGKVRCASKNVDGPEVDKLVINKLKELSLDKSYLVQRLKDYKESFATSSENILSKNIQNEISKNKEQIDNLVNNITLTEDPQLVQILLDKLTKLKSKSVELTNSLNKLNDELAKQDILINNCDNIIQKLKNLSALIDDLDVPQKRTLLSSVIDKVFVNGDTGAVKIKFKSFN

SEQ ID NO: 4852 - protein, 476 aa, synthetic construct
MAVSRNVTVIPAIKRVGNNKNSESKPKIRVAAYCRVSTDSEEQASSYDIQIEHYTNYIKKNKEWELADIFADDGITGTNTKKRDEFNRMIEECMAGNIDMIITKSISRFARNTLDCLKYIRQLKDKNIAVFFEKENINTMDSKGEVLLTIMASLAQQESQSLSQNVKLGIQYRYQQGEVQVNHKRFLGYTKDENKQLVIDPEGAEVVKRIYREYLEGASLLQIARGLEADGILTAAGKAKWRPETLKKILQNEKYIGDALLQKTYTVDFLSKKRVYSSKYALSSIVYCGHCGDIYRRVHWNNRGYKSIVWRCVSRLEEKGSECTAPTINEETLQKAVVKAINELLANKDPFLKVLQKNIATVFNGENDNATDDIDSKLEELQQQLLIQAKSKNDYEDVADEIYRLRELKQNALVENAEREGKRQRIAEMTDFLNKQSAELEEYDEQLVRRLIEKVTIYEDKLTVEFKSGIEIDEEI

SEQ ID NO: 4853 - protein, 551 aa, synthetic construct
MKTPTCIATNGLSINLDNPSPKAYSYVRFSTKRQAKGDSLMRQLDKSREYAAEYGLDLQEKSFEDLGVSAFDRSNVTKGALAAFIRAVEASAIERGSFLLVENLDRLSRADVLDAMNLLSTLVKLGVRVVTLVDRRILDEESVKEPMNLMYAVLVFVRANEESATKADRVKKAHKRKRDNCSTFAFGQGPGWLQPNADRTGWEVIPERAESVRRVFEYTAKGYGATAIAKIANEERWPVPGRAADWHKTLPNKLIHNRRVLGEFEPQIKEGKQRRPTGELWQTYYPAIVSEELFNAANAAVERRRLLPKRRDNGYHNVFQGMLRCGHCGATLARKSKSGTRNSAGYGLYVCADRDRGLTNCPNWNARELEDALIPPLMTFVAADVLEGTVKQQARAALEIERTELAREGKAIKHLVGTIERIGTSDTISARILALEASIEARRRRVTQLAAQANDPVTSVWSEDVEVAIGEALRAVRDVTLEMAEEREALHQSLLRVVKQISVWPKTHAAVELHQGNGQVFLPLSEQAPIQDALKGLIAAPRLNNDTIATA

SEQ ID NO: 4854 - protein, 577 aa, synthetic construct
MENFDLKGFAKGKKQQKEQIGGNAIIYTRVSSSEQVDGQSLEVQIDKCREYAKVRSYTIVGEFGGTYESAKSDKERKEFNRMLAFIKQSNKKGSSQPVKTVIVFSTSRFSRTGSTTIIEEVEARGAYVVSATSNYDPRTPVGKYMQLMELANARFQNDEKRATTIENSVKALLKGRWIGKAPRGYDQKTTKKEQIITINEEGKLIRKAFLWKANNKLSNEEIRHRLEAEGLHICKQKLSELFKNPFYCGYMAHKFLQGDIVQGNHPPLISKEIFLKVNGELSKNHSGYEQKIDKEYAPLLGSIKCPCCGKNLSASISTKMRKKFGRTDIGYYVCSRKGCKYNSSIKKVHEAFEEEVNRYSLSDKVSELLKMQLTITFEYMNQENRERAKSIKANIKAKEKELEQVETNYALCTDAKKQSICEKVMTKLEKEVRDLKTEFSKVNTEILNLDKFIDFAFKMRSNLFGLWELQGLEGRRRLQKLVFPDGFIYDKNNEHIEPKRVNQFFLIKYSYPTGNGDKKKGTNREKHDSSLRVLEAGLEPAQPQWPKDFKSFVSTIPPFEHPKKGKESGKRDSNSRP

SEQ ID NO: 4855 - protein, 635 aa, synthetic construct
MPTSKNMARKYAAGGGSDNSCDVEPLRAVIYARYSSSGQREESIEGQLRDCYEFAKKHGIIVIGEYIDKAMTGRVDRRPDFQRMMKDSEKGRFNCVLLWKMDRFARNRYDSAMYKYKLKKNGIRIFYAKETIPDGPEGIILESVMEGYAEYYSENLAQNVKRGNYDSALELKTLGKTCLGLKTGPDGRYMIDQAEAAIVRRIFEEYAEGERAKDIYERLNSEGYRTSRGGKFNKNSLRRILSNKKYIGVYEYEDIYVENGIPAIITDRDLFERVQKMLKINHDAPARGKAQNFLLTTKLFCGLCGSPMIGDGGTSHTGKAYAYYSCTKRKRGRSCKKESVPKDWIEDLVVGELVKIVHNDELIEQIADRVMEYQKREKDQSGLHALEIRQKENEKAISNMLAAIEAGIITPSTKTRLMELEADRADIEKGIAHELLAEPEFERDQIIYFLERFRSGDINDEAYRIMLVDTFLNSVYLYDDDHLVLVMNYSGENCKVDLKLVEGAVSGDGCKGSAFAPSSALNNKTGTKQSVWSLSCCSKPKRALNPWFKVSPPARSARGMRSPGPHSPHLAQDYGRGRAGPMGPRSPLRFGRCRTDVPRASCGLRSASVGAEQTSPGCLAPHLPQGSGCCGTGSL

SEQ ID NO: 4856 - protein, 536 aa, synthetic construct
MLRQTNQQPITALYPRLSHEDELQGESNSISNQKRILETYAKQNGFSNLRWYTDDGYSGANFQRPGFQAMLADIEAGKVGTVIVKDMSRLGRNYLQVGMYTEMIFPQKGVRFIAINDGVDSAQGDNDFAPLRNIFNEWLVRDTSKKIKAVKRSKGMSGKPITSKPVYGYLMDEDENFIIDEEAAPVVKQIYNLCLAGNGPTKIARMLTEQQIPTPGTLEYRRTGSTRRYHPGYECKWATNTVVHILENREYTGCLVNFKTEKLSYKVKHSVENPPEKQVIFENHHEPIIDTQTWERVQELRKQRKRPNRYDEVGLFSGILFCADCGSVMYQQRYQTDKRKQDCYICGNYKKRTHDCTAHFIRTDLLTAGVLSNLRKVTSYAAKHEARFMKLLIEQNEDGGKRRNVAKKKELEAAEKRIAELSAIFKRLYEDSVTGRISDERFTELSADYEAEQRELKERAAAIQAELSKAQEATVNAEKFMNVVRRHTSFEELTPTLLREFVEKIVVHECSYDENKTRRQDIEIYYSFVGKVDLPE

SEQ ID NO: 4857 - protein, 537 aa, synthetic construct
MKQQIYNTALYLRLSRDDELQGESSSITTQRSMLRLYAKEHHLNVIDEYIDDGWSGTNFERPSFQRMIEDIEAGKINCVVTKDLSRLGRNYIMTGQYTELYFPSHNVRYIAIDDGVDSEKGESEIAPFKNIINEWVARDTSRKVKSAFKTKFAEGAYYGAYAPLGYKKHPDIKGKLLVDEETKWIVEKIFSLAYQGYGSAKITKILREEKVPTASWLNFTRYGTFAHIFEGKPESKRYEWTIAHVKAILKSEVYIGNSVHNRQSTVSFKSKKKVRKPESEWFRVENTHEPIIDKEVFYRVQEQIKSRRRQTKEKATPIFAGLVKCADCGWSMRFATNKANKTPYSYYACSYYGQFGKGNCSMHYIRYDVLYQAVLERLQYWAKAVQQDEEKVLNKIQKVGNAERIREKKKKASALKKAENRQNEIDRLFAKMYEDRACEKITERNFIMLSGKYQKEQIELEQQITSLREELSKMEQDMIGAEKWIELIKEYSVPKELTAPLLNAMIEKILIHEATTNEENERIQEIEIYYRFIGKVD

SEQ ID NO: 4858 - protein, 604 aa, synthetic construct
MTKIIGYARVSTTKQDLSRQKLKIKEFCENNNYELIEIIEDFGISGVVADRRGYLELQSRTYKDADMIVISELSRLSRQEDVTETVHNIQQIINKGLSVILLDSPSKIYEANKLLDITEILILTIKAWAAAQERLDIKKKNQDGKQALFQAYPYAVVDQKIPYGYKAVPNPNGKRPKYILEEVPEEVENIKRLFALVNSGKTLGAVARYFNERNITFRGYYSTVAILSNYIHSDIYRGIRRRTQRLGREEPYTIEVRIKPIISEEDFMKAQELIKNNYKNTPTGKVNHNPLKGIIKCRCGRAMTVKDKKPAAGISKLTYRCSCVDRKSHPDFCKYNIDEVSYDLTNEILYSLFKSMHTAEYINFFRNQTDNRVTELQEEIAGIEKRLSTLYLDKENLSNESKENANKFLLTTNPTLLNIIQEKQNQLDDKIKSIDKEIVKYKKSQSKKAADIERIKDNNGKEKLQNLTIEEQGELYHKYLERVNYIPVTTMQGYYIVQFLNGIKFYIAITKVRSIAMASLLLDNWSIDEKGIITANYDTLKSSDMKNFNIEMIRKTKTMTLQEYLKTDLAKERALHLDLSYRERYLKELHKAGLDGRLRPLKKE

SEQ ID NO: 4859 - protein, 550 aa, synthetic construct
MNRQSTFSTILKSTIAFEEAKITALYCRLSRDDELAGDSNSIVNQKAILKKYAEDNGFRNIEFYVDDGVSGTTFDRPDFNRMIADVESGRIGTIIIKDMSRFGRDYLKVGYYTEIMFPEADVRFIAINNCIDSANQADSDFTPFLNIINEWYAKDTSKKIRAVFKSKGQSGKPLCTNPPYGYIKDPEDKLHWIIDEKAAEVVRDIFRLCMAGFGPTQIAKQLEKRCIDTPTVHLRKMGINTPARPPENPYAWSARTVADILAKMEYLGHTVNFKTSKKSYKSKVKILSNPEDWLVFKNTHEAIIDEGTWETVQKIRDGKRRPSRLGEMGMLSGMMFCADCGAKLYQVRGKGWTHDKEYFVCATYRKKKGMCSSHQIRNVVVEQLLLEDLRRVTSFAKDHEQEFIRIVMNNSEKELAKELRQSQKEYEQAQTRIADIDKIIRKLYEDNVMGKIPEERFYKMSAEYETEQKALEERITKLKHTIDTANEQSLNTDRFLALVKKYTEITELDAEIIREFIDKIIVFKAEKVDGRRTQRIQIFYNCIGAIDLPN

SEQ ID NO: 4860 - protein, 559 aa, synthetic construct
MKTKLYSYIRFSSMRQSDGSSYERQIRMAREVAAKYDLELVNDYQDLGVSAFKGANSKTGALSRFLDAIGRSVPVGSWLFIENLDRLSRADIVSAQELFLSIIRRGITIVTGMDNKIYSLDTVTANPMDLMFSILLFIRGNEESQTKRNRTNSSALIKIKSHQENPQNPAVAIEEVGKNMWWTDTTSGYVLPHPTYFPVVQEIVELRKNGRSTAEILDHLNETYAPPPAVSNKKHSKWSRAMVERLFHTRALIGIKEVSVDGVNYELKDYYPRVIDDATFYHLKKNIGARAWNFGDKEEAKPIPLLSGIGLLKCDHCGCAMVKVKGTNKRSDQYRYTCDATRSRRLDCEHPNWSFRGDQLEKAVLQLLADKIWIAEDKANPVPALKVQVDEISRKIDNLIALSAMTGATKELADQITALNSERETLYNQIKMAEEEMYSVDSQGWEKLAEFDLEDVYNEERLKVRFKIKQALKRIGCSRIDRNKNLFVLEYIDGKTQRVVIENSRGTRKGQIFVDLKTINDRQILESNGLVLHPCLDMLTDKNWKPEEEIPGPLQEFGI

SEQ ID NO: 4861 - protein, 506 aa, synthetic construct
MRSVITYLRYSSAIQGAEGADSTRRQNDLFKQWLKKNSDAQVVASFSDEGLSGYKGKHLTGQFGDMLARIESGEFPEGTILLVESIDRIGRLEHLETEALMNRILGNGLEIHTLQDGLIYTKDALADDLGISIIQRVKAYIAHQESKQKSFRVSQKWEQRAKLALAGEQRLTKMVPGWIDPDTFKLNEHAETVRLIFKLLLSGESLHNIARHLQANNISSFSRRKDANGFSVHSVRTILRSETTIGTLPASQRNDRPAIPNYYEAAIDAATFNKAQEILDKNRKGRTPASDNPLTINIFKGLFRCQCGASVHPTGTKNKYAGVYRCNSHLDGRCDVPPLKRKPFDKWMIDNFLGMIDVGNDGEAERKIASLQHEVEIVTTRIKKATALLLEMDDIDELKIQLKELNQKRTELQTMIDNMRRKASLTDKELPQLKDIDLMTKAGRVECQLILSKHLKGLTLGKDSVTVTLQNDTEIIVPTDPLPLNDGTSIFEIAEKELLEIDAYQL

SEQ ID NO: 4862 - protein, 506 aa, synthetic construct
MRTVITYLRFSSATQGAEGADSTRRQNELFKQWLRKNSDAQVVASFSDEGLSGYKGKHLTGQFGDMLARIEAGEFPASTILLVESIDRIGRLEHLETEALMNRILGNGIEIHTLQDGLIYTKDALADDLGISIIQRVKAYIAHQESKQKSFRVSQKWKQRAKLALAGEQHLTRNVPGWIDPDTFKCNEHAETVRLIFKLLLDGESLHNIARHLQSNDIKSFSRRKDANGFSVHSVRTVLRSESVIGTLPASQRNDRPAIPNYYEAAIDAATFNKAQEILDKNRKGRTPASDNPLTINIFKGLFRCQCGASVHPTGTKNKYAGVYRCNNHLDGRCDVPPLKRKPFDRWMIDNFLGMIDVGNDGESEGKITALQHEVEIVTARIKKATALLLEMDDITELKAQVKGLNQKRTEIQTTIDTLKRKTSLTDKELPQLKDIDLTTKAGRVECQLILSKHLKGLTLGKDSVTVTLQNDTEITIPTNPLPLNDGSPIFEIADKELLDIDAYQL

SEQ ID NO: 4863 - protein, 559 aa, synthetic construct
MKTKLYSYIRFSSMRQNDGSSYERQIRMAREVAAKYDLELVNDYQDLGVSAFKGANSKTGALSRFLDAIGRSVPVGSWLFIENLDRLSRADIVSAQELFLSIIRRGITIVTGMDNKIYSLDTVTANPMDLMFSILLFIRGNEESQTKRNRTNSSALIKIKAHQENPQNPAVAIEEVGKNMWWTDTTSGYVLPHPTYFPVVQEIVELRKNGRSTAEILDHLNETYAPPPAVSNKKHSKWSRAMVERLFHTRALIGIKEISVDGVNYELKDYYPRVIDDPTFYHLKKNIGARAWNFGDKEEVKPIPLLSGIGLLKCDHCGCAMVKVKGTNKRSDQYRYTCDATRSRRLDCEHPNWSFRGDQLEKAVLQLLADKIWIAEDKANPVPALKVQVDEISRKIDNLIALSAMTGATKELADQITTLNSERETLYNQIKMAEEEMYSVDSQGWEKLAEFDLEDVYNEERLKVRFKIKQALKRIGCSRIDRNKNLFVLEYIDGKTQRVVIENSRGPRKGRIFVDLKTINDRQILESNGLVLHPCLDMLTDKNWKPEEEIPGPLQEFGI

SEQ ID NO: 4864 - protein, 559 aa, synthetic construct
MKTKLYSYIRFSSMRQSDGSSYERQIRMAREIAAKYDLELVNDYQDLGVSAFKGANSKTGALSRFLDAIGRSVPVGSWLFIENLDRLSRADIVSAQELFLSIIRRGITIVTGMDNKIYSLDTVTANPMDLMFSILLFIRGNEESQTKRNRTNSSALIKIKSHQENPQNPAVAIEEVGKNMWWTDTTSGYVLPHPVFFPVVQEIVELRKNGRSTAEILDHLNETYAPPPAVSNKKHSKWSRAMVERLFHTRALIGIKEVSVDGVNYELKDYYPRVIDDATFYHLKKNIGARAWNFGDKEEVKPIPLLSGIGLLKCDHCGCAMVKVKGTNKRSDQYRYTCDATRSRRLDCEHPNWSFRGDQLEKAVLQLLADKIWIAEDKANPVPALKVQVDEISRKIDNLIALSAMTGATKELADQITTLNSERETLYNQIKMAEEEMYSVDSQGWEKLAEFDLEDVYNEERLKVRFKIKQALKRIGCSRIDRNKNLFVLEYIDGKTQRVVIENSRGTRKGQIFVDLKTINDRQILESNGLVLHPCLDMLTDKNWKPEEEIPGPLQEFGI

SEQ ID NO: 4865 - protein, 506 aa, synthetic construct
MRTVITYLRFSSATQGAEGADSTRRQNELFKQWLRKNSDAQVVASFSDEGLSGYKGKHLTGQFGDMLARIESGEFSEGTVLLVEAIDRIGRLEHLETEALMNRIIAHGIEIHTLQDGLIYTRDALSDDLGISIIQRVKSYVAHQESKQKSFRVSQKWKQRAKLALAGEQRLTRNVPGWIDPDTFKCNEHAETVRLIFKLLLDGESLHNIARHLQSNDIKSFSRRKDANGFSVHSVRTVLRSESVIGTLPASQRNDRPAIPNYYEAAIDAATFNKAQEILDKNRKGRTPASDNPLTINIFKGLFRCQCGASVHPTGTKNKYAGVYRCNNHLDGRCDVPPLKRKPFDRWMIDNFLGMIDVGNDGEAEVKIASLQHEVEIVTARIKKATALLLEMDDIDELKIQIKELNQRRTELQTTIDSMRRKASLTDKELPQLKDIDLTTKAGRVECQLILSKHLKGLTLGKGSVTITLQNDTEITIPTNPLPLNDGSPIFEIADKELLDIDAYQL

SEQ ID NO: 4866 - protein, 506 aa, synthetic construct
MRTVITYLRFSSATQGAEGADSTRRQNDLFKQWLKKNSDAQVVASFSDEGLSGYKGKHLTGQFGDMLARIEAGEFPAGAILLVESIDRIGRLEHLETEALMNRIIAHGIEIHTLQDGLIYTRDALSDDLGISIIQRVKSYLAHQESKQKSFRVSEKWKQRAKLALAGEQHLTRNVPGWIDPDTFKCNEHAETVRLIFKLLLDGESLHNIARHLQSNDIKSFSRRKDANGFSVHSVRTVLRSESVIGTLPASQRNDRPAIPNYYEAAIDASTFNKAQEILDKNRKGRTPASDNPLTINIFKGLFRCQCGASVHPTGTKNKYQGVYRCNSHLDGRCDVPPLKRKPFDRWMIDNFLGMIDVGNDGEAEKEIASLQHEVETVTARIKKATALLLEMDDIDELKIQLKELNQKRTELQTTIDNMRRKASLTDKELPQLKDIDLTTKAGRVECQLILSKHLKGLTLGKDTVTVTLQNDTEITIPTDPLPLNDGTSIFEIAEKNLLNIDTFQL

SEQ ID NO: 4867 - protein, 559 aa, synthetic construct
MKTKLYSYIRFSSMKQADGSSYERQKRTAAEIAAKYDLELVTSYQDFGVSAFKGANSRTGALSRFLDEIGRSVPVGSWLVVENLDRISRQSIIEAQELFLSIIRRGITIVTGMDGKVYSKESVNANPIDLLLSVMLFARANEESQTKRNRTNSSALIKIKAHQENPQNPAVAIEEIGKNMWWTDTTSGYVCPDPVFFPIVQEVVELRRNGRSTAEILDHLNATYTPPPAASHKRHSNWSRAMIERLFHTRALIGIKEISVDGVKYELKDYYPRVLDDAEFYHLKKSIGVRACNYGDKEEVKPIPLLSGVGLLKCEHCGSAMVKVKGTNKRPNQYRYSCDAMRSSRIACVHTNWSFRGDQLEKAVLQLLADKIWIAEDKANPVPALKVQIDEISRKIDNLITLSAMTGATKELADQITTLNSERETLYNQIKMAEEEMYSVDSQGWEKLAEFDLEDVYNEDRIKVRFKIKQALKRIGCSRIDKYKNLFVLEYIDGKTQRVVIENSRGPRKGRIFIDLKTINDRQILESNGLVLHPCLDMLTDKNWKPEEEIPGPLQEFGI

SEQ ID NO: 4868 - protein, 470 aa, synthetic construct
MKGESELDKKAAIYIRVSTQEQATEGYSIQAQTDRLTKYVEAKDFILYKKYIDAGYSASKLERPAMQELIQDVKSKKVDVVIVYKLDRLSRSQKDTMYLIEDIFRPNDVELISMQESFDTSTAFGSATVGMLSVFAQLERKSISERMITGRVERAKKGFYHTGGQDRPPAGYQFNSDNQLIINEYEAAAIKDLFRLYNDGLGKSSISEYLKKNYPGKNKWLPSSIDRMLKNSLYIGKVKFSGAEYDGIHEPIIDEVTFYKTQKEIARRKQTNTKRYNYVALLGGLCECGICGAKMANRRAVGRKGKVYRYYRCYSKKGSPKHMMKTDGCSSKAQQQFIIDEAVINNLKNIDVEAELKRRSAPQTNTSLISSQIESIDKQINKLIDLFQVDSMPLDVISEKIDKLNKEKQSMEKLLERKNKLDKTELQHRFDVLKSFDWDNSSIESKRVVIEMLVQKVIIHDNSIEIILVE

SEQ ID NO: 4869 - protein, 547 aa, synthetic construct
MKLLATYIRWSTKEQDSGDSLRRQTNLIDAFYSKHKNDYYLLPAHRYVDKGKSGFHQQHKAQGSDFRRMFENVMSGAIPEGSLIVVENFDRFSRADIDTAIDDVRQILRKGVSILTLGDGELYDKSALTDPVKLIKHIIIAERAHQESLVKQKRIAQVWNHKTQLARELKKPMGKQAPGWLELSEDGSHYIVDEDKASLVNIIYDKRLSGMSMFAICKWLNEQGYPTINQRKVRISKTKKPDGNWSALSVKHILTSRSVLGYLPAKISTEDRKTVLREEIEGFYPQIVTDSKFYAVQQLLEETGKGKTSSGDHWLYVNILKGLIRCKCGLVMTPTGIRKPVYQGTYRCNGNKESRCSYGTVSRKLLDTQLCSRLFSKLSQLHDEATDTAKLDELQRRLNTVDGELEKLTETLIQLPNITQIQEALRVKQEEKDELIVQLSREKARVKSVSSLDLSGLDMESVEGRTEAQIIIKRLVKEIVVSGNEKLVDIYLHNGNMIRGFPLDGKDDHTLTLEEATDEMQSLDDMLIFGEPVTRIYPAGDMEEVDA

SEQ ID NO: 4870 - protein, 464 aa, synthetic construct
MKRAALYIRVSTMEQAKEGYSIPAQTDKLKAFAKAKDMAVTKVYTDPGFSGAKMERPALQEMISDIQNKKIDVVLVYKLDRLSRSQKNTLYLIEDVFLKNNVDFISMQESFDTSTPFGRATIGMLSVFAQLERDTITERMHMGRTERAKQGYYHGSGIVPLGYDYVDGELIINDYEAQIIQEIYDLYVNQGKGQQYITKRMVAKYPDKVKTLTIVKYALTNPLYIGKISWDGKVYDGHHTPIIDKSMYDKAQEIIARKAQKGGEQHGNQLGLLLGITYCGKCGAKVFRYVSGGKKYRYNYYMCRSVKKMLPSLVKDWNCKQPSLRQEVVEKKVIDSLKSLDFKKIERELKQVENKTKSKITTINNQISKKHNEKQKILDLYQYGTFDVTMLNERMKKIDNEINALTANISNLEGTKSESLINKLETLKTFNWETETTENKILIIKEFVERIELFDDEVIIKYKF

SEQ ID NO: 4871 - protein, 507 aa, synthetic construct
MKRVISYIRFSSEKQAKGDSLRRQSKMVTDWLKAHPEYYLDQDLSFRDLGVSGFTGKHLKGGLGDFLTAIKKGLVKAGDTLLIESLDRLSRQDIDIASELLRNILRSGVDVVTLSDGEHYTRESLRDPLALIKSILIMQRAHEESLRKAERIQAAWDAKKEAAKAGIKVSKRCPAWLKLNDDRKSFSVIPEKVETVKRCFQLRLEGKSIWEIVRTLNDEGHQSMSQYKPGSFGQSSVQDLLKNRSVIGYFTPKGCEEIAGYYPAIIDETTFYKVQQLSYARYGRKPASDKPLSVNLFKGVIRCSECGHALIITGFSDTRSGIYRCPLRNENRCSAKGLSRKQTDGTLLALLSRLDRFDSDMTNTIDTLKLHREHISSNIEKLVQLSLEIEDLNAITNKLKQLKNELSQVDADIEKETQRLKSIDVGCLSDCDLTTKAGRIEAQLIIKSAVKEVVLNTAKRRCKVTFHNGKIIDLPITENPSEDVTEAIQSLSEVTERGLIDVDEVII

SEQ ID NO: 4872 - protein, 559 aa, synthetic construct
MKTKLYSYIRFSSMRQNDGSSYERQIRMAREVAAKYDLELVNDYQDLGVSAFKGANSKTGALSRFLDAIGRSVPVGSWLFIENLDRLSRADIVSAQELFLSIIRRGITIVTGMDNKIYSLDTVTANPMDLMFSILLFIRGNEESQTKRNRTNSSALIKIKAHQENPQNPAVAIEEVGKNMWWTDTTSGYVLPHPVYFPVVQEIVELRKNGRSTAEILDHLNETYAPPPAVSNKKHSKWSRAMVERLFHTRALIGIKEISVDGVNYELKDYYPRVIDDPTFYHLKKNIGARAWNFGDKEEVKPIPLLSGIGLLKCDHCGCAMVKVKGTNKRSDQYRYTCDATRSRRLDCEHPNWSFRGDQLEKAVLQLLADKIWIAEDKANPVPALKVQVDEISRKIDNLIALSAMTGATKELADQITTLNSERETLYNQIKMAEEEMYSVDSQGWEKLAEFDLEDVYNEERLKVRFKIKQALKRIGCSRIDRNKNLFVLEYIDGKTQRVVIENSRGTRKGRIFIDLKTINDRQILESNGLVLHPCLDMLTDKNWKPEEEIPGPLQEFGI

SEQ ID NO: 4873 - protein, 532 aa, synthetic construct
MTVKKSLPRAFADVFSDDETINVYSYIRFSSKAQSQGASETRQLEQLNTFFEQYQQARQIERYEDLGVSAFKGKNLKSGQLAKFVERIKSKEILPNALLLVESFDRISRVGGYDALELIISIIQADCAIYTLFDNRLYSKRKKDNSVDISLIQNILERANDESRAKSERISDAKARNLLKGESGGIVTKRCPFWISFVDNKFVLNEHAKAVKRMTELCFDYGFQAIAQQLNKEEHERKYTESTVGKVLHKHAIYGSFLSMRNDDEGNRTIVNKEIKNYYPAVISESEFHRISAKLKERQDPKLAGRKASDFKNILRGLVFCKCGSTFRFHAQKNFYVDLVCNASSVHKCEFAQKNKSVRYRYARVEEIFLAYQSLIPFHQIVSKNDDVKALEKEHQEVSGLIVLKEKALANHFAILESASDSSRKYITQRIDEVSADLDKLKNNEHELNQKIMSLHLASKTDLNSLEIYNLLITESGRIKINNFLHAQKIKLIITPVKKKFFTLDIFHNDKHIDTIDVTANDYTARNHTHLK

SEQ ID NO: 4874 - protein, 325 aa, synthetic construct
MKSKKAVVYARFSSDNQRDESIDAQLRAINEYADKNNIKIVNQLIDRAKSATSDKRPEFQNMIKFCEADTTGISMVIVHKLDRFSRDKYDSAMYKQKLKVKGIRVVSVLENLDNSPESLILESVIEGMAQYYSANLAREVAKGQKENALKALHNGGDAPLGYDVAHDKTYTVNEEEAQAVKIIFDRYIKGYSYSKIIDELNDLGYKTKRGNKFGKNSLHGILNNEKYTGVYVFNKTQRKGVDGKRNGHKQKSEDEIIKVEGGMPVIIDKEVFEQAQEMIQKRKKTPGAHKATTTYLLTGLIKCGECGHAFQGNKRKDSYGNICFI

SEQ ID NO: 4875 - protein, 507 aa, synthetic construct
MKRVISYIRFSSERQAKGDSLRRQSKMVNDWLKAHPEYYLDQDLSFRDLGVSGFTGKHLKGGLGDFLTAIEKGLVKAGDTLLIESLDRLSRQAVDKASELLRNILRSGVDVVTLSDGEHYTRESLKDPLSLIKSILIMQRSHEESLRKSERIQAAWNRKKELISEGIKISKRCPAWLKLNDDRKSFSVIPEKVETVKRCFQLRLEGKSIWEIVRTLNAEGRQTLHQHKAGSFGQTSVQDLLKNRSVIGYFTPKGCEEISGYYPAIIDETTFYKVQQLSYSRYGRKPASDKPMAVNLFKGVIRCSECGHALIITGFSDTRNGIYRCPLRNENRCSAKGLSRKQTDGTLLTLLSRLDRFDSDTTNTVDTLKLHREHISSNIEKLVQLSLEIEDLSAITIKLKQLKGELSQVDADIEKETQRLKSIDVGCLSDCDLTTKAGRIEAQLIIKSAVKEVVLNTAKRRCKVTFHNGKVIDLPITENPSEDVTEAIQSLSEVTERGLIDVDVVEI

SEQ ID NO: 4876 - protein, 559 aa, synthetic construct
MKTKLYSYIRFSSMRQNDGSSYERQIRMAREIAVKYNLELVNDYQDLGVSAFKGANSKTGALSRFLDAIGRSVPVGSWLFIENLDRLSRADIVSAQELFLSIIRRGITIVTGMDNKIYSLDTVTANPMDLMFSILLFIRGNEESQTKRNRTNSSALIKIKAHQENPQNPAVAIEEIGKNMWWTDTTSGYVLPHPVFFPIVQEVVELRRNGRSTAEILDHLNATYTPPPAASHKRHSNWSRAMIERLFHTRALIGIKEISVDGVKYELKDYYPRVLDDAEFYHLKKSIGVRACNFGDKEEAKPIPLLSGVGLLKCEHCGSAMVKVKGTNRRPNQYRYSCDAMRSSRIECVHTNWSFRGDQLEKAVLQLLADKIWIAEDKANPVPALKVQIDEISRKIDNLITLSAMTGATKELADQITTLNSERETLYNQIKMAEEEMYSVDSQGWEKLAEFDLEDVYNEDRIKVRFKIKQALKRIGCSRIDKYKNLFVLEYIDGKTQRVVIENSRGPRKGRIFVDLKTINDRQILESNGLVLHPCLDMLTDKNWKPEEEIPGPLQEFGI

SEQ ID NO: 4877 - protein, 475 aa, synthetic construct
MKTTNKVAIYVRVSTTSQVEEGYSIDEQKDKLEAYCKIKDWKIYDVYVDGGFSGANTQRPELERLISDVKRKKVDIVLVYKLDRLSRSQKDTLFLIEDVFAKNDVAFISLQENFDTSTPFGKASIGMLSVFAQLEREQIKERMMLGKEGRAKNGKSMSWTTIAFGYDYSKETGVLSVNPTQALIVNRIFTEYLNGKPVVKIIRDLNAEGHVGRKRPWGETITKYLLKNETYLGKVKYKDKVYEGQHEPIITQELFDLVQLEVERRQISAYEKYNNPRPFRAKYMLSGLMKCGYCGASLGLRYTRKDKNGISHHKYQCRNRHSKDLEKRCESGWYSKEELERGVIKELERIKFDPKYKNETLAKKEETIKVEEIKKQLERINNQVSKLTELYLDEIITRKELDEKNDKIKTERQFLEEQLENQKSNVLSIRKRKLTRLLKDFDVEKLSYEDASKIVKNIIKEIIVTKDGMSITLDF

SEQ ID NO: 4878 - protein, 612 aa, synthetic construct
MIEYHNKITALYSRLSVGDEDRDGGESNSIVNQKAFLERYARDKKLINIRHYIDDDESGRFFDRSAYTQMISDVEQGKIGIVIMKDMTRWGRDYLQVGNAMEIFRRNNVRFIAINNGIDSIDQNTLEFAPFINIMSEWYARDISKKVKTGIKTKGADGKPVATEAPYGYIKDPENKDYWIVDKEAAEVVKLIFRLFMEGKNRNQIAVYLKEKEILTPTFYMKQQGRGTAKNKPLNEENRYNWNKATLTRILKRQEYCGDVVNFKTEKHYRDKRNHYVDKSKWQITENVHEPIIDRPTFENVERMLKNAPVKRPNGDGEIHALSGLMYCKDCGTKMHIRTIHKNEKVQHVTYCSEYAKGKAKHPKCNSPHRIDVDEVMENIAEVLRKIAQYSLENKAEFEKLVKESLYKEQTEEVKKNQKRMPQITDRMEQIERVMNKLYEDNALGNLDTERYEQLSRKYAEEYYTLKAEKEEIKERLSECENANQRAKKFIRLAESYSNFEELTPTIINEFISKIAVHERDVKRAKYVVQRIEVYFNYIGKFENELTKQIEPTEQEMIQMREEIEEAKREKSRAYHRAYSKAYRAKNLEKCREYEKLKAREYRAKKKLQATT

SEQ ID NO: 4879 - protein, 556 aa, synthetic construct
MSNTKRTGQTALYERLSRDDEMQGESNSITNQKQLLESYAKRNGFVNIYHYTDDGVSGTTFDREGFQKMIKAVEENKVSTVIVKDMSRFGRDYLKVGFYTEILFKEKGVRFIAINNGIDSEKQAESDFTPFLNIMNEWYARDTSRKIQSIFRARMEEGKRVSPSVPYGYFRNPKNKQELLVDKESAKFVKRIYRLIIEGYGVTQIADILTKDKVLILSAYAEIHYPENNHSSKKRGIEDPYFWTPTTVGYILEKREYMGHTVLGKTICLDYKTKKRRKAKEDELIIFKNTHEAIIDEETWNNAQRLRKTVRRSPKYGTTSHPFTGLLICSDCGGKLSYREPAEHKEKKYDCDYCFVCQHYRHRKGTCSMHYIKVKTVNEILLKSIKEITDFAKEEKQEFLKVMNKLSDEKREEKYQEDKEKLEKLSSRNAELTTLITKLYEDHALGKIPVKHFERLFNTYDTEQQDLEKQIQYFEQEIESYHQRKVDTDKFLKMIEKYTDIEELTVPMINEYIEKVVVHEATGGRKGKDRKQQVDVYFNFIGNCQVPQKEEIEKLA

SEQ ID NO: 4880 - protein, 612 aa, synthetic construct
MIEYTNKITALYSRLSVGDEDRDGGESNSIVNQKAFLERYARQHKLMNIRHYIDDDESGRFFDRSAYTQMISDVESGKIGIVIMKDMTRWGRDYLQVGNAMEIFRRNNVRFIAINNGIDSQDQNTLEFAPFINIMSEWYARDISKKVKTGIKTKGASGKPVATEAPYGYIKDPNNKDFWVVDKEAAEVVKLIFTLFMEGKNRNQIAVYLKDKEILTPTFYMKQQDRGTAKSRKLNEENRYNWNKATLTHILKRQEYCGDVVNFKTEKHYRDKRNHYVDKDKWQIIENVHEPIIDRSTYENVQRILKTAPVKRPNGDGEIHALSGLMYCKDCGTKMHIRTIHKNGKVQHVTYCSEYAKGKAKHPKCNSPHRIDVDDVMETITEVLRKIAHYSLANKEEFEALVKSSLAKEQTEEIKKQQKRIPQITDRMEQIERVMNKLYEDNALGNIEVKRYELLSRKYAEEYYTLKEEQEEIEERLSEFENANQRAKNFINLAESYSDFEELTPTAINEFISKIVVHERDVKRAKYAVQRIEVYFNYIGKFENELTKEIEPTEQEMIQMREEIEEAKKEKSRAYHRAYSREYRAKNLEKFREYERIKAREYRARKKLQATT

SEQ ID NO: 4881 - protein, 506 aa, synthetic construct
MRHVITYLRYSSAIQGAEGADSTRRQNELFKQWLRKNSDAQVVASFSDEGLSGYKGKHLTGQFGDMLARIEAGEFPAGTILLVESIDRIGRLEHLETEALMNRILGNGLEIHTLQDGLIYTKDALADDLGISIIQRVKAYIAHQESKQKSFRVSQKWEQRAKLALAGEQRLTKMVPGWIDPDTFKCNEHAETVRLIFKLLLDGESLHNIARHLQSNDIKSFSRRKDANGFSVHSVRTVLRSESVIGTLPASQRNDRPAIPNYYEAAIDAATFNKAQEILDKNRKGRTPASDNPLTINIFKGLFRCQCGASVHPTGTKNKYQGVYRCNNHLDGRCDVPPLKRKPFDKWMIDNFLGMIDVGNDGEAEGKIAALQHEVEIVTARIKKATALLLEMDDIDELKIQLKELNQKRTELQTTIDNMRRKASLTDKELPQLKDIDLMTKAGRVECQLILSKHLKGLTLGKDSVTVTLQNDTEITIPTNPLPLNDGTSIFEIAEKELLEIDAYQL

SEQ ID NO: 4882 - protein, 559 aa, synthetic construct
MKTKLYSYIRFSSMRQNDGSSYERQIRMAREVAAKYDLELVNDYQDLGVSAFKGANSKTGALSRFLDAIGRSVPVGSWLFIENLDRLSRADIVSAQELFLSIIRRGITIVTGMDNKIYSLDTVTANPMDLMFSILLFIRGNEESQTKRNRTNSSALIKIKAHQENPQNPAVAIEEVGKNMWWTDTTSGYVCPDPVYFPIVKEIVELRKNGRSTSEILNYLNETYTPPPAVSNKKHSKWPRAMIGRLFHTRALIGIKEVSVDGVKYELKDYYPRVIDDATFYHLKKNIGARAWNFGDTEEVKPIPLLSGIGLLKCEHCSSAMIKVKGTNKRADQYRYSCEGIRSHRFDCEQPNWSFRGDQLEKAVLQLLADKIWIAEDKANPVPALKVQVDEISRKIDNLIALSAMTGATKELADQITTLNSERETLYNQIKMAEEEMYSVDSQGWEKLAEFDLEDVYNEERLKVRFKIKQALKRIGCSRIDRNKNLFVLEYIDGKTQRVVIENSRGTRKGRIFIDLKTINDRQILESNGLVLHPCLDMLTDKNWKPEEEIPGPLQEFGI

SEQ ID NO: 4883 - protein, 582 aa, synthetic construct
MLTTVLYLRVSSKKQMDTAIDIDPEGNSIATQREVGTKKANSLNATVVKEFIEPGISASTIEKRPAFQEMLTYLREHPEIKYVIVYARSRAFRNYIDAAITKRLLDKLNVKLVSAREDFGDGVYADMMEAVTDIFNDVQNKLSGEDIKIKLQHKAANGGTTGKAPIGYRNVRVEHEGRLINTVHLDPERAPLVRKAFELYATGEYGLERLEATMADLGLTARATGKLPERPVTFKWLHRMLRDVYYVGCIAYKGEIYAGRHEPIIDQVLFDRVQEVISFRSKNGQRDRVLQHYLKGIVFCDRCERHERTSRLIYTEATNRSGTRYGYFLCRGRQDGVCDLPYLPAANVEQAIADHYATLNLPATFVSDIRRLLQESLAGEHSSVAELHTALNRKLKELEGKEDRLLDLLADDQLPTSKIKAKLREIQSERAAAETSLAGTGAELAIGAEVLLNALDLMSDPESCYTNGADAIRRNINETFYQRFYLDEQGVQASELNPPFEDFHAALALSKERPATSVATSTTTHTDHSHSGLALTLADIHSDTGSSKTSLVELRGIEPLTFSIPIMGATSGTIGLSSATQK

SEQ ID NO: 4884 - protein, 1512 aa, synthetic construct
MSKEKIKVYLYTRVSTSIQIDGYSLEAQKSRMKAFALYNDYEIVGEYEDAGKSGKSIEGRVQFTRMMEDIKSGKDGVSFVLVFKLSRFARNAADVLSTLQIMQDFGVNLICVEDGIDSSKDAGKLMISVLSAVAEIERENIRVQTMEGRIQKAKEGKWNGGFAPYGYQLIDGKLIINEEEAIAIRTIFDQYVNTSIGANGLSKYLENHGIRKIPRQNGKNPLFDAGLIRKILKNPVYNGKIAFGRRTLEKVHGTRNEYRQVEQDDYLVAEGIHEAIIPDELWQAAQVKLKAQAKKYEHVNKGKNMRTHLLSGIVKCPICGAGMFGNKSIKYKKDGTKYKDFYYYGCKHRLMNRGHKCTYNKQIREELLDDAVAEVIIKLVSNPKFASMIQEKINMKVDTSAIENEIDNYQNELRKSHSTKYKLIEEIDNLDVEDKHYKRRKNDLDDRLYRMYDKIEELESQLIEAKAKKETIEVEKLTGDNIYKVLIYFDKLYKVMNDVERRQLIEALISEIQIYEEKQPNGQWLKSITFKLPIIDEDLNISLENDEQVDGVSVPGVDPNTGFPLPDIGGGTGVEVTFDVVVESIPNPNPTNNIANIDYSYTPVEGGIPNDFSVDSNPVPVEVISADIEVTKLSEPTIVNPGEELIYTIKVVNNGPFPSENVVLTDDVPASIVNPEYSLDGGVTFQPWTGSLNIGTLEVGETRVIIIRGIVNPSTVGIITNTAVVSSTTADPNLNNNASTIETEVNLLADILVMKTAEPNSAVPGTLLRYTIQVENLGPANAENVILNDDIPASIINPEYSLDGGASFQPWNGSLNIGTLNSGISLTVLIQGTVSLNSSEYIVNTATVSSTTPDPDLSNNISTIITPVNPQAGISIIKVADEDVAVPGEEFVYTIEIFNEGPSNATNVVLTDDIPDVILNPEYSLDGGATFQPWTGSLNIGTVAPGQLIRIIIKGLVSSTATGDITNTAEVSADVPEPVTDSSTVTTPIVPSADIEVIKTSNMDTTVPGETFSYTITVTNLGPSAAQSIVLTDDIPDVILNPEYSLDGGVTFQPWNGNLSIGTLDAGEIRSIIIRGTVSQTAVGTIINTATISSTTPDPNPDNNTSTDETDISPLADISVIKGNEPVAMPGGRFIYGIEIANAGPSFAENVTLTDNIPASILNPEYSIDNGVTFQPWNGSLNIGILDAGEIRNIIIRGTVSQTAIGTIINTATVSSTTPDPNLNNNTSTSEAEVSSSADISVVKRSNQIVVVPGDVLDYTIEVRNAGPSTAQNVTLTDNIPASILSPEYSIDNGVTFQPWNGSLSIGTLDAGEIRNIIIRGIVSQTAIGTIINTATVSSTTPDPNPDNNTSTSEIDISSSADISVIKLANKTESCVGEQIDFVIVVSNAGPENAQNVTLIDNVSDKLKKAVFSLDRGVSFQPWTGSLNIGTLPAGTLRVILLRGIIKSTCLDRLTNIAEVTSTTPDSNLNNNISRVQVEIKQCCCNDCCCNNCSNCCCKDCCCNCCKNDFWC

SEQ ID NO: 4885 - protein, 586 aa, synthetic construct
MQEVEVIKARNVLSKQARGKAIERLRVAAYCRVSTDSEDQLNSYKSQVQYYTDMIKKNKEWVLADIYADEAITGTQVTKREDFQRMINDCMNGEIDMVITKSISRFARNTLDTLKYVRMLKERNIAVYFEDEKINTLTMDGELLLVVLSSVAQQEVENISANVKKGLKMKMKRGELVGFQGCLGYDYHPEDKTITVNQEEAEIVRYIFNRYVDGAGGSVIGQELENLGYKTKYGSSTWAPSTVIGIIKNEKYKGDILLGKTFTVDPISKRRLENMGEEDKFYMKDHHEPIISEEVFEKAQEILNRRNKNRTTVGSGKREKYSRKYAFSCMLECGFCGGTLTRRNWHSGSQYSKVIWQCVTATKKGKKFCKHSKGIPETAIEEAFVESYRLLCDDNKDVLEEFLQRMDDTLSSSVVSKQLAKAEKEIDALEKKKSKLVDMRLEEIIDKETYESKYADLVSKQEQLVEERQKLQETSDNEKDIKKRLKEFKKTLEQNEVLDKFDRYVFESIVEKVIVGGLDENGNVDPAQLTFVYKTGLKNSVDGAKFKPQRKNERGRHRTNELCSHDSNEVDKMCSDSSNDTCGNCS

SEQ ID NO: 4886 - protein, 537 aa, synthetic construct
MKQQIYNTALYLRLSRDDELQGESSSITTQRSMLRLYAKEHHLNVIDEYIDDGWSGTNFDRPSFQRMIEDIEAGKINCVVTKDLSRLGRNYIMTGQYTELYFPSHNVRYIAIDDGVDSEKGESEIAPFKNIINEWVARDTSRKVKSAFKTKFAEGAHYGAYAPLGYKKHPDIKGKLLVDEETKWIVEKIFSLAYQGYGSAKITKILREEKVPTSSWLNFTRYGTFAHIFEGKPESKRYEWTIAHVKAILKSEVYIGNSVHNMQSTVSFKSKKKVRKPESEWFRVENTHEPIIDKEVFYRVQEQIKSRRRQTKEKATPIFAGLVKCADCGWSMRFATNKANKTPYSYYSCSFYGQFGKGYCSMHYIRYDVLYQAVLERLQYWAKAVQQDEEKVLHKIQKVGNAERIREKKKKANALKKAENRQNEIDRLFAKMYEDRACEKITERNFIMLSGKYQKEQIELEQQITNLREELSKMEQDMIGAEKWIELIKEYSVPKELTAPLLNAMIEKILIHEATTNEENERIQEIEIYYRFIGKVD

SEQ ID NO: 4887 - protein, 540 aa, synthetic construct
MKQPYNTTIYNTALYLRLSRDDELQGESGSIQTQRMMLRQYAAEHGLTVVDEYIDDGWSGTNFERPSFQRMIDDIEDGKINCVVTKDLSRLGRNYILTGQYTEIYFPSKGVRYIAINDNVDTINGESELAPFLNILNEMHARQTSKKVKAAMHTRFANGAHYGAYAPLGYVKDPDKKGHLLIDPETRWIVEKIFDLAVHGRGAASITRILVEEKVPTPGWLNYERYGTFANIYAGAPAEKAYAWTIAQVKSILKEETYIGHSIHNKQSNISFKNKKKVRKPQEEWYRVENTHEAIISEEVFQKVQELIASRRRKRRNGTTQIFAGLIKCADCGWSLAYGENKQNKNPYGYYHCSKNGQGLRQCSMHYIRYDVLYAYVLARLQYWSMLAQKDEDNLLKRLLNASDRERNSAKKKQAAELKKAEKRKAEVDGLFAKMYEDWSAGRITEYNFNMLSEKYQNEQRELETKIRQLHETMEAAVQTAADAEKWIALMKQYVNPVELTAELLNTLIEKITVHEAVKGEDGSREQEVEIYYRFIGKID

SEQ ID NO: 4888 - protein, 537 aa, synthetic construct
MKQQIYNTALYLGLSRDDELQGESSSITTQRSMLRLYAKEHHLNVIDEYIDDGWSGTNFERPSFQRMIEDIEAGKINCVVTKDLSRLGRNYIMTGQYTELYFPSHNVRYIAIDDGVDSEKGESEIAPFKNIINEWVARDTSRKVKSAFKTKFAEGAHYGAYAPLGYKKHPDIKGKLLVDDETKWIVEKIFSLAYQGYGSAKITKVLREEKVPTASWLNFTRYGTFAHIFEGKPESKRYEWTIAHVKAILKSEVYIGNSVHNMQSTVSFKSKKKVRKPESEWFRVENTHEPIIDKEVFYRVQEQIKSRRRQTKEKATPIFAGLVKCADCGWSMRFATNTANKTPYSYYACSYYGQFGKGTCSMHYIRYDVLYQAVLKRLQYWAKAVQQDEEKVLNKIQKAGNAERIREKKKKASAFKKAENRQNEIDRLFAKMYEDRACEKITERNFVMLSSKYQKEQIELEQQITNLREELSKMEQDMIGAEKWIELIKEYSVPKELTVPLLNAMIEKILIHEAITNEDNERIQEIEIYYRFIGKVD

SEQ ID NO: 4889 - protein, 648 aa, synthetic construct
MNREGKKCVLYPRVSTEMQVDGYSLEGQKNGLKRFADREEMEIVGIYEDAGKSGKSIEGRPAFKKMLSDIKNGLEIDYILVYKLSRFGRNAADILNSLEFVQSYGINLICIEEGIDSSQTSGKLLISVLSAVAEIERENIIEQTMNGRREKARQGGWNGGFAPYGYYLKDNQLLIEETEAEAIRIIFDKFANSDIGLGGVAKYLNLQGIKKIPRQNGTLETWSSHFIRLILDNPVYCGKIAYGRRTREKVKGTKNEYKQVHAEDYILEDGQHEGIISEELWQKVHAKRMATGIKQPSKIGKDRSHLLTGILKCPLCGSSMYTNKHAWTNKDGTYKEVYYYICGRNKQERGHHCDYKASLRKTDIEPLVIEAVKELVSDKYFAKEIEKRIGVQTDTTAIDKELANYESKLKEVDLNKARLEREIDNLPIDARFRERKIHDMTLRLDALYDTIVELEERIEDAKLRKSSIEMETITLDNIYKLMLNFGKLYDIISDEEKKSLITYLIKEIQIYPNGESEQPLKSIEFNFPIYRDGQEVRRLLWEKGNTVETVALLSKLDVDKHIDVEIKLDELDLTSAESKATYAQIKEYVLEKFGLKVSTLYIAQIKKKCGIELREHYNKSKKDNQAIPQCTPEKEEAIMDALRHFKMI

SEQ ID NO: 4890 - protein, 537 aa, synthetic construct
MKQQIYNTALYLRLSRDDELQGESSSITTQRSMLRLYAKEHHLNVIDEYIDDGWSGTNFERPSFQRMIEDIEAGKINCVVTKDLSRLGRNYIMTGQYTELYFPSHNVRYIAIDDGVDSEKGESEIAPFKNIINEWVARDTSRKVKSAFRTKFAEGAHYGAYAPLGYKKHPDIKGKLLIDDETKWIVEKIFSLAYQGYGGAKITKILREEKVPTASWLNFTRYGTFAHIFESKPESKRYEWTIAHVKAILKSEVYIGNSVHNMQSTVSFKSKKKVRKPESEWFRVENTHEPIIDKEVFYRVQEQIKSRRRQTKEKATPIFAGLVKCADCGWSMRFGTNKANKKPYSYYACSYYGQFGKGYCSMHYIRYDVLYQAVLERLQYWAKAVQQDEEKVLNKIQKAGNAERIREKKKKASALKKAENRQNEIDRLFAKMYEDRACEKITERNFVMLSGKYQKEQIELEQQITNLREELSKMEQDMIGAEKWIELIKEYSVPKELTAPLLNAMIEKILIHDATTNENNERIQEIEIYYRFIGKVD

SEQ ID NO: 4891 - protein, 502 aa, synthetic construct
MEFIREDCIYARQSVDRKDSISIESQIDFCKYELKGGSCRIFKDKGYSGKNTDRPEFQKLLGEIRKGKVRRVIVYKLDRISRSILDFATMMELFQEYDVEFVSSTEKFDTSTPMGRAMLNICIVFAQLERETIQKRVTDAYYSRCLKGFHMSGQAPYGYQLEPTVVEGIRTKKMVADPVAADHVRLMFEMYAEPETSFGDITRYFEEHDIKIYGKSMFRTFLSQLLRNPVYAQADLELYEFFKSQGAAIVNDASDFAGTNGCYLYQGRDVKEDKDRCLKDQILVIAPHEALISSDTWLKCRKKLMANTTFQQGRKPKNTWLAGKIKCGHCGYALKATHVPNSTGYFRCTKRTENKGCPGCGKIRKEEFEQFIFSAMQEKFKDFQILHGREEKVNPKLTAYQVELAQVEAEIEKLLDTLTGANATLLAYANKKIEELDTRRQTISKAIAELSVETISPQQIKKLSYYLDNWDSIDFDDKRKAADGLISTIKATSDHVQIEWKI

SEQ ID NO: 4892 - protein, 584 aa, synthetic construct
MKEVKVIKARNDLQTRTRGKTIELMRVGAYCRVSTDSADQLNSYKSQVAYYTDMIKKNKEWVLADIYADEAITGTQVAKREDFQRMINDCMNGEIDMVITKSISRFARNTLDTLKYVRMLKERNIAVYFEDEKINTLTMDGELLLVVLSSVAQQEVENISANVKKGLKMKMKRGELVGFQGCLGYDYHKDTKTITVNEEEAEIVRYIFNRYIEGAGGSVIAHELENLGYKTKYGSSTWVQSTVIGIIKNEKYKGDLLLGKTFTVDPISKRRLENFGEEDKFYIRNHHEPIISEEVFEKAQEILARRNVNRGKIGEGNTKREKYSRKYAFSCMLECGFCGGTLTRRNWHSSSQYSKVIWQCVTATKKGKKFCKHSKGIPETAIEEAFVESYRLLCDDNKDVLEEFLQRMDDTLSSSVVSKQLAKAEKEIDALEKKKSKLVDMRLEEIIDKETYESKYADLVSKQEQLVEERKKLQETSDNEKDIKKRLKEFKKTLEQNEVLDKFDRYVFESIVEKVIVGGLDENGNVDPAQLTFVYKTGLKNSVDGAKFKPQRKNARGRHRTDELCSHDSNEVDKMCSDSSNDTL

SEQ ID NO: 4893 - protein, 558 aa, synthetic construct
MSKEKIKVYLYTRVSTSIQIDGYSLEAQKSRMKAFALYNDYEIVGEYEDAGKSGKSIEGRVQFTRMMEDIKSGKDGVSFVLVFKLSRFARNAADVLSTLQIMQDFGVNLICVEDGIDSSKDAGKLMISVLSAVAEIERENIRVQTMEGRIQKAKEGKWNGGFAPYGYQLIDGKLIINEEEAIAIRTIFDQYVNTSIGANGLSKYLENHGIRKIPRQNGKNPLFDAGLIRKILKNPVYNGKIAFGRRTLEKVHGTRNEYRQVEQDDYLVAEGIHEAIIPDELWQAAQVKLKAQAKKYEHVNKGKNMRTHLLSGIVKCPICGAGMFGNKSIKYKKDGTKYKDFYYYGCKHRLMNRGHKCTYNKQIREELLDDAVAEVIIKLVSNPKFASMIQEKINMKVDTSAIENEIDNYQNELRKSHSTKYKLIEEIDNLDVEDKHYKRRKNDLDDRLYRMYDKIEELESQLIEAKAKKETIEVEKLTGDNIYKVLIYFDKLYKVMNDVERRQLIEALISEIQIYEEKQPNGQWLKSITFKLPIIDEDLNISLENDEQVETVVKLIRE

SEQ ID NO: 4894 - protein, 528 aa, synthetic construct
MKHYMEHYAEYCIYLRKSRADLEAEKRGEGETLKRHRTTLMALAKKMNINITTVYSELVSGERIIERPEVQKMLGEVEDGRWAGVLVMEVERLARGDTADQGIVAEAFKACGTKIITPMKIYDPNNQFDEEYFEFGLFMSRREYKTINRRLQGGRMASVEEGNFIGSTPPYGYKKIKLEDGSPTIEIVPEAAAIIRVLFDLYTQGHMGLPSIAKHFNLMQLPTKTGADWTTATLKKMITCDTYVGKVSWNKRKTKKVVKDGVLKREQYYSPKSEWKVYQGKHESIISEEIFDLAQQILAERYHPPAPKGVITSPLATLVVCEKCGKNMVRHGHYTTYRAPTLYCQNTLCDNVSSPFEIVENRVIEALKLWVENAKNDWESYKPEESEETKADNMELIVKGHEKTLAGLKKQNSNLHDLLEKGVYTIDTYLERSQNLAGRIAETESALVLVREQLETEKSRTFARKAHIPLVENVLKVYYLTDIPAERNALLKSVIEYATYRKEKSERWGNGGTGSSFDLKIFPRTPSL

SEQ ID NO: 4895 - protein, 480 aa, synthetic construct
MKKIALYIRVSTDEQALKGNSLNEQEERLRAYCHAMELEGEIETFIDDGYSAGSMKRPALTRMLKMAREKKLSMVVITKIDRLCRNLKDLLMLVDELDEIQCGFASAGERFDTSTAAGRMVLQILGAFAEFERGRNRERVRENMLSIVTNTDKAVSRPCFGYNVVDSKYVINQEEAEVVRKMVEWMLQGEGAHRVMRRLNDMGVKTKDGKSFTQLSVGKLMRRETIAGMFVYNRGYTLRGKSLIRPEEEWIVIEEHHEPIIDRETFKRLQIAITARKTSGKQADNERWLLTGLVHCTHCGRPMFGRYRKKPSGKEYFHYVCSSYMKRAECFHHFIDRDLLENTVFDYLMDAENYSGRTEEVTTKDSQSEVDAAQLKAGLKKLDIKMQRQIELFEDADISKEDFRIARDRIHKERMAIEERLHEAETGTRVALENEFIKRLGSMNNELHSKNRGEQKNALRQLIKVVEVTNASIINVDVRL

SEQ ID NO: 4896 - protein, 556 aa, synthetic construct
MSNTKRTGQTALYERLSRDDEMQGESNSITNQKQLLESYAKRNGFVNIYHYTDDGVSGTTFDREGFQKMIKAVEENKVSTVIVKDMSRFGRDYLKVGFYTEILFKEKGVRFIAINNGIDSEKQAESDFTPFLNIMNEWYARDTSRKIQSIFRARMEEGKRVSPSVPYGYYRNPKNKQELLVDKESAKVVKRIYRLVIEGYGVTHIADILTKDKVLIPSAYAQIHYPENNHSSKKRGIEDPYFWTPTTVGYILEKREYMGHTVLGKTICLDYKTKKRRKAKEDELIIFKNTHKAIIDEETWNNAQRLRKTVRRSPKYGTTSHPFTGLLICADCGGKLSYREPAEYKEKKYDCDYCFVCQHYRHRKGSCSMHYIKVKTVNEILLKSIKEITDFAKEEKQEFLKVMNKLSDEKREEKYQDDKTKLEKLSSRNEELTTLITKLYEDHALGKIPAKHFDRLFNIYDTEQQELEKQIQYFEDEIESYHQRKVDTDKFLKMIEKYTDIEELTVPMINEYIEKVVVHEATGGRKGKDRKQQVDVYFNFIGNCQVPQKADIEKMA

SEQ ID NO: 4897 - protein, 475 aa, synthetic construct
MKRAVDYDRVSTFEQATEGYSIASQSESNKKFIESQNWELVDRYVDDGYSAKNLIRPEMQRLIEDAQAKKFDVVVFYKLDRLVRSVSDLDKLLKIFDANNIAIRSVTEPFDTTTAMGRFLIILVAAIAQWERETISERVSLNILQKTKSGEWKGGTPPYGYKSVNEKLAVNVDEAPIVKKIFQAARTMGFYTIAKNLTNKGVPTRNGGDWHVDTVRGIANNPIYCGYLTNNPSREDYKKPPREQILYEGNHQRLIPREEFWELQDILDKRRTFGGKRETSNYYFSSILKCGRCGYSMSGHKSNGYKTYRCSGKKAGISCTSHIIKEDNLVTKVLDSLDELISNTHINSEVDNVSQQKINEIENELKLTKKLLKKKKTMYENDIIDIDELIIETEVLRKKEMELTKELKQYASSQKYTTDDVSYIIENIHDLWEHLNDQDRKQMISTLFKTLVIDTVDEFNRSNTSHREILIVSAY

SEQ ID NO: 4898 - protein, 540 aa, synthetic construct
MKQPYNTTIYNTALYLRLSRDDELQGESGSIQTQRMMLRQYAAEHGLTVVDEYIDDGWSGTNFERPSFQRMIDDIEDGKINCVVTKDLSRLGRNYILTGQYTEIYFPSKGVRYIAINDNVDTINGESELAPFLNILNEMHARQTSKKVKAAMHTRFANGAHYGAYAPLGYVKDPDKKGHLLIDPETRWIVEKIFDLAVHGRGAASITRILVEEKVPTPGWLNYERYGTFANIYAGAPAEKAYAWTIAQVKSILKEETYIGHSIHNKQSNISFKNKKKVRKPQEEWYRVENTHEAIISEEVFQKVQELIASRRRKRRNGTTQIFAGLIKCADCGWSLAYGENKQNKNPYGYYHCSKNGQGLRQCSMHYIRYDVLYAYVLARLQYWSMMVQKDEDKLLKRLLNASDRERNSAKKKQAAELKKAEKRKAEVDGLFAKMYEDWSAGRITEYNFNMLSEKYQNEQKELETKIRQLHETMEAAVQTAADAEKWIALMKQYVNPVELTAELLNTLIEKVTVHEAVKGEDGSREQEVEIYYRFIGKID

SEQ ID NO: 4899 - protein, 589 aa, synthetic construct
MRIYRLRKEYGYQNVKVQRALHKWRDDMHSEKIKVYTYTRVSTAMQTDGYSLDAQKARMKAYADYNDYEIVGTYEDAGKSGKSIEGRIEFNRMMEDIESGKDGISFVLVFKLSRFGRNAADVLSTLQVMQDFGVNLICVEDGIDSSKDAGKLMISVLSAVAEIERENIRVQTMEGRIQKAREGKWNGGFAPYGYQLVEGKLQINEEEAKAISIIFEQYVKTDIGANGVAKYLENHGIHKIQRQNGKNPLFDAHLVRLILKNPVYCGKIAYGRRKTEKVHGTRNEYHLVEQDNYILVDGQHDAIIEEDVWQAAQVKLISHAKKYEHVNRGKDTKTHLLSGIVKCPVCGAGMYGNKSIKHKKDGTKYKDFYYYGCKHRNMTRGHKCDYKKQIREELLDDAVAEVIVKLVGNPKFAAMMQEKINCKVDTVTIDGELADFEKQLRQYYAVKLKLAEEIDSLDPDDRHYIKRKADLDDRLYRMYDKIENVETQLIETRAKKQAIEAEKLTGDNIYKVLIYFEKLYAVMNEIERRQFMEALISEIQIYEDRKPNGQWLKSIKFRLPIIEEDMNLSLEDNKHVEVVCLLSREKPTA

SEQ ID NO: 4900 - protein, 557 aa, synthetic construct
MSHTEPKTTAAIYCRVSTREQAEEGYSIGEQERLIREYCMKQGYEVYKVFSDAGISGKDIAHRPAIQELLKEAAEKKFDIVMSWKINRLSRKLEDAIKIVNTLDRYGISYRSYSEPFESDTPAGKMQFQMMALVGEFERNTIAQNVKMGMKAKARAGEWCGGIAPLGYHWVPMEGTENSARKKSRLEIDEKEAEVIKIIYGMYASGKGYKAIANYLNKKGYQTKLGNAFSVAQLRTILTNPVYIGKVRFNVRRDWNEKRRNNINPDPIIVEGIHEAIITEEQWNQVQFLISQKSGKPSRIYDGEYLLTGILKCPECGAGMVISRVSNKRADGSRHKLTYYACGNWKNKGSAVCHSNMIRVEKANGFVYRRMEEVLNDDKVFQEVFSRVNREHEIIKKNAYKEQELQEKEREKLSRRIMKNHEAYEDGVITRDEFLMRKQELDQQMEQARERTSESHLILLEEGKKEIPKEAVREILKNFSNALSADIDRTMRKRLLHLLIKEITIDRDRNIGSIKLKLSDELIRFLQNNGGTPPDGAPSVFMFREFGIKSLELELVI

SEQ ID NO: 4901 - protein, 502 aa, synthetic construct
MYDALYARQSIEKKDSISVESQLEYCRYETHGEACIEYTDKGFSGKDTNRPGFEKMMNDIRAGKIKRVIVYKLDRISRSILDFANMMEIFQKYHVEFVSSTEKFDTSTPIGRAMLNICIVFAQLERETIQKRVTDAYYARCRRGLYMGGRIPYGYRLTGTVVDNVRTSMYEEVPEESEQLKLIYSMYADTDNSLGDIVRYLNEHQIKNLRGTNWNTARISEMLRNPVYVQADIDVYQFFQSQGANIYNPASDFTSYNACYLYKGTVSTSRKQSDLSDKEIVLAPHKGFIPSKTWLACRIRCLNNRQSTKTCKPKNSWLAGKVKCGKCGYALTIRKAKTKWGRYFVCSQSGSRGSNCTGAGCTIYADVLEEYMLGAIRERLSEFQKLSCLSDAGEEQSHMTKKIRLTQIEEEIEELLSKVSGASGVLMKYIDEKVSELDAERKALQEEIVTANVTDTEGRLKQITNHVKAWETLSFEDRQAVVDTLIKVIRIADGNIEITWNI

SEQ ID NO: 4902 - protein, 632 aa, synthetic construct
MRKISKIEPKLPVIQARKKVAAYARVSKDTERLMHSVSAQVSYYSTLIQKNPEWEYAGVYADMGISGTDTSRRGEFLRMLADCEEGKIDIILTKSISRFARNTVDLLETVRHLKNLGIEVRFEKEHIHSLSEDGELMLTLLASFAQEESRSISENVKWGVRKRFQSGEIGAANKHILGYQYDEDEKKYVIIPEEAEAVRWMFKMYIDGVPLRGIAESMNSAGIRTTLGNDFQEASVRQLIFNEVYAGDIRRQKCYMADPITKTKVKNCGELPQYYMADCHEAIIDRETYAKVQAEMERRAGLVNPTYPFTGKIKCGICGQSFTRRKGTTKGKEYVSWFCRAKKEVGMTCTSRNYSEQNLMEICAKLMGTDSFDGTAFESSVRLISALPDGSLEVQFFDGQIKRWEMPPKPAKVPDKPMKKRPAHLFDGKIFCGQCGRRYGRAVSESKDRHLYWYCRAKSHHGVTCDSVNYPDSEMKEIFCMVMGLEAFDEGFFTETVERMVVQKTGSIDFHLKDGTVKAYETLKLRSNRHENTSTDEFTGKIRCASCGNLYHRYCCYGKYTYWRCSGKSKVRTECSGRDFQDSDIRKVSAYMMGMEEFDAEAFNGTVDYVTAFPDGSLEIHFYDGRAERWQR

SEQ ID NO: 4903 - protein, 524 aa, synthetic construct
MAKVITIPATRSRYTAAPINSRDKRKVAGYARVSTDHEEQQTSYEAQVDYYTNYIKGREDWEFVSVYTDEGISATSTTKRDGFNKMVADALDGRIDLIITKSVSRFARNTVDSLTTIRKLKEHKVECYFEKENIWTFDSKGELLLTIMSSLAQEESRSISENVTWGQRKRFADGKVTVPFKRFLGYDRGEDGNLVINEEQAKTVRRIYGMFLQGRSPFAIAKALTEEGIPTPGGKINWSGSTIRSILTNEKYKGDALLQKVYTVDFLSKKKKVNEGEVPQYYVEHNHDAIIEPAVFEAVQKQMAVRQTGTNRQSSVCIFSSKIKCGDCGSWYGSKVWHSNDKYRRVIWQCNHKFDGGEKCSTPHLDEETIKGLFIKAVNILTTEKDEIAANFQAIKGQLFSTAELEAEQSRLQEELNVVAELIQQCVRENAHVALDQTEYQARYDGLAERFDRTKARLNEVGNAITEKQAKKEQIERFLAELERQDGVATEFDEEQWYSLVDFVTVFNKEDVRFTFKDGTELKV

SEQ ID NO: 4904 - protein, 517 aa, synthetic construct
MKKIRKIEPAIPALAGRKKVAAYARVSRDTERLMNSVSAQISHYSALIQNNPEWEYAGVYADCGISGTGTARRGEFLRMLADCEAGRINIILTKSISRFARNTVDLLETVRHLKSLGIEVRFEKEHINSLSEDGELMLSLLASFAQEESRSISENVKWGVRRRFQSGEIGTANKHILGYRYDEDEKKYVIIPEEAEAVRWMFQMYIDGVSFRRIAENMNRVGIRTTLGNDFQEASVRQLIFNEVYAGDIRRQKCYMADPITKAKVKNGGELPQYYMADCHEAIIDRETYAKVQAEIERRAGLVNPAYPFTGKMKCGVCGQPFTRKKGTIRGKTYVHWICRSKKETGMSCTSVNFSEEELERISARMLGMDEFDGAVFEKAVRGITVMENGDLEFHLTGGETKVWKNLHLDPPRHIATVTDCFQGKIRCAACGNTYHRVNGAGKWVYWYCIGKKRKNVECHNPNCTDYKLRQVSAHMMGLEEFDEAEFEKQIEEITAFPDGSLEFNFYGGRKERWQRA

SEQ ID NO: 4905 - protein, 525 aa, synthetic construct
MAKSVITIPATVNRHTAAPIGSYKKRRVAAYARVSTDHEEQQSSYEAQVDYYTNYINGREDWEFVSVYADEGITGCNTKKRDGFNKMVEDALSGAIDLIITKSVSRFARNTVDSLTTIRKLKENRVECYFEKENIWTFDSKGELLLTIMSSLAQEESRSISENCTWGQRKRFADGKVTVPFKRFLGYDRGEDGNLVINEEQAETVRRIYGLFLQGRSPHAIAKLLTAEGIPSPGGKEAWSSSTVKSILTNEKYKGDALLQKVYTVDFLTKQKKVNEGEVPQYYVENNHQTIISPSVFEEAQHQMAARHSGKNRAGSMGVFSGRIKCADCGGWYGSKVWHSNSKYRKTIWQCNHKFDGGEKCGTPHLDEETIKQLFLKAANAIFAEKDGVREDYDSIKDTLFGTAELETERLRLQEEMNVVAELIEQCVAENARVALDQTEYQKKYDGLAGRFNRAKGRLSEVSQAITERQAKREKIGRFVSALEKRDGPLTEFNEDDWYSLVEYATVYSREDIRFTFKNGMEIKA

SEQ ID NO: 4906 - protein, 533 aa, synthetic construct
MNRPLNPQGTYYAYLRKSRADRDAEAHGEGETLLRHEKLLKTFAENLGITISKFYREIVSGETIQDRPVVRKLLQDISDGSCDGVLVAEVERLARGDTGDQGTIARYFQISDTLILTPLKIYDPTDEYDEEYFEFGLFMSRREYKTINRRIQRGRMASLQEGKWIASTAPYGYERVKIPGGKGYTLEIVPEQAEVVRLIFHLCLFGEKQPDGSWKPLGRLRICRKLDEMGIKPKAAEKWSVSTIKDILENPVYIGKICWGRKKEKKTIAEGTTRKIRIKNPDFPMYSGLHPPVISEDIFYKVQKLIHAKSAPPVVNSKILKNPLSGIITCKKCGSALTRTASNTRDSYYSLRCPNRDCDNISAPLYLIEQKLLEALQEWMDGYMLEWETDTDRVQEWNMKEHMLKNYLKELELAEKQQIRTCELLEQGIYTPEIFQTRFTAVSDKIQIVRTEIFRLQQSIEAEQQTVSAENTWLPAHCPILDAYTHTDNAQIKNEILKSIIHHAEYIKTERSRKFHRDNASFELVIYPKLPEH

SEQ ID NO: 4907 - protein, 522 aa, synthetic construct
MNKSVTLIPARKRMGSTEQEEEKPKLKVAAYCRVSTDSDEQATSYETQVEHYTSFIKKNPDWEFAGVFADDGISGCNTKNRNEFNRMISECLAGNIDMIVTKSISRFARNTLDCLKYIRQLKEKNIPVFFEKENINTMDTKGEVLLTIMASLAQQESQSLSQNVKLGLQYRYQNGHVQVNHNRFLGYTKDEDGHLIIEPSEAEVVKRIYREYLQGSSLKQIGESLESDKILTAAGKPTWRAETLKKILQNEKYIGDALLQKTYTVDFLTKKRVKNNGIVPQYYVTDDHEAIIPRDLYMQVQEEMQRRSNLHSGKNRKKRVYSSKYALSSIVYCSKCGDIYRRIAWNNRGKRSNVWRCVTRVESGPDACDADTIQETELQEVVIKAINSVLSQKSTAIGVLQENIEEVLKQENSPTKDVDGKLEELQKQLLQKANRNEQYDDLVEEIYKLREEKQQILADKAEMEGVKQSIFNMKAFLNSQTAEIEEYDEQLVRRLIAKVTVFDDKFEVELKSGLSVDIRRSK

SEQ ID NO: 4908 - protein, 520 aa, synthetic construct
MIKITKIDEFRPLPQDNKTRTAAYCRVSTDSDEQMESLDTQRSHYERYIKTNPEWDFAGVYFDEGVTGTKKEVRKGLMSLISDCEKGLIDLILTKSISRFCRNTTDCLELVRKLLDLNVCIYFEKENLNTGSMESELMLSVLGSLAENESVSISENEKWSIKKRFQNGTYVISYPPYGYTNVDRKMVIVPEQAEIVRQIFSDCLDGKSTHLIAKELNKRGITAKKGGKWSSGSVLAIIRNEKYTGDVIFQKTYTDSSFNRHTNYGEYDRYLCKDHHEAVISHEIYDKANELVDRRGQEKGNGTNTERYLNRYEFSGKIKCGECGSSFKRRKHSKPSGGYIAWCCSRHIEDKTACSMKYITDDAVKAAFVTMMNKLIFSQQTVLKPLLRNMQGYDEEGRLQQIENVEAAIENVKEKRQVLVSLMTSGLLEPPIFQKENNALIVENERLKERKENLLSSVSIDNEKADALKNLIKFVSGHEMLTEYDEGLFESHVREITVISRKEIIFGLHCGLNLKERLDG

SEQ ID NO: 4909 - protein, 525 aa, synthetic construct
MQDNYCAYLRKSRADRDAEMKGEEETLARHKRILTELSKKMGKPISRFYSEVVSGETITARPVMQELLSDVESGMWKGVYVVEVERLARGNTKDQGIVADAFKYSNTVIITPSKTYDPNNEFDEEYFEFGLFMSRREYKTINRRLQRGRIASVKEGNYIGGSAPYGYRKVKLSKGYSLEIIPEQAEIVRQIYNWYCQGEQQPDGTFCRLGTDAIATKLDSMGIKPVVNDKWSRATISDMLKNLTYTGKVFFGQYKEIKTSVNGKVVKKRVYDPNHLVAQGKHEAIISDDQFELAAKMRTVNQKNTVPAASVLQNPLSGLVYCKKCGTLMTRLAPNSRNKYSTLKCPNRYCGNVSSPLFLVERQVLQYLKDWLHAYEVDNKAMNFSPINEEINLKLDTIKKLRSEIAQLTSQLNRAYDLLEQEVYTIEIFKERQANLKNSIFSLEEQLNAHESDLNHLRELQITQELFAPKVRHLLDTYKTNSTELNNSILKELIARIDYEKETRNTRGKLDNCNFSLSIFPHISN

SEQ ID NO: 4910 - protein, 571 aa, synthetic construct
MRIRKVAIYARVSTEHEAQLSALENQVQYYDDLIDRHPDWVLYRRYIDEGITGTSISKRKNFVRMMEDAKDGHFDLIVTREVSRFARNTVDTLQQTRLLKRMGIEVYFTEDGIWTMNDEDGELRLTIMATLAQNESKKTSMRVKAGQMVSFQNGVVYGTGNVLGYDKVGPEYVINETQARTVRKIFDMYLAGNGSQKIKRQLEKDGDLTAMGKSLWHYATISHILKNRLYCGELEYRKEYVPDYLEQKRAKNNGELDRIIVEGKHQPIVTKEEFERVQKLIEEKRPQMEKCRKNRGVHSDDLWRRKLRCQCGHAFAKTRWHSKSRDFTTYTYKCYDQTRTGTISARLKNGLSIEGVCRSPLVQDWKIHTMAQKVLHAVFDDPEGTLKNAAAVLGLGAAGVEQAEVLRDKSIIEEKLKKEQGRYETLLDMRMNNEIPREVFSRKQQEVEKKIAELEQQMMQYGDVKPATEADVSGKLENLRRLMEQPPVPKDGEFSEEDIDKYVFGVRVYEDRFEWLLNLSPEARGELDDAGSPVYFTKLTVTPDDERAWFRMHPQWSKSNKYAELEAWIYI

SEQ ID NO: 4911 - protein, 527 aa, synthetic construct
MAKKVTTIPATLNRFDSRPIAAAKKRKTAGYARVSTDSEEQATSYEAQVDYYTRYINGREDWEFAGVYTDEGISATNTKKRDGFNQMIEDALAGKIDLIITKSVSRFARNTVDSLTTVRKLKEKGIEVYFEKENIYTLDSKGELLITIMSSLAQEESRSISENTTWGKRKQFADGKGSLAYSTFLGYEKGEDGSLRVNPEQAETVKLIYQLFLQGLSPYAIGKKLTGLGIKSPAGKDTWHQSSVKSILTNEKYKGDALLQKQYTADFLTKKRKKNQGEIPQYYVEGNHEAIIPPETWELVQEEMERRKSMDARYSSASIFSSKIKCSECGNWYGSKVWHSQDKYRRVIFQCNRKFKNDKKCRTPHLTEDEIKDAFVKAVNAVIPEKDELIANTKVMMRTLCDTTELEVEQSRFQTETRTVAEMVKRIVAENKAAPMDQEEYQRRRNELVARYEAARDGYEKASGEISDRQGKRKTYMRFIGGLQKLDGFCGKFDEELWTALLDYATVYARDDIRFTFKAGNEVKVDG

SEQ ID NO: 4912 - protein, 525 aa, synthetic construct
MRTVIYARFSSDNQNPRSTADQIALCRQRADQEGWQVVGAFEDAAISGAAGIDARQRPGLHAMLQLVEAGGVDQVLAESTDRISRHVADAHMIRERIEFAGARLFTLFDGTVTPMIGLVKGFMDAQFRTDLAKRVRRGQLGTLKQGRIPGSIAYGYRHANRLDDKGQLVRGLREIDPDKADIVRRIFAEYAAGRSPRQIAAGLTADCVPAPQGALWHETAINGDLKHKRGILRNETYIGVVTYGRSRQVVNPQTRQRLMRPNPKEEVERQAFPHLRIIDDNLWQRVQERLASNQGVRPERKRRPKHVLSGLGFCGVCGTAWVKASGDFWRCSNYRYRLGCSNNRMINTRLYEEGVLADLKAGLLSPEAVSEYVREYHRDFARQSADLGRDRARIERKLQEAERKKERMLKAFAEGGSEFAEIRTMLATARDEADRLQRELASMDALPNVLALHPHVEEQYRRQVEDLAAALAAPEAQPEAIGRYRAMIARVIVSPDLTKQRGAVVQVVRQMDEILSIATGKAKHA

SEQ ID NO: 4913 - protein, 564 aa, synthetic construct
MRSAKAYSYVRFSTPKQAQGDSYRRQLQQARDYCTTHNLVLDDKTIEDFGVSAFRGSNRTDGALGRFIDAVKSGEIEKGSYLLVESVDRLSRQAIEEALTQFLEIVREGIVIVTLSDNQVFRSGEVDFTKLIVSIVYMARANDESEMKSRRSRAAWSNGRQQARENNKVIANSRLPSWLTLEGDKIVPIPERVAIVNEMFQMARSGQGYQQIAKIFRDKDYKTFGQGKAWRPAGIQSVVKSRAVIGEFQPHIIYEGKRVPDGDPLFGYYPTVVSPAIFAEVQHIVDKRNNHSGSYRKGLYNNLFSGVIRCQCGELLRFHNKGSKGQVRNYLVCPMEGVTGCELPYLPYNRIEPQLLQALSRLSRVMKQRQPQTGRASELKDDLAVLRNELEAAGKKRVKAAQLVLDFDDDADFRMLFEESKNACHVLEEKIVQIEGEIMALELSTRTIDRFLHPEDLNSTEQRQQFNSQLKSAITIEFIYENVGLVAVIKDLEGELMLEQAFGPKLMSSIVHDYEGHICVKTIADAPYVDPVWVEKERADYEKGILVEFDECGDFNIDNLNKNS

SEQ ID NO: 4914 - protein, 478 aa, synthetic construct
MRVAVYIRVSTQEQAQEGYSIKAQRKKLEAYALSQEWEIVQFYVDEGLSAKDMNRPELQRLLNNMEEGAFDCVLVYRLDRLTRSVLDLYEMIKKFEKHDIKFKSATEVYDTTTATGRLFVTIIASLAQWERENLGERVRFGLEQKAKEGKWALSTPPYGYDIENGYLKINDGEANTVKYIFDQYLKGRGMNQIVTDLNDNGTKTKSNSNWHQGSIRYILTNPAYIGTMRYNFRTNKENYFEVEDAIPPIIDKDLYETVQEIRNTRAQLHPRAANSDYVFSGIAKCKRCGAPLFGKTSKKVKGDKTYLSKSYKCSNVRRGMCDQPTITDSFLEEQFHKILSIWDFSKNIKKIQGTDLNTELDEQKLIRRQLSDVNKRRSKWQYAWVNNMISDEDLSKRLQEETQKEEELNQKLELIQGMNNNSKGPSKQFINDMVYTWNKLTAKDKKKLLHLTVKEFKVDKISKKRLPTSVEVSDIIFN

SEQ ID NO: 4915 - protein, 474 aa, synthetic construct
MGITMKQKKLRVGAYCRVSTEHEEQQTSIEAQVSYYTEYIKENDKWEFAGVYEEKGISGTNAKNRPEFNRMIKNCMDGKIDMIITKSISRFMRNTLECIKYIRLLKEKGVSVYFEKENLDTKDSKGEFIITLLGGIAQEESRTLSLNTKWGIIHRFQQGIIKVNHNRFLGYTKNRFGELVVIPEEAKIVERIFTEYLEGKGSKKIADGLTADNILTPAGCSKWYPSTIIKILGNEKYIGNALLQKTITLDFLTKKRIKNTGQERQYYVENNHEPIITKEVYIKVQQEKLNRRSTMGLKKKDQGVYKSEYALSGKIKCSQCGKTYHRCHWTIKKERIIVWRCGNRQHNGPKACQAPTIYEKDLFEAIDIVFKTLIRKKEQFIKEMEDTLTKEKELTDPIQKEKEVYNLKDLEWDNKKQRLKEMEEIFETSKQELTEYNDLYCRKLIEKILVISEKEIQIEFKSGIVLNGSINTKN

SEQ ID NO: 4916 - protein, 535 aa, synthetic construct
MKKVTVIEASSESKAADNRKIRVCAYCRVSSMHKEQQNSFEAQASHYTKYIQSNSQWEFAGIYSDEGISGTKKEIRPEFMRLINDCENGRIDMVITKSISRFARNTADCIETIRKLKSLGVTVYFEKENINSMSQESELILSVLSSLAQEEAASMSSNIRWANQRRYKQGKFQIATAKFMGYDKDGNGDLVINQAEAEIVKRIFREYIGGKGSAGIARTLNEENIPTITGTKWYGSTIRRMLGNEKYCGDALLQKTITADSVTFKRKSNKGELPQYYIKNNHEPIISREDFERVKELIEIRKKKQGIDEEVIKKMRKRYPLTGKIICGNCGNHYKRSIYNTSNKYRSVVYVCSSTEAEKIMDCNARPVMQKGLHQAFINMSNRLYSNWRTLLLPYRTYLKKLVQSTADRTEIYNIDNQIIELAEQESMQKILLAKGSIEPALFNKNINETTAKINEIKARKQAISTSIVNQDILLAETEKSIEFIKNYTYIDEFDEDCFNAIVKDIVVKSRNNLCFRLKNGMELDEFMGGEDDVL

SEQ ID NO: 4917 - protein, 470 aa, synthetic construct
MARSITVIPARANRPQLDENIETHKKRVAAYCRVSTDQAEQLSSYEAQVNYYTSYITNHPDYEMAGIYADEGISGTNTKKREQFNKMIEDCKAGKIDMIITKSISRFARNTMDTLNYVRILKELGINVKFEKENIETLESKGEFLISVLASLAQEENFSISRNATWGIRRRFEQGKVIVNHTKFMGYDKDESGNLVINEKQAKVVRRIFSEYLNGKGTNRIAYELEKEGIPNWNGKAKWYESSIKKMLNNEKYKGEALLQKTYTVDFLSKKRVENKGEVAQYYVEESHPPIIDKDTWAAVQLERERRKAFMEKYNIQKMDYITNANPFVGRIICGCCGGVYGRKVWNSNDERLKRIIWQCNNKYATKGKKGCNNRHINDEVLYMAFVSTFNSVLENREHFMSKWNEQINGEDILKRVTTKRFVDIFKDAETLQQFDTELYFKMVEKVLAFGDSRLIVGLLDGTEIECGIE

SEQ ID NO: 4918 - protein, 400 aa, synthetic construct
MRVKILEPTLKNISRKNRVCAYARVSTDNYEQGESLENQITYHGNLIAANPEYELVGVFADKGISGTTENRPQFQKMLGLCRERKIDLIITKSISRFARNTTIVLRIVRELKELGIEVIFEKENISTLSKDGEFMLSVLSSFAEEESRSISENTKWRVRKKFETGQLIINTNRFLGYDKNEYGELVINPAEAKIVERIYSEYLSGKGTFTIAKQLAVDNIPTVAGGKWCESTILGILKNEKYMGNVLLQKYYIPNHLKKSTVLNKGELNSYYIEENHSPIIPKEVWNKAQIEIVKRAREKGNYQGNMKYQNRYPLTGMLYCSKCGAVLRRRTWNSKADCRKIVWQCSNYIRNGKTACSGTILDDGSASRLNIHEPTIVKETIKNGKKHYSYSGKSKQTTA

SEQ ID NO: 4919 - protein, 515 aa, synthetic construct
MIAAIYARYSSDNQREESIDAQVRAINEYAQRNGYSIVKIYSDEARSATTDNRPQFLQMMKDSALGLFNAVIVHKLDRFSRDRYDSAFYKRQLKKNGVKLISVLENLDDSPESIILESVLEGMAEYYSANLAREVMKGMKETALQCRHNGGTPPLGYDVLPDKSYSINESEARIVRTIFEMYASGHSYSEIIDTMNREGYKSKSGRSFGKNSLHDILRNEKYTGTYIFNRTVSKAGGKRNNHSSKSDIDIIRVENGMPAIISKELWNEVSKKMNGNKRARAANSAKENYLLSGLVFCGVCGGSFAGNRKFSGRNKNLYVTYECTTRKRKRTCCMKSIEKNFIENLVIDQLLTDIFAPDAIERIADRIAEYAKTRTSEISKNIREYENELAGIQTQISNTVNAIANGMFHPSMKQKMDELEARKSALVIRIEEAKRQAEINSPSRDFIRSYLEQDSDIKNKSPEDQKRIIQTYVVKIIVYNDRIDTYTIVDFDGGGEGSRTPVRNHILKNFYGCSL

SEQ ID NO: 4920 - protein, 493 aa, synthetic construct
MTRSAIYIRKSREDRDKPSHRLTVQREQLPAHARAQGWSVEVYDDGHASAARGKAEDLKERARLEADVRAGKIDVILTIELSRLSRDETLEDYLAWLNLCSSHGVKLATPSRILDPSQHSDWMLLLMEGGFSSVEMKVLQARMKEGRAEAFRKGKWLGGSPPPPYVYDKATGCPQVDPDQLAKMRRLWKMAETKSTRDIAEAFDMPVIAARRAISEERLLFYQALREDPQTGELIPCEWEPVMKADQTERIRQGRRTRRRAPKRVAAGLFSNLSIFTCGYCGRTVRAWKNHRTRKDGSRIDYYGCTAKDTRRKCEKSRMFPQTIIDERILTNFFGTLERVEELKVWWKDNDKTGQALDRLADLEAEETTLTTQKRRLIAAIAEGVIDFADARQKRTEIETRLGEIRARRSELAGAQRPEPNWKALAISRETFDFLGFEEQREFLSLAIQNIRLFSSYLIIEYNFPRASDGRKEARIHLPPPPKPAGTRQVYKA

SEQ ID NO: 4921 - protein, 566 aa, synthetic construct
MTQPAWIYARFSTMEQSKGHSLKRQINEGRAFIERMGWEHAEHREIVDEGKSAFHGANRSEGSLLYEFEQKARNGHFDNGAVLAVENLDRLTRQGYEEAIDLLRLLTTNGVTVATWHDNQIYEAGKRIDMMKVMSVILKAELAREESEKKSIRTRASWSNKIEAAINGDRRAMTKILPAWLQRNDDTMQMEVIEYRAGVVNEIYDWYISGRGLPWIVQRLNERREQSWAYGVKDRGAGWNTAYLHKILTNRSVIGEFEPMSRPRSALHEMTKGIVVQNFYPQIVTADKFHRVQQIRAQRVKWGGQATKTMNNLLSGIAKCATCGGAMYFESQQKAGRRTGHKSRLDGRALEYVAKTDRSYYRCNSARRGHTCTNKTRIRYETLEKSILDCLFDLAMKDTTFKPSDEEAKLTVAIAELSRSIDTKREQVQRGSDNLLEVFSKSLAQRVAQLEEEVEADTLQLEALDRQLDLARGALRPEEDTDLLLAARTALQSEDKDERYLARVQTHQSLTRLIDQMYCNSSAGTDVTLKNSDVMIHIDYEGRTTVVVHEGPDGEREWHPDQEAAE

SEQ ID NO: 4922 - protein, 540 aa, synthetic construct
MRTAIYARFSSQLQKDSSIEDQVRVCTERAEREGWTVTAVFSDYAMSGAVRDRPGLNSLIEHIRAGGADQILAEAIDRLSRDQEDLAGIHKRVRFLGARIFTLSEGPIDELQIGFKGTMASLFRKDLADKIKRGQGGRVAAGRTPGNIVYGYRKVHRLDSRGEAERGLREIDPEQAEIVRRVYAEYIAGESPLAIARRLNAEGIPSPSGGTWNVSAINGDAVRGNGLLCNEIYIGQLVYNRTTMVRDPDTRKRVPRVNPAEQWQRQDVPHLRIVDDESWEAVRRRKSLRENWDFNKQRRPKRLLSGLVKCGQCGGAIVVIGSEKWGCANTRRAGTCTNRRTIDSTVLESRVLAGLRKELLSPERVSLVVKAYHQHRARLDREAFEAAATNRKRIDELEKQISNLVSAIAAGAADVPEIVEALQRAKAEREQLTEAIGSANAAQVISLHPAIAEAYRNAVEDITRHLNGEEESARTARSALRTLIDAVILTPKENGRGLHIDLQGRLENVVSLATGEAPMEREGMLQVVAEEGLEPPTRGL

SEQ ID NO: 4923 - protein, 638 aa, synthetic construct
MKPKLYSYVRFSSVKQREGNSLERQQDTALKIAARYNLELETTAFHDLGMSAFKGRNAHEGKLSEFIKQIGVKVPVGSWLVVENLDRISRDDAWTALDIFKSILSKGIVVVTGMDEKVYKYADVKNNPTDLIISLLMFTRAHDESLTKKNRVEAQARSLIRYNLTRKAGTPAKAIESVGQNVWWVDTKSGYVTPHPMYFSAAQKIIELKQNGETLLGIQRYLNEHYPAPKKRIYKDQTGQALKPKTEQWGKHLIRTFLNPTVYGQKVFTLDKRDESGVVIYEPDSEQPLKETFVIPDYYPALISEIDYLTLSKLDRHRAVTRSSSKYPEGNPEPEIPLLSGIGILFCGKCGSFMFKSGSNENKYRYICGSKIVQGKPCGKKGFTAYQLEHTVLQLIADHVWNNHQEDKTAWYESEIEKTSESIDKLLKLATLTDSLEELAEQIRSYKHKKATLEREFQQYKISRSEIQTTGWDQFRNFDIHDTKNPDRKRLRLKVKQAIKRINCYDIDGRHGHFELTFADETKQRIVIKFNRNRSPGVSYVEAQTVNDHDLLKMQGCVMHSFIDELISPDEFAQQIKDKHEVSILNPTFITKLEDGVNRDESNGLAIKVDSTTSKSYVTVNGIKYEINSLEDLEKLLL

SEQ ID NO: 4924 - protein, 598 aa, synthetic construct
MPKIWPYIRFSSEEQKKGDSLRRQQELIERFAARPEIVAEGAEIDTSLDLNDLGVSGFTGKNVLQGRFKDFLDAVDSGIVKPGDYLAVEALNRVTRLDPMESLPILLDLMKKGVKIAITANSQIYKQGGDITQLYIALGELQRGYAESEEKGRRVRQAWDKKKERAFQTGEIATSRLPLWLRAVKTDQKGLIVRKVEEIPERVAIVKEIFRLSDSNIGAIATARLLTERGVPTFTRENPRKNPNYGDFWQPSYIKKILDSRAVLGHYQPMTWEKLPDNRRRRINHGPEIENYFPQIITPELFRRVQEKRRGRGKEGQGNKGKKFSNLFLKIAHCAKCGATASHVNKGPDPRKGGRYLVCYRARHGDCSYKAWRYDDLETMILKFLAEADIKSIISEENKADELINKKYEIDAEINDIQEMLDAYKADFKRLKGRVSDLDREMAIENEQTLKELKEKAKDLDQEIFKALEQKKADIEKDILDLRGLSNTEDANTVFEVRSKINERLKVIIEDIKIDFQDRHIEIIFKNETRRHLKNHLAVERRESTEADQKRQDDYDDFYSSLTDEQKAELNQYSIPAEIANDPKRLIEYLAQFNVVED

SEQ ID NO: 4925 - protein, 533 aa, synthetic construct
MTKKCFPYVRFSSTRQEDGSTRTRQNGLIEAFVAKHGLEVDRHLEDAGTSAFHGKHAGSEGVLGQFLKEVRKGEIEKGSYLLIENFDRLSRDKIVRSNKIFTDLLFSGIKIVILDKNKIYDADNLDFGDWVTALVEFERANAESQRKSDFSSKAWKLNRDKMHNGEIVTKKVPTWLKVENNTFIIDEVKIDRIRTLFRLSLSKGLQEATKEYNTLYGEKLAIHQAQYLLGNRKLIGEHQPQKIHYNENGRLIRKDEGNPIPDYYPQVIDEDLFLKVQSVITSRKPFSGRYSAQRYNVFRDLIFCRFCGGTIRYMNKGERDYFICTNSMTGKCGLKGQQSIRGKKVFSRFFKFTNGINIGTLLEENTNADEIKNELMKLENQKNKISNRLDDFKSQIKKMVMEGETIPETYNEIIVDLENSIIKYDAEIEIKNKELDKIISSFRSFYDLQGIDIEKIIYDKSQEAIEKRVQYNNELKNIIKKIQIDYLNDILHVEFSNGVNRHILNDELANEYNKDEIENSWASVVKSIAQKTN

SEQ ID NO: 4926 - protein, 574 aa, synthetic construct
MQNTAVDRSKPIAIAYVRWSSSIQSDGDSYDRQTSPLAEFTSLTGVPVVEIIIDPGRSAYTGENSKVGKLKDILVRIESGHIRKGDYLVVESIDRITRMRVLDGVSLIQDGILKKGVKLYTTSDNKVYSYEDPDRDLETLLMIGLIAKRANEESETKSKRRKSSWNKAKEKAENSGEIFNRHTPPYGLIFNHAENKFNIVEDEANEIRAIIEGLKSEGVSNTLKKVNINSKRKWTRRTVHQMLVSKYPTGALMSQRRENKQKVFDSFIENYYPQIVTNHAFQEAVNAMKQRGKVKDYGRTTEGSLNIFKHCIKCGLCGATLMFEKSVNQKGVKYGYLHCHTSKETLSTCETRFRFDLAFGTLLQLVRQITGEDIDYTVHEWANREPIGNTGTYLENEQDSENLNDALLDFFSNSKLDQSVSVELIEKEKLLANAKSLYENLTASLSNYADGKIPKIFIDKVIIAEEAVSVLSSEVDELAGELHKERTDIDIYSSSDILSLYDDESGRLKLNTFFKENKFEFVFTCDRKTRTVFMTLRDKSKDIQLARVGKRFTLHHPLKEFGINSLSEYMNAEI

SEQ ID NO: 4927 - protein, 508 aa, synthetic construct
MKKAIAYMRFSSPGQMSGDSLNRQRRLIAEWLKVNSDYYLDTITYEDLGLSAFKGKHAQSGAFSEFLDAIEHGYILPGTTLLVESLDRLSREKVGEAIERLKLILNHGIDVITLCDNTVYNIDSLNEPYSLIKAILIAQRANEESEIKSSRVKLSWKKKRQDALESGTIMTASCPRWLSLDDKRTAFVPDPDRVKTIELIFKLRMERRSLNAIAKYLNDHAVKNFSGKESAWGPSVIEKLLANKALIGICVPSYRARGKGISEIAGYYPRVISDDLFYAVQEIRLAPFGISNSSKNPMLINLLRTVMKCEACGNTMIVHAVSGSLHGYYVCPMRRLHRCDRPSIKRDLVDYNIINKLLFNCSKIQPVENKKDANETLELKIIELQMKINNLIVALSVAPEVTAIAEKIRLLDKELRRASVSLKTLKSKGVNSFSDFYTIDLTSKNGRELCRTLAYKTFEKIIINTDNKTCDIYFMNGIVFKHYPLMKVISAQQAISALKYMVDGEIYF

SEQ ID NO: 4928 - protein, 589 aa, synthetic construct
MTKKNGEVGDSIRRQMENQRKAVETFNLHVVDVFEDLGKSAFRGKHRLKGALSLFLASLDEGKIPSGAYLLIESFDRLSRERMTDGLTVVLTILRKGIKIITTDDLKLYDLSIKGKDLEQTIMITVLLERANNESTTKSDRQKAKWDGRRERIIKGEKKFLNKNVPWWISLNESTGEYSLIPDRVAELKTIYELLMVKNLGLRAAAAHINENNPIKVVFGKNPKSSGWTARGIKRMIDTPSLYGSLELCEYIYDNGKSVPDRKTVQVMDNFYPAAFSKHEVDVLKAKISSRMTSKERPTKRDLQYYNIYHGLIKCAFCGGNVRFSQKQKYSYLVCRNSEIKLCKYPKTLSMQYERFHEVFFKYAEHYNFDLLIKSGGNDNDVVVKEITELEETIASEKYKAQKFTEKLLDMFDGDIPSEQEAALITRNKKIKLMEAKAKALRAKIVYVDTDAETISDAIQLASKLVETKDGRLELSNYLTKVIDKMVVDFGKAHNRDGDYVKVLFKNKDFSHHMLIGKTTAYSYDSDGELFLDTLQGITREDGYYLEAQKAQDEWFDVPDFTDAEIAADELAKTTNPSYVNEEFIIDAE

SEQ ID NO: 4929 - protein, 555 aa, synthetic construct
MLCYSYVRFSTPEQARGDSHRRQMEFAQNYCKLNNLTLVEDLSFNDFGISAYKGDNLKNGALGKFLELVHSGYIPNGSTLIIESFDRLSRQTAIKAQAIFSEIISAGITIVTAMDNRSYNLKSVTENPFDLMYSLMIMIRANEESETKSKRVKEAIKANIRNKKIVSSKLPYWIKHNKEKDILELIPERVEVILYIIEKYLSGLGISKLTQHLNDNIKPFAGKNWYPVYLQKLLRSPSLYGERQYNIDNTLHIMDNYYPAIINKSKFAVIQENLDLRAPTRGGKISSAITGIRKAYCGYCYGVLVSQSTRRNGKIVDGLRRVRCNSNHNGKHCITSTFRASLVEHAIAEYCSQHIDLSFLEPTSNASKLKLSEYKLELHELNKKINNYVKFISEGHVSPAIVASLNEAENRKKEIEYNINKLDLDILSDNKEELIKKWREIKTNLESYNEENILKLRELIRISIKTIYVFQYGVWGKENSIILPSRKSIPIEKGAFTIQITFKSGVRKTLVLGDKIEDMEVIPQNRTIKENGKTYTSEEYTKILEDKIKIEYEQK

SEQ ID NO: 4930 - protein, 553 aa, synthetic construct
MKQQLAYSYVRFSSPQQAKGDSFRRQTKAAREYCDKHGLQLADLTLHDLGLSAYSGTHYEQGALGDFVRAVQQGKVAQGSYLIVESLDRLSREEVDIAFSRFASILRANINIVTLQDGKQFTRESLKNTTDILTSILVMLRAFEESDIKAQRIKAARDEKHRQARENKKPTGYRPPDWMKLENGSYQLIPERAGIIKRIFQLNNGGLGAIAIARLLNEEQIPAWGRSKTGWQTSYIKKILKTRTVLGEYQPHVMVNRVRSAVGDPITDFYPPVIDPKTFKLAQLTMTSRDKRPGGIRNSRMTNLFTGLVRCKHCGNTMHFVDKGRPPKGGQYLLCSLAKTGATNKDGVSCKRASIRYKETENAILTVAATLNLRVTKPSNEAEVSHLKENLSRVNAELGTVENSITRIADAIAALPDSSGLLSKLVELEQQKQDKKNEYQALEKRIDEIELTPKSSNVWKELKSTLRTLRVEAANRANVELRAKINSQLLSCIDRIEFDNHAKVVTIHIDDYRNIEIRFEDKMKSYTVKPSWDSREFPPNTFMIKSVVDTKRV

SEQ ID NO: 4931 - protein, 532 aa, synthetic construct
MRAGAKIYLYFRYSDIKQENGDSIRRQRECAQRVADKYKLEIDEESVITDRGVSAFYGNNAKKGNLAGFLKSVEQGEIEKDSILIVESFDRLSRDAPRDAHKLFDKLIDNDITIITENDGLEYNKETLAREPSRLFMMIGTMLRAHEESLTKQKRAIESIKGKVEEFRESGNVKSIGTVPHWLDYIDGSYVLNSRAENVKLIIDMYLNNEGLKSISRKLAEKGIKSPTGKDRWGITTIRTILDNKALYGFKEFEISYLVDGRKVKESFELESFYPPLISKVDYLVIQEKKKARSNSRESYGDVTYLLSSYGKGKSVCAKCGYATGTQTQKQINRKGKYMQSVMRLHCKKHSESGDCCKSFKCAELEKHFIYSIYHELDPEFLMKYKSKKVNKEGLKAEISEIDRQIKVLVSSMIELNNADLTTVFQEKLSDLNEKKIKLSNELNQTNDTKNEGDLKELKTLALKCLDVKNSVERKKLKNIIMQVLDKIVIDFETKSLSIKFTNGNVMNVYFDEKSKSYCTSLFRSKIIRRKK

SEQ ID NO: 4932 - protein, 559 aa, synthetic construct
MRYVAYLRVSSHNQVETGDSIDGQRNKIINWAHEGNHHIVGWYIDEAKSAYHGTRAEFSRMLDDLEQGLVRADGVIVYSLSRFSRNLLVQLQATKTLEKLGISLVSAIESFPENPEDQYVMVTMLGVMNEHQSRQNGKVVSDRLMDTARKGFFTGGIPPYGYKSIEVAGDTSNIRRKLEIVEEEADLVRHIFELAEKGNCGKGIGIKNILGILNGQGLTYRGKRWSKSTLSRVLNNPVYYGERLFGKNSKKDTVASPAPAILSKEQFDRTRESILARGVNMHNSKSVRSPSLLTGILRCAVCGGSMVVTSGKSGKYKYYQCSLQVQRDTKPKLDKEVREKLIPQVFSEQHITNVYSQARELLKEKSGASRDKMLQTTNAINRTKVKAKTLIDLLASGELQPNATVNNHLSELNTTISNLEATLKQQAALSRLPLKNVGKKQLTNFVRCIRKHIESSTDEQLKQLLLSTFKEIKVLPEKKILATGANVNILRVATNAKTGTDFSVPVFGTIWRRDRDLNPRYAINVCRFSRPVLSTTQPSLRCGTYNREWSSRCKALNYN

SEQ ID NO: 4933 - protein, 523 aa, synthetic construct
MRYVAYLRVSSHNQVETGDSIDGQRNKIINWAHEGNHHIVGWYIDEAKSAYHGTRAEFSRMLDDLEQGLVRADGVIVYSLSRFSRNLLVQLQATKTLEKLGISLVSAIESFPENPEDQYVMVTMLGVMNEHQSRQNGKVVSDRLMDTARKGFFTGGIPPYGYKSIEVAGDTSNIRRKLEIVEEEADLVRHIFELAEKGNCGKGIGIKNILGILNGQGLTYRGKRWSKSTLSRVLNNPVYYGERLFGKNSKKDTVASPAPAILSKEQFDRTRESILARGVNMHNSKSVRSPSLLTGILRCAVCGGSMVVTSGKSGKYKYYQCSLQVQRDTKPKLDKEVREKLIPQVFSEQHITNVYSQARELLKEKSGASRDKMLQTTNAINRTKVKAKTLIDLLASGELQPNATVNNHLSELNTTISNLEATLKQQAALSRLPLKNVGKKQLTNFVRCIRKHIESSTDEQLKQLLLSTFKEIKVLPEKKILATGANVNILRVATNAKTGTDFSVPVFGTIWRRDRDLNPRYAI

SEQ ID NO: 4934 - protein, 532 aa, synthetic construct
MAIAYSYIRFSSSQQSQGDSLRRQIQLAEKYCIENNLTLSDTNFRDLGVSAFHSTNSQEDSGLGKFLSALSQGRINEGSYLLVESLDRLSRAKVQTALRQMLNIIDLGVKIVTLMDNRIYDQESDTTDLIISLTIMERAHNESKTKSERIKAAWAHKRQNPKTTNRHSSTPFWLSLNPDKKTYSLKEKYVEIVRKIYQLSIDGWGVVKIVRHLNESNIKAPKGGSWATTTVSRVLTSKAVLGHYEPKQNRKSLNFVIEDYYPPIIQEDTYYLSKQRQNERSKPEAAGRKTDYPNPLNQIAKCKICGSSMYYENKSKSLKYLTCREFKKKNCTNKPIRIEMIYRFIYEIFNSPINYQYQAKLIEKSKQRDTNKLKGLEAKKTEEENALRGLLSLSNDFSNTIIQEEIKARSERIESFKKQIENAKAEQAVEHTRDVHINFTEALQLAVNAFHFPLEKVKVEELPPEELFNTRVRLNRILKQAFNTLSIYHCNESKRITIEAEVMEGFPDGLKYETNQQSIREPIGNRIWSVYQ

SEQ ID NO: 4935 - protein, 510 aa, synthetic construct
MNKTKVYSYIRFSTSRQESGDSVRRQLEIARNYSEKVGGVYQDRSFTDMGISAFKQKERDGLQMMLDMVEDGSVEKGSHIVIERLDRLSRQGISVTQQLITQIVQHGVLLYVAGDNMLLERDSLNDLSTVIRVAVAADIAYKESLQKSQRIKASKIAKKRDGIDGRVTKKVCPFWLQFDESKQKYVFSDKLPTIQRIIELRQQGYGENRIAQHLNDEDIKPPRAAKWSPTTLRKMYTHPALYGAWQTTEKAENGQYIDSDLIENYYPALLTYEEFTLMNPKSKATTAKDSGLNPFKGLLRCAKCGATMSRQTTKMRTGEKYVAYRCTNAGKGIYCDAVGYRDLDKYLVSGCKRLKITKTTDHDTRQQEADLRALESKLEQLQKAILTQTDISALISTSQVVERQIKDLKSKIKPSATVTVEELYSHKDSPQSFNLLARSLLNRVEVEVKAKSRHTKTLLAKFYQHNDYVIAMTVLPSGESFYSTTELNKLYKGTENFVDEYEFEQPELED

SEQ ID NO: 4936 - protein, 598 aa, synthetic construct
MDEKPRIAHIYSRVSKGTQVKGDGLRRQIEIASKFIEDVNISNSRDGLPVYTLADSPIYDRGLSAYFGLNTDENAGLGAFLKAAENGQVEKGTLLIVEAIDRISRLPVDDARALFARFKKYGIDVAICRFNLIIYHDKSSDLGQDLLITTAIHLAHLESEQKSKRIRARFTHKRLLEKEGGERRTSMSPSWIELSKDKTHFVLIPERARIVRKMVDLKLQGWGAHRITVYLNEQGYPCWNRSNTWYTKIVEKYLKMIQLVGDFQPVEHVHGEKGVRKEPVGDVIKGYYPALITEEEWIRLKASFKRSGGRQTGAFSNLFSHMLYCPTCGSCMSYFKPNRGRIKVRCRKQIDKQGCDQRALNYEEIEPRLIKALAGLDYAKINNNSFASLQKELNTLEAQVAELEASADDIKTQMLEESDPRIISVYVNKLKAIYTEQDKAKARFEKLSTQTSDYDVNTLEQLQLERNEDRERYNGFVRSFVKYVIASDSKLGKPLRIVFKSEAVGEVPVFFNDDKNNKAISDIFTAQKDVNEAAPIRLINMSRVHGNLGKLAAIDTVPVPDDLGDALERIKYLFAVRQAVLQNPEKWQAIADDARLFE

SEQ ID NO: 4937 - protein, 664 aa, synthetic construct
MFSFDKSKFKGICVPYARFSTKGQSKIGKKSLERQIEEARRYAKSNNLYINEDLIFADKGISGFAQQGNIAKAFKKGQMQVMLALLEEVPYQEREFIYVTFHNFDRFSRMSPKQARTYFDLILQKGFNVVTTIDNQLYTRHDKDLGKMLISTIKMTTAWEESQVKSIYIKDALARKKKVVEYLYNHPSQKGKYKHIGVVQPNMPRWIDHEKIELTYTDESGSKRTDSFKKFTLNKEKAKIVNYIFDLKIQGLGYARICRRLNEEGIPTFDQGKHRIAKKWHVFAVQNLICNEMVLGHITLHTHNEEEYMCEIDKVFKKRKIKQTATEKLYNYYPAAVSEAKYLEAHKNTIQQDKPKKLGRIGERTNIFAQILLCECGGTLQYRRTKKNKKKTEDVSVNEYLQCNNAFVNHKCNSQTINYTLLETAFFRYVNNIDFKKICSTTNSKHALKIIDLDADIKELNDEIESLKLREAGLAKTYMSLASAGLDGSTALIDREKTKKEIAEKVLELENLELKKKGLEIEADKDNREFVDINDYMMNKDNYSTDEKIIIRKKINDFLHSKIEWMEVVSTERQKFVIIAFHDTVIRTFAFDDRCANDLMFNEIDVDLSGLNRVQASNLMFTLIKAIRNSLKGVEAVITKADLISYLQHIKQDYLKNIGEQASV

SEQ ID NO: 4938 - protein, 644 aa, synthetic construct
MFNFDKSKYKGICVPYARFSTDVQDEIGRKSLERQIEEAKRFSNEYGLFFDEDIAFVDRGVSGFALSGDTAKTFQKGQMQLMLELLEEIDIAEREFIYITFHNFDRFSRMSPDVASRYFEQILDKGFNIVTTIDNEVYKRNSGNLEQMIISIIHMSTAYYESEVKSIYISDSRQRKRDVIEYLYNDEMQKGKHRHVGIKACCPRWIKTKDIIYEYVGKDGSVKKEALKRFEIDEERAKIINYIFDLKIQGLGNGKICQVLNEQNIPVFHSGKYTKAKYWNLSTISNYLKNENVIGHSYLYHKAKEEVFNEKTQTFSTKRVRKIATDKLYNYYPAIMSEEKFNQAKEAVKANSVKVDRSKVSEKPHMFSNLMRCSCGTRLHYKITKKNNVKKVDDYFEYLKCERSALNDGCTGENINYKNFEAQFINFIRYIDVNEILDHANGVEGETQGLTELEEREAAINLKITGLTKTYQGLINAGVDGSDVLVELEKAKGELQEVEFEKSKFLNSMKSQTSSSSESIKQKKSALKSKVFAEKVEARKAVNELLKQKIRWMEVYATAYAKFVIVCFVDNVIRTYAYQDEFATDLMFNTIKINTDGLKGYEADELMVLMIKTVRESLAGMNEVITNTDLKIKLAAIKSEYMNK

SEQ ID NO: 4939 - protein, 525 aa, synthetic construct
MNKTKVYSYIRFSTSRQESGDSVRRQLEIARNYSEKVGGVYQDRSFTDMGISAFKQKERDGLQMMLDMVEDGSIEKGSHIVIERLDRLSRQGISVTQQLITQIVQTGVLLYVAGDNLLLDRNSLNDLSTVIIVAVAADLAYKESLQKSQRIKASKIAKKKDGLDGRVTKKVCPFWLTFDENKQGYVFNEKLPTIQRIIELRQQGLGENKIAQHLNDENIKPPRAAKWNPTTLRKMYTHPALYGAWQTTEKADNGRYVDSDLIENYYPALLTYEEFSLMNPKSKPTTGKDSGLNPFKGLLRCAKCGATMSRQTTKMRSGEIYVAFRCTNAGKGIYCDAVGYRDLDKYLVSGCKRLKITKTADNDTRQQEADLRALESKLEQLQKAILTQTDISALINTSQLVERQIKELKSKIKPVATVTVEELYSHKDTPQSFNLLARSLLKRVEVEVKAKGRHTKTLLAKFYQHNDYVITMTVLPSGESFYSTTELNELYEGLEDFEKDEKHFHLQSNTDEQKTYKSNKDSSSW

SEQ ID NO: 4940 - protein, 501 aa, synthetic construct
MEIQIREGSREQKRKLKVCAYCRVSTDADEQENSLENQVRHYEKVIKANPDYEYAGVYSDFAISGFKEKRPGLQKMLADAEKGKIDLILTKSVSRFARNTSIVLEATRKLKELNVGVFFELQNINTLSGEGELMLTILAAFAQAESESGSVGAKMVYQRKYEAGIPVQYLERSFGYTKDERGIFVADEAEAVWVRKIYEMAADGYTPAAIKRYLNENGVKTVGGAEWIDSTVLRLIENEIYKGDYIMHKHFVNEERKLVRNRGEVDAWYIEDDHEAIVSPELWQRAQEALEAKRDYLAEGSVIKEFTEENYPYMNKIYCAKCGYPLYKRIYSKGNRLNWGCSGMKRYGKSFCDGINIPDGVLLSAWHFEENTYIDEKASDKGVKEFSYLKERSWKRRHKKKQPPTIPENTEAEYPYREKIYCALCGSRLVRHVNTQSHKVTWVCNGRKRKGKDFCDGTRVPDTILKGWGEIKKDIYIQRKDDKNGTKCYSYTSKKPSGIGA

SEQ ID NO: 4941 - protein, 463 aa, synthetic construct
MARSVTVIPARNRQVSGHRTAPQKKIRVAAYCRVSTDQEDQLHSFEAQVDYYTKYINDHENYEMAGIYADEGISGTNTKKREQFKRMIADCEKRKIDLVITKSISRFARNTQDCLMYSRKLKNLGIGIIFEKENINTLDSTGELLFTILSSLAQDESRNISENCKWGIRTKFKNGEMHFNTFKFLGYDKDENGKLIINREQAKTVRRIYRDFLWGLNPAQIAKELEEEQVPGCLGQTKWYASTVAGILKQEKHMGDALLQKTYTADFLTKRQVKNNGEVAQVYVKDSHKGIIDKETWNAVQEEFDRREKFMQKHGTDRYSYGSECYPFCEKIFCGECGSLFTRHSWKSRGIVQWQCKNHRKDGKVACTNAYVDNADLEKGFVKAFNRLAGEREKHMERWNAMKADGTPLEKIRAVQMMEATENGQLQKYVPEAAQLLLEEITIFGAKKYEFAFLEGSRVKVSA

SEQ ID NO: 4942 - protein, 416 aa, synthetic construct
MEICKLPPKPTQLRLTRVAAYVRVSRESERLTHSFSAQVSYYNKLITNTPGWEYAGVYSDYATTGTSTTGRGEFNQMIEQALAGSIDIILTKSISRFARNTVDLLSTVRALKAAGVSVRFERENIDTANAEGEVLLTLLASFAQAESESISANAKWGIRKKYKDGLLHSRHPYGYLYHHGQLDIIEEEAVIVRRVFAEFLEGISPEKTCKQMNQEGLRSRGGGKFSASVTRDWLENPTYIGTAILQQYFSAHAGDNTPTLNRGELDKYIVEDSHPPIIERSVFDAVQAELARRRATGGRGLTPTGGSSALTHRITCTICGRNYHRRTRRLAHSTYKYWWCETATKGKGNPCHAHQLREENLHTIIKRLLGLHAWDDQQVVDRIERIKASPNWLLTIHLSSGNTTMINCRTGEEVTA

SEQ ID NO: 4943 - protein, 609 aa, synthetic construct
MAEITKIEAFKPQLAPKKRVAGYARVSLEKGRTFHSLSAQVSYYNKLIQGNPDWVYAGVYSDSGISGTSKNRPGFQQLLTDCRDGKIDVVLTKSVSRFARNTVDLLDVVRELKSIGVEVRFEKERIHSLSEDGELMLTLLASFAEEEIRSISKNARWSVQKRFEQGIPNGRFRITGYDWEGDRLVINEEEAEIVRTIYRRYLEGASRVQIAKELNSEGITTINGKKWSDSNVKSILRNITFSGDLLLNKEYVADPITHERKVNKGERPQYLVENHHEPLISKEDWNAVQAEMKRRKLAGPLGNPAIPTTCFTSKIKCSKCGYNYRRHVSRRKNDDYPFWGCYGKDKNGTIFCDTGNIPEEALQDAVCEVLGLETFDSDAVTTQIDTITAGENRELVFRLMDGREVQTIWHYEKNARKAYWTKEVREKVSQERRNKHQHKLKNAATAFTGMIRCGNCGQSFSSTKRTFKDGTKTCYLSCRSPLHICPSNAIQEATLKALVCDVLELEVFDEAQMDAAIDYIEIAKPTATFHFFDGRIEKRTYHEKKKSYPCTPEQKEAMSAFMKTYWDDPEKRKQVSLFFKRLRKEKTWSSRSRQSRPKSSPSPSHPSTP

SEQ ID NO: 4944 - protein, 527 aa, synthetic construct
MAKQVTTIPASIKPFSKTPLTTSRKRRVAAYARVSTDSDEQFTSYEAQVDYYTNYIKARNDWQFAGVYTDEGITGTNTKKREGFKCMVKDALDGKIDLIVTKSVSRFARNTVDSLTTIRKLKEHGTECFFEKENIWTFDSKGELLITIMSSLAQEESRSISENCTWGQRKRFADGKVTVPFKRFLGYDRGKDGNLVVNPKQAKIVKRIYAMYLQGKTYHLIAKALTEDGIPSPAGKPRWNPSNIKSILTNEKYKGDALLQKSFTTNFLTKEHKINEGEIPQYYVSGNHEAIIEPEVWELVQREMERRKNEKGRHSGVRLFSGKIYCGECGTRLGSKVWHSNDKYKQVIWQCNRHCKKNSPCKNGVHLTDEELKAAVLSATNKLIENKDEILNSFQEIVGGVYDTHTLEGEKAKLESEMDVCAKMIEDLIRQNAAIPQDQSEYQAKYEDLERFYNEKKAALAKVEGKLKKMQATKADIKFCLKQLQKQDRLLQTFDEQSFCALVDHITVFSKEDIRITFRNGSEIKAL

SEQ ID NO: 4945 - protein, 588 aa, synthetic construct
MVEIIKIEAKKSPLPNRKKVAAYARVSMETQRLHHSLAAQISFYSDLIQKNPEWDYAGVYADEGISGTSVEKRPEFMRLMKDCKAGKIDLILTKSISRFARNTVDLLKVVRQLKDLNIEVRFEKEKINSLSDDGELMLTLLASFAQEETISISNNVKWAIRKRMSEGNPNIRNNVYGYRWKDDTLIVVPEEAKIVRRIFQNFLDGKSRLETEREFAEEGITTRKGNRWTDSNIKVVLTNVTYTGNLLCQKEFVEDPITKKRKKNRGELPQYFIANTHEAIIDKETFDYVQEEMARRRALGPRANKSLNIYCFTGKIKCELCGKSYMRNVRNNRAKHSNLGDKVISWVCGSSKKKYSTCSAKAIPDRILKTCCAKVLGLEDFDDAVFNEQIDKITVPKQGVLIFHFKDGHSITETWENNAKKESWDDAARKRASEYRRTHAMKRSDVTCFSTKIRCEHCGCNFRAQTQNCSTSPSGKRRYWRCAEHNGCDTRGLRDDLLRSLTAEVLGLDAFDDAIFLSKIDHISVLNREDLVFHFYDGHEISRKLIQPTHEGHKWTEEQHTKFQTSIKDFYTSERYKQMRKEKKWQNK

SEQ ID NO: 4946 - protein, 551 aa, synthetic construct
MKGDELRKTRAVTYVRVSSAAQVARGQGAESQAARCAEFARMRGYEVEKVFADKAVSGSLVERPAMKELLSFLRKNKKDKVVVLIDEISRLARGLEAHISLRVLIAKAGGILESPSHEFGDDSDSQLVEYMLASVSQHFRMKIKETTRHRMEARMRSGFWAFYAPWGFSYVKTKEHGNVLVRDEPLASIIQEGIEGYANGRFQTQAEVARFFESREGFPKDSRGKVRIQRVKNILTRRVYAGLVEYEPWGVTLREGYHDGLVSVATFDKVQERLAGKAYAPVRADINEAFPVRGAVECADCGHALTACFSKSKTGKLHPYYLCHHKGCVSYRKSIRRDDLEGAVEAMLETLSPSSGMFEMIKEMFADAWNQQQAQAQIIAKNIRVEMNKLEKQIDGIVDRIVDATSERVIQAYEQRIETLERKKLVLSEKLQNASKPKRTFEEMFELTMGFLSRPCNIWKNGGLAEKKTVLRLVLSDRLQYSRESGLRTPRIARVFSIMKGENMTDGKMADWGGFEPPTPWFVAKYSIQLSYQSAPRRTREYRKQASMASV

SEQ ID NO: 4947 - protein, 465 aa, synthetic construct
MARSITVIPASQPYRVGGRTQQKTRNLRVAAYCRVSTDQEEQLNSFENQVEYYTKYIQDNPLYQMAGIYADEGISGTNTKKREEFKRMIRDCEEGKIDLVITKSISRFARNTQDCLEYSRRLKNLGIGIFFEKEHINTLDASGELLFTILSSLAQDESRNISENCKWGIRSKFKKGIPQVDCTKFLGYDKGEDGKLIVNQEQAKIVKRIYREFLNGYNPAAIAKMLMEDHIKTGTGREEWRSASVRAILKNEKYMGDALLQKTYTADFLTKKVKKNHGEVEQFYVKESHEAIIPKEQWEAAQLELERRDSYMQELGLTFYGYGSEVNPFSCRVVCGKCGAVCGKKSWKSRGVEFWQCNNRSKNHGVKGCASENLPHENLLKGFVTAWNQIVAEREQYLPKWEKKKKEGNPLEKLRAEQMIELTLQPPLTKMLPELGQMVLERVIVQGKEILFIRFLDGTEIKVRI

SEQ ID NO: 4948 - protein, 498 aa, synthetic construct
MQIEVRKADMGKEKKRLKVCAYARVSTEASEQENSLENQVSHYTEMIQSNPAYEFAGVYADFGISGFKESRPQFQKMMQDAKNGKIDLIITKSVSRFARNTAIVLKASRELKERNVGIFFELQNINTLTEAGELLLTILAAFAQAESESASESSKMAYLHRIENGEVVAYLERSYGYEKDENGEYRAKEPEASVIREIYDLVIQGVNCTNIARVLNARNIQTVQGAEWTASTVFRIVENEIYKGDVLMQKTFIDEKRHQVQNRGEKAMYYAKDNHPPIVSEKTWEKAQRKLEDMRAERAEHSVIQEFTEENYPYMNHIFCAKCGWPLKPRVYSHGHRLSWDCSGQKRGTKKFCTGIHVLDNDLRKMKIEGNRYFSETVDKYGEVHLKHVGERTWKNKHKKKKFNHKDLYPELNEENYPYYRRLYCARCGSRLGRYISHGTVRWICSSYKRKGQAKCPGVRIPDEIIKGWNLPDGKIYIMGKEDKNGEKHYSYTSESAL

SEQ ID NO: 4949 - protein, 456 aa, synthetic construct
MKRKEVAAGLVRVALYIRVSGEEQKIKGLSLEAQQERLEAYARERGWVIVGIYIDAAKTARKNIHKRTEFQRMMDSVKRDEVDILLFARLDRWFRSVADYYKVMEVLQAHNCDWKTTDEEYDTTTANGRLYINVKLSIAQNEADIDGERIDVVFDSKIAHGTVVSGSSPFGFRVGEEKRLEIIPEDAAIVQDAFNYFETTVSQRATTKYIREKYGVNWCYATFHRMLIEELYTGVYNRGGRYNANFCPAIIQREQFDRVQALLKKNVRRAPSGRVYIFTSVLTCEECRHKLSGYISQGIYYYRCNQHLQRGRCTHNRSVREDRVEQWLFDHLGEELERCKLEWEVQAAEKKRSVTSRDKAALKRKLTKLKELYVNELIDIDDYKKDYEIYTAALNQIPDTTQETPPDFAAVEKLLQKDFRKIYDTLTREEKRTLWRSVIKEIRIDNDQNITGVVFG

SEQ ID NO: 4950 - protein, 566 aa, synthetic construct
MNKHVFRNSAQNQTDAPRRVATYYRVSTGRQLNHEASIPSQRKVTAAFCDQNGYAIVEEFVEAKTATDDRRPVLQDMIDRACAPDHPYDAIVFYAFNRFFRNVAEMELTIRKLRKHGVEVVSVTQPTGDDPSQILVRQIIGAFDEHTSREISKNTTRAMRESARQGFWNGATPPLGYKIVEAERRGQKIKKKLGIDPVEAETVRLIYKLYMDGDGTTGPLGVKETTKWLNSHGYRTRRGVTFGVGPVHKILTNACYATGQWPYGVRSSRDGRKHDPSSVVNITVPILIEKSDFDRVQAKLTQNNPKTTPPRVVNGPSLLTGIAVCASCGAGMTRTGTTNRQGRSYSYYSCAGCQQKGKTVCNGRHIPAATLDDIVLTNLKTRVLAPDRLADLLKSLIERQAAKSESADQRLITLQKELTDVDERLRRLYRSIEDGIVELDEILRERTTALKSQRERAKAALDHARAQCSTAAAIDAGKIDAFARLMTEKLDAGDTNTRKAYIRSIIDAVEVDDRAIRIVGSKDILQAAVAGKQTENGNVRGFVRKWRARHDSNVWPPPSEGGALSS

SEQ ID NO: 4951 - protein, 550 aa, synthetic construct
MKIALYARYSTDNQRDASIADQFRVCRGYAEKQGWQIVDEYSDHAISGASLLRAGIQALIADALRGRFQIVLAEAMDRLSRDQEDIAGLFKRMVHANVKIITLSEGEVTHLHVGLKGTMNALFLKDLADKTRRGLRGRVELGKSGGGNSYGYDVVKQFQENGEPIRGDRVINTAEAEVIRRIFRDYVVGKSAKRIAAELNKEGITAPSGGDWGFSTINGNAKRGNGILNNEMYIGRIVWNRQRFVKDPDTGKRQARPNPAAEWIVQDVPELRIVDDELWASAKARQTAIKTKRGEDGREVQNSFRDRRRPRYIFSGLIKCACCGGGYAMISADLIGCSTARNKGTCENRKSIQRKRLEERVFNALRYHLMDPTLFKEFCDEFTREMNRLRMEGSATIEAARSEVRRIERELDKLLELILKGGAADAINAKMVQLEHRKAALERQLADAEIPPPLLHPEMATFYREQVSTLHTALQDDSEATRLQAGEVLRTLVKEILLTPEAGDLKIDVRGDLAGILAVSLKTKTPTTGAGVSQVEMVAGIGFEPMTFRL

SEQ ID NO: 4952 - protein, 566 aa, synthetic construct
MTLAPPAPPTSIDRLGETTTLAVSYLRVSTKEQAERGGRDEGFSIPAQRDANLRKARDLNAIVVEEFIDAGESARKADRPELMRMIEYVTTHQVAYCIVHKVDRLARNRADDVAIHLALKDAGVILVSATENIDETPSGMLLHGIMSTIAEFYSRNLANEVAKGMTQKAATGGTVGRAPIGYLNVHKRDELGRDVPTVIPDPDRAALVRWAFEAYATGNYSTSMLHSELVDRGLTTVPTPKRPAKAPGLSTIQQMLSNPYYKGDVIFRGARYDGLHEPLVSAELWYRVQNVLTARQVSGEKTQTHEHYLKGSVYCGDCGSRLMVTHAKNGKGVVYPYFICAGRHSKRTNCVRQAMPIEHIERQVEDYYRRVQIPEHVVTALRHMLVRQFDDLHAANKAERHTHAVERDRLRDERRSLLHAHHAGAVPLDLLKEEQDRIGRRLAFLDAQIDAGQIEYDQAKAHLEDCLTLAGDMHVIYMSIDDSLRRICNQAFFERIHVYEVENADRVEAEPGEPFDTLLDPAVHAAALAYEASVRAGEDVKPADVACLNIDTWVGDTRLELMTSSV

SEQ ID NO: 4953 - protein, 570 aa, synthetic construct
MTKAVGYIRVSTEEQAQHGYSLEAQAESISNYCKAMRWELIKIYRDDGYSASSLDRPALQQLIADIPLRSFDTVVSWKLDRLSRSPKDTLYLLEDVFEKNSITFVSVQEPFVNTKDPTSKMFTTILAAFAQHEREMITERMKMGKYQKARMGQFPGGHILYGYRKNPLTGEFEINEEEARIVRLIYHWYVYGDETGKPLGMEAIADKLTKMGVLPPSAVRGVRVGVRGKRGQKGEYVKHWSNATVRQILTHQAYIGKNYFGRNGKNAEPDKVEDDWIVIPFPPIVDEYTYQLAQERRNRAKFWQRKHETPLLTGIIHCGICGLQFRGTYDHGKTAVYSCYGRLKRYHRDGSPTCDSPRIPADWLDQQVVLKVFEALQKPEQMKEAIMAHLESWERRKRELELIVGPSVKQMKELQDEQERLNYLFRKGRISVSEYEKEASTLDKKIAELREQHKHQTNELRHLQKLEKDLDFIKQALENGYWKVEYEALQSELKMMWDTALTIDNKTGEVVVTTPRQEKKVTIDFSEAGKQVQEQEELLTFAIHGGGKIATRQLFDKLHITVHVYNLMIL

SEQ ID NO: 4954 - protein, 600 aa, synthetic construct
MIHPKEQLDAYIYSRVSKDVQVQGDGIRRQIDGAIRFVESKNKENLQNGLPTYSIADEFITDRGLSAYKGFNTAANGGLGAFLEAARKGEIKRGSLLVVEAVDRISRMPADESRKTFSLFKEYGIDVAIVKFGIIIKHSESTTLENDLLITAAIHLAHMESQQKSNRINDYFENKRMKEKEGGEKRTSICPSWMKLSEDKRSFELIPDRARVMKRIINMKLDGLGCHRIASALNSEGVPYFNGKTWSTEIVRKYCKMIQLYGAFQRVKHVRTNAGTKKQPWGDIEQNYYPAIIDEQTFLRLKKSFKRSGGRQTGAFSNLFSNLLFCPQCGSSMSYYKPNRGRKKVRCRKQIDNQGCTQRALNYEEIETRLVKALAGLDYAKINDSSFTDLSAELSSLEANIAELNENVEVVTKQLMENTNPRLYSILTEKLTKLDDEIHSEKAKFDELSILHRNYDTTIINSLKLDNNEDRERYNNFVKQFVKYIICTDEEQGGSLRVVFKADAIGELPFSFSDEKNDKAVSEVFTANRSISDTQAVRLINLDKSSSMYLPLLKEITDVKQPNDLSDSRELIRYMHAVRMAVKRNPSKWKEIAEQAKLRY

SEQ ID NO: 4955 - protein, 574 aa, synthetic construct
MKLAISLLRVSSDRQYQEGQGINVQKRTIDYFAERNEYAIVRYFVEHYSGRKADREVLEEIIEYLAKNEGEISALIVSQIDRFTRAGAEVYLYLQKQLRSLGVELVDASGIIQQPVNTLAHTGFSYEWSTRSPSRLTETIMAEQANAEATQILTRCIGGQIESAQKGFQYKSADYGFQNEKTVTSDGRKRTIMVKDETEAVHIEMMYTLRAEGHLSDTTICERLNNAGYESRPFRRYDKVTREVVGEGGRVKLTPKQLQKYIRRPVYCGIRIGKWTKRKAIWLPRECPRLVSIDVFNRANRGRIKITEVDNDLVIEENVGKQISTAETGDFLLRHVICCPECNKPFKASKSRGKSGGLFGYYHCSRDHKYFGVNAKVFEDTVAKTVRNIRFKKKLLGVLKEVVRDVWIKHHKADEIVKQQTKAHIEALRKRQTQLVGKISRCASDIVQTALEQEYEELEDNINSAVKQLSEFVNNDVQIETYFQKIKEAVEHPEKWLMNPQSKASTVKAWGFLFEKPPTWSEMESRTPRLALPFRFLTGSETKKGRLVEVASLESNTLIRHVKAFSKFNQTEFQ

SEQ ID NO: 4956 - protein, 566 aa, synthetic construct
MQRKTPVYAYIRMSTIEQAKGDSERRQLGQIERFLQENDGELVEPVFLDRLSSFNGKNIKKGAIKDFLERVKNGQIEKGSVLVIESFDRISRQGGYLAHAVILDIIKNGVDIATLSPYKKYSINSENQFIEGIEIQTLLYRAHEESRTKSDRITRQHQARREKAKDKSVVYGSLPFWLIRTKDWIEFKEPEASDVKTCLSLLKTYGMYTATAKINEQRKSSKIFSKETVSHLLNRSAVCGDLQTHRIEYDEHGNKIRVQGEVIHDYYPALISRSEFEELRAEIQNRRTTKSTGRVSGFKNIFRNVMTCGCCFSPMRLAHMKWKNGGKKYLVCTKSETNQCIEKGRLWFDYDDVERVFFNEVNLSILKKSLTQKTKVDDAEIEKLRSNFLKIEKQKSNILNAIEMGTVTKTLVNRLGELEKDSDETQKRIDELKAENALKRSQNEAEIFDYEQLDAALKDEEQRAIINKILRTNQAEISISKGGDGCDFVIEISINDKLETEISYHKQDDFIDRVEHQLPHNQTTDLVVHEDHTDPYAEENDGQVFRMFDSASMPIIEINQHKKTTD

SEQ ID NO: 4957 - protein, 489 aa, synthetic construct
MLKAVIYARYSSEKQNEQSIEGQIHECEQFARMHDMVVVNHYVDRALSGKTDDRPSFLQMIKDSATGSFDAVLVYKTDRFARNRYDSAVYKAKLKKNGIKIFYAKENIPDGPEGIILESMLEGFAEYYSAELSQKVKRGIKENIRKGLSFGGACPYGYKIVNKKYTVNDEQAPYVQKIFSDYASGRRAVDIFNELNSMPNYAGKGRKWNRSSLNRMLTNKKYIGIYELEDVCVKDAIPPIISEELFNKVQAIIVYNRRHTTKHRINYLLSGRLFCGLCNSPMTGKTGTSKTGVKYHYYVCSDKRCQQKKYRQDLLEDTVIQYTVRDILNPHNFKRIAKRCMQIQKENNPYDAILISLQKQLSDTNIKLSNIMKAIEAGIITASTKERLNELERQKFSLETEIKQQKMANNLLLTEEQIIYVLNEFYQKRVDKNFYNRIIDGFVHKVYLYKDKISIVYNLTGNGKELLKSDIDNLYKSSQADACGSPYDL

SEQ ID NO: 4958 - protein, 554 aa, synthetic construct
MARLISYLRMSTSEQLRGFSLERQRKLIAEFAAKNGLSVEEENTLEDIGRSSFSDDAQQKELAKFFENLNAGKYEPGDVFALENIDRLTRRGPVDAILKVNQIISKGLKLAIISGNEQRIIEDVNDVFTIINLSIDASRANKESKNKSDKGLSNWQEKRNLASTHKIAMTAQAPAWIDTEIFYIFDEEKKKNIKRRKYVLNEEKAEAVRLIFNLYSSGNGALKIKNILNERNIPTFKGAEYWEPSIITKILKNPATFGLYQPKKQGTGKRDLIAAGEPINDYFPPVITRDLFEQCERIREGNGTRKGRKGKLFTNLFTGLLKCVDCGGPVHLLNPGIDKRNKVQKSIYYLVCKRAKFTKECTTKRVRYDDFETALLKAIQEINLADILNENNPLETLIKKQRSKETEISKKKKLIENFQRQFLENDGDLPAFMISQAKEAEISIKELEEEQREISSEIAQLNVYNSNVDNAIEELKNDGTYETRAKINLVLHEIIKNINIDFDLADFAIIFKNGVKRFVNDGIVQNVYTTKTGSDQYYSEIEEILNHSITPPEK

SEQ ID NO: 4959 - protein, 520 aa, synthetic construct
MAEKNITVIPARKRVGSTAAKEKVKKLRVAAYCRVSTETEEQNSSYEVQVAHYTEFIKKNAEWEFAGIFADDGISGTNTKKREEFNRMIDECMEGNIDLVITKSISRFARNTLDCLKYIRQLKDKNISVFFEKENINTMDAKGEVLLTIMASLAQQESQSLSQNVKLGLQYRYQQGKVQVNHNRFMGYTKDEEGNLIIVPEEAEIIKRIYREYLEGKSLAGIGRDLEKDGILTAAGKPRWRPETIKKILLNEKYIGDALLQKTFTVDFLTKKRVKNEGHVPQYYVENSHEAIIPKELFLQAQEELHRRNNIYTGADKNKRLYSSKYALSTITFCGDCGDIYRRVYWNIRGRKEFVWRCVTRIEQGPKVCRNRTVKEGDLYDAVMTAINKLLAGGDNMIRTLEENIHAVIGDTTEYKISEINKLLEEKQKEVISLANKGKDYEFLADEIDKLREERQSLLVEDASLSGENKRINELIGFIRRNKYRTLLYDDTLVRKLIQSVTVYEEHFVISFKSGFEIEV

SEQ ID NO: 4960 - protein, 519 aa, synthetic construct
MKKITKIDELTKSQLSKNKLRVAAYARVSTDSDEQMVSLKAQREHYENYIKSNPEWEFAGLYYDEGISGTKKEKRPELLRMIRDCESDRVDFIITKSISRFARNTTDCLELVRQLLNIGVYIYFEKENLNTGDMESELMLSILSGFAAEESASISQNMTWSISKKFQNGSFIIGSPPYGYANVNGEMVIVPEEAEVVKRIFSECLSGKGGSVIAKGLNRDKIPARRGNHWSTGTVIDMLRNEKYKGDALFQKTYTDNNYNRRPNKGEKDQFYCKNHHEPIVSKEVFSKAQKLITQRAKIKAVNKKAYQNRYVLSGRIICGECGSTFRRKTNYSAGRSYIAWSCIGHIEDKNSCSMLFIRDGEIKATFATMMNKLAYSRKIILGPLYDAISKNQEECDLERIDAIDKRMEQLTEERNTLIGLMAKGFLEPALFSKERNALDSEIKNLTTEMTNLVMSFTSGTSQADEVKAILEHVSKDKFDGNYTDEIFEKFVENIIVNSRDELTFKLKCGLSLKERVVR

SEQ ID NO: 4961 - protein, 598 aa, synthetic construct
MILNLEVPLTKPLAYSYIRMSTDIQLKGDSLRRQTERSKKYAEDHDLQLVEDFRLEDIGVSAFKGDNVSSGALGKFLDAVKAGRIPEGSYLLVESFDRLSRQKLNASVALFFDITSNGINLVTLSDNQLYKAGEAEFAQLIMSIVVMARANEESEIKSQRLSAAWGAKRRAIGDKKLTGLCPAWLALSDDRKSFRVIEDRAQIVRRMFEDSASGQGSFVITRRLNDLGVPAFGRSNGWVQSYVTKILQARAVLGEFQPHTKQNGKRIPFGDPIPGYYPQIVDEELFLRAQFARGKRRIEGGGRKGEALRNLFTHLAKCGYCGAPMHFLNKGFGPGGGTYLKCSQALRGLDCVSTPWRYQDFERSFFLYVKEIDLGEILAASATKSDAIALGDRLTSLKEKRNQLEVQRERTYALINQAISIDFVSAKLKECENDLTGVDVQIADFELQLSAIREQQSISPDELHRLIDQLQVTEGPDAFAQRTMLAGRLREIVSDLRLDIEGTKPRMKKAETLFDQAGTDPLERQSILEAIQRTNIEANRYNRSFTVVLADGISRKIVLNNDDPTDFIAEVTINAEGTPSGTDRGSDFETLFGVSSAH

SEQ ID NO: 4962 - protein, 481 aa, synthetic construct
MFTTNKVAIYVRVSTTNQAEEGYSIEEQKDKLSSYCNIKDWSIYNIYTDGGFSGSNTARPALENLIKDAKKKKFDTVLVYKLDRLSRSQKDTLYLIEEVFIKNGIEFLSLQENFDTSTPFGKAMIGLLAVFAQLEREQIKERMQLGKLGRAKSGKPMMWSKPAYGYIYHKESGELIVNELEAIVVREIFKSYLEGMSITKLRDKVNEKYPKTPAWHYRIIRGILANPVYCGYNQYKGQVFPGNHEPIISEEVFNKTQEELKIRQQTAAEKFNPRPFQAKYMLSGIAQCGYCHAPLTIIMGMIRKDGTRFIRYECKQRYPRKTKGVTVYNNNEKCHSGAYEKSDIEEYVLKEISKLQNDKDYLDEIFSDSNTETIDRESYQKQIEELSKKLSKLNDLYIDDRITLEDLKKKSSEFTSMRTLLETELENDPALKKQKRKDDMRKILSAEDIFLMDYEGQKIMVRGLINKVQVTANDVFIKWKI

SEQ ID NO: 4963 - protein, 519 aa, synthetic construct
MGKEVTKLGPKFPEIIKVEKIKVAAYARVSTEKDEQHNSLEAQKDYFLKYIKNEPEWEYVGLYYDDGISGLSKKNRDGFNSLVKDALNGNIDLIVTKSISRFARNTVDTISTIRKLKRGGIGVYFQKENIHTLDSKSEFVLTLMSSFAQEESRSISENCTWGQRKRFADGKVTVPFERFLGYDRGEDGNLVVNPEQAKVVKKIYRLFLQGYSPFGIAKELTGEGILTPGGKKKWSARTVAAILSNEKYKGDALLQKSFTVDFLTKEKKKNEGEIPQYYVTGNHEAIIPPSTFDRVQRLLEQRKAGKNRISSVSIYSSKIKCGNCGSWYGSKTWHSTSKYRQKIWQCNHKFEEKCTTPHLTEEEIQDLFLQAVNRLVKNKKEIISNHKEMAKIIFDTSVLEKEKIELEEELNIVAEQVNDCINENARKVQNQDEYEIRYSSLVNRFNSTKVRLDEIKQTIIEQQSKRDEVEDFIKELEKQELMTEFDKNVWLSMVDYLTVHQDGKVEFTFLDGSQVELNR

SEQ ID NO: 4964 - protein, 560 aa, synthetic construct
MSKEKIKVYLYTRVSTSIQIDGYSLEAQKSRMKAFALYNDYEIVGEYEDAGKSGKSIEGRVQFTRMMEDIKTGKDGVSFVLVFKLSRFARNAADVLSTLQTMQDFGVNLICVEDGIDSSKDAGKLMISVLSAVAEIERENIRVQIMEGRIQKAREGKWNGGFAPYGYQLIDGKLIINEEEAIAIRTIFDQYVNTTIGANGLSKYLENHGIRKIPRQNGKNPLFDAGLIRKILKNPVYNGKIAFGRRTLEKVHGTRNEYKQVEQDEYLIAEGIHEAIISDELWQAAQVKLKSQAKKYEHVNKGKDVRTHLLSGIVKCPICGAGMFGNKCIKRRKDGTKYKDFYYYGCKHRLMNRGHKCTYNKQIREELLDDAVAEVIIKIVSNPKFASMMQEKINMKVDTSEIEKEIDNYQKELRKSHSTKFKLIEEIDNLDADDKHYKRRKQDLDDRLYRMYDKIEDLESLLIDAKAKKQTIEAEKLTGDNIYKVLIYFDKLYKVMNDVERRQLITALISEIQIYEEKQPNGQWLKSITFKLPIIDKDLNIGLDNDEQVECVVLLQRSKG

SEQ ID NO: 4965 - protein, 563 aa, synthetic construct
MQKIIYPYVRFSSEQQSGGSSYKRQLGDILKYAKENGYTVNDSLELRDLGLSAYNADHIKKGSLGDFFDAIDMGIIETDGTAYLCVEQFDRLSRQSLDDASDVLRKILRANINVITLMDKRVYTKESLNDLMSVMYSSMLMAQANEESAKKSERILKSFDARLDALHDGKQIQYVGVFPGWIDNKGTKKETNFVLNKKAEIVKKIFKMYINGTSFNEIARTLNYEKIPQVAKKRQRNFTNLWSSAKVNHILKNRCVLGELYIRKTGDTFKNYYPQIISNDDWDIVQSMTKTKKIIKTSGRNSINIFTGKLFCSGCGQKYYFETDDKTLKTGKKYYHMLKCSGRRGLQCKSASIKYDDFLTSMPNMFGLIDKKPQDYSDKIKKIKEKITEISGYSKDINEKLLLLEELNNNNELDFTIYLKESSKLQKQIRENDARIASFKVSISRLSSDNKLDYFDKNDPISIKKAKKFINDNFAGFIVSSDSRNCTALYNNGQIIHFKVKNSKIEKTKNIIEKADGFKEFFDLKEEVVQAYKNGTMDGRFAEVLKATNFWGIETPEKDYTLE

SEQ ID NO: 4966 - protein, 598 aa, synthetic construct
MDEKPRIAHIYSRVSKGTQVKGDGLRRQIEIASKFIEDVNISNSRDGLPVYTLADSPIYDRGLSAYFGLNTDENAGLGAFLKAAENGQVEKGTLLIVEAIDRISRLPVDDARALFARFKKYGIDVAICRFNLIIYHDKSSDLGQDLLITTAIHLAHLESEQKSKRIRARFTHKRLLEKEGGERRTSMSPSWIELSKDKTHFVLIPERARIVRKMVDLKLQGWGAHRITVYLNEQGCPCWNRSNTWYTKIVEKYLKMIQLVGDFQPVEHVHGEKGVRKEPVGDVIKGYYPALITEEEWIRLKASFKRSGGRQTGAFSNLFSYMLYCPTCGSCMSYFKPNRGRIKVRCRKQIDKQGCDQRALNYEEIEPRLIKALAGLDYAKINNNSFASLQKELNTLEAQVAELEASADDIKTQMLEESDPRIISVYVNKLKAIYTEQDKAKARFEKLSTQTSDYDVNTLEQLQLERNEDRERYNGFVRSFVKYVIASDSKLGKPLRIVFKSEAVGEVPVFFNDDKNNKAISDIFTAQKDVNEAAPIRLINMSRVHGNLGKLAAIDTVPVPDDLGDALERIKYLFAVRQAVLQNPEKWQAIADDARLFE

SEQ ID NO: 4967 - protein, 523 aa, synthetic construct
MAKTVRVIPASPKIFRPEVTEEPRRRRTAGYARVSTDHEEQASSYEMQMAHYKNYIESRADWDFVGMYSDEGISGTNTKKRDGFNQMIEDALAGKIDLIITKSVSRFARNTVDSLQNVRKLKEHGVEIYFEKENIWTFDTRGELLITIMSSLAQEESRSISENTTWGKRKQFAEGKTSVGYSTFLGYDKDFKINEEQAKIVRLIYKLFLGGRSFYAITKELEKRGIKSPSGKDKWYISTVRSILTNEKYRGDALIQKEYTADFLDKTRRKNTGEIPQYYVEEHHEAIIPPDLFDFVQTEIKARENGGKHSGVSIFANKIKCGCCGGWYGAKVWHSTDKYRRVIYRCNKKYSQKGKPCSTRHLTEEEIKRIFVKALNSLVEVKESVIAELRSLIDGICQTGELTEERNGIEQELAVLTERLEMLIHENARVAQNQTAYLKQENEIRARYLEKQGHIARLGERIAERESKRKTLEGMIQVVCGINGELVEFDEDLWSGLLEHIVVKEGGAAVVVFKGGVEIGVYG

SEQ ID NO: 4968 - protein, 497 aa, synthetic construct
MKIRRVQQTQTLQKKLRVAAYARVSVDTLHHSLAAQVSYYSTLIQNNPEWEYAGVYADEGITGTSTTHRTEFKRLIADCNTGKIDLVLVKSISRFARDTVDCLHTVRRLKEKGIAVRFERENIDSTSEDGELLLTLLASFAQEESRSIGDNIRWGVRRRFRQGVPNGHKAPYGYQWDGEMFRIIQAEGEIVKEIYQRYLAGESAYAIAKTLAGRGIRGRQGRPIEQTTVKDILSNISYTGTMALQKNYISEGHIRKRNKGELPIYMVEGMFEPLVSKDDFDKAQEIRKMRAERSANRNPVLLPFSGMVKCGCCGSGFSRRTAGKYRRWGCNTRERKGSTACDSRPIKEEELVAAVRALMEKDDFDAAELRHKVSKIVIHGDRIDFHLVNGRIKKTARIYNGQRGSNPFTNKVYCASCGSKCERDTWTRGTKVWACSQPRTKCRLKRLPESELKEAATFLFGDGYEGKIVQNVERIVISDDEVIFQFKEGGAYRWQRQ

SEQ ID NO: 4969 - protein, 523 aa, synthetic construct
MAKTVRVIPATPRVFRSEVAAEPRRRRTAGYARVSTDHEEQASSYEMQMAHYKNYIESRADWDFVGMYSDEGISGTNTKKRDGFNQMIEDALAGKIDLIITKSVSRFARNTVDSLQNVRKLKENGVEIYFEKENIWTFDTRGELLITIMSSLAQEESRSISENTTWGKRKQFAEGKTSVGYSAFLGYDKDFKINEEQAKVVKLIYKLFLGGRSFYAITKELEKRGIKSPSGKDKWYISTVRSILTNEKYRGDALIQKEYTADFLDKTRRRNMGEIPQYYVEEHHEAIIPPDLFDFVQAEIKHREQNGKHSGVSIFANKIKCGCCGGYYGAKVWHSTDKYRRVIYRCNKKYAHKGKPCSTRHLTEEEIKRIFVKALNSLVEVKENVIAELRSLIDSVCQMEELIEERSMVEQELRSLAERLEMLIHENARVAQNQTAYLKQENEIRRLYVEKQGHLARLDERIAERESKRNILEGMIQVVCGINGEQVAFDEELWGGLLDYIVVKEDGQVIVVFKGGIEIGVWK

SEQ ID NO: 4970 - protein, 499 aa, synthetic construct
MKIRRVQPSPILQKKLRVAAYARVSVDTLHHSLAVQVSYYSNLIQNNPAWEYAGVYADEGITGTSTAHRTEFKRLIADCNAGKIDLVLVKSISRFARDTVDCLNTIRQLKEKGIAVRFERENIDSTSEDGELLLTLLASFAQEESRSIGDNIRWGVRRRFAEGIPNGHKAPYGYTWDGEMFRIVPAEGKIVKEIFRRYLAGESAYAIAKTLAGRGITGRQGRPIEQTTVKDILSNISYTGTMALQKNYITEGHIRKRNKGELPMYLVEGMFEQLVSKVDFDKAQEIRKRRAEGAANRNPVLMPFSGMVKCGCCGGGFSRRTAGKYRRWGCNTRERKGRESCDSRPIKEEELVAAVRTVMEKDDFDTAELRRKVSKIVIYGDRIDFHLVNGRIKKTARIYNGQRGSNPFTNKVYCASCGSKCERDTWTKGTKVWACSQPRTKCRLRRLPESELKEAVASFFGNSCEGQIVQNVERIVISDDEVIFQLKEGGAYRWQRQCG

SEQ ID NO: 4971 - protein, 511 aa, synthetic construct
MAAMHLPFMDENPRYDVRVVAKYNRKSRGDSEEDLVKHDYILTEMCKRNNWKFVDYPEIGSGDSIELRPVFQRLLQDFEDGLFDAVLVVDWDRLGRGDMGDTDRIKKSLKKSNTLVITPGKWYDLNDDDDDFNVDAKAFIARQEYKMIKFRLNRGKKIGARLGRWTNGIPPFPYDYDPQRKGLIVNDYKHTLYRFIIEAALEGHVCDEIAWELNKQGIPSPRNKKWTGTTISRLLRDETHLGKIISNKSEGDGHAKKRPNAKELKKIPKHLWVVVENCHKPVKTQEEHDKLMYSLMKRRRVPSAALAGKHALSGIIRCALCGSVMQIYKTKTKIPQVRTCQHHDHYGNKCRNKGGTAEVLVNEIQVKLKQFEEQIISKIDSAEGDEVKVLRDSIQQKYREIKLKEEAIERLEEGFEAGLYTAERARKRKIKLEEELNTIQNELSILEKRLKSQDSVTDEERLYFIRNFWEQMQSSNTMNDLELNKCYKEIIESIIWKREDNGHPTIEINFL

SEQ ID NO: 4972 - protein, 539 aa, synthetic construct
MLRQATQNLITALYPRLSHEDELQGESNSISNQKRILETYAKQNGFTNLRWYTDDGFSGANFQRPGFQAMLADIEAGKVGTVIVKDMSRLGRNYLQVGFYTEMLFPQKGVRFIAVNDNVDSANGGMDNDFTPLRNLFNEWLVRDTSKKIKAVKRAKGMSGKPVTSKPVYGYLMDEDENYIVDEETAPVVRQIYQLCLAGNGPTKIARMLTEQQIPTPGTLEYRRTGSTRRYHPGYECKWATNTVVHILENREYTGCLVNFKTEKPSYKTKHSVENPVEKQAIFPDHHEPIIDTETWERVQELRKQRKRPNRYDEVGLFSGMLFCADCGHVMYQQRYQNKTRKQDCYICGSYKKRTRDCTAHFIRTDLLTAGVLSNLRQVTEYAAKHESRFVKLLIQQNEIGGKRKTAAATKQLEQAQERISEVSRIIKRLYEDNVNGKISDERFMELSADYEQEQRELKDRAAALQAELDKSQAATVNAEKFMGIVRKHLAFEELTPTLLREMIEKIVVHECSYDENGTRRQDIEIYYSFVGKIDLPEA

SEQ ID NO: 4973 - protein, 548 aa, synthetic construct
MRSANPFSETGTKAIIYCRVSSSKQKKVGDGLGSQESRCREFARYKGLDVVDIFQDDASGGLIDRPGIQAMLRYIRKRKNDPHIVIIDDVSRLARGLDAHLALRAAISDAGGVLQSPSIEFGEDSDSILVENMLASVSQHQRQKNAEQTKNRMRARVMNGYCVLARPPRGFRYEQTPGHRKLLVRDEPIASILQEAFEGYACGRFQTQVEVKRFLEGQPTYPKDLPDGTIRNQRIHDLLTQPLYAGYIEAPNWGISLRKGQHEGLISFETFQRIQERLNGTAKAPARKDISADFPLRGFVHCDDCGTPMTACWAKSKTGAKHPYYMCKKKGCESYRKSIRRDVLEGEFEELLQTLQPKAKLFELAKAMFIDLWNMRLAQADEIAKSLKTNVQKIDKQIEQLLDRIVEASNASVISAYEKRISKLEQEKLLTQEHIDNAGKPRHTQEELFELAFKFLSSPWKIWKNSDLAWKKTVLRLAFVEPISYSRNEGVRTPKIAMPFKALAGISCIEKEMAHRGRFELPTPRFVVWCSIQLSYRCLPVPRCRGST

SEQ ID NO: 4974 - protein, 513 aa, synthetic construct
MAKKIVTIEAVKPVCHQVDFLRKRKVAGYARVSTDHDDQASSYEAQMCYYENYIQSRHDWEFVKMYSDEGISGTNTKKRLGFQEMVADALDGKIDLIITKSISRFARNTVDALTTVRKLKEVGVEIYFEKENIWTLDSKGELLITIMSSLAQEESRSISENITWSKRKMAAEGQVTFNYTHVLGFKESKEGGFEIDEKEAEVVRYIFGLFLQGENPNSIAKILTDKKIATPAGKKVWSYSTIKSILSNEKYKGDALLQKSFTVDFLTKTRKTNQGELPQYYIENNHEAIIDKAIFDMVQVELKHERSRSTLSYFGKVICGCCGGSYGRQTWHSTSKYKRVVYRCNHKYKGEEKCDTPHASREEIEAWISQAISQLITNKDEIIRNLECLISVLAKSGQLEDELKTLESQLFSIQEEVEQLVNGKLTQNLYSQYDALVKNYHTLQKTYRDKQQVLQERKIKLKALNNFIDILRQQDKLVVVYDEKLFNTLVDKVIIYKDKQVEVHFKNEQVISM

SEQ ID NO: 4975 - protein, 537 aa, synthetic construct
MNTIRPLVSLRSPTAYSYIRFSSAIQAQGDSLRRQTKLAQEYCQKHSLTLSEQSFTDLGVSAFNSANTNEDNGLGQFLKALEQGVIPSGSFLLVESLDRLSRANVMTALSQLLNIIGHGITVVTLIDNRTYSSESETTDLIISLAVMERAHNESKTKSERIKAAWANKRANPTTTNRTSLAPFWLKLNKDKRTYTVIEKNAETVRRIFQMSIDGHGIVGIARRLNEEKIPSPKGGSWSNTSICRILNSKAVIGEYTPNIGRTSTNASISDYYPSIIDEDTFYFSQSRKAERSKPESAGRKTTFPNVFNQVAKCGVCGATMYYDNKSPTLKYLTCREFKKKNCTNRPIRLELMHHFVIEQFLHPQHFERFNELVAKGTTVDSNVAVLKGKLEASKETYKQLLSLASNFSDPVIQDEIKRRSESVQSLTQQIEAAKAQTIEATNSVHMNFRESCQLVADALQTETYGYQPTSLPNEELLKARVKLNRSLKQAFKEIQVSHCPDTKKASITANDFVFEAHKSAMKTGFNDTTWWVQKKEA

SEQ ID NO: 4976 - protein, 575 aa, synthetic construct
MTKIAYSYTRLSTEKQIKGHGFTRQREAIEKVCCQHGWQLSDQTFNDLGVSAWKGANATTGALSQFIDLAKKGAIRPNSVLIVESVDRLSRQQVDKSLRLMLELLEVGVSIFTLSDSKLYTTNSDSVMLDLMMWLMTAQRAHEESEIKSLRVRAAKKKNKELIRKGIIVTRKCPEWLTVSDDKSCFLVNNERAEIVRKIFTWYSQGFSTKPIALKLNELGIPYWGKSSTWSYRHIRSLLKHRGVIGEIQLLKRIDGRDVADGDPVEDYYPAIIDRGLWATCQQIKSSKTTAKGRVVERGMANLFRGLLKCECGSGLAINSSTVKGRTYRFLRCSQLKTTGCQAKNWHYEKTERILLIALRHSLSSFSEEDHAVSLRECQHYLARISEELKEKERQAENAINYLLDKPSKLLEARLQTLEDDIARLKAIQEQAEHRLEAVHYEKSTALDKVEELQRVLEDIANDDDSRHKANGLLRRLIDTITLGSISNPRSKEFMEVSGNDYHGLIIIKRRDGLELRIEVLKDYGLSISWEGDDFTVIECSPTQQLNSQHVSQRLVNLGGQTVDLWDDEGWVASS

SEQ ID NO: 4977 - protein, 555 aa, synthetic construct
MKLAYSYVRFSSPEQAKGDSLRRQTESARDYCERKGLKLADLTLKDLGLSAYHGVHFKDGALGEFIKAVEAEQIPKGAYLLVESIDRFSREKIHVAYRRFSELLELGINIVTLQDERVYTEASLNNLGDIMISLVTMSRAFEESDVKAKRLREAHAAKRAAARKNKTPTGYRPPDWLVQASQGYDLIPERVAIIRRIFQLTIDGLGAIAISKLLNREGVPTWGRSKTGWQTTYIKKLLRTRTVLGEYQPHKTVNRKREPDGEPIHGYYPPIIDPQTFRKADLAIRSRDRRPVSVRKAAVNNIFTGLVKCKNCGNTMHYVNKGRDSVKGGQYLVCSMARTGALVNGQKCSYSSMRYQVIEDAVLQIASIISLDLSPPDNSQELQSLRNELAVAESVRAELESTVESLIDKLEKVDDDELLLNRYNKRSQELKEQRQSCTEILKAIDELECKPTESHIFKKLSETLKKLKTEAADRENVVLRTRINSQLVSMLESIDIDGSNKLVSIQVDGTKTIDLRFDKRQKNYMVKPSWDEREFPPKTFAVKYATGSFRTQLFS

SEQ ID NO: 4978 - protein, 578 aa, synthetic construct
MEYVAYLRVSSYNQKEKGDSIDGQRKSITRWVTERGGNIIKWYIDDGVSAYKGKRNNFDLMLQELENDIVKVDGLIVYSLSRFSRNLLAQLEATKVLQRKEIRLISATEALPESYEESYVMSSILGLMNEHSSMQNGKVVRDRLRDTALKQCFTGGPIPFGYRSVTVTGETSKKRKKLQIQEEEAEIVREIFNLAEKGENGKPLGVKKIAERLNIDMKYKRGSKWEKNAICRLLHNKSNIGEFIFNPSEGDPVTVKIPSIISKEQFYNVQECLRLKDIFSSESRGIRSKNLLTGLLKCSVCGGSMVVTSGKNGKYHYYQCSKQVRHSPDSCSSKRIRKDEIEPIVKDKFVKQLLKEDHLKMIHYNAKQRLKEVNKLSSTDKAKISKKIGSLETRYSRLVNLIADGDLVPDERINKTLTGLSTQIDALEADMEKLKVRTNLPVKNFGSAWLEEFAKAIQIYLHGIDDEALKQLMLATVTSVKVVKTTKKLKFEGSNMAVLYLIANAKTGTDFSVPAFVTKWRRDRDLNPRYAINVCRFSRPVLSTTQPSLRCGRYNKEHSPTCKVLNYNRSTVCLFYDH

SEQ ID NO: 4979 - protein, 577 aa, synthetic construct
MEVEVIKAKTNFDNSAAVGRKDRLRVAAYCRVSTADEEQIKSYDSMVKYYTDLIKKNPDWKFVEVYADKASTGTKAETRENFQRLIADCMAGKIDMVIAKSLSRFARNTLDTLKYVRQLRTKNVAIYFEVEKINTIKDGEFLLTILSSVAQQEVENTSAYVKKGLKMKMKRGELVGFQGCLGYKYDIETKTISVDETEAETVRYMFERYVAGAGSTMIARELNEQGIMTIRGNPWTSSSVMGVINNEKYTGDILLGKTFTVDPITKRRLDNLGEEDRFFIKNHHEPIISHETFEKAQALRERRNGGRQHHVEIGKREKYSRMFAFSSLIECGFCGGHLTRRKWHSSSKYKKTIWQCVTSTKGGKKLCPDSKGIPEQVIEEAFIESYRLLCSDNQEVMNEFLSRIEKTLGDDANEKNYQKAKKEVKQYKEKRKKLLDKYVDDGIDKETYMSMDAEYEVKYAEAQSQLEYYEKQVQGDDSLRKRIEGFRKTLTQNQVLEEFDRAVFESIVEKVIVGGYDDDGNADPYKVTFIYKTGFKDSFDHAKTKFGPKSKKSDENVSSNSSVHQENQCSNHSVDTC

SEQ ID NO: 4980 - protein, 626 aa, synthetic construct
MGVNTEQIHQEKIAYSYIRYSSKRQEFGDSFRRQTQQTKDFCEKFGYTLANQFEDLGVSGFKDDQEALQAFIRDCESGKIKKGSLLIVESLDRLSRQHTKVALRQMLQILEHVDIYSHHENKYYRSESDNSDNQMLDLMMSIMIMSRAHNESYEKQKRLKEAWDEARSKAQKGIEKAKGSLPHWLSLSDDATKFIVKENRTDIIFTMFELSASGMGSTQIIKFLNKNIDKYPSPSPKTKLWVRSTVKNILKDKRLLGEHQFFKTDPTNIKKKIPAGDVIPDYFPKVIDEELFYEVQAGMRSRKIKAGRVSSTHFPNVFRHILKCGSCGASMAYVNKGLMNAKVRKPTKYLACSVAKKSDECSQNKHFRYEPIEHMMIHLASANGFMPKVESSADLTVRYEKLLDTHEKEQKQLEMLLSRDLSSTKVLDKIEALDRSVKHIASEIQTLEDLIAANKGQYEYEDLYRDLVLLDDEVMKYSNRAQFNAHLQQDIKEAVLFHEYDTPYLAFKMKDGVVHTAMLDQQTTFGGCTLADGSNTFKRLEGQNSVEDDERLWELLKYFGDIADDLKQADLYEHHRKEVQEVMQKLSFKISKYMQEPFNEGLFEEIYQLSDRVYEEIGKKEKIFIG

SEQ ID NO: 4981 - protein, 522 aa, synthetic construct
MTTAYSYIRFSSAIQAKGDSLRRQTQLAQDYCLKHSLTLSDQSFTDLGVSAFRSANTNEDNGLGQFIKALEQGVIPRGSLLLVESLDRLSRASVMTAMRQLFNIIEYGITVVTLIDNRTYNSESETTDLIISLTVMERAHNESKTKSERLRAVWANKRANPHTTTRHSNTPFWLSLNEDKRTYSIIEPKANIVRRIFQMSIDGHGVISTCRILNEEGLKAPKGGTWATTSIKKILDSKAAIGHHTHIINNKVQLSTVPDFYPPIISEETYYLSQAKKKERHKPDSAGRKSAFPNVLSQVAVCGSCGSHMLYDPKSPQWIYLTCREFKKNACTNKPLRIELINRFIIEQYLHPQHIEKHVDLVKKGSTSTDQINVIEGKIESAKEALKQLLTLSSDFSNSVIQDEIKTRSESIQSLEQQLEEAKALSVESITSIRMDFREACQLVADALQVQVFDKKPATLSKKELFKVRVKLNRSLKKTFSEVRVSHCPETKKASITANDFTYEAHKLAMTTGFNNHTWWAV

SEQ ID NO: 4982 - protein, 618 aa, synthetic construct
MIKKSKEPQVYSYSRFSDLEQSKGSSLARQEDYAKKAAKEYGLALNDELKMEDLGKSAFRAEHKKAGAYGAFLQAVNKGWVAKGSYLIVENFDRLSREQARLAQKDINELIEADINIITATDNQLYNKKTIDQNPYLMFLMTGTMIRAHEESLTKQKRSISAIEKKLNKFRDGKPVDVGGPLPFWLERIKDDPDKLFDYSDKVEAARIITKGYLSGRSYGQIQDQLTEHGIKTPKGDERWGTTTISKVLENHALYGRKVVRLPETKDGTKEAQEHTLDNYYPALISKGDFDLIQQIKKVKKKGRTGYRFNSSKEDGVKSVVYLLSGYGRDKDGKARSVCSKCGGGLGSRLVDQYTRKKEYVRTVMRLDCLNRTRKKSCTAKGIAQSGLEKSFLLAISDHIDYSLLNKEDSDVRAVEVIDSKIEELDGIIERASDLYLLGKSSASREKAKAQLVAAEAERELLLSEKDEGKEFVISPHAIREFQDFVLRAYEDDNDFEARRYVKDILLQCVEKLVVDTQPKDVASLGFSNLYKDARVWTVKVDFRSGKRITVYHDCDTNMSLFNMIEGGDSTFHSYTPEALQIFDSQGPEAFVQHLRETGFGTNTGYIQDFISTLEEGK

SEQ ID NO: 4983 - protein, 548 aa, synthetic construct
MPLGDRGRVVSFGCTPLVFGLGYDADTSVRGRRGFVRKFDVQRDCGPTCGVSCGLISYARISADTKKDEHGVEGQHAQNQDTALYHGERIVCKLTDNDLSISAGKDDVYREDFEKLIKALVHGKCPCHGYVIHGVVVTFQDRIARTFANWERFTDALTYHDGRTYIQENSRKDPYSEGFVWEGAAGMVGAKQEPKRISKRLRNSHRNRAAAGKPVGGSRPFGWSPDRKSLDPSEADWAIKAIRGFAAGVTLYSLVRDMQNAGVKSTKGNEWTTDSLRKFLRNPRMCGWRELNGELVYGSDGEPVVGEWDTLVPPEIYLAVKARLQSRRKAHIERGGSVGVPLAGDYSARRYLLTGYLRCGKEYTGSQCLTKFRASPYSRSIGVPGHQYHCHSKARGGCGGNYRNGERLDLYVVEAVLAQLERYASEDTSPSPWGREDEWERALANRASLIAAYANGAGSIAPESFYDVLLPGAEAAIKELRADRDRHNAAQAQRSALPADVRGEWERNTDLGWRRAVIGRAVSAVIVRPLGHRWAPWEGSVEIIWRQR

SEQ ID NO: 4984 - protein, 534 aa, synthetic construct
MRQAYSYVRLSSKKQIFGYGEDRQWESIEEAALTNGWELSDKTFSDLGVSGWKGENIDTGALSQFLRCVEDGYVAKGSVLIVENVDRLSRAGVNRAVSLLMQLLDSGISIYTATDKKLYEPDSSSPLIDLMAWALSAQRAFEESERKSHMILNAKAKAREEARATGKIITRRCPSWLQVNADKTAFETLPERVETLQKIFELYTNGYGTPRVARYLTDEGRKPLTGRAWYPRSVSRLLQYRAVLGEYQPTLNGKPEGDPIKNYYPAIITEDLFNEAQAILKEGGAGKGRRGNEMRNYFAGLLRCSCGEGMHIVSTCTKGKRYYQLRCLQYTISCYAGSWNFNKLASYVLFALRRLPILEVMGSNDNGNVKELNDKVRDLSALLEDSRKQLDNTINAIASLGLNDMLQAKFRELTGSVADIEIQLATAKTSLDASQGQLTIQKQDSEMLSGRFLELIENTKELDGRIKLNQVLRRYLSKIEMEADRDTDHRYIRIYRKDGELLVTAQCDHRLNHALFESAEGTETMEMKRKGGGL

SEQ ID NO: 4985 - protein, 644 aa, synthetic construct
MFNFDKSKYKGICVPYARFSTDVQDEIGRKSLERQIEEAKRFSNEYGLFFDEDIAFVDRGVSGFALSGDTAKTFQKGQMQLMLELLEEIDVAEREFIYITFHNFDRFSRMSPDVASRYFEQILDKGFNIVTTIDNEVYKRNSGNLEQMIISIIHMSTAYYESEVKSIYISDSRQRKRDVIEYLYNDEKQKGKHRHVGIKACCPRWIKTKDIIYEYVGKDGSVKKEALKRFEIDEERAKIINYIFDLKIQGLGNGKICQVLNEQNIPVFHSGNYTKAKYWNLSTISNYLKNENVIGHSYLYHKAKEEVFNEKTQTFSTKRVRKIATDKLYNYYPPIMSEEKFNQAKEAVKANSVKVDRSKSSEKPHMFSNLMRCSCGTRLHYKLTKKNNVKKVDDYFEYLKCERSALNDGCEGENINYKNFEAQFINFIRYIDVNEILDHANGEEAETQGLTELEKREAAINLKITGLTKTYQGLINAGVDGSDVLVELEKAKGELQEVEFEKSKLLNSMKSQTSSSSESIRQKKSALKSKVFAEKVEARKAVNELLKQKIRWMEVYATAYAKFVIVCFVDNVIRTYAYQDEFATDLMFNTIKINTDGLKGYEADELMVLMIKTVRESLAGMNEVITNTDLKIKLAAVKSEYMSK

SEQ ID NO: 4986 - protein, 664 aa, synthetic construct
MFSFDKSKFKGICVPYARFSTKGQSKIGKKSLERQIEEARRYAKSNNLYINEDLIFADKGISGFAQQGNIAKAFKKGQMQVMLALLEEVPYQEREFIYVTFHNFDRFSRMSPKQARTYFDLILQKGFNVVTTIDNQLYTRHDKDLGKMLISTIKMTTAWEESQVKSIYIKDALARKKKVVEYLYNHPSQKGKYKHIGVVQPNMPRWIDHEKIELTYTDESGSKRTDSFKKFTLNKEKTKIVNYIFDLKIQGLGYARICRRLNEEGIPTFDQGKHRIAKKWHIFGVQNLICNEMVLGHITLHTHNEEEYMCEIDKVFKKRKIKQTATEKLYNYYPAAVSEAKYLEAHKNTIQQDKPKKLGRIGERTNIFAQILLCECGGTLQYRRTKKNKKKTESVSVNEYLQCNNAFVNHKCNSQTINYTMLETAFFRYVKNIDFKKICSTTNSKHALKIIDLDTDIKELTDEIESLKLREAGLAKTYMSLASAGLDGSTALIDREKTKKEIAEKVLELENLELKKKGLEIEADKDNREFVDINDYMLNKDNYSSDEKIIIRKKINDFLHSKIEWMEVVSTERQKFVIIAFHDTVIRTFAFDDRCANDLMFNEIDVDLSGLNRVQASNLMFTLIKAIRNSLKGVEAVITKADLISYLQHIKQDYLNNIGEQASV

SEQ ID NO: 4987 - protein, 609 aa, synthetic construct
MNLCGSGMKKAYSYIRYSSPQQASGDSYRRQLAATQAYCDANGYELDTELSIYKELGVSGFKGDQEHLKQFINDCETGKVKKGSLLVVENLDRLSRQAINVAMRQFLSLLEYVDIYTLQDKKHYSNSDGRDSENQLLDIMTSLIIMSRAHEESLTKQKRLKESWANQRKNAHKIKMSGVYPHWLIRSEDKKEFYLKEDRVKIIRHIFDLCINGQGATQILRSLNDNVEKYPPPSSKKEFWVRSTVKRLLSDRRLLGEHQLYKGHHAKREPVGEPIKDYFPQVIDEKTFVNAQISLKSRKIGAGKVKADSFSNIFRGFLRCGHCDSPVEYVNKAAKQASTLYLTCSNAKRGGDCNHSRHYRYVPLEHMLVHLSTANGFMPKPEKPGDLQQQLELATSKREQTNSRLSTLLERDFTAPIIMSKIEELTQDLAKFESEIAEIEDKLLALKSDYDYEDLYHDMVVETDSTKKFSNRVRFNSNLNKKIDTAYLYSIGLLPSIVFTMSDKSVHSLIIDERYNFGGCSIKNEEDTLIRLNGESVEAVDQMIWQMITQSIDLLGSIDNDNEQAVKTGRKISLLISKFVMNSQNHSLLDELQTVLSEFQDIQYKSEIC

SEQ ID NO: 4988 - protein, 562 aa, synthetic construct
MQKIIYPYVRFSSEQQSGGSSYQRQLGDILKYAKEHGYTVNDSLELRDLGLSAYKADHIKKGSLGDFFDAIDSGVIETDGSAYLCVEQIDRLSRQSLDDASDVLRTILRANINVITLMDKKIYTKESLNDLMSVVYSSMLMEQANKESAIKSERILKSFDNKINQLNNGEPIQYVGIFPGWIDNRGTKQKKDFIVNYKAKIVQNVFKMYIEGTSMGDIARIFNEKGIEQVAKKRHKNFTNSWSSAKINHLLKNRCVLGELCIKKTGEVYKDYYPQIISIDDWDVVQSMTSTKKTTKTSGRKSINIFTGKIFCSGCGQKYYFETDDKITKKGRTLYYMLKCQGRRVLGCKSKSIKYDDFLSSTPNMFGMITKTKKDNSEEIKKIKQKISEISYETKELEKKINTLESMNDNGILDYETYLKESSKQRKKTRVNDTRIADFKANIARLSSDNKLSYFDKTDPVSIIKGKRFVNENFAGFVISSDSKACTALYLNGQVIHFVLKNSKIEKQENVKAVDGFREFFELKQEILDAYRGGKMDGRFIEILRATNFWGVDTPEKDYSFE

SEQ ID NO: 4989 - protein, 616 aa, synthetic construct
MKPRAYSYIRYSSPQQAKGDSFRRQFAQTQKFCEENGYELDTELSVYKELGKSAFKGEQENLKRFIEDCKSGIVEKGSLLIVENLDRLSRDTINKAMRQFLHLLDYVNIYTLQDRKFYTSNDDVDNDAQVFDIITSLLIMSRAHEESQTKRKRLKESWEAKRQQIDKKKFATSYPHWLVLADDWESFSLKEDAVRAIRKIFELCIDGNGYNQILRHLNDKIEQYPTPSKRSKSGLWVRSTIQLLLSDRRLIGEMQMYKGAYKNRKPYGEPIADYYPQVIDEETFLKAQIAMQSRKVGKGKTGKYRFSNIFRGFLHCAECGNAMEYVDKGNTKKRSQKYLTCTSAKRGGSCTHSRHYRYEELELMLLHLVTENGFLPKPAEPNDLHLQVQKLKEQKASADNKLNALLEHDFTAPAIMTKVQELNEQIARFDAEIKTIENKLNQKTITYQYDQLVYALIDEPDEEVKFNNRVNFNSNFSTKVKRANVQNDINCLLVEFVMENDEHHRIILDSKYNFGGSSLSSGGSVYKRLAGEEFIHNGTSKESNIWHNLQRYIEWHFEIKKKSFTPENKKLIEINIKKMALDLSRFIIKPTDDTPLLNMFDMVIETDRLIKSNELR

SEQ ID NO: 4990 - protein, 556 aa, synthetic construct
MKVAAYVRVSSYNQKQTGDSISGQKEYIKNWANLTGNEIIKWYIDESASAFRDLRRYNFNLMLQDIKNPNSEIEAIVVYNLSRFSRNLVNQLTAQNLLETYNVRLISASEGIPDDHNTARLHTSFLGILNEHYSRQNSAVVTDRLQDTARKGYFCGGPIPLGYISVEIEGDTSKKRKVLAVNDDEAPIVKEIFSLAEKGIDGKPMGVKAISIYMNNKGALNRGKQWNRNSIDRVLTRRDYFGEHIHGKNRDPRKGLEPIIVNVPAIISKEQFFNVQDGLEYRGLKNNKNKCYRSDSLLVGMLKCSICNSNMLVVTGKGGKYKYYECSRKIRQDVKSCSSKMLPKPLIDNAVRRLLSDRVITEENINYIYKDLKSRIRTLVEKSARNVASINRRINNNNFKVNTIIEKIASRQLEPNTQINQYITDKRNELESLDRELVTALKGTKLPIKQFGQTQVAQLVKNLKEIVLTGDEARVKQILLILLKEVEITPQKKISILGFNMALVFLASHAKTGTDFSVPVIDTIWRRDRDLNPRYAINVCRFSRPVLSTTQPSLRC

SEQ ID NO: 4991 - protein, 572 aa, synthetic construct
MAAKKQTPPLTKKRVACLWRVSDKKQLYGDDIPLQRRACLDFIASKPDWVFVKDYTEGGVSGYKVSAKNRDAIQQAKTDAENGEFDVLLVFMFDRLGRRDDETPFVLRWFVEKGIEMWSVNEGQQKLEDHTDHLVNYLRFWQSSGESKKTSIRVTENQEQMAEDGLFTGGSAGFGYRLVFSGLKNKKGKDLFKREIVEEDAKIIDDFFTMAEEGYGGKRIAKFMNEERVPFVPSATGGNWTAGVINFILRNPLYKGFPAIGKRKSEMGVFNMQDPEEWILPKKQIPELVIIEADRWDRIQLLRKSRAPKKDGGDEGQEGITPSKLSKSPLLLIGMIWCGHCGAPLTTTYNRKTYTLKTGEQRVWTSPKYRCSGKASGKPCDGKTIHSPNIVESMVLEELDMYLDQLKEMDLTAEVNKYITNNLDNDLSKIKQLEKDKLQQEKELNVLTEEVTKSLLGQSSFEPKLLNSLIAKKREELNELVTAIAKEEVKVLEKKVEKSDIELLSKKIPNWKEVFGKSSLDKKKIMLSALLKSVIVKRDGIDINLKLHVTHFCKLANGSEFVLGGRAHRWQR

SEQ ID NO: 4992 - protein, 573 aa, synthetic construct
MKVAAYVRVSSYNQKQTGDSISGQKEYIKNWANLTGNEIIKWYIDESASAFKDLRRYNFNLMLQDIEKPNSEIEAVVVYSLSRFSRNLSNQLTAQELLETYNVRLISASEGIPDDHNTARLHTSFLGILNEHYSRQNSAVVTDRLQDTARKGYFCGGPIPLGYISVEVEGDTSKKRKVLAVNDEEALIVKEVFSLAEKGIDGKPMGVKAISIYMNNKGVLNRGKRWNRNSIDRVLTRRDYFGEHIHGKNRDSRKGLEPIIVNVPAIISKDQFFNVQDGLKSRNLKNNKNKCYRSDSLLVGILKCSICKSNMVVASGKSGKYKYYECSKKIRQDVKSCSSKMLPKQLIDNTVRKLLSERIITEENINYIYKDIKSRIGALVEKSARNVASINRKINNNNFKVNNIIDQIASNQLEPNAQINKYITDKRNELESLNRELVTALKCTKLPIKQFGQTQVAQLVKNLKELVLKGDEAQVKQILLILLKEVEITPQKKISILGFNMALVFLSSHAKTGTDFSVPVIDTVWRRDRDLNPRYAINVCRFSRPVLSTTQPSLRCGTYNREWSSRCKALNYN

SEQ ID NO: 4993 - protein, 529 aa, synthetic construct
MRKVYSYMRFSRPEQAKGTSIERQSNFAEQYALEHGLELDKSLTMMDKGLSAFHGVHKTKGAFGQFLAAVTAGKVPSGSVLVVESLDRLSREDPLIAQAALTDLILSGITVVTAADNQVYSREEIQQNPFKLIMSLVVMIRANEESETKQRRSNAFLKSALNQYQANGKVRRLGSDPSWLDFNKDNDTYSFNERVEVIRRILNLYNQGIGSLKIARQLTEASIPTLSGKRSAWGQTTVANIVKSHALYGMKRINVQGVEYDLEDFYPALITKSKWLALQQHRTKRSKSMHGRGEVVHLITGHGKGFTTCGYCGGGLGAQTQKQYKRSGVYSKTVTRLHCLTHKETSSCCSSVFLEPIENAVLFAACIGVEPQSLVPTVNNVNYSALIDEVDNKVKHIVEQVTAGAPWDLFKDAHDRLKSEKQKLIEERDSQKPDVNQSDVQKWVNKLVELADKARANDKEARLKCRTLISSICKSIVIKLRGHDLKSEPVVTITFVTDEQFEFKVGKSGSVQFVDNGMAVNRRLKPLLA

SEQ ID NO: 4994 - protein, 547 aa, synthetic construct
MRTAYSYVRLSSKKQIQGYGQERQWQAIQTAALAHGWELSEKTFSDLGVSGWKGANIETGALSQFLQCVEDGYIEKGSVLIVENVDRLSRAGVQRAVSLLMQLLASGISIYTFTDSKLYEPDSHNPLMDLMAWALSAQRAFEESERKSQMILNAKAKAREKARLTGEIITRRCPSWLRVNQDKTAFELIPERVETVRKIFALYVNGYGTPRIGRLLTEEGRKPLTGRAWYPRSISRILQYRAVLGEYQPTLNGKPEGDAIKNYYPAIIDEDQFNEVQAVLKEGGAGKGRRGKEMRNYFAGLLRCSCGEGMHIVSSCVKGKRYYQLRCLQYRISCFGSSWNFYKLSSFVLFALRRLPILEVMGSQDNNNIKELNAKERELTFLLEDTRRQLDNTINAIAALGLNDQLQSKFRELKTSVTNIEKQLSNVKTELETSQGKLVIQKQDSEMLTGRFLELIDSTKDIDGRIKLNQVLRRYLSKIEMHADKKEEYRYIKIYRKDGDELVSIQCDHSLKGALFESKDGLETFELLPATDAKRNEISNTLLCTPK

SEQ ID NO: 4995 - protein, 529 aa, synthetic construct
MRKVYSYMRFSRPEQAKGTSIERQSNFAEQYALEHGLELDKSLTMMDKGLSAFHGVHKTKGAFGQFLAAVTAGKVPSGSVLVVESLDRLSREDPLIAQAALTDLILSGITVVTAADNQVYSREEIQQNPFKLIMSLVVMIRANEESETKQRRSNAFLKSALNQYQANGKIRRLGSDPSWLDFNKDNDTYSFNERVEVIRRILNLYNQGIGSLKIARQLTEENIPTLSGKRSAWGQTTVANIVKSHALYGMKRINVQGVEYDLEDFYPALITKSKWLALQQHRTKRSKSMHGRGEVVHLITGHGKGFTTCGYCGGGLGAQTQKQYKRSGEYSRTVTRLHCLTHKETSSCCSSVFLEPIESAVLFAACIGVEPQSLVPTVNNVNYSALIDEVENKVKHIVEQVTAGAPWGLFKDAHDKLKLEKQKLIKERDSQKPDVNQSDVQKWVNKLVELADKARANDKEARLKCRTLINSICKSIVIKLRGHDLKSEPVVTITFVTDEQFEFKVGKNGAVQFVDNGMAVNRRLKPLLT

SEQ ID NO: 4996 - protein, 476 aa, synthetic construct
MKVVAYIRVSTHEQAEEGYSIQAQKRRLEAYAVSQGWDLVHFYVDEGISAKDITGRPELKRMLKGVQEKAFDCVLVYKLDRLTRSVLDLHELINLFEKHDVKFKSATEVYDTTTATGRLFITLVAALAQWERENLGERVSFGMEQKAREGKWVVAIPPLGYDRDGDYLVINESEAAIVREIYNLYLSGIGISKMALTLNKRGLRHKSGKPFTAESLRYILSNPVYIGTQRHNYRVNKERYFENENVIPKIIDKNIYDQVQLIREKRHHAHPRRANSPYIFSGVVKCKRCGRPLNGSYGIARGKETYRYHCANRKLGLCDLPSIAQNFLEPQFKAFFDQWDNFEVLDEALTEEENKSANKKKIASIQKELKEIENRKSKWQYAWVNEMITDEDFKSRMKEENEKEKMLLSELEALDESKTTHNINISELLMDMKENWDNMSLPEKKQFVQMTVKEIVVDKVSTEKKPESVSIEVKFH

SEQ ID NO: 4997 - protein, 530 aa, synthetic construct
MFMAAQVYSYRRFSSPTQKHGGSLQRQSDYAEEIAKEYGLELNQDLVMTDDGLSAFSAEHIKKGALGQFIREVDKGRVERGSILIVESLDRLSRELPLAAQSQFNELISKGITIITANDRQVYNNDTLANDPSKLFISIAIMIRAHEESLTKQKRSIAFIKQQTKKYLTEGKGDVAGSTPFWISKTNGIYELNYKAEVARMIVDAYLDNNGLNTISRELAKKKIKSPKNKDRWGVTTIRKVLDNTALFGQKKFDLTYLKDGKEVTEPVILDEYYPSLIDKDKYLMIQDKKRKKAGSRESYGSAVYLLSGHGAGRAVCSKCGQNVGSQLQKQKNRQGQYTKSEMRLHCNRNKESLDCCSSFRAQRLENAFVNAMVSLIDSDLLLNPTKNTTKERQNIEAKLDTIDTGMKNLIDRMALDIGDAALKMLDGKLMELDRERAILQSELDSLKSPPINLEGFSKLRNLAEKVKDFSNTSERREFKHVLLQVVKRIVIVFESESLIVEFNNGNKLYLNHESGKYNSTVEYDRKNLT

SEQ ID NO: 4998 - protein, 531 aa, synthetic construct
MAIAYSYIRFSSSQQSQGDSLRRQIQLAEKYCIENNLTLSDTNFRDLGVSAFHSTNSQEDSGLGKFLSALSQGRINEGSYLLVESLDRLSRAKVQTALRQMLNIIDLGVKIVTLMDNRIYDQESDTTDLIISLTIMERAHNESKTKSERIKAAWAHKRQNPKTTNRHSSTPFWLSLNPDKKTYSLKEKYVEIVRKIYQLSIDGWGVVKIVRHLNESNIKAPKGGSWATTTVSRVLTSKAVLGHYEPKQNRKSLNFVIEDYYPPIIQEDTYYLSKQRQNERSKPEAAGRKTDYPNPLNQIAKCKLCGSSMYYENKSKSLKYLTCREFKKGNCTNKPIRIELIYRFIYEAFNSPMFHQYQAKLVEKSNQKGSNRLEELTAKQTEEENALRGLLSLSNDFSNTIIQEEIKVRSERIESFKKQIENVKAEQAVEHTRSVHINFTEALQLAVSAFRFPLGEVEVEELSREELFNTRVRLNRTLKRAFNSLSIYHSGESKRITIETEVMEGFTEGLKYETTRQSIKDPVSSRIWSVC

SEQ ID NO: 4999 - protein, 547 aa, synthetic construct
MRTAYSYVRLSSKKQIQGYGQERQWQAIQAAALAHGWELSEKTFSDLGVSGWKGANIETGALSQFLQCVEDGYIEKGSVLIVENVDRLSRAGVQRAVSLLMQLLASGISIYTFTDSKLYEPDSHNPLMDLMAWALSAQRAFEESERKSQMILNAKAKAREKARLTGEIITRRCPSWLRVNQDKTAFELIPERVETVRKIFDLYVNGYGTPRIGRLLTEEGRKPLTGRAWYPRSISRILQYRAVLGEYQPTLNGKPEGDAIKNYYPAIIDEDQFNEVQAVLKEGGAGKGRRGKEMRNYFAGLLRCSCGEGMHIVSSCVKGKRYYQLRCLQYRISCFGSSWNFYKLSSFVLFALRRLPILEVMGSQDNNNIKELSAKERELTFLLEDTRRQLDNTINAIAALGLNDQLQSKFRELKTSVTNIEKQLSNVKTELETSQGKLVIQKQDSEMLTGRFLELIDSTKDIDGRIKLNQVLRRYLSKIEMHADKKEEYRYIKIYRKDGDELVSIQCDHSLKGALFESKDGLETFELLPATDAKRNEISNTLLCTPK

SEQ ID NO: 5000 - protein, 529 aa, synthetic construct
MTIAYSYIRFSSSQQSQGDSLRRQTQLAERYCSEHNLTLSDTTFQDLGVSAFNSANSNEDSGLGQFLSALNQGLIDRGSYLLVESLDRLSRARVQTALRQMLNIIELGVKIVTLMDNRIYDQESDTTDLIISLTIMERAHNESKTKSERIRAAWENKRQNPHTTNRHSITPFWLTLNSDKRSYTVEKKHADIVRKIYQLSIDGWGVVKIVRFLNDSEIPAPKGGSWSGTTVYRILNTKAVLGHYEPTQNRQSLNTVIENYYPAVIDEQTYYLSQKRKSERSTPESAGRKTEYPNPLHQIAKCKLCGSSMYYDNKSKTLKYLTCREFKKKNCTNKPIRIELIHRFILEVFNSPMYIKQHVELADKSHQRDTNKLLELEGNINEKKKALKGLLSFTNDFTNALIRDEVKTRSEHIQELEKQLESAKAEQAVERDTDTQVSFKEALKLTINAFQLPLEGKTELSTEELFNTRVRLNRVLKQTFNTLSILHDKESKRITIETEVTDNNKFSYKFETNKKAISEPLSNNIWSMY

SEQ ID NO: 5001 - protein, 598 aa, synthetic construct
MDEKPRIAHIYSRVSKGTQVKGDGLRRQIEIASKFIEDVNISNSRDGLPVYTLADSPIYDRGLSAYFGLNTDENAGLGAFLKAAENGQVEKGTLLIVEAIDRISRLPVDDARALFARFKKYGIDVAICRFNLIIYHDKSSDLGQDLLITTAIHLAHLESEQKSKRIRARFTHKRLLEKEGGERRTSMSPSWIELSKDKTHFVLIPERARIVRKMVDLKLQGWGAHRITVYLNEQGYPCWNRSNTWYTKIVEKYLKMIQLVGDFQPVEHVHGEKGVRKEPVGDVIKGYYPALITEEEWIRLKASFKRSGGRQTGAFSNLFSYMLYCPTCGSCMSYFKPNRGRIKVRCRKQIDKQGCDQRALNYEEIEPRLVKALAGLDYAKINNNSFASLQKELNTLEAQVAELEASADDIKTQMLEESDPRIISVYVNKLKAIYTEQDKAKARFEKLSTQTSDYDVNTLEQLQLERNEDRERYNGFVRSFVKYVIASDSKLGKPLRIVFKSEAVGEVPVFFNDDKNNKAISDIFTAQKDVNEAAPIRLINMSRVHGNLGKLAAIDTVPVPDDLGDALERIKYLFAVRQAVLQNPEKWQAIADDARLFE

SEQ ID NO: 5002 - protein, 529 aa, synthetic construct
MRKVYSYMRFSRPEQAKGTSIERQSNFAEQYALEHGLELDKSLTMMDKGLSAFHGVHKTKGAFGQFLAAVTAGKVPSGSVLVVESLDRLSREDPLIAQAALTDLILSGITVVTAADNQVYSREEIQQNPFKLIMSLVVMIRANEESETKQRRSNAFLKSALNQYQANGKVRRLGSDPSWLDFNKDNDTYSFNERVEVIRRILNLYNQGIGSLKIARQLTEASIPTLSGKRSAWGQTTVANIVKSHALYGMKRINVQGVEYDLEDFYPALITKSKWLALQQHRTKRSKSMHGRGEVVHLITGHGKGFTTCGYCGGGLGAQTQKQYKRSGVYSKTVTRLHCLTHKETSSCCSSVFLEPIENAVLFAACIGVEPLSLVPTVNNVNYSALIDEVDNKVKHIVEQVTAGAPWDLFKDAHDRLKSEKQKLIEERDSQKPDVNQSDVQKWVNKLVELADKARANDKEARLKCRTLISSICKSIVIKLRGHDLKSEPVVTITFVTDEQFEFKVGKSGSVQFVDNGMAVNRRLKPLLA

SEQ ID NO: 5003 - protein, 598 aa, synthetic construct
MDEKPRIAHIYSRVSKGTQVKGDGLRRQIEIASKFIEDVNISNSRDGLPVYTLADSPIYDRGLSAYFGLNTDENAGLGAFLKAAENGQVEKGTLLIVEAIDRISRLPVDDARALFARFKKYGIDVAICRFNLIIYHDKSSDLGQDLLITTAIHLAHLESEQKSKRIRARFTHKRLLEKEGGERRTSMSPSWIELSKDKTHFVLIPERARIVRKMVDLKLQGWGAHRITVYLNEQGYPCWNRSNTWYTKIVEKYLKMIQLVGDFQPVEHVHGEKGVRKEPVGDVIKGYYPALITEEEWIRLKASFKRSGGRQTGAFSNLFSYMLYCPTCGSCMSYFKPNRGRIKVRCRKQIDKQGCDQRALNYEEIEPRLIKALAGLDYAKINNNSFASLQKELNTLEAQVAELEASADDIKTQMLEESDPRIISVYVNKLKAIYTEQDKAKARFEKLSTQTSDYDVNTLEQLQLERNEDRGRYNGFVRSFVKYVIASDSKLGKPLRIVFKSEAVGEVPVFFNDDKNNKAISDIFTAQKDVNEAAPIRLINMSRVHGNLGKLAAIDTVPVPDDLGDALERIKYLFAVRQAVLQNPEKWQAIADDARLFE

SEQ ID NO: 5004 - protein, 550 aa, synthetic construct
MIYAAYLRISSYNQKEKGDSIDGQRKSIIAWVTERGGNIIKWYIDDGVSAYKGKRNNFDLMLQELENDIVKVDGLIVYSLSRFSRNLLAQLEATKVLQRKEIRLISATEALPESYEDSYVMSSILGLMNEHSSMQNGKVVRDRLRDTALKQYFTGGPIPFGYRSVKVSGVTSKSRKKLQILQEEAELVIEIFNLSEKGINGKPLGVKAIAEMLNKKKSFRRGTKWNRNSVCRILNNRSYIGEFIYNSSDSEPIVVNIPSIISKEQFHNVQEGLKSRDIFSAESRRIRSNCLLTGLLKCNVCGASMVVTSGKSGKYSYYQCSKQVRHAPDSCTSKRIRRDKVELLVKDKFINELLTEAHLREICYQAKQRLKEASKLLSFEKTKLSKKINHLEMRQFRLITMVADGELEPDARINKTITALSTQLDILESEMAKLTVKINLPVRNFGEARLVEVASALQGYLQQIDNEALKQLMLATVMSVKVVDAEKKLIFGGSNMAVLYLIANAKTGTDFSVPVFITKWRRDRDLKAISARSKCLFYSNLIAILKSRVC

SEQ ID NO: 5005 - protein, 644 aa, synthetic construct
MFNFDKSKYKGICVPYARFSTDVQDEIGRKSLERQIEEAKRFSNEYGLFFDEEIAFVDRGVSGFALSGDTAKTFQKGQMQLMLELLEEIDIAEREFIYITFHNFDRFSRMSPDVASRYFEQILDKGFNIVTTIDNEVYKRNSGNLEQMIISIIHMSTAYYESEVKSIYISDSRQRKRDVIEYLYNDETQKGKHRHVGIKACCPRWIKTKDIIYEYVGKDGSVKKEALKQFEIDEERAQIINYIFDLKIQGLGNGKICQVLNEQNIPVFHSGNYTKAKYWNLSTISNYLKNENVIGHSYLYHKAKEEAFNEKTQTFSTKRVRKIATDKLYNYYPAIMSEEKFNQAKEAVKANSVKVDRSKSSEKPHMFSNLMRCSCGTRLHYKLTKKNNVKKVDDYFEYLKCERSALNDGCEAENINYKNFEAQFINFIRYIDVNEILDHANGEEAETQGLTELEEREAAINLKITGLTKTYQGLINAGVDGSDVLVELEKAKGELQEVEFEKSKLLNSMKSQTSSSSESIKQKKSALKSKVFAEKVEARKAVNELLKQKIRWMEVYATAYAKFVIVCFVDNVIRTYAYQDEFATDLMFNTIKINTDGLKGYESDELMVLMIKTVRESLAGMNEVITNTDLKIKLAAVKKEFMNK

SEQ ID NO: 5006 - protein, 664 aa, synthetic construct
MFSFDKSKFKGICVPYARFSTKGQSKIGKKSLERQIEEARRYAKSNNLYINEDLIFADKGISGFAQQGNIAKAFKKGQMQVMLALLEEVPYQEREFIYVTFHNFDRFSRMSPKQARTYFDLILQKGFNVVTTIDNQLYTRHDKDLGKMLISTIKMTTAWEESQVKSIYIKDALARKKKVVEYLYNHPSQKGKYKHIGVVQPNMPRWIDHEKIELTYTDESGSKRTDSFKKFTLNKEKTKIVNYIFDLKIQGLGYARICRRLNEEGIPTFDQGKHRIAKKWHIFAVQNLICNEMVLGHITLHTHNEEEYMCEIDKVFKKRKIKQTATEKLYNYYPAAVSEAKYLEAHKNTIQQDKPKKLGRIGERTNIFAQILLCECGGTLQYRRTKKNKKNSESVSVNEYLQCNNAFVNHKCNSQTINYTLLETAFFRYVNNIDFKKICSTTNSKHALKIIDLDTDIKELADEIESLKLREAGLAKTYMSLASAGLDGSTALIDREKTKKEIAEKVLELENLELKKKGLEIEADKDNREFVDINDYMMNKDNYSSDEKIIIRKKINDFLHSKIEWMEVVSTERQKFVIIAFHDTVIRTFAFDDRCANDLMFNEIDVDLSGLNRVQASNLMFTLIKAIRNSLKGVEAVITKADLISYLQHIKQDYLKNIGEQASV

SEQ ID NO: 5007 - protein, 603 aa, synthetic construct
MKKAYSYIRYSSPQQASGDSYRRQLAATQAYCDANGYELDTDLSIYKELGVSGFKGDQEHLKQFINDCETGKVKKGSLLVVENLDRLSRQAINVAMRQFLSLLEYVDIYTLQDKKHYSNNDGRDSENQLLDIMTSLIIMSRAHEESLTKQKRLKESWANQRKNAHKVKMSGCYPHWLVRSDDKTEFFVKEDRAQIIKDMLDMCINGLGATQIVRSLNQNIERYPPPSQKKEFWVRSTVKRLLSDRRLLGEHQLYKGHHAKREPVGEPIKGYFPQIVDEKTFANVQISLKSRKIGAGKVKADSFSNIFRGFLRCGHCDSPVEYVNKAAKQASTLYLTCSNAKRGGDCNHSKHYRYLPLEHMLIHLSTANGFLPKPEKPSDLEQQLEIIKEKKEQANKKLSVLLEKNFTAPIILEKIEELTNDVEQYSYQIAEIEDKLLSIKPNYTYEDLYHDAVLEIDLLKKFSNRSMFNNYLRKKIDSAYLYSIGLFPCIAFKMNNKSVHVLVLDERYNFGGCSLPNKKDKLIRLNGEEIEAIDEIIWKMFGNAIDFINGIDEENEELIKIIRKISLLMSKFIMDNKNQELISEFNSLLNTSIEKVIKIDNFN

SEQ ID NO: 5008 - protein, 621 aa, synthetic construct
MRTTPKIYNYARVSTTKQLQGVGLETQQQKSVLESLSLEHNLPIHDENFVDQGLSAYHGKHKEGALGIVLTRIKSGEIPAGSILVVFSLDRLSRETVNIAMEQLLSIINQGVRVYTHIDGKMFDSMSTNLTADLIVSLISMERANEESLTKSKRVKAAMREGLRRWRDSGEAQSTLGRVPFWIDQPTNTLNSNADGVRKAIELYLNGVGILSIKKHLDEFYQYTPVRKNNRNKANIDKWDYTAISELFSKPSLIGEKHITIDDTKYRLENYYPPIIDEITFEKLKKIKSTKRGRTPETGAIHLLKGLVKCKTCGSSMVYIDKGRGNNAINYVCGSAAKGNHNRENYSAQMLELVTLAICKDKYLASTVDSEELKTKKISLEATKEELNSSLDDLTMRYKKNSSARILDLIEDTEDKLNRVLIELNELDTPEIAQVFELLSKDVYTKDIMDDYLHPDRAEIRNNLCRILTSIEVGRKVVHSEFTKTGHVACVSIRIKFRNGYIRDLDIDPFSYVIDEGNESIFVPFKYKYDIPNEETFRSSEIISDMLIKLHANDLLNKLYPSKGRYQWATKGLNIGISESKIVNYLPTLDDVEGSKTWNEIFEKFYSRGVKETRIESNRLK

SEQ ID NO: 5009 - protein, 599 aa, synthetic construct
MKKAYSYIRYSSPQQASGDSYRRQLAATQAYCDANGYELDTELSIYKELGVSGFKGDQENLKQFINDCETGKVKKGSLLVVENLDRLSRQAINIAMRQFLSLLEYVDIYTLQDKKHYSNNDGRDSENQLLDIMTSLIIMSRAHEESLTKQKRLKESWANQRKNAHKVKMSGCYPHWLVRSDDKTEFFVKEDRAQIIKDMLDMCINGLGATQIVRTLNQNIERYPPPSQKKEFWVRSTVKRLLSDRRLLGEHQLYKGHHAKREPVGEPIKGYFPQIVDEKTFANVQISLKSRKIGAGKTKEDVFSNVFRGFLRCGHCDSPVEYVNKASKQASTLYLTCSNAKRGGDCSHSKHYRYLPLEHMLIHLSTANGFLPKPEKPSDLEQQLEIIKEKKEQANQKLSVLLEKNFTAPIILEKIEELTNDVEQYSSQIEEIEDKLLSIKPDYTYEDLYHDAVLESDLLKKFSNRAMFNSYLRKKIDNAYLYSIGLFPCIAFKMNNKSVHVLVLDERYNFGGCSLPNEKDKLIRLNGEGIEAIDEMIWKMFGNAIDFINGIDEENEELNKIIRKISLLMSKFIIDNQNQDLISEFNSLLNTSIEKSYQN

SEQ ID NO: 5010 - protein, 529 aa, synthetic construct
MRKVYSYMRFSRPEQAKGTSIERQSSFAEQYALEHGLELDKSLTMMDKGLSAFHGVHKTKGAFGQFLAAVTAGKVPSGSVLVVESLDRLSREDPLIAQAALTDLILSGITVVTAADNQVYSREEIQQNPFKLIMSLVVMIRANEESETKQRRSNAFLKSALNQYQANGKIRRLGSDPSWLDFNKDNDRYSFNERVEVIRRILNLYNQGIGSLKIARQLTEERIPTLSGKRSAWGQTTVANIVKSNALYGMKRIKVQGVEYDLEDFYPALITKSKWLALQQHRTKRSKSMHGRGEVVHLITGHGKGFTTCGYCGGGLGAQTQKQYKRSGVYSKTVTRLHCLTHKETSSCCSSVFLEPIESAVLFAACIGVEPQSLVPTVNNVNYSALIDEVENKVKHIVEQVTAGAPWDLFKDAHDRLKLEKQKLIKERDSQKPEVNQSDLQKWVNKLVELADKARANDKEARLKCRTLINSICKSIVIKLRGHDLKSEPVVTITFVTDEQFEFKVGKNGAVQFVDNGMAVNRRLKPLLA

SEQ ID NO: 5011 - protein, 509 aa, synthetic construct
MKNAVSYIRFSSKQQASGISVSRQNDAIQTAVKNNNFNLLDIEFKDLGVSAWKGDNLTGDGSLGKFLAACKAGKLDHVDVLLVEHLDRVSRKDVSTALTFFMELLRYVDVYSMMDNRLYSSSNSELDLILAILSFSKANEESQKKSERGIKNWNKKREEPTTCTKSGTRPFWLDVSEDRKSYVLNEHIETVNQIFQMKLKKLGSQTIATRLTEEGIKTIKGANWINSSVARLLRDRRLVGEWNFNGQIIKGYYPVAIDENLFNRVQVILDETVQSGTWKGNASTQYNIFKGKGVCKECGAKLVGTKKNGYEYIQCSNALANKSCDQKLISVPLIFKFADEWLTDATLYSARMGFDKDKEEELTNRINALKVQHSLKRKGLEDLGKTGAVSEKQVEMLINTDEDLIQWHREIGILEASLLEIGSSDATYQDMQQMKKLIQDAQSGDLESRIQLKGIINTFEGLKVGSIDKVLTIELTDSEKTRTFQTDRNPRVKKGVEVWHHIETVDLTE

SEQ ID NO: 5012 - protein, 529 aa, synthetic construct
MKKVYSYMRFSRPEQAKGSSIDRQSQYAEQYALEHGLELDKSLTMMDKGLSAFHGVHKTKGAFGQFLSAVTAGKVPSGSVLVVESLDRLSREDPLIAQAALTDLILAGITVVTAADNQVYSREEIQQNPFKLIMSLVVMIRANEESETKQRRSNAFLKSALNQYQTNGKIRRLGSDPSWLDFNKDDDTYSFNERVEVIRRILNLYNQGIGSLKIARQLTEESIPTLSGKRSAWGQTTVANIIKSHALYGMKRINVQGVDYDLEDFYPALITKSKWLALQQHRSKRSKTMHGRGEVVHLITGHGKGFATCGYCGGGLGAQTQKQYKRSGEYSKTVTRLHCLTHKETSSCCSSVFLEPIESAILFAACIGVQPQSLVPTVNNVNYSTLIDEIENKVKHIVEQVTAGAPWDLFKDAHDRLKSERQKLIKERDSQKPDISQNDIQKWVDKLVKLADKARAGDKEARLKCRTLIHSVCKSIVIKLRGHNLKSEPVVIITFVTDEQFEFKVGKNGAVQFVDNGMAVNRRLKPLLT

SEQ ID NO: 5013 - protein, 575 aa, synthetic construct
MTKIAYSYTRLSTEKQIKGHGFTRQREAIEKVCCQHGWQLSDQTFNDLGVSAWKGANATTGALSQFIDLAKKGAIRPNSVLIVESVDRLSRQQVDKSLRLMLELLEVGVSIFTLSDSKLYTTNSDSVMLDLMMWLMTAQRAHEESEIKSLRVRAAKKKNKELIRKGIIVTRKCPEWLTVSDDKSCFLVNNERAEIVRKIFTWYSQGFSTKPIALKLNELGIPYWGKSSTWSYRHIRSLLKHRGVIGEIQLLKRIDGRDVADGDPVEDYYPAIIDRGLWATCQQIKSSKTTAKGRVVERGMANLFRGLLKCECGSGLAINSSTVKGRTYRFLRCSQLKTTGCQAKNWHYEKTERILLIALRHSLSSFSEEDHAVSLRECQHYLARISEELKEKERQAENAINYLLDKPSKLLEARLQRLEDDIARLKAIQEQAEHRLEAVHYEKSTALDKVEELQRVLEDIANDDDSRHKANGLLRRLIDTITLGSISNPRSKEFMEVSGNDYHGLIIIKRRDGLELRIEVLKDYGLSISWEGDDFTVIECSPTQQLNSQHVSQRLINLGGQTVDLWADEGWVASS

SEQ ID NO: 5014 - protein, 531 aa, synthetic construct
MAIAYSYIRFSSSQQSQGDSLRRQTQLAEKYCIENNLTLSDTTFRDLGVSAFHSTNSQEDSGLGQFLSALNQGRINEGSYLLVESLDRLSRAKVQTALRQMLNIIELGVKIVTLMDNRIYDQESDTTDLIISLTIMERAHNESKTKSERIKAAWVHKRQNPTTTNRHSSTPFWLSLNPDKKTYKLKEKYVEIVRKIYQLSIDGWGVIKIVRHLNESNIKAPKGGSWATTTVSRVLTSKAVLGHYEPMQNRKSLNLTIEDYYPSIIDEATYYLSRQRQNERSKPEAAGRKTNYPNPLSQIAKCKLCGSSMYYENKSKSLKYLTCREFKKGSCTNKPIRIELIYRFVCEVFNSPMYYQYQAKLVEKSNKKDNNKLEELEAKQTEQENALRALLSMSNDFSNTIIQEEIKVRSERIESFKKHIENIKAEQAVEHTRSTHINFTEALQLAVNAFRFPLEKVQVEELSREELFNTRVRLNRILKHAFNSLSIYHCGESERITIETEVMEGFSEGLKYETTRQSIKEPLSSRVWSVC

SEQ ID NO: 5015 - protein, 507 aa, synthetic construct
MKYAAYLRISSYNQKEKGDSIDGQRKSITTWVTERGGNIIKWYIDDGVSAYKGKRNNFDLMLQELENDIVKVDGLIVYSLSRFSRNLLAQLEATKILQRKKIRLISATEALPESYEDSYVMSSILGLMNEHSSMQNGKVVRDRLRDTALKQYFTGGPIPFGYHSVTVSGVTSKSRKKLQILQEEAELVIEIFNLSEKGVNGKPLGVKSIAEMLNKKKSFRRGTKWNRNSVCRILNNRSYIGEFIYNSSDSEPIVVNIPSIISKEQFHKVQEGLKSRDIFSAESRRIRSNCLLTGLLKCNVCGASMVVTSGKSGKYSYYQCSKQVRHAPESCTSKRIRRDKVELLVKDKFINELLTEAHLREICYQAKLRLKETSKLLSFEKTKLSKKINNLKKRQFRLITMVADGDLEPDASINKTITDLSTQLDILESEMGKLTAKINLPVRNFGEARLVEVTSALQGYLQQIDNEALKQLMLATVMSVKVVGAEKKLIFGGSNMAVLYLIANAKT

SEQ ID NO: 5016 - protein, 554 aa, synthetic construct
MFTKNVSVKLNKYHLYQRVSKQVQAEEGLGIQRQEQVCEHWISEYNNRLVSEGKSVYSKGFIYEDRGKSAYTAANFNKGELGTLINDIKNGKIEKGDLIVIELIDRFSRANVDFVRGEFQRILDAGVKIAITKWNLVFEENMESVSSVTGRILLEIGMYLAYQESSQKSSRIKASRKLLEDSGRKSIAKPPFWLARNLDLKSYTIIEENAEIIRNIFDLKLNFNYGAQKIIKKLGDLEIYRYSFDENGNLIKTTKNSPLNESSINAYLRNQNVIGKLKGKNYYPRIIDDRTFYAVQRRTRENTGGVGDIFRNVFVGVGKCGCLIRKENENGCDSLAKCGYIMAFSSRKVKNPTKGMYLKCNRKRKSTRCDAENINYYLAQNKIYNVLKSLTFDIEQSVDISHLEEKIISIDKSMSKIREYMTQYSDDEEWEKQYNIKRIEREKIENEIKASKSRITGRLSNLDMDFSEEKDRVLFNQFLKDNRITVYFTKDRMEIIIGSLNNFSIKCGYNDNEREIDQLVESISQKGFVGLEKISRVSEGKELLRFKLPTVSDS

SEQ ID NO: 5017 - protein, 529 aa, synthetic construct
MRKVYSYMRFSRPEQAKGTSIERQSNFAEQYAIEHGLELDKSLTMMDKGLSAFHGVHKTKGAFGQFLAAVTAGKVPSGSVLVVESLDRLSREDPLIAQAALTDLILSGITVVTAADNQVYSREEIQQNPFKLIMSLVVMIRANEESETKQRRSNAFLKSALNQYQANGKIRRLGSDPSWLDFNKDNDTYSFNERVEVIRRILNLYNQGIGSLKIARQLTEENIPTLSGKRSAWGQTTVANIVKSHALYGMKRINVQGVEYDLEDFYPALITTSKWLALQQHRTKRSKSMHGRGEVVHLITGHGKGFTTCGYCGGGLGAQTQKQYKRSGEYSRTVTRLHCLTHKETSSCCSSVFLEPIESAVLFAACIGVEPQSLVPTVNNVNYSALIDEVENKVKHIVEQVTAGAPWDLFKDAHDKLKLEKQKLIKERDSQKPDVNQSDVQKWVNKLVELADKARANDKEARLKCRTLINSICKSIVIKLRGHDLKSEPVVTITFVTDEQFEFKVGKNGAVQFVDNGMAVNRRLKPLLA

SEQ ID NO: 5018 - protein, 653 aa, synthetic construct
MFDYDKSIFDGICIPYARFSTTEQDKVGRKSLERQLEEAKRYASQNNLYISDDLIFTDKGVSGFAKQGQLSKTFEKGQMALLLDVLEDVSFKERENIYLCFHAFDRFSRQHPEVAYEQFSRILKRGFNIVTTIDDCLYSSKEADLESMLISIIKMSSAHYESEVKSVYVSDAHRRRREMLEYLYNHPTQKGKHKHIGLKQSTTPRWIIESEIIYDFVDDNGVARKDSFSKFSLDEAKAEIINQIFDWKIQGLGHTKICQLLNQKQIPTFEDGNCRKAEKWHTFAISNLFKNKSTIGTFTLKTVEDEEYFCESERIFKTRSNKVDATSEMENYFPAVVTVEKYEAALKIIAMNNKGEKISEPEDKTHVFSKVLRCTCGGRLVFKGTRKTGKSEKADWFEYLRCEKAILKDGCDAENIIYKDFEMAFLRFATSSNYTVFSTTQSKLKTKLKRLSIKQSYLNGEKEQLLLEAKGLNKTFESIVTQNLDATLLLDSISKNKSLLNTVQNELVKIENQVKGVEREYEKSGKPIDKRIIKKELRSEDYSKRLLMRKAVNQQLRKNVVHMEVCSTKLLKFVIVCFDDYVIRTYAYQDEFSSDLMFNFIKINVENLDESEAYDLIIHLFKEVRISLSGENAVITNFDLKVHLSGIKEKYLK

SEQ ID NO: 5019 - protein, 673 aa, synthetic construct
MIGEETLREEIFQYDKAKFKGICVPYARFSTKGQSKVGKKSLERQLSKAREYAKRNNLFINEDLIFTDKGVSGYSNQGELSKAFKKGQMATMLLLLEEVPPEERDNVYITFHNFDRFSRMSPDAAQAHFNKILNRGFKIVTTIDNQLYDRRDKGMSNMLISIIKMTTAWQESLNKSIYITDALSRKKKVIEYLYNHPSQKGKHKHIGVVQPSIPRWIDQENITYEYIDADGSKRTDTFKKFSLNQYKAEVVRKIFELKIAGLGYTRICQKLNNDGVEVFEQGRFKKAKKWHPYAVQNIITSDKVLGHITLKEMVTEEYHCKETDEIKTKKVKKEVTSKLENYYPSVVDEEVFRLANVLKFQEKKGKPLGRIGERTNIFATFMSCYCGATLQYSRSQINKRSNKAPIYREQLRCNNALVKNGCFDDYINYVELEQAFFKYVHHIDFREVCLVGDKSLETEIKNLQAEITYLNGQKKELKLKNSGLEKTFESAISQGLNADYVLVALNEAKKSADLIETKINDLKVRITKLQLSLDSKESDFLDIVEYSKRIKNSSTETKIMMRKKLNDFLHSKIKWMEVCSSKHSKFVILCFHDDVIRTFAYSENYANDLMFNTIKISYEVEDSQLNYELFLIYIHQIKRSLRGETEVVSNGDLIEALQRLKRKFYAGKGIDYV

SEQ ID NO: 5020 - protein, 551 aa, synthetic construct
MLLMQKGDHMQKTAVSYRRVSSGKQLRGHGLARQREMSIAWCATHNLLLVDDLVDNGLSAFKGHHKHKGEFGPLLHAVQTGTVKFDCLLVENFDRIGRMPVMEQFSQFSLLINAGIELHIISENRIFTSESINSNPYELFGVLAQMARSYDESRLKAQRIKQAYDKKLQALQEHGVIFSKTVPFWLDVNHDRTAFSLNKHVLTVKRCFDLAVQGHGATKISRLLNDEEVPVPEHGARKCIQAWTRNKVQRVLTNPAVYGRFVGKKTQVDREDYYPDVISKQIFHQVQSMISTRNAVNPKTSNKQVSNLFSGLMFCECGRTMKLYNFAGGDFFSKRTFKCRSSSEDGHCEHKTVYWLKSFEIQALILLYELNCSNKPSKPSQAPIIEQQIRELEASNANLVKLIMQGQVSQAIANASMQLELEIQQAKKQLEATKLAEATPDTQLDQSERDATIQAVLYDEQYQARLLMQSQVQQLIKQVTFYKHGVLFELKSGIQYWLRPLTNRDFSSVYSLRVPDGLCIEQLHTIVPQTPITVDTSKRQSAASNVPIFSV

SEQ ID NO: 5021 - protein, 533 aa, synthetic construct
MREAYSYIRLSHTNQLSGHGRQRQLESTVRAAKEKGWQLMDETFEDLGVSGFKGINVETGAFSKFLTAVQQGAIREGSVLIVENVDRLSRAGVNRAVTLMLQLLEYGITIHTLSDNKTYEPSSENPLMDLMQWALTAQRGYEESLIKSKRIQAVKDAVREKARKEGTYYTTKSPSWIIISPDKKEATFHPTNAAIVKVVIDLYLNGYGTTRIANRMIELGHPTLSVKSKCWNASLVRSLLTQPALSGDIMFKRNGKRDPDILEDYYPALIDKDTHRKIKERLAKGGAGKGRRSTTMRNPLAGLLRCKCGSGLGLSHNNARKHSNPRTALRCKKYYGECNGSGISAPRAITGILYGLRRLPMATLLTEEKKVDRVSVEVEIRSLTDSLEGIKQSMDNVITTIAAVGGNKALQEKLIELTAEQDAIEKKRDALRKQLEAIDALQVTEDLETLEERFTKLLDQTSTEEGRTALNGLLRDHLSHILVDTDGEQKMLIAFNKKQQPIIEVTVRAEGEVAVKVGKEVEVINVPQIALPW

SEQ ID NO: 5022 - protein, 644 aa, synthetic construct
MFNFDKSKYKGICVPYARFSTDVQDEIGRKSLERQIEEAKRFSDEYGLFFDEDIAFVDRGVSGFALSGDTAKTFQKGQMQLMLELLEEIDVTEREFIYITFHNFDRFSRMSPDVASRYFEQILDKGFNIVTTIDNEVYKRNSGNLEQMIISIIHMSTAYYESEVKSIYISDSRQRKRDVIEYLYNDETQKGKHRHVGIKACCPRWIKTKDIIYEYVGKDGSVKKEALKQFEIDEERAKIINYIFDLKIQGLGNGKICQVLNEQNIPVFHSGNYTKAKYWNLSTISNYLKNENVIGHSYLYHKAKEEVFNEKTQTFSTKRVRKIATDKLYNYYPPIMSEEKFNQAKEAVKANSVKVDRSKVSEKPHMFSNLMRCSCGTRLHYKLTKKNNVKKVDDYFEYLKCERSALNDGCTGENINYKNFEAQFINFIRYIDVNEILNHANGEEAETQGLVDLEEREAAINLKITGLTKTYQGLINAGVDGSDVLVELEKAKGELQEVEFEKSKLLNSMKSQTSSSSESIKQKKSALKSKVFAEKVEARKAVNELLKQKIRWMEVYATAYAKFVIVCFVDNVIRTYAYQDEFATDLMFNTIKINTDGLKGYESDELMVLMIKTVRESLAGMNEVITNTDLKIKLAAVKKEFMNK

SEQ ID NO: 5023 - protein, 664 aa, synthetic construct
MFSFDKSKFKGICVPYARFSTKGQSKIGKKSLERQIEEARRYAKSNNLYINEDLIFADKGISGFAQQGNIAKAFKKGQMQVMLALLEEVPYQEREFIYVTFHNFDRFSRMSPKQARTYFDLILQKGFNVVTTIDNQLYTRHDKDLGKMLISTIKMTTAWEESQVKSIYIKDALARKKKVVEYLYNHPSQKGKYKHIGVVQPNMPRWIDHEKIELTYTDESGSKRTDSFKKFTLNKEKTKIVNYIFDLKIQGLGYARICRRLNEEGIPTFDQGKHRIAKKWHVFAVQNLICNEMVLGHITLHTHNEEEYMCEIDKVFKKRKIKQTATEKLYNYYPAAVSEAKYLEAHKNTIQQDKPKKLGRIGERTNIFAQILLCECGGTLQYRRTKKNKKKSGSASVNEYLQCNNAFVNHKCNSQTINYTMLETAFFRYVNNIDFKKICSTTNSKHALKIIDLDTDIKELADEIDSLKLREAGLAKTYMSLASAGLDGSTALIDREKTKKEIAEKVLELENLELKKKGLEIEADKDNREFVDINDYMINKDNYSSDEKIIIRKKINDFLHSKIEWMEVVSTERQKFVIIAFHDTVIRTFAFDDRYANDLMFNEIDVDLSGLNRVQASNLMFTLIKAIRNSLKGVEAVITKADLIRYLQHIKQDYLNNIGEQASV

SEQ ID NO: 5024 - protein, 546 aa, synthetic construct
MRTAYSYVRLSSKKQIQGYGQERQWQAIQAAALAHGWELSEKTFSDLGVSGWKGANIETGALSQFLQCVEDGYIEKGSVLIVENVDRLSRAGVQRAVSLLMQLLASGISIYTFTDSKLYEPDSHNPLMDLMAWALSAQRAFEESERKSQMILNAKAKAREKARLTGEIITRRCPSWLRVNQDKTAFELIPERVETVRKIFDLYVNGYGTPRIGRLLTEEGRKPLTGRAWYPRSISRILQYRAVLGEYQPTLNGKPEGDAIKNYYPAIIDEDQFNEVQAVLKEGGAGKGRRGKEMRNYFAGLLRCSCGEGMHIVSSCVKGKRYYQLRCLQYRISCFGSSWNFYKLSSFVLFALRRLPILEVMGSQDNNIKELSAKERELTFLLEDTRRQLDNTINAIAALGLNDQLQSKFRELKTSVTNIEKQLSNVKTELETSQGKLVIQKQDSEMLTGRFLELIDSTKDIDGRIKLNQVLRRYLSKIEMHADKKEEYRYIKIYRKDGDELVSIQCDHSLKGALFESKDGLETFELLPATDAKRNEISNTLLCTPK

SEQ ID NO: 5025 - protein, 515 aa, synthetic construct
MTKAYSYIRFSTKGQIEGRSLQRQLETARKYAEENGLELQSLSFQDLGVSGFKGRNSEQGALSQFIEAVKEGTIPEGSWLLLESFDRMSRQPVEKSMRLLMELVELGITVVTLMDKQVYRRGQLDMTKLIISLVIMSRAHEESAAKSKRLADVWHAKQAVAHLKPLGTHLPAWLEYNEDKTKIQINYEKAVVVRYIFELSANGYGRSALIRKLNSQGIAPIGSRAKRWHLSYVTKLLNNTAVLGEYIPHVTDKLGQRVPTGEVIENYYPPIIEKDLWLRAKAAAQSRKIRGTGAIRRGHTRNILSGMVSCECGSSMQFVNKGSSDKGGYYLVCSTARHGAGCQYIGHRYYSVQWVVLIALQKLLHTFANKADNHEKEMQLEGELVELDRKLNNLINDLEENGSSNYISAAIRKTEQRMDIVKNELLILQSSKAVENDEVDLQEITLRLNENFERLRLHQYLKRHIANIVVYKNKERLEISLKTGEDITLTFNTSDSLWQTNTGISFRVTFDTRWG

SEQ ID NO: 5026 - protein, 599 aa, synthetic construct
MKKAYSYIRYSSPQQASGDSYRRQLAATQAYCDANGYELDTELSIYKELGVSGFKGDQEHLKQFINDCETGKVKKGSLLVVENLDRLSRQAINVAMRQFLSLLEYVDIYTLQDKKHYSNNDGRDSENQLLDIMTSLIIMSRAHEESLTKQKRLKESWANQRKNAHKVKMSGCYPHWLVRSDDKTEFFVKEDRAQIIKDMLDMCINGLGATQIVRSLNQNIERYPPPSPKKEFWVRSTVKRLLSDRRLLGEHQLYKGHHAKREPVGEPIKGYFPQIVDEKTFANVQISLKSRKIGAGKTKEDVFSNVFRGFLRCGHCDSPVEYVNKASKQASTLYLTCSNAKRGGDCSHSKHYRYLPLEHMLIHLSTANGFLPKPEKPSDLEQQLEIIKEKKEQANKKLSVLLEKNFTAPIILEKIEELTNDVEQYSSQIEEIEDKLLSIKPDYTYEDLYHDAVLESDLLKKFSNRSMFNNYLRKKIDSAYLYSIGLFPCIAFKMNNKSVHVLVLDERYNFGGCSLPNEKDKLIRLNGEGIEAIDEMIWKMFGNAIDFINGIDEENEELNKIIRKISLLMSKFIIDNQNQDLISEFNSLLNTSIEKSYQN

SEQ ID NO: 5027 - protein, 678 aa, synthetic construct
MRNIPKIYNYARVSTTKQLKGVGLETQQQRSVLERLSQEYSLPIHDEDFVDEGLSAYHGSHKDGEFGVILSRIESGEIAHGSILVIFSLDRISREATNVAMAQLLDFINNGVRVYTHIDDKMYDSSSKHLFIDLMYSFLTMERANEESRTKSKRIIAAQKIALKHWKDTGKPQGALGRSPFWIDQPTNTLNINAEGVKKAVEMKLAGYGDLKIKQYLDANFEYKQTRTKGTVKQSNTWDYTAISQLWANRSLIGEKTFHIEGVSHVLENYYPPIIDEATFRKLKMCKSKKRGRNTSSGKIPLLKRLARCGICGGAMVFVDKGGDRVNYVCNLAMKGEHDQEVYNANMLDLLTLEICKDAYLVESDKTNNNAIENEKLKIEAELAIEHERRDELVTRYKAQKAMSFLDLLEDCESNISDLEAKLDAINNNNVVLSADELESLPEIFSGDVRTDYSHPERYAIRNNFYRFISSITLNRVVEPCSDAKTKYANCVDITWHFKNGQKRRLAMLPYQYLKADDGNKGLYLPFVYMYGSKSNIKVDDGDQFLSSIFKKLHAFDLTKCLFPSKGRYQWSQLSLECGKTYWASLDKAMFMEKGMEVIADTIRDNGGKNKVDGVTTNYLSLMFNYPSSEEFSYDYPDSTFVELACKFGFVADRDFSLFLQDNNFNRELYSSLDFLVS

SEQ ID NO: 5028 - protein, 547 aa, synthetic construct
MRTAYSYVRLSSKKQIQGYGQERQWQAIQAAALAHGWELSEKTFSDLGVSGWKGANIETGALSQFLQCVEDGYIEKGSVLIVENVDRLSRAGVQRAVSLLMQLLASGISIYTFTDSKLYEPDSHNPLMDLMAWALSAQRAFEESERKSQMILNAKAKAREKARLTGEIITRRCPSWLRVNQDKTAFELIPERVETVRKIFDLYVNGYGTPRIGRLLTEEGRKPLTGRAWYPRSISRILQYRAVLGEYQPTLNGKPEGDAIKNYYPAIIDEDRFNEVQAVLKEGGAGKGRRSKEMRNYFAGLLRCSCGEGMHIVSSCVKGKRYYQLRCLQYRISCFGSSWNFYKLSSFVLFALRRLPILEVMGSQDNNNIKELNAKERELTFLLEDTRRQLDNTINAIAALGLNDQLQSKFRELKTSVTNIEKQLSNVKTELETSQGKLVIQKQDSEMLTGRFLELIDSTKDIDGRIKLNQVLRRYLSKIEMHADKKEEYRYIKIYRKDGDELVSIQCDHSLKGALFESKDGLETFELLPATDAKRNEISNTLLCTPK

SEQ ID NO: 5029 - protein, 546 aa, synthetic construct
MGECMKHQKVSNLFNVAIYIRLSREDGDKEESDSVGNQRKLLTEYVAKKEDFILYDIYVDDGYSGTNFNRPSFQKMIADIEDGKVNCVVVKDLSRFGRDYIDTGRYLERYFPELGVRFISVTDSIDSMKQAYDMLLPIKNIFNEQYARDISKKIQATVKSKQKAGEFIGAFTSYGYKKSPVDKNKLVIDDYAADVVRRIFSLYIQGYGKQRIAKLLNSEGILCPAEYKKVNGENYKNCNRLESTTYWSYSTINSILHREMYVGNMVQGTKHQRMRSKQKKMPKEEWIIVENTHEPIIDKETWEKAQSLLQKRTRELDLETNKNIFAGFVKCGDCGRAMTKNMWRRADGSKTYSLYCGTYKRNGKQYCTPHTLPMAVLKDIVLGDLKAIVDSVDNLKELVQSQSFTASKVKRIADTELSKIKAELERVKRLKKSIYEDYREELISKEEFLSYREDYLKKEELYSKQIEALEEKKKDNVTEDVFETPWLKRLLELKDIETLDRDIVVEMISEIKVYENRKIKITYNFGNELEHLFSSVYSVESEEKAI

SEQ ID NO: 5030 - protein, 386 aa, synthetic construct
MRTAYSYVRLSSKKQIQGYRQERQWQAIQAAALAHGWELSEKTFSDLGVSGWKGANIETGALSQFLQCVEDGYIEKGSVLIVENVDRLSRAGVQRAVSLLMQLLASGISIYTFTDSKLYEPDSHNPLMDLMAWALSAQRAFEESERKSQMILNAKAKAREKARLTGEIITRRCPSWLRVNQDKTAFELIPERVETVRKIFDLYVNGYGTPRIGRLLTEEGRKPLTGRAWYPRSISRILQYRAVLGEYQPTLNGKPEGDAIKNYYPAIIDEDRFNEVQAVLKEGGAGKGRRGKEMRNYFAGLLRCSCGEGMHIVSSCVKGKRYYQLRCLQYRISCFGSSWNFYKLSSFVLFALRRLPILEVMGSQDNNNIKELNAKERELTFLLEDN

SEQ ID NO: 5031 - protein, 514 aa, synthetic construct
MNNNKALAVLYVRFSTKKQETGDSQRRQIESAEQWCERNNAELSAQTYEDLGVSAFKEGGKRPALEDLINAIRMGKIPRDSYLLIEDHDRLSRRGWRYTQDLVYQLVQLGVRLVMLKTGVVYDANNINNIADNIVLMISAERAHQESERKSHLIKASREKARRDKKVTGKLPAWVSRDGDGFTFNDKKATIQELINCKLSGKSHQSTAKHLNSLKMTTGNDSAWSASGVRAIVQNHALYGAKAYFDTGKDGRMNKEPIEIVSDIFPALITYEQYQVLNKRQQAGRTSQRGAYSRLLKCGACGGAMTTRTSNYKGKPRAYKMCVKATEGSCNQVERIREPEVYLNEALHYLKYESSSTLYVSRTSEYQQRLETLNATVDLLTKNGNIEALARVYTDIKEVSDLIEESKVLDQNNVDVKVDFSLISSIEDVEQRNIELRKVLREIRFYCIEKVGQTSKWKVVIEQINGIKKYLVLDQKYGFGNTVVDYASLLTQGTEDNREPWEIEDSEEWESYSY

SEQ ID NO: 5032 - protein, 593 aa, synthetic construct
MQINDGVLKSLSNEHNLPIAQETYQDLGKSAYKGEHLENELGLFLAAVKNRTVAEGSILVVYSLDRLSRLEIGHAKQTYYDLTNNGVSVYAVVDNHLYRAHNAADDIIATITFERAHNESEIKSRRVIDAAKEGLKRWKETKQPQSSLGRSPFWIDQPTNSLNENAEGVKVAVDLFLEGWSTIKVKQHLDKNYPYLRTRKTSIKKAQTWDYGVIDQLWRKTSLIGEKRLTIEDQKYVLSNYYPPLISLEKFNTLTRLKKPKLGRSTSTGSIHLLKGLARCGICGSAMVFVDKAQHSKNYVCSLAIKGEPLHNREVFSAELLELLTLEVCRDQYLINSFNAQLNVEEKARVGYELAEEKKQLEDLKSRYKQKSRASLLDLIEDTEDKIEVLEQQLASFETFDLSDNLHLLNSDIFTEDVRTNFQHSSRAEIIDNLRSVLSDVTLNRVVEDSEFTKTGTVNCVSITWRFKNDQTRSISVKPFRYIGKGSNKKLFVPVRYEYTVPVIDEENRRGEKFVPDMIKKLHEKKLLNKLYPSKGRYQWYKLEFVLGEFQTGLHNFLPNFVADPDPDAFWGDMVDKARAEGTRYTVLSKNVL

SEQ ID NO: 5033 - protein, 578 aa, synthetic construct
MNYVAYLRVSSYNQKELGDSIDGQRQSIIDWVQAKGGNILRWYTDDGVSAFKGKRNQFELMLHELENDIVKADGLIVYSLSRFSRNLLRQLEAKKLLEKKGITLVSATEALPTNQEDNFIMVSLLGLMNEHYSIQNGKVVTDRLRDTARKGYFTGGPVPYGYCSITVSGVTSKCRKKLQIFEEEADLVKQIFSLSEKGVNGKPLGVKSIAEMLNKKLQYRRGTKWNRNSVSRLLRNTAYIGDFVYNSGGREPIIVKIPAIIDRNQFDNVQDGLKSRDIFSAESRRLRSHCLLTGLLKCQVCGGSMVVTSGKSGKYSYYQCSKQVRHAPDTCTSKRIRRDIVERVVKQKFIGELLKEDHLKKIHTRTRLRIKDANRTLVSDKSRLSKRKSNLETRYSRLIMMVADGELAPDERINKNLSEISAQIDALEHELARLSVRINFPVKNFGDARLQDFAVAVLEYLMDADDEKIKQLMLSTVTSVKVVEGAKKLIFEGSNMAVLYLIANAKTGTEFSVPVFVTKWRRDRDLNPRYAINVCRFSRPVLSTTQPSLRCGRYNKEHSPTCKVLNYNRSTVCLFYDH

SEQ ID NO: 5034 - protein, 512 aa, synthetic construct
MKRIAIYSRKSRETDTGESIKNQIDMCKTYFNREDKDCSFEIFQDEGFSGGNTNRPSFQRMLELAKHRQFDVIAVYKVDRIARNIVDFVNIYDELEKHDVKLVSITEGFDPSTPIGKMMMMLLASFAEMERMNIAERVKDNMKGLAKIGRWSGGTPPTGYRSKTITLNGKKETYLELIPEKKQLLISIFKKAADGYTTYQIGEMFSMSPKTISNIICNPTYVQADSLSANYLKSIGYDIFGELNGNGYLSYNRRPKKKGKKLFNAKGMFTAVSNHEAPIDSKTWIKANNNLKDRATEAKPRISNNSFLAHLVKCSCGSGMYIHTGHKKKDGTKNLYFACSKKKTQNKCTSKWLRIDFAENHILNILKEISFSPKLLENYLKHQNNPVDYTESIKNIKKQIDKNNEKINTLTDKLIFLKGTAIDIVSEKINTIADENYKLSEQLLRLERKKMFSEVDGENVKVLLDNIKKFLQNFDKINTTERQNFAKSIIKKIVWDSSANNNKGKISIEFLE

SEQ ID NO: 5035 - protein, 529 aa, synthetic construct
MRKVYSYMRFSRPEQAKGTSIERQSSFAEQYALEHGLELDKSLTMMDKGLSAFHGVHKTKGAFGQFLAAVTAGKVPSGSVLVVESLDRLSREDPLIAQAALTDLILSGITVVTAADNQVYSREEIQQNPFKLIMSLVVMIRANEESETKQRRSNAFLKSALNQYQANGKIRRLGSDPSWLDFNKDNDTYSFNERVEVIRRILNLYNQGIGSLKIARQLTEESIPTLSGKRSAWGQTTVANIVKSHALYGMKRINVQGVEYDLEDFYPALITKSKWLALQQHRTKRSKSMHGRGEVVHLITGHGKGFTTCGYCGGGLGAQTQKQYKRSGEYSKTVTRLHCLTHKETSSCCSSVFLEPIESAVLFAACIGVEPQSLVPTVNNVNYSALIDEVENKVKHIVEQVTAGAPWNLFKDAHDRLMLEKQKLIKERDSQKPDVNQSDVQKWVNKLVELADKARANDKEARLKCRTLINSICKSIVIKLRGHDLKSEPVVTITFVTDEQFEFKVGKNGAVQFVDNGMAVNRRLKPLLA

SEQ ID NO: 5036 - protein, 550 aa, synthetic construct
MNTIRPLVSLRSPTAYSYIRFSSAIQAQGDSLRRQTKLAQEYCQKHSLTLSEQSFTDLGVSAFNSANTNEDNGLGQFLKALEQGVIPSGSFLLVESLDRLSRANVMTAMRQLFNIIEYGITVVTLIDNRTYSSESETTDLIISLAVMERAHNESKTKSERIKAAWANKRANPTTTNRTSLAPFWLKLNKDKRTYTVIEKNAETVRRIFQMSIDGHGIVGIARRLNEEKIPSPKGGSWSNTSICRILNSKAVIGEYTPNIGRTSTNAPISDYYPSIIDEDTFYLSQSRKAERSKPESAGRKTTFPNVFNQVAKCGVCGATMYYDNKSPTLKYLTCREFKKKNCTNRPIRIEFMNKFIVEQYLLPKHFQHHISMTTTASKQADSVSSLEAKIKEEEQALSKLMEITENFTSHIAVQQMENRDRKISQLKKELEETKVQQAKVALTPRIGFRQAQQLVANALQMEVNGKKPNNTEPEQLREYRVSLNQSLKDVFNSLRVHNTKADPEITVECNQFTYAIEKSCLKSIHEDLYWQLKCDTAHNMATNGNIGDTL

SEQ ID NO: 5037 - protein, 529 aa, synthetic construct
MRKVYSYMRFSRPEQAKGTSIERQSSFAEQYALAHGLELDKSLTMMDKGLSAFHGMHRTKGAFGQFLAAVAAGKVPSGSVLVVESLDRLSREDPLIAQAALTDLILSGITVVTAADNQVYSREEIQQNPFKLIMSLVVMIRANEESETKQRRSNAFLKSALNQYQANGNIRRLGADPSWLDFNKDDNTYSFNARVDVIRRILSLYNQGIGSLKIARQLTEESIPTLSGKRNAWGQTTVANIVKSHALYGMKRINVQGVDYDLEDFYPALITKSKWLALQQHRSKRSKTMHGRGEVVHLITGHGKGFTTCGYCSGGLGAQTQKQYKRSGEYSRTVTRLHCLTHKETSSCCSSVFLQPIESAVLFAVCIGVEPQSLVPTVNNVNYSALIDEVENKVKHIVEQVTAGAPWDLFKDAHDRLKLEKQKLIKERDSQKPDVNQSDVQKWVNKLVELADKARANDKEARLKCRTLINSICKSIVIKLRGHDLKSEPVVTITFVTDEQFEFKVGKNGAVQFVDNGMAVNRRLKPLLA

SEQ ID NO: 5038 - protein, 546 aa, synthetic construct
MRTAYSYVRLSSKKQIQGYGQERQWQAIQAAALAHGWELSEKTFSDLGVSGWKGANIETGALSQFLQCVEDGYIEKGSVLIVENVDRLSRAGVQRAVSLLMQLLASGISIYTFTDSKLYEPDSHNPLMDLMAWALSAQRAFEESERKSQMILNAKAKAREKARLTGEIITRRCPSWLRVNQDKTAFELIPERVETVRKIFDLYVNGYGTPRIGRLLTEEGRKPLTGRAWYPRSISRILQYRAVLGEYQPTLNGKPEGDAIKNYYPAIIDEDRFNEVQAVLKEGGAGKGRRGKEMRNYFAGLLRCSCGEGMHIVSSCVKGKRYYQLRCLQYRISCFGSSWNFYKLSSFVLFALRRLPILEVMGSQDNNIKELNAKERELTFLLEDTRRQLDNTINAIAALGLNDQLQSKFRELKTSVTNIEKQLSNVKTELETSQGKLVIQKQDSEMLTGRFLELIDSTKDIDGRIKLNQVLRRYLSKIEMHADKKEEYRYIKIYRKDGDELVSIQCDHSLKGALFESKDGLETFELLPATDAKRNEISNTLLCTPK

SEQ ID NO: 5039 - protein, 521 aa, synthetic construct
MKKVTKIKETNNRLQKKLKLRVAAYARVSTDNTEQLISLEAQKVHYEAYIKANPDWEFVGIYFDEGISGTKKENRTELLRLISDCENKKIDFVITKSISRFARNTIDCLEIVRKLTDLGVFIYFEKENINTQSMESELMLTILSSLAENESISISENNKWSIQKRFRNGTYKLSYPPYGYDYIDGQIVVNKKQAEVVKRIFTDALAGKGTQKIAQELNDEGVRTKKGGQWRGSTIRGILRNEKYTGDVILQKTYTDDNFTRRTNKGEKDQFLIENNHEAIISHEEFKAVNLAIEQRGKEKGIKSGNSKYLNRYPLSGKIQCSECGSTFKRRIHGTKNNKYIAWCCSKHITNIEECSMIYIREDSIHQGFVTMINKLIFSHKVVLRPLLQKLKLMNYSDNLIRVQEIESKMEKNAEQLQVLINLMTKGYLEPALFNKQNNELRSEAEKLKDQKEALYRFINGGMAKITELERLIKYVSKSKNIESFNKEVFEQFVEKIVAFSPTEIGFSLKCGLLLKERMER

SEQ ID NO: 5040 - protein, 523 aa, synthetic construct
MTMSRNVTVIPARARVGNNQETESKTKLRVAAYCRVSTDSEEQASSYEVQIEHYTSYIKGNPEWELAGIYADDGISGTNTKKREEFNRMIEACMEGKIDMIITKSISRFARNTLDCLKYIRQLKDKNIPVFFEKENINTMDSKGEIMLTIMASLAQQESQSLSQNVKLGIQYRFQQGEIQVNHNRFLGYTKDENKRLVIVPEEAEVVKRIYREYLEGASLLQIARGLEADGILTAAKKPKWRPETLKKILQNEKYIGDALLQKTYTVDFLSKKRVVNNGIVPQYYVENSHEPIIPRGIFMQVQEELVRRANLYTGKNGKKRVYSSKYALSSIVYCSECGEIYRRVHWNNRGCRSIVWRCVSRLEEKGSDCTSPTVNEEVLQAAVVKAINELLASKDTFLSTLQANIETVLNEEHDKITNDIDVKLEELQNELLRLANSKTDYEEVAEEIYRLREQKQNALVENAEREGKRQRIAEMTDFLNEQSCELEEYDEQLVRRLIEKVTIYEDKLTVEFKSGIEIDEEI

SEQ ID NO: 5041 - protein, 603 aa, synthetic construct
MYNNNTIGTQNANIKGSGYVKEVEVIKARNDLQTRTRGKTIELMRVGAYCRVSTDSADQLNSYKSQVAYYTDLIKKNKEWVLADIYADEAITGTQVTKREDFQRMINDCMNGEIDMVITKSISRFARNTLDTLKYVRMLKERNIAVYFEDEKINTLTMDGELLLVVLSSVAQQEVENISANVKKGLKMKMKRGELVGFQGCLGYDYHKDTKTITVNEEEAEIVRYIFNRYIEGAGGSVIAHELENLGYKTKYGSSTWVQSTVLGIIKNEKYKGDLLLGKTFTVDPISKRRLENFGEEDKFYIRNHHEPIISEEVFEKAQEILARRNVNRGKIGEGNTKREKYSRKYAFSCLLECGFCGGTLTRRNWHSSSQYSKVIWQCVTATKKGKKFCKHSKGIPETAIEEAFVESYRLLCGDNKDVLEEFLQRMEDTLSSSVVSKQLDKAEKEIDALEKKKSKLVDMRLEEIIDKETYENKYADLVSKQEQLIEERKKLQETSDNEKDIKKRLKEFKKTLEQNEVLDKFDRYVFESIVEKVIVGGLDENGNVDPAQLTFVYKTGLKNSVDGAKFKPQRKNARGRHRTAELCSHDSNEVDGMCSDSSNDTL

SEQ ID NO: 5042 - protein, 538 aa, synthetic construct
MSNFNMTPNQPPAKCYSYVRFSTVSQGKEGKDSYIRQTLAAKEYAARTGLEYQDKSFSDLGISGFRTSKKRDGLSSMLEAIQSGAIEPNSTICIDGFDRLSRASFEHTYDTVRLIVGTGVKLHVVQDNLTLDKSSLNDLISIVKVALQSDLAHKESAKKSYLIKQSRLRAREAHKVTGKLPMWISRVLDSKGEPTDQFVFNSFETCIRELVSLRVEGKSLQSIAKVLNNKEYKTSKGSPWSGAGVRSIIENRALYGAKSYHDTDSETGRMNLTPVDIVPNIFPALISFGLWQSIQQKSRSASTKTNKVSKRGAYSGLLRCGSCGAAMVMRTTTYTPKGTGAPEVRMYRKCIRSTEGSCGQVEIVREPETYIDMALSNLKYVTSEKRHVSKVPEIQEQITTLEKTEDILLQRGMAEKLADLYVKIDDLKSKLVDALKEDSRHTTPTETSFAKVIEIEDLEHRNMVLRKLLNGVYFTLLWKYKTQSKWKVTIEQINGLKTTFILSQKHGFGNSHIELLADPLRWTNLVQSDLEPWELDQY

SEQ ID NO: 5043 - protein, 532 aa, synthetic construct
MTSVSSTVKVHLYVRFSTVTQRKGFSLQRQTETWQSFIDSNNHQVGNQYIDDGISGFKTDADERPAFSEMMAHIKAGTIRRNDIIVFENLDRMGRQSVTKQMSLLLNIVSTGVRLYIATDKTLFDENATMVDLMMSLVAMQRANDESATKSFRGQKTWARKLKQFHDGILVTRNVPSWLIVNEGYGIGDKSLDAVGYHPTHAETVRRIFQLCIDGHGAQAICKVLNSETAPTFRSSARWIPTTVRHILKHRSTFGEWTFKEETKEGYYPAVISKETFLKAQSIIANRTQVGSVGLKTGRRVNLFSGLLRCHHCGSGITYANSNRKSHALRCNGNRQGFCEFNGSMPYKLFEQRMLECISEIEWDDEITDEAGQKLVLEAEIEEIDKRIANISKAISYGGDIPALVKQLTELNANKDDISIQLGELEVASTRLAIDIDETVDEVINGNLEIRNRAAQKIANAVKHIRIIHHKKYKRSNVNDIKAAVIQLRNGQTRQTFILREQYGPNKLLGNYNFGAIPDFEQYDEPERVNTD

SEQ ID NO: 5044 - protein, 568 aa, synthetic construct
MNCIAYLRVSSHGQLEKGDSIDGQKNHIESWAKNNGHNIAKWYIDDGRSAFNGKREQFELMLYELDNDIFQTEAIVVYSLSRFSRNLRSQLSSLEKLNSLGIKLISTTESLPEAEDDNYMMSTILGLMNEQYSRQNAKVVCHRLKDTARKGYFTGGPIPFGYKSVEVNGDTSKHRKVLQILDEEAVVVKDIFQMSDQGDSGLGIGVKNIAKILNQRGDKRRGTVWNRNSVHRILTNPAYYGNFIFGKKNSEPISVPIPQIISEEQFIRVQDGLKERDFTSLENKKFRSNSLLTGILICPKCGSSMVVTTGKSGRYKYYQCSLQVRQSPDKCSSKRIRKDIIEPIVKEKFCNQLLTEERLKTICKLAREVHSTAAKELVSEKLKLAKHISQTKEKSYRLISLIAQGTLEPSKQINDQINGYTIALERFEFQLQEVQRKLTLPVKNFGSRRVEEFAIELKQHLIEIDDTSLKQLMLATLNSIEGNVSAKKMRFKGSNMAMLYIIANAKTGTDFSVPVFVTKWRRDRDLNPRYAINVCRFSRPVLSTTQPSLRCGTYNREWSSRCKALNYN

SEQ ID NO: 5045 - protein, 547 aa, synthetic construct
MRTAYSYVRLSSKKQIQGYGQERQWQAIQAAALAHGWELSEKTFSDLGVSGWKGANIETGALSQFLQCVEDGYIEKGSVLIVENVDRLSRAGVQRAVSLLMQLLASGISIYTFTDSKLYEPDSHNPLMDLMAWALSAQRAFEESERKSQMILNAKAKAREKARLTGEIITRRCPSWLRVNQDKTAFELIPERVETVRKIFDLYVNGYGTPRIGRLLTEEGRKPLTGRAWYPRSISRILQYRAVLGEYQPTLNGKPEGDAIKNYYPAIIDEDQFNEVQAVLKEGGAGKGRRGKEMRNYFAGLLRCSCGEGMHIVSSCVKGKRYYQLRCLQYRISCFGSSWNFYKLSSFVLFALRRLPILEVMGSQDNNNIKELNAKERELTFLLEDTRRQLDNTINAIAALGLNDQLQSKFRELKTSVTNIEKQLSNVKTELETSQGKLVIQKQDSEMLTGRFLELIDSTKDIDGRIKLNQVLRRYLSKIEMHADKKEEYRYIKIYRKDGDELVSIQCDHSLKRALFESKDGLETFELLPATDAKRNEISNTLLCTPK

SEQ ID NO: 5046 - protein, 652 aa, synthetic construct
MFDYDKTRFDGICIPYSRFSTTEQDKVGRKSLERQLEEAKRYAKENNLYINEELIFADKGVSGFAKQGRLSKTFEKGQMSLMLEVLEDVPIKERENIYLCFHAFDRFSRQHPEVAYEQFTKILKRGFNIVTTIDDCVFSSKEDNLESMLISIIKMSSAHYESEVKSAYVSDAHKRRRDALEYLYNHPTQKGKHKHIGLKQSTTPRWIIETDTIYEFVGEDGEIKKDSFSRFSVDEAKAEIINQIFDWKIQGYGHTKICQMLNQRKVPTFEDGNCRKAKKWHTFAISNLFQNKSTIGTFILKTVVDEEYYCEDEGIFKTRSKKTEATSELENYFPAVVSVEKYEAALRAIESNKTGNKTSKSEDKTHVFSQVMKCTCGSRMVFKGTKKTGKNKKVDWFEYLRCERAILKDGCDAENIIYKDFENAFLRFATAIDYKVFSSTQAKLKAKLKRIKLKQTRLSNEKSKLLLSASGLKKTFESIVSQNLDATLLLESISKNEQSLEALQSEIAKIEEQVERVEKEYEHSGKPIDKRTIKRELKSEEYSQRLVMRRTLNEQLKRNIVHMEVCSTKLLKFVIVCFDDYVVRTYAYQDEFASDLMYNTIKINIENLDESEAYNLIVKIVKAVQVSLSGRNGVITNQDLKNYLSEIKEKEL

SEQ ID NO: 5047 - protein, 674 aa, synthetic construct
MIGAEKLKTELFEYDKTKFNGICVPYARFSTKGQSKVGKKSLERQLSKAREYAKRNNLYINEDLIFTDKGVSGYSNQGDLSKAFKKGQMATMLLLLEDVPPLERENVYITFHNFDRFSRMSPDAAQAHFNKILNRGFKIVTTIDNQLYDRRDKGMSNMLISIIKMTTAWQESLNKSIYIKDALSRKKKVIEYLYTHPTQKGKHKHIGIVQPSIPRWIDQENVTYEYVAADGSKRVDTFKKFSLNKRKAAVVRQIFDLKIAGLGYTRICQKLNNDGVEVFDQGKFKKAKKWHSYAVQNIITSDKVLGNIVLMEMVAEEYHCKETDEIKTKKVKQEVTSRLENYYPAVVDEETFRLANVLKFQEKKGKPLGRIGERTNIFSTFMSCYCGASLQYSRSQINKKSKNTPPIYREQLRCTNALVKNGCFDDYINYVELEQAFFKYVNHIDFREICVVGDKSLEAEISNLQSEIKALNDEKKALSKKNSGLEKTFESAISQGLNADYVLVALNDVKKSSELIETKINDLKLKISKLKVSIDSKETEYLDIVEYSKQIKNSSTETKIMMRKKLNEFLHSKIKWMEICSSKNSKFVILCFHDEVIRTFAYTDNYANDLMFNTIKLTYEVDDSHLNYELFLIYIDQIKRSLRGETEVVTNADLINALQRLKRQFYESKGVVNV

SEQ ID NO: 5048 - protein, 547 aa, synthetic construct
MRTAYSYVRLSSKKQIQGYGQERQWQAIQAAALAHGWELSEKTFSDLGVSGWKGANIETGALSQFLQCVEDGYIEKGSVLIVENVDRLSRAGVQRAVSLLMQLLASGISIYTFTDSKLYEPDSHNPLMDLMAWALSAQRAFEESERKSQMILNAKAKAREKARLTGEIITRRCPSWLRVNQDKTAFELIPQRVETVRKIFDLYVNGYGTPRIGRLLTEEGRKPLTGRAWYPRSISRILQYRAVLGEYQPTLNGKPEGDAIKNYYPAIIDEDRFNEVQAVLKEGGAGKGRRGKEMRNYFAGLLRCSCGEGMHIVSSCVKGKRYYQLRCLQYRISCFGSSWNFYKLSSFVLFALRRLPILEVMGSQDNNNIKELNAKERELTFLLEDTRRQLDNTINAIAALGLNDQLQSKFRELKTSVTNIEKQLSNVKTELETSQGKLVIQKQDSEMLTGRFLELIDSTKDIDGRIKLNQVLRRYLSKIEMHADKKEEYRYIKIYRKDGDELVSIQCDHSLKGALFESKDGLETFELLPATDAKRNEISNTLLCTPK

SEQ ID NO: 5049 - protein, 532 aa, synthetic construct
MIEQNEAQVYLYIRFSRKTQEDGDSERRQLECAHKAAEKYNLTINEDFIMTDRGFSAFKAAHIRRGALGGFLEAVKSGGVAKGSILIVESLDRLSREAPFFAQMQFSSLINDGISIITANDGNIYNTREMNRRPEVFYGIYAVMQRAHEESKRKQALSAGSIKGKILKHEKGEHTTNFTSVPSWITNKKDGYVLNEKAKAVELIVSMYLNHEGLNTISRELAEREIKSPTGRKRWGITTIRKVLDNPALYGLNKFKLRYDSDGVTVEEKFEFENFYPAMISKEEFLVIQERKKKKANSRESYGKVTYLLSSYGKDRCVCSRCGYTTGSQMQKQVNRKGEYTQSVMRLHCRKHKETLDCCSSFKCERLEHAFINAIHKELNPDFLKSHKVVKGNEESIRAQIADIDNEFKMLMKQRKKMKSMSLKLEIMKEIDELDSKREELIEMLNKKLTQSNGEADYEKLKSLANKCLNIKNSNERKLFKQILIQSVKQIVIDFKTESLACYFNNGNHLSLNYITETDSYQTTIFYKRKPR

SEQ ID NO: 5050 - protein, 543 aa, synthetic construct
MTEEKQRFAVTYQRFSSGRQIGNSSLDRQTDTQKAWLRQNPNVTVIDNFVDKAMSGWSGKHLKEGSLGQLMKAIEDGIIQPGTLILVEHFSRLTRQNIDNAEELVKRIWKAGITLVTVRDNTEYPPEAVNNMSLRIRLIVEMEQAFKESEWRSAKVKASYTRREKLAKEEGKAPRIRKPFWLNPDGTLNHLHQAVKDMFNWYLEGLGQQRIVVRLREKYPDTAIQKINPSTVMRWIQSEIVRGYWRGNRVYEPAVDDQLFFDVQAIHKSRLYKNVKPDRQWPLSGLMQCGVCGRGMSIQKSGKSNPVVRCSSKQRDHSCDRKTTFPYFIVHMYMMTHVLQHAIRLHSDKSSNKGLQIELGKVERKLATTRKKLNDEKEFYNKASNEGQNTTMILQLMNETYQKVAELEEQEKSLKASLKQNNHSVSPESRDLVLTPETFNLEMHKLGFKIVVGEQELSTIGFDKPVSKMVYVGYCRKERAYKYADSSSDFIKVWPSSLVTDELLNMQMLKNYINSSSGLRYIWDNLYEDDLEENLAKKLKEKR

SEQ ID NO: 5051 - protein, 609 aa, synthetic construct
MDLCGSVMKKAYSYIRYSSPQQAAGDSYRRQLAATQAYCDAYGYELDTELSIYKELGISGFTGDQENLKQFISDCETGKVKKGSLLVVENLDRLSRQAINVAMRQFLSLLEYVDIYTLQDKKHYSNNDGRDSENQLLDIMTSLIIMSRAHEESLTKQKRLKDSWANQRKNAHKIKMSGVYPHWLIRSEDKKEFYLKEDRVKIIRHIFDLCINGQGATQILRSLNDNVEKYPPPSSKKEFWVRSTVKRLLSDRRLLGEHQFYVGHHSKREPIGEPLSNYFPQVIDEKTFVNAQISLKSRKIGAGKIKSDSFSNIFRGFLRCGHCDSPIEYVNKASKQASTLYLTCSNAKRGGDCNHSKHYRYLPLEHMLIHLSTANGFIPKPEKPSDLQTQLELITSKREQTNSKLSTLLERDFTAPIIMSKIEELTHNLAKYESEIAEIEDKLLALKADYEYEDLYHDMIVESDATKKFSNRVRFNSNLNKKIDNAYLYSIGLLPSIVFTMSDKSVHSLIIDERYNFGGCSIKNEDDTLIRLNGESVEAVDQMIWQMITQSIDLLGNINKDNEQAVKAGRKISLLISKFVMDSQNHSLLDEFQSVLSEFQDIQYKSEIC

SEQ ID NO: 5052 - protein, 554 aa, synthetic construct
MFTKNVSVKLNKYHLYQRVSKQVQAEEGLGIQRQEQVCEHWISEYNNRLVSEGKSVYSKGFIYEDRGKSAYTAANFNKGELGTLINDIKNGKIEKGDLIVIELIDRFSRANVDFVRGEFQRILDAGVKIAITKWNLVFEENMESVSSVTGRILLEIGMYLAYQESSQKSSRIKASRKLLEESGRKSIAKPPFWLARNLDLKSYTIIEENAEIIRNIFDLKLNFNYGAQKIIKKLGDLEIYRYSFDENGNLIKTTKNSPLNESSINAYLRNQNVIGKLKGKNYYPRIIDDRTFYAVQRRTRENTGGVGDIFRNVFVGVGKCGCLIRKENENGCDSLAKCGYIMAFSSRKVKNPTKGMYLKCNRKRKSTRCDAENINYYLAQNKIYNVLKSLTFDIEQSVDISHLEEKIISIDKSMSKIREYMTQYSDDEEWEKQYNIKRIEREKIENEIKASKSRITGRLSNLDMDFSEEKDRVLFNQFLKDNRITVYFTKDRMEIIIGSLNNFSIKCGYNDNEREIDQLVESISQKGFVGLETISRGSESKELLRFKLPTVSDS

SEQ ID NO: 5053 - protein, 674 aa, synthetic construct
MRTTPKIYNYARVSTTKQTKGVGLETQQQRSVLENLSQEHNLPIHDENFVDQGLSAYHGKHKDGAFGVVLSRIESGEIASGSILVVFSLDRLSRETVNVAMEQFLSIINRGVRVYTHIDCKMFDSESQNQTADLIGSLITMQRANEESETKSKRIIAAQKIALKRWKDTGKPQGALGRSPFWIDQPTNTLNINAEGVKKAVEMKLAGYGDLKIKQYLDANFEYKQTRTKGTVKQSNTWDYTAISQLWANRSLIGEKNFHIEGVSHVFENYYPPIIDEATFRKLKMCKSEKRGRNTSSGKIPLLKGIARCGICGGAMVFVDKGDNRVNYVCNLAMKGEHDREVYNVNMLDLLTLEICKDAYLAESDKANNTFVENEKIKIEAELVEEREVLDELVARFKSKRSNAILDLIGDSENKIDELEARLDALNSADVILSADELASLPDIFTDDVRKDYLHPERLAIRNNLYRFISSITLNRMFEPCSDAKTKFANCVDITWHFKNGQKRRLAMLPYEYTKTESGGKGLYLPFVYMYCSKNLIKVEDGDQLLSDILTKLHKLDLTKCLYPSKGQYQWSQRTLECGKTYWVPLDEGVFLEPEALQFDFGGIHTEKSTSQNYISLMYSHLWAEGEYTNDYPLLKFRDLARGFNFVESYAFYDTLRDNLFDQELYLARDFLMS

SEQ ID NO: 5054 - protein, 531 aa, synthetic construct
MSIAYSYIRFSSAQQAQGDSLRRQTQLAQRYCEENNLTLSDTNFQDLGVSAFHSDNVKEDSGLGQFLEALEQGAIPEGSYLLVESLDRLSRAKVQTALIQMLRITQLGVKIVTLMDNRLYGRDLDTTDLIISLTIMERAHNESKTKSERIKAAWTNKRQNPNTTNRHSSTPFWLTLNSDKRTYTVNEEYAELVRKIYQLSIDGWGVIKIVRYLNENGITAPKGASWATTTVNRILNSKATLGHYEPTQNRKSLNTLIEDYYPPIIDEKTYYLSQQRKFERSKPEAAGRKTEYPNPLNQIAKCKKCGSSMYYENKSQSLKYLTCREFKKKNCTNKPIRMELIYRFIYEVFNSPMYHQQHAKLVDKSKQKDVSKLAELEGRYEAERKAYEELLEASSSFSDPIMLKELQKRSTSILELSKQMEEAKAKETVEKARTVHINFTEALQLTVNAFHLPLEGIKVEELNTDELFNTRVRLNRILKQAFNHLSIFHCNESKRITIETEATEDCPIDLRYETNQKAIKEPMKNRIWSVY

SEQ ID NO: 5055 - protein, 547 aa, synthetic construct
MRTAYSYVRLSSKKQIQGYGQERQWQAIQAAALAHGWELSEKTFSDLGVSGWKGANIETGALSQFLQCVEDGYIEKGSVLIVENVDRLSRAGVQRAVSLLMQLLASGISIYTFTDSKLYEPDSHNPLMDLMAWALSAQRAFEESERKSQMILNAKAKAREKARLTGEIITRRCPSWLRVNQDKTAFELIPERVETVRKIFDLYVNGYGTPRIGRLLTEEGRKPLTGRAWYPRSISRILQYRAVLGEYQPTLNGKPEGDAIKNYYPAIIDEDQFNEVQAVLKEGGAGKGRRGKEMRNYFAGLLRCSCGEGMHIVSSCVKGKRYYQLRCLQYRISCFGSSWNFYKLSSFVLFALRRLPILEVMGSQDNNNIKELNAKERELTFLLEDTRRQLDNTINAIAALGLNDQLQSKFRELKTSVTNIEKQLSNVKTELETSQGKLVIQKQDSEMLTGRFLELIDSTKDIDGRIKLNQVLRRYLSKIEMHADKKEEYRYIKIYRKDGDELVSIQCDHSLKDALFESKDGLETFELLPATDAKRNEISNTLLCTPK

SEQ ID NO: 5056 - protein, 531 aa, synthetic construct
MSIAYSYIRFSSAQQAQGDSLRRQTQLAQRYCEENNLTLSDTNFQDLGVSAFHSDNVKEDSGLGQFLEALEQGAIPEGSYLLVESLDRLSRAKVQTALIQMLRITQLGVKIVTLMDNRLYGRDLDTTDLIISLTIMERAHNESKTKSERIKAAWTNKRQNPNTTNRHSSTPFWLTLNSDKRTYTVNEEYAELVRKIYQLSIDGWGVIKIVRYLNENGITAPKGASWATTTVNRILNSKATLGHYEPTQNRKSLNTLIEDYYPPIIDEKTYYLSQQRKFERSKPEAAGRKTEYPNPLNQIAKCKKCGSSMYYENKSQSLKYLTCREFKKKNCTNKPIRMELIYRFIYEVFNSPMYHQQHAKLVDKSKQKDVSKLAELEGRYEAERKAYEELLEASSSFSDPIMLKELQKRSTSILELSKQMEEAKAKETVEKARTVHINFTEALQLTVNAFHLPLEGIKVEELNTNELFNTRVRLNRILKQAFNHLSIFHCNESKRITIETEATEDCPIDLRYETNQKAIKEPMKNRIWSVY

SEQ ID NO: 5057 - protein, 568 aa, synthetic construct
MNCIAYLRVSSHGQLEKGDSIDGQKNHIESWAKNNGHNIAKWYIDDGRSAFNGKREQFELMLYELDNDIFQTEAIVVYSLSRFSRNLRSQLSSLEKLNSLGIKLISTTESLPEAEDDNYMMSTILGLMNEQYSRQNAKVVCHRLKDTARKGYFTGGPIPFGYKSVEVNGDTSKHRKVLQILDEEAVVVKDIFQMSDQGDSGLGIGVKNIAKILNQRGDKRRGTVWNRNSVHRILTNPAYYGNFIFGKKNSEPISVPIPQIISEEQFIRVQDGLKERDFTSLENKKFRSNSLLTGILICPKCGSSMVVITGKSGRYKYYQCSLQVRQSPDKCSSKRIRKDIIEPIVKEKFCNQLLTEERLKTICKLAREVHSTAAKELVSEKLKLAKHISQTKEKSYRLISLIAQGTLEPSKQINDQINGYTIALERFEFQLQEVQRKLTLPVKNFGSRRVEEFAIELKQHLIEIDDTSLKQLMLATLNSIEGNVSAKKMRFKGSNMAMLYIIANAKTGTDFSVPVFVTKWRRDRDLNPRYAINVCRFSRPVLSTTQPSLRCGTYNREWSSRCKALNYN

SEQ ID NO: 5058 - protein, 558 aa, synthetic construct
MSKEKIKVYLYTRVSTSIQIDGYSLEAQKSRMKAFALYNDYEIVGEYEDAGKSGKSIEGRVQFTRMMEDIKSGKDGVSFVLVFKLSRFARNAADVLSTLQIMQDFGVNLICVEDGIDSSKDAGKLMISVLSAVAEIERENIRVQTMEGRIQKAKEGKWNGGFAPYGYQLIDGKLIINEEEAIAIRTIFDQYVNTSIGANGLSKYLENHGIRKIPRQNGKNPLFDAGLIRKILKNPVYNGKIAFGRRTLEKVHGTRNEYRQVEQDDYLVAEGIHQAIIPDELWQAAQVKLKAQAKKYEHVNKGKNMRTHLLSGIVKCPICGAGMFGNKSIKYKKDGTKYKDFYYYGCKHRLMNRGHKCTYNKQIREELLDDAVAEVIIKLVSNPKFASMIQEKINMKVDTSAIENEIDNYQNELRKSHSTKYKLIEEIDNLDVEDKHYKRRKNDLDDRLYRMYDKIEELESQLIEAKAKKETIEVEKLTGDNIYKVLIYFDKLYKVMNDVERRQLIEALISEIQIYEEKQPNGQWLKSITFKLPIIDEDLNISLENDEQVETVAKIIKQ

SEQ ID NO: 5059 - protein, 648 aa, synthetic construct
MNREGKKCVLYPRVSTEMQVDGYSLEGQKNGLKRFADREEMEIVGIYEDAGKSGKSIEGRPAFKKMLSDIKNGLEIDYILVYKLSRFGRNAADILNSLEFVQSYGINLICIEEGIDSSQTSGKLLISVLSAVAEIERENIIEQTMNGRREKARQGGWNGGFAPYGYYLKDNQLLIEETEAEAIRIIFDKFANSDIGLGGVAKYLNLQGIKKIPRQNGTLETWSSHFIRLILDNPVYCGKIAYGRRTREKVKGTKNEYKQVHAEDYILEDGQHEGIISEELWQKVHAKRMATGIKQPSKIGKDRSHLLTGILKCPLCGSSMYTNKHAWTNKDGTYKEVYYYICGRNKQERGHHCDYKASLRKTDIEPLVIEAVKELVSDKYFAKEIEKRIGVQTDTTAIDKELANYESKLKEVDLNKARLEREIDNLPIDARFRERKIHDMTLRLDALYDTIVELEERIEDAKLRKSSIEMETITLDNIYKLMLNFGKLYDIISDEEKKSLITYLIKEIQIYPNGESEQPLKSIEFNFPIYRDGQEVRRLLWEKGNTVETVALLSKLDVDKHIDVEIKLDELDLTSAESKATYAQIKEYVLEKFGLKVSTLYIAQIKKKCGIEMREHYNKSKKDNQAIPQCTPEKEEAIMDALRHFKMI

SEQ ID NO: 5060 - protein, 593 aa, synthetic construct
MQEVEVIKAKNVLARQARGKAIERLRVAAYCRVSTDSEDQLNSYKSQVQYYTDMIKKNKEWVLADIYADEAITGTQVTKREDFQRMINDCMNGEIDMVFTKSISRFARNTLDTLKYVRMLKERNIAVYFEDEKINTLTMDGELLLVVLSSVAQQEVENISANVKKGLKMKMKRGELVGFQGCIGYDYHPEDKTITVNQEEAEIVRYIFNRYVDGAGGSVIGQELESLGYKTKYGSSTWAPSTVIGIIKNEKYKGDILLGKTFTVDPISKRRLENMGEEDKFYMKDHHEPIISEEVFEKAQEILNRRNKNRTTVGSGKREKYSRKYAFSCMLECGFCGGTLTRRNWHSGSKYSKVIWQCVTATKKGKKFCKHSKGIPETAIEEAFVESYRLLCDDNKDVLEEFLQRMDDTLSSSVVSKQLAKAEKEIDALEKKKSKLVDMRLEEIIDKETYESKYADLVSKQEQLVEERQKLQETSDNEKDIKKRLKEFKKTLEQNEVLDKFDRYVFESIVEKVIVGGLDENGNVDPAQLTFVYKTGLKNSVDGAKFKTQRKNARGRHRTNELCSHDSNEVDKMCSDSSNDTCGDGSTSFPQKT

SEQ ID NO: 5061 - protein, 674 aa, synthetic construct
MRTTPKIYNYARVSTTKQTKGVGLETQQQRSVLENLSQEHNLPIHDENFVDQGLSAYHGKHKDGAFGVVLSRIESGEIASGSILVVFSLDRLSRETVNVAMEQFLSIINRGVRVYTHIDCKMFDSESQNQTADLIGSLITMQRANEESETKSKRIIAAQKIALKRWKDTGKPQGALGRSPFWIDQPTNTLNINAEGVKKAVEMKLAGYGDLKIKQYLDANFEYKQTRTKGTVKQSNTWDYTAISQLWTNRSLIGEKNFHIEGVSHVFENYYPPIIDEATFRKLKMCKSEKRGRNTSSGKIPLLKGIARCGICGGAMVFVDKGGSRVNYVCNLAMKGEHDREVYNVNMLDLLTLEICKDAYLTESDKANNTFVENEKIKIEAELVEEREVLDELVARFKSKRSNAILDLIGDSENKIDELEARLDALNSADVILSADELASLPDIFTDDVRKDYLHPERLAIRNNLYRFISSITLNRMFEPCSDAKTKFANCVDITWHFKNGQKRRLAMLPYEYTKTESGGKGLYLPFVYMYCSKNLIKVEDGDQLLSDILTKLHKLDLTKCLYPSKGQYQWSQRTLECGKTYWVPLDEGVFLEPEALQFDFGGIHTEKSTSQNYISLMYSHLWAEGEYTNDYPLLKFRDLARGFNFVESYAFYDTLRDNLFDQELYLARDFLMS

SEQ ID NO: 5062 - protein, 678 aa, synthetic construct
MRNIPKIYNYARVSTTKQLKGVGLETQQQKSVLENLSQKFNLPVHDENFVDQGLSAYHGQHREGAFGVVLSRIESGEIASGSILVVFSLDRISREATNLAMAQLLNIINRGVRVYTHIDGKMYDTTNDTFSIDLMFSMFTMERANEESRTKSKRIIAAQKIALKRWRDTGKPQGALGRSPFWIDQPTNTFNINAEGVKKAVEMKLAGYGDLKIKQYLDANFEYKQTRTKGTVKQSNTWDYTAISQLWANRSLMGEKTFHIEGVSHVLENYYPPIIDEATFRKLKMCKSKKRGRSTSSGKIPLLKGIARCGICGGAMVFVDKGDNRVNYVCNLAMKGEHDREVYNVNMLDLLTLEICKDAYLAESDKANNTFVENEKIKIETELVEEREVLDKLVARFKAKKSNTILDLIGDSENQIDVLEAKLDAINNADVVLNADELASLPEIFTDDVRTDYLHPERYAIRNNLYRFIASITLDRVVAPCSDAKTKYANCVDITWHFKNGQKRRLAMLPYQYLKADDGSKVLYLPFVYMYGSKSNIKVDDGDQFLSSIFEKLHAFDLTKCLFPSRGCYQWSKLSLECGKTYWASLDKAMFMEKGMEVIADTIRDNGDTNKVDGVTTNYLSLMFNYPSSEEFSYDYPDSTFVELACKFGFVADRDFSLFLQDNNFNRELYSSLDFLMS

SEQ ID NO: 5063 - protein, 554 aa, synthetic construct
MFTKNVSVKLNKYHLYQRVSKQVQAEEGLGIQRQEQVCEHWISEYNNRLVSEGKSVYSKGFIYEDRGKSAYTAANFNKGELGTLINDIKNGKIEKGDLIVIELIDRFSRANVDFVRGEFQRILDAGVKIAITKWNLVFEENMESVSSVTGRILLEIGMYLAYQESSQKSSRIKASRKLLEDSGRKSIAKPPFWLARNLDLKSYTIIEENAEIIRNIFDLKLNFNYGAQKIIKKLGDLEIYRYSFDENGNLIKTTKNSPLNESSINAYLRNQNVIGKLKGKNYYPRIIDDRTFYAVQRRTRENTGGVGDIFRNVFVGVGKCGCLIRKENENGCDSLAKCGYIMAFSSRKVKNPTKGMYLKCNRKRKSTRCDAENINYYLAQNKIYNVLKSLTFDIEQSVDISHLEEKIISIDKSMSKIREYMTQYSDDEEWEKQYNIKRIEREKIENEIKASKSRITGRLSNLDMDFSEEKDRVLFNQFLKDNRITVYFTKDRMEIIIGSLNNFSIKCGYNDNEREIDQLVESISQKGFVGLETISRVSEGKELLRFKLPTVSDS

SEQ ID NO: 5064 - protein, 547 aa, synthetic construct
MRTAYSYVRLSSKKQIQGYGQERQWQAIQAAALAHGWELSEKTFSDLGVSGWKGANIETGALSQFLQCVEDGYIEKGSVLIVENVDRLSRAGVQRAVSLLMQLLASGISIYTFTDSKLYEPDSHNPLMDLMAWALSAQRAFEESERKSQMILNAKAKAREKARLTGEIITRRCPSWLRVNQDKTAFELIPERVEIVRKIFDLYVNGYGTPRIGRLLTEEGRKPLTGRAWYPRSISRILQYRAVLGEYQPTLNGKPEGDAIKNYYPAIIDEDRFNEVQAVLKEGGAGKGRRGKEMRNYFAGLLRCSCGEGMHIVSSCVKGKRYYQLRCLQYRISCFGSSWNFYKLSSFVLFALRRLPILEVMGSQDNNNIKELNAKERELTFLLEDTRRQLDNTINAIAALGLNDQLQSKFRELKTSVTNIEKQLSNVKTELETSQGKLVIQKQDSEMLTGRFLELIDSTKDIDGRIKLNQVLRRYLSKIEMHADKKEEYRYIKIYRKDGDELVSIQCDHSLKGALFESKDGLETFELLPATDAKRNEISNTLLCTPK

SEQ ID NO: 5065 - protein, 566 aa, synthetic construct
MSKIIYPYIRFSSDKQAAGSSFQRQMERITDYANENGYIVNNSLKLQDLGLSAFTAKHIEKGALGAFLDGVKAGKIEQDGSAYLCIEQLDRLSRENVDDAYQVFRKILKSNVNIITLMDNKIYTKESLTDLMSIMYSLMLMAQANQESAKKSDRVLRAFDKKLDKLNEGKTVQYVGMFPGWIDNKGTKEETNFVINKKSEIVQRVFSLYINGTSMGDIARILNEERVPQVAKKRQKNYTNSWSSAKINHLLKNRCVLGELLIRKTGDIFENYYPAIISVDDWDIVQSMMKTKKIAKSSGRRSINIFTGKMFCACCGQKYYFETDDKNTKTGKKLYYMLKCSGRRSLSCKSKSIKYDDFLDSSPNLFGMITKSKKDNSKEIDKIKLKIKEINETTKKSRDKLITLENLNDSNELDFTVYLKESSKVQKQVRENDARVASFKLKISRLSSDNKLDYFDKTDPNSVVKAKKFISDNFAAFVISSDSRFCIALYNDGQVLQFKIKNSKIEKKESQVKNIDNFESFNEFYKLKEQVLETYKNGTMDGRFIEILSATNFWGVETSEKDYSLD

SEQ ID NO: 5066 - protein, 530 aa, synthetic construct
MRQAYSYVRLSSKKQILGYGEDRQCEAIEAAALANGWELSDKTFSDLGVSGWKGANIETGALSQFLRCVEDGYVAKGSVLIVENVDRLSRAGVNRAVSLLMQLLDSGISIYTATDNKLYEPDSPNPLMDLMAWALSAQRAFEESERKSQMILKAKAKAREAARSSGKIITRRCPSWLCVNQDKTAFELLPERVETVQKIFDLYVNGYGTPRIGRLLTEEGRQPLTGRAWYPRSISRILQYRAVLGEYQPTLNGKPEGEPVKNYYPAIITEDQFNEAQAVLKEGGAGKGRRGGEMRNYFAGLLRCSCGEGMHIVSSQVKGKRYYQLRCLQYRISCYGGTWNFNKLSSHVLFALRRLPILEVMGSKDNGNLKELNDRVRDLTHLLEDTKNQLDNTINAIATLGLNDMLQTKFRELTAAATDIEGQLSSAKTALETSQGQLAIQKQDSEMLTGRFLELIDNTKDLDGRIKLNQVLRRYLSKIEMEADRDAEYRFVRIFRKDGELLVTATCDHKLNSALFESVDGTETMELNNS

SEQ ID NO: 5067 - protein, 551 aa, synthetic construct
MKQQLAYSYVRFSSPQQAKGDSFRRQTKAAREYCEKHGLQLADLTLHDLGLSAYSGTHYEQGALGDFVRAVQQGKVDQGSYLIVESLDRLSREEVDIAFSRFASLLRANINIVTLQDGKQFTRESLKNTTDILTSILVMLRAFEESDIKAKRIKAARDEKHRQARENKKPTGYRPPDWMKLESGSYQLIPERAAIIKRIFQLNNGGLGAIAIARLLNEEQIPAWGRSKTGWQTSYIKKILKTRTVLGEYQPHVVVNRVRSAVGEPITDFYPPVIDPKTFKLAQLTMTSRDKRPGGIRNSRMTNLFTGLVRCKHCGNTMHFVDKGRPPKGGQYLLCSLAKTGAINKDGVSCKRVSIRYKETEDAILTVAATLNLRVTKPSNEAEVSNLKEKLSRVNAELGTVENSITRIADAIAELPDSSGLLSKLVELEQQKQDKKSEYQALEKRIDELELIPKSLNVWKELKSTLRTLRVEAADKANVELRAKINSQLLSCIDRIEFDNHAKAITVCIDENRSVEIRFAEKMKGYTIKPSWDNRDFLPKTFLVKSVARTI

SEQ ID NO: 5068 - protein, 547 aa, synthetic construct
MRTAYSYVRLSSKKQIQGYGQERQWQAIQAAALAHGWELSEKNFSDLGVSGWKGANIETGALSQFLQCVEDGYIEKGSVLIVENVDRLSRAGVQRAVSLLMQLLASGISIYTFTDSKLYEPDSHNPLMDLMAWALSAQRAFEESERKSQMILNAKAKAREKARLTGEIITRRCPSWLRVNQDKTAFELIPERVETVRKIFDLYVNGYGTPRIGRLLTEEGRKPLTGRAWYPRSISRILQYRAVLGEYQPTLNGKPEGDAIKNYYPAIIDEDQFNEVQAVLKEGGAGKGRRGKEMRNYFAGLLRCSCGEGMHIVSSCVKGKRYYQLRCLQYRISCFGSSWNFYKLSSFVLFALRRLPILEVMGSQDNNNIKELNAKERELTFLLEDTRRQLDNTINAIAALGLNDQLQSKFRELKTSVTNIEKQLSNVKTELETSQGKLVIQKQDSEMLTGRFLELIDSTKDIDGRIKLNQVLRRYLSKIEMHADKKEEYRYIKIYRKDGDELVSIQCDHSLKGALFESKDGLETFELLPATDAKRNEISNTLLCTPK

SEQ ID NO: 5069 - protein, 573 aa, synthetic construct
MKVAAYVRVSSYNQKQTGDSISGQKEYIKNWAYLTGNEIIKWYIDESASAFRDLRRYNFNLMLQDIENPNSEIEAIVVYNLSRFSRNLKNQLTAQNLLETYNVRLISASEGIPDDHNTARLHTSFLGILNEHYSRQNSAVVTDRLQDTARKGYFCGGPIPLGYISVEIEGDTSKKRKVLAVNDDEAPIVKEIFSLAEKGIDGKPMGVKAISIYMNNKGVLNRGKRWNRNSIDRVLTRRDYFGEHIHGKNRDPRKGLEPIIVNVPAIINKDQFFNVQDGLKSRGLKNNENKCYRSDSLLVGMLKCSICNSNMVVVSGKGGKYKYYECSKKIRQDVKSCSSKMLPKPLIDNAVRRLLSERVITEDNINYIYKDLKSRIRNLVEKSARNVASINRRINNNNFKVNNIIEQIASRQLEPNAQINKYITDKRNELESLNRELVTALKGTKLPIKQFGQTQVAQLVKNLKEIVLTGDEARVKQILLILLKEVEITPQKKISILGFNMALVFLASHAKTGTDFSVPVIDTIWRRDRDLNPRYAINVCRFSRPVLSTTQPSLRCGTYNREWSSRCKALNYN

SEQ ID NO: 5070 - protein, 500 aa, synthetic construct
MAIAYSYIRFSTRKQADGDSLRRQSRLALEYCKANDLELSEQSFKDLGVSALHSANANEDKGLGQFLSALQQGVIPKGSFLLVESLDRLSRAKVMIALRQFLHIIEYDITVVTLIDGRKYNSESDTSDLIISLTVMERAHNESITKSKRILAIKATQRKLVREGKVVNKRLPFWITNSDGYQLNDKAQIVRDIIKQRTSGVGFHRIAMNLNGVYEAPKAKHWSDTTIRDIVKSRALYGSMVDKDGEVESVFPALIDFTEWQAIQSEHVSSAGGYTKHNHLARLVKCECGAAMSKKIQKSKTKTKTHEYNTWKCVAATSGGCEHKGVIRDLDVDIFKSLNHLKINKTKSDTQLNKISKQIEKKSVRQQELEQALLEDDAPIAALTKAIKKTTEELKQLRSERDLLSVRTDSKLLIELQDNAVEFNIELRKLVEKIVVTPISSNRFQIKIHQHNGHIVNCLKGRKSQRSEWTRLFGKTEEMLRIATEDDGMPYVDWAETDEL

SEQ ID NO: 5071 - protein, 604 aa, synthetic construct
MNKATTLLNTNTAYIYSRVSKEAQVNGDGLRRQIDNAFRFIDSKNRELIEKGLPTYIVADELITDRGLSAYKGYNTAANGGLGAFLEAAKRGEVKRGSLLVVEAVDRISRMPADESRKTFSLFKEYGIDVAIVKFGVIIKHSESTTLENDLLITAAIHLAHMESQQKSNRINDRFEEKRRLEKLGGAKRTTICPLWMKISEDKKSFELIPDRARVMRRIIDMKLNGIGCQRIASILNEEGVPYFNGKTWSTRIVLKYCKMIQLYGAFQRVRHIRTENGTQKQPWGDIEKDYYPALIDEQTFLRLKNSFKKSGGRQTGAFSNLFSGLLCCPKCGSSMSYYKPNRGTLKVRCRKQLDKQGCDQRALNYEEIEERLIRALAGLDYAKLNDSSFVDVSAELSLLEATMAELKENVNVVSTQLMKNTDPRICETLTDKLSQLYSDIDSNKAKFDELSTLHSNYDISVIDNLELAENKDRERYNHFVKQFIKYIICTDKKQGGSIRVVFKADAIGELPFNYDSDDRNDKAISEVFTANRPITNADTVRTINMDKSSTVYLPLLKEITDVKQPSDLSDTRDRLKYMHAVRVAVSRDPKKWGEIAKKAQLKY

SEQ ID NO: 5072 - protein, 545 aa, synthetic construct
MKKYHLYQRVSKQIQAEEGLGIQRQEQVCEHWISEYNKRLLDDGKSAYSKGLVYEDHGKSAYTTANFKRGELGTLMKDIESGKIAKGDLIVIELIDRFSRANVDFVRKKFQSILDAGVKVAITKWNLVFEENMEGISSVSARLLLEIGMHLAYQESSQKSTRIKASRKLLEDSGRKSIAKPPFWLVRNLDLRSYTIIEENAEIVRKIFDLKLKFNYGPQKIIKSLGELEIYRYKFDDNGNLVKTTKNSPLSESSINAYIRNPNVIGKLDGKDYYPRIIDDKTYYAVQKRTRENTGGASDIFRNVFVGVGKCGCLIRNEDENGYVKFTKCGYIMAYSSRKVKNPAKGQYLKCNKKRKNTKCKSENINYYLAQNKVYSVLKSLKFDFSQSVDISHLEEKINILNKEMSKIRTFMAKYTDDDEWENQYNIKRMEREKIENEIKASKSRITGKLSNLDIDFSKEKDRVLFNQFLKDNRITVYFTKERMEIIIGSLNNFSIKCGYDDSNRDIDHIIESYSKNGLVGIEEKAGKSEGKGLLRFNLPTVPGS

SEQ ID NO: 5073 - protein, 506 aa, synthetic construct
MRSVITYLRYSSAIQGTEGADSTRRQNDLFRQWLKKNSDAQIVASFSDEGLSGYKGKHLTGQFGDMLARIESGEFPEGTILLVESIDRIGRLEHLETEALMNRILGNGLEIHTLQDGLIYTKDALADDLGISIIQRVKAYIAHQESKQKSFRVSQKWEQRAKLALAGEQRLTRNVPGWIDPDTFKLNEHAETVRLIFKLLLDGESLHNIARHLQSNGIKSFSRRKDANGFSVHSVRTILRSETTIGTLPASQRNDRPAIPNYYEAAIDASTFNKAQEILGKNRTGRTPASDNPLTINIFKGLFRCQCGASVHPTGTKNKYAGVYRCNNHLDGRCDVPPLKRKPFDKWMLENFLGMIDVGNDGESERKIAALQHEVEIVTSRIKKATALLLEMDDITELKAQVKELNQKRTELQTTINTMKRKTSLSDKGLPQLKDIDLMTKAGRVECQLILSKHLKGLTLGKDSVTVTLQNDTEIIVPTDPLPLNDGTSIFEIAEKELLEIDAYQL

SEQ ID NO: 5074 - protein, 415 aa, synthetic construct
MGDMRVIPARPAWPQRLRVAAYARVSTEHERQLSSIAAQVSYYSHLIQSTPGWDYVGVFIDEGITGTSTKHRDGFKHLMDTARAGGIDVILTKSISRLARNTVDLLATVRELKALGVAVRFEREQIDTATADGELLLTLLASFAQEESRSLSHNVKWAIRNRYKNGGTNSFVVYGYHWADGKFAIIDEEAEIVRLLFSNFLKGISPEKTAAILNEQGVRSRGGGRFYGSVFRRMLENERYKGCQMLQKMYRPTIQAPTRCLNDGELPRYWVDQALPPIIDEVMFDAVQAEIAYRREAGPAATPSKNTGVFTGRIYCRACGKNYQRKTRTYKSGTSYKFWRCWSACTGNGNPCSGHNLRETLIERACADVLGTQSFDPVSVAEQIVMIEAFPHQLTFHLTDGTMTPVGLTSEGRLA

SEQ ID NO: 5075 - protein, 517 aa, synthetic construct
MTRTVTAIPATKKPGTVTTLSGVPARKRVAAYARVSTEMEEQTSSYEAQIDYYTTYIRSRNDWQFAGMYSDEGISGTSMKRREGFQTMIDDALAGKINLILTKSVSRFARNTVDSLTTVRKLKDAGVEVYFEKENIWTFDSKGELLITIMSSLAQEESRSISENVTWGHRKRFADGKIMVPYASLLGYKKGVDGNLVIDETQAPIVRRIYARFLQGATPQTIAKELIADGIATPRGKTVWPPSTVRSILANEKYKGDALLQKTFTADFLTKTMKVNEGEVPQYYVTGNHEPIINPDTWDAVQAELARRQGRGTSNSHPFANTITCSDCGGSFGRKVWHSTSKYRRYIWRCNNKYNKTHRCTTPHVTEDQIKHAFVKALAERVTDNNALDDTMRLLDDTVYNTRELETQQAKLAERIEETITLMNQLITAAAGTAHDPDDYDRRYHELENRHHQLEAEHQHISCQIDDLRHRRAQAIKVRDYLASQPPLTYSDQAWNTLVDHATVTADGAIEVRFKVL

SEQ ID NO: 5076 - protein, 523 aa, synthetic construct
MRQVITYLRFSSKPQERGDSIRRQKGLFERWLKDNPDAKVVDEYSDEGASAYHGHHLKGDFGRMLQKIQDGKYLSGQTVLLVESETRLNRQKARNTENLVDLITGKGVDVICLESGKIYTSTNIDDLDTSIQLKIAAHIAHQQSKEKSIKVSAAWEHRAQLALEGKQQLTKNVPGWIDPDTRKLNEHSSTVVTIFDLLLSGESLHNIARYLQANNIKSFSRREKANGFSVHSVRTILRSESTVGTLAASKRNDRPAIPNYYEPAIDVATFNKAQEILSKNRVGRAPASDNPITINLFKGIIRCQCGASVHPTGVKATYQGVYRCNNVPDGRCNVPTIKRKPFDKWMLDNIIGFLERSDGSNTDKRKAEIEYQISLVTSKLKKAATLLLELDDVTELKEQVKELNIQRINMQSELDELNQRETLSDKPLHHLSEIDLTTKAGRVEAQLILSKFVQSIELQREMIIITLRNGAVIGKSRDLSPALSQDLMKQVVSSSSPRDIDMLSVITSDEEFRKSGKPVTKRS

SEQ ID NO: 5077 - protein, 542 aa, synthetic construct
MQQLKQKRVGIYVRVSTEIQSTEGYSIDGQINQIREYCDFNNFIVVDVYADRGISGKSMNRPELQRLLKDANEGQIDSVMVYKTNRLARNTSDLLKIVEDLHRQNVEFFSLSERMEVNTSSGKLMLQILASFSEFERNNIVENVFMGQTRRAQEGYYQGNLPLGYDKIPDNKHELMINQHEANIVKYIFESYAKGHGYRKIANALNYKGYVTKKGNPFSINSITYILVNPFYIGKIQFAKYKDWNEKRRKGLNDKPIIADGKHPPIISQELWDKVQSRKKQVSQKPQVHGKGTNLLTGIVHCPQCGAPMAASNTTNTLKDGTKKRIRYYSCSNFRNKGSKVCSANSVRADVIEKYVMDQILEIVKSDKVINQVLERVNQENKVDIGALNHDIAYKQQQFDEINTKLKNLIQTIEDNPDLTSALKPTIHQYETQLNDITNQMNQLKHQQNQEKPSYDTKQIAALLQRIFQNIESMDKSQLKALYLTVIDRIDIRKDGNHKKQFYVILKLNNEIIKQLFNNNNLDEVLLSTSSLFLPQTLYFQI

SEQ ID NO: 5078 - protein, 679 aa, synthetic construct
MNNMDKKILIYCRVSTQQQTTDRQKEELLKFAEDNHWNVAEEDIFIDVISGFKKGEFRPEYAKMLERVEYGDIDIILFSEFSRLARNATELLEQIKLFIDKGINLYFDKQKLWVKDINKDVGSLILLHVLAVMSSYEIELFVERSLSGKITKVQAGHGGGDERAYGYMHNENKQIVINPIESKIVARIFEMYVGGYSSIQISEILNAEKVPAPYVRKLNEYKKNREAKGLEVKEYKFDTDNLKWRISTINRLMHNELYKGNRRITFYKPDPTNPLPLSERQDREIVYEYSEHVESLRIVSDELFQQAQDKLSKAHYNKNNAVRHENLLKHLMVCGECGANFSVGKSNETSKNYISGGRTYKCYGRVNRKDKPRTCTNGAELRQWKLDGLVLQLSIQMFAEINIQQTNILKIENLGKEIEELVQIKSSKNTELVEAENLYKKTLKRLIAIEDDEVAKNLISDAKHKYDETKNVLNKTMDKLSREITTKRITIDNLKRLNANPLLINKMDEIRKNRDLVKTMVDEYIDKITIFRLHELWLLVVVSYKGGEEMWGTIKCARYKKEEMFYDELHCHYGVEFQGWLLNNTEHCFSYDKSTRIITYHGGSKIYVEFKSGEYDYDTFNQMIQETGWMGCFPFYAYEDSDKDLSVPFNEKFRKSLQENRVDWKARNDKVLERLLSES

SEQ ID NO: 5079 - protein, 547 aa, synthetic construct
MKLLATYIRWSTKEQDSGDSLRRQTNLIDAFYSKHKNDYYLLPAHRYVDKGKSGFHQQHKAQGSDFRRMFENVMSGVIPEGSLIVVENFDRFSRADIDTAIDDVRQILRKGVSILTLGDGELYDKSALTDPVKLIKHIIIAERAHQESLVKQKRIAQVWNHKTQLARELKKPMGKQAPGWLELSEDGSHYIVDEDKASLVNIIYDKRLSGMSMFAICKWLNEQGYPTINQRKVRISKTKKPDGNWSALSVKHILTSRSVLGYLPAKISTEDRKTVLREEIESFYPQIVTDSKFYAVQQLLEETGKGKTSSGDHWLYVNILKGLIRCKCGLVMTPTGIRKPVYQGTYRCNGNKESRCSYGTVSRKLLDTQLCSRLFSKLSQLHDEATDTAKLDELQRRLNTVDSELEKLTETLIQLPNITQIQEALRVKQEEKDELIVQLSREKARVKSVSSLDLSGLDMESVEGRTEAQIIIKRLVKEIVVSGNEKLVDIYLHNGNMIRGFPLDGKDDHTLTLEEATDEMQSLDDMLIFGEPVTRIYPAGDMEEVDA

SEQ ID NO: 5080 - protein, 556 aa, synthetic construct
MTRAHYHSTKPQKAVIYCRVSSKSQSTEGSGLDSQEHLCREHAASKGYEVVAVFPDDISGYGDFMKRPGMVALLKFLDDNPFDNFVVIFDDLKRYSRDTEFYLKLKREMEMRGAIRECPNFNFEDTPESKFVETVLAAQGELEREQNRRQVLQKMKARVEQGYWVFHAPKGYIYQKAQSGGKVLVPDPVLGPIVKSALDGFASGRLGSQVEVQRFLQSQPEFAAQSPKGRVRPQAIVRLLSNPVYAGMVYAKVWGVSLRPGKHEGLVSPTTHQKILEILERGVYAPSRVDTTEKFILRGAVSCASCGKPMTAGHCKGKTKTYAYFWCAQKGCDQRSKTISRDKMEAEFTDLLKELQPTQWLLRLAEAMFKDLWDRENRQAHERVLAYQKEADAAEAEIQALVDRIVESSNARVISALERRIDAEERRKIIALEHARIGVKPLIPMERVFELSLKFLKAPYLLWESGRLDLRRLVLKLTFSEHLRYRKGEGFKPSPLSLPFNIFNELGEKMAQMEPAVAGSDAMVPRGRIELPASSLPMMRSTTELPRHIAGMESGL

SEQ ID NO: 5081 - protein, 515 aa, synthetic construct
MKTAIYLRKSRADLEAEARGEGETLAKHRSTLLRIAKEMNLNVLSVREEIVSGESLVKRPEMLALLEEIEDNKYDVVLCMDMDRLGRGGMKEQGIILETFKRSNTKIMTPRKTYDLNDEWDEEYSEFEAFMARKELKIITRRMQRGRIASVEAGNYLGTHAPYGYDIHRLNKRERTLTINSEEASVVRMIFDWYANEDMGASAIRNKLNDLGYKSKLGNEWNPYSILDILKNNVYIGKVTWQKRKEVKRPDAVKRSCARQDKSDWIIADGKHEPIIPESLFEQVQEKLNSRYHVPYNTNGIKNPLAGIIKCSKCGYSMVQRYPKNRKETMDCKHRGCENKSSYTELIEKRLLEALKEWYINYKADFEKHKQGDKLKETQVIQMNEAALRKLEKELVDVQKQKNNLHDLLERGVYTVDMFLERSNVVSDRFTEITSTMENLKKEIKTEIKKEKVKKDTIPQVEHVLDLYFKTDDPKKKNSLLKSVLEKAVYKKEKWQRLDDFELVLYPKLPQDGDI

SEQ ID NO: 5082 - protein, 515 aa, synthetic construct
MYRPQELDVFIYLRKSRKDLEEEKKAMEHGQHYDTLERHRTQLLELAHKEHHNIIDILEEVVSGEYISERPMMQKLLREVETGIADAVLVMDLDRLGRGDMVDQGTIYRVFRYSETFIITPTEIIDPNDENQELTFSIKSLIAREELKTIVKRMQRGRRVSAKEGKSISRVPAYGYLRDNNLKLYPDPEKSWVIPRIFELMANGMGRQAIAQELDRLGISPPEGKYWNPSTISSITKNEVYLGHIIWGKIRYTKQNGKYIRKKVPKEKWQRHDHAHTPLVSEELFQKANIAHSKRWRPPTIKTKKLSNPLAGILLCKLCGHSMLYQPRKDRPNPQVRCVQPSCKGVQKGASLALVEQRILDGLKQIIESFEIQENMVQKKKPKNNIQLHQKALEKKEQQINDLQKQKNKLHDLLEKGVYDIETFLERQSSIVIRLKSTQEEIEQLEHEIKCLLAREQHIHEFVPKIKNILEAYYATEDVEKKNRLLKSALEKVTYLRKKSWQRKDEFTIELYTKI

SEQ ID NO: 5083 - protein, 522 aa, synthetic construct
MKLSHILQSNMKAAFYGRHSTDKQDMDMQLNSVMEVIRKYDCIHTHSFLDKAVSARKNKITSRKELENMFEAAKRKEFDFVIVYKSDRLARDPLEHQTIRIIMKTLDIPIIISSTESVYNTDTDLIVQLMEDGFTKYEVDTIIARTQSGLENKAKQGKWLGGKPPFGYTYDKNSEQFIEHPEELCYVKEIFNLYVNGHGFQYIANTLPKGSRRGKDWGKENVKAIVLNPFYCGLLSWRRQKAGKQNARDIWIEAPNHYVKPIISRTTWESCWRVYSEKRNGNMVPKHYKTSFLLQGLLSCERCQELMKTKNQQTVSSTNKKYGGKIYFCSNCKLRIDADLLHDKVVNQTLTDVKISGFHNVYHAIEQKIQYEIQELNNDIQKHQRLFENYTIKRHNITEELKQRMKNNDDKRFLKSLAIYRLDVQRKLDEVTKQINDFKQQITLKEKVEKSKETWLHTLNEVFQDDVKLQEISDMDKRRFLLPLIQSVSIKENKKRNEYDISLQLRTDFSKRDVKDQISLIL

SEQ ID NO: 5084 - protein, 655 aa, synthetic construct
MKPTIITYLRYSSKQQADGLSEFRQSEINRKFVEKFCAEHDVDLNEVISLKDLGVSAYRGLNLTLGSFSQTIKKFKSGEIKKRFNEDGEINTYLIVESLDRITRTGPFKSTQIFTELLEYTNIVVLADGEKKIYSKKSIDSTHGMMDLFMALISLQRSHTESLMKEFRSRKSWEKKREDLLNYFTLPEEDRVGLERPKNATAMCPFWLTAKKDGRGYDFIPENKKVMDFLIEKLLDGNGMTRAVRLLNDEIDAGNLKPKLKKANRKTRHFRAAAYSGLFNSEISTVKGDYLLTESYYPTEDDIEQGKYPEKHLGKRVRKEIAVLKNYYPALMTESQAAYIRKMMDERRSAGTKPNKSIKNLAQGILRCPLCNSTYIKSKDRKNVYLRCNLAREGLCNAKVIKHGVFEHNLLQFCKGLNINKIISNQSSDQVIDSSLKELEQKMMPLKVKKSQLEDDIEQIVKNISSIKIPSLLEKVQDDYLKKENELKKVVQEIDLIETSIMKLQHQIAMSDGDNSLQDLIDLTLDENADDEIRQRFNVELKKVVKSMTVLYRDTDDNPFGYHMISIQFLDGVHRLIPVHEKMTDKIHNILPYQDAVKVDSVDFSETVILPEDYVEGREKGKYPNLDGMAKYYQENPTKYLRLKHKMDQVHEIHA

SEQ ID NO: 5085 - protein, 550 aa, synthetic construct
MGDSAKNGLVYSYLRFSDPKQSAGGSTDRQLAYAAKWAAEHDLKLDTHLSLRDEGLSAYHQQHIKSGALGVFLRAVEEGRVPFGSVLIVEGLDRLSRAEPIQAQAQLAQIVNAGITVVTASDGKTYSRQRLKDNPMDLVYSLLVMIRAHEESDTKSKRVKASVRRLCEKWIDGSYRGRVEQGHDPAWLTRNDTDGWDFKPDTVKAILRTIEMYKQGLGGKRIIEKLNAEGLRIYPTSKENQTLQVYRVTKMPQLAGHKPISVDGDEYLLKGYYPPLLSELDWEDLQRVVKSSGRRRVKGDLPHVITGIGITFCGYCGHPMAGQHLASKKRLPDGRIRDGYRRLLCSAAATFSAVCPVRGSTSVAPIERAIMSYCSDMMNLQGLFETDTSSESRKELLKAQKNVEAIKAQLDKLTDAMLASADEGIPLTFARRARQLEEDLAVAEKSLTAQERDIAMLARRDISGADEKWRALAAGVEAQDIETRLQARQLVADTFSRISVYHHGLRPNHTPKSRDYYIDLMLVAKGGSSRWLRIDRDGNWVHDESYEAAD

SEQ ID NO: 5086 - protein, 534 aa, synthetic construct
MTKKVTKIEPVRHKVMHELRPKKRVCAYCRVSTDSTKQHTSYVAQVEYYKSYIGKREEWEFAGIFADEAKSGTQVKSRDEFIRMMKECENGNIDIIVTKSVTRFARNTIDSIEAIRKLKALGVTIYFEKENINTMSEQSEQMLTILSSIAQGESESISTNNRWGIQKRFRDGSYNLGCVAYGYTKDEDGELIINEDEAATVRRIFQDYLNGKGSYVIARDLTNDNVPPVRTAETWNDSVVKGILQNPIYEGDLILQKTYTTEVLPYTKKINRGEMPQFFIKDNHEPIITREQGQMVREIYEYRRKQMGIDDSGKYQNRYELSSKIICEECGGTFRRQKIYIGKPYEKIQWSCKNHLNSKENCKMKAIREDIIKSAYLTMWNKLVSNYTYILIPLLDSLKNLRTCKSQEDDIENLNHKIMELTEQSHILSRVVQKGYMDSALFIQKQNALNIEIEETKKKRNSLLDSNGFTKEIEGTIRLLEIIKYNPEIMDTYDENLLAHTVDHVIIGQSGTITFKLINGLKLAERISKGGEDT

SEQ ID NO: 5087 - protein, 558 aa, synthetic construct
MTKLYSYIRFSSMRQSDGSSYERQIRMAKEIADRYNLELVNDYQDLGVSAFKGANSKTGALSRFLDEIGRSIPVGSWLFIENLDRLSRQDIISAQELFLSIIRRGITIVTGMDNKIYSIETVTANPMDLMFSILLFIRGNEESQTKRNRTNSSALLKIKAHQQNPQNPAVAIEEIGKNMWWTDTTSGRVLPHPVYFPVLQKIVQLRQEGHSAGAILDYLNEHHEPPAPTSNKKHGKWSRAMVSRLFATKALIGVKTVNVDGVEYELRDYYPRVLSDSEFYFLRKNIIKKAWDYNHDKEKVIPLLSGIGVLRCVHCGATMVKQTAANGKREQYRYCCDGRKSGRTDCPYPNWGFRAVTLEGAVLQLLADKIWIAEDKTNPIPEIQVKIDEISRKIDNLINLSAMMGATKELANQITDLNSQREALHEEIRLFEREMYSVDSQGWDKLAQFDLSDVQNEERLKVRMKIKGALHEIECSRIDSKKNLFVLVYLDGLRQRLVIENNRGLKKGQIFVDLKTINDRQILESAGMVLHPCIEMIIDSDWKAPEEIPGLLSEEFGI

SEQ ID NO: 5088 - protein, 452 aa, synthetic construct
MKAAIYIRVSTQEQIENYSIQAQTEKLTALCRSKDWDVYDIFIDGGYSGSNMNRPALNEMLSKLHEIDAVVVYRLDRLSRSQRDTITLIEEYFLKNNVEFVSLSETLDTSSPFGRAMIGILSVFAQLERETIRDRMVMGKIKRIEAGLPLTTAKGRTFGYDVIDTKLYINEEEAKQLQMIYDIFEEEKSITSLQKRLKKLGFKVKSYSSYNNWLTNDLYCGYVSYADKVHTKGVHEPIISEEQFYRVQEIFSRMGKNPNMNRDSASLLNNLVVCSKCGLGFVHRRKDTVSRGKKYHYRYYSCKTYKHTHELEKCGNKIWRADKLEELIIDRVNNYSFASRNVDKEDELDNLNEKLKTEHTKKKRLFDLYISGSYEVSELDAMMTDIDAQINYYEAQIEANEELKKNKKIQENLADLATVDFDSLEFREKQLYLKSLINKIYIDGEQVTIEWL

SEQ ID NO: 5089 - protein, 499 aa, synthetic construct
MHVAAYARYSSDAQREASLEDQLRNCRQYAARMGWPEPVVYTDAAVSGARNDRPGYLRLLADAPRFDVILVDDLTRLSRDSVEATKATRRLTFAGVRVIGVSDGLDTGRKGHKAEVGLRGLMGELYLDDLREKTHRGLMGRALDGASAGGLPYGYRVSATGQREIREDQAEIVRRIYAEYLAGRSPREIVAGLNRDRVPSPRGRTWAASAVAGDVRRGIGILANPIYAGRQVWNRSRWVKHPDTGRRVRQERPQSEWVVTEHPELAIVDAGTWAAVERRLRLQSRATGGSAGRPPQHVLSGILRCGLCNGPMVVVDRYNYGCANAKQRGTCAGLRVARAAAEDGLLAAVRARLSAPEAFAEYQRAVQAHLRQSGGEATRRLAEARKWHGNVMAAIRAGIITPSTKADLEAAEAAVREAEAAVKASPARMVPRLRERWERVLADLAGHVRRSPQARAALVDVVGERVTVRYENGDLVAEAAASQLALVAGAGFEPATFGL

SEQ ID NO: 5090 - protein, 565 aa, synthetic construct
MAIASPKKRAVIYARYSSDMQKVTSIDGQLLLCRKVAARNDLDVVGEFVDAAKSGLTEDTRDGYQRLLNGVRKQDFDVIIVEHFDRLSRDPATIQRLKQVFEFNRVELMDQKGVYATATDISIASLYNTIYKPQLADKVRRGHDNAVNSGRIPGSYAYGYRPRPGVPGERMIDESEAKIVRRIFIEYTAGRSTRDIAADLTREGVPSPGATRHKNKAGRTTWNHQCFTGGRHGRGIIGNELYIGEIHWNVRSTILNPETQKKQKRRNPEERHIIVKNAELRIIPQALWDSAQKVRNERAIHMFGPSGKPRRRPVVPRNNEHPLAGVLRCGVCNGRMRIAQSSRNGGPRAACANAHQRGTCEHTRSFDMDVLLKDVAEKMEVRLLSPKAIEEAMRAWKEERKSDQRKDSERSSLERRRRVLNAEIERLSYAIANSRRKPNELIKRIDDCDVERETVEERLRLLGNGGENVISFDHPKFGDRYRSEAKRLVTGLKINPKAIETRIAFRNLVDCIIVHPVRKRMPYEYTPYLNAAALFSMKLLEDREKSGTISTAYYDTVQSGKSVSS

SEQ ID NO: 5091 - protein, 560 aa, synthetic construct
MTKLYSYIRFSSMRQGEGSSYERQIKMAKEIADRYGLELVNDYQDLGVSAFKGANSKTGALSRFLDEIGRSIPVGSWLFIENLDRLSRQDIISAQELFLSIIRRGITIVTGMDNKIYSIETVTANPMDLMFSILLFIRGNEESQTKRNRTNSSALLKIKAHQQNPQSPAVAIEEIGKNMWWTDTTSGYVLPHPVYFPILQKIVKMKQEGHSTGSVLDYLNEHHEPPAPTSNKQHRKWSIAMVSRLFKTKALIGVKEVTVDGVQYELKDYYPRVLSDSEYYFLKNNLIKKAWSFGHAQEKTIPLLSGIGLLKCAHCGSPMVKRKAANGKVEQYRYTCDGEGSGRTDCLYPNWGFRASSLEGAVLQLLADKVWIAEDKANPIPEIQVQIDEISRKIDNLINLSAMTGATKELANQITDLNTQREALHEEIRLFEREMYSVDSHGWEKLAQFDLSDVQNEERLQIRLKIKGALRSIECARIDRNKNLFTLVYLDGLRQRLVIENNRGIRKGQIFVELKTINDRQILESAGMVLHDHIDILIDEKAFYDGLPKEEDGPLSKFGI

SEQ ID NO: 5092 - protein, 507 aa, synthetic construct
MKRVISYIRFSSEKQAKGDSLRRQSKMVTDWLKAHPEYYLDQDLSFRDLGVSGFTGKHLKGGLGDFLTAIEKGLVKAGDTLLIESLDRLSRQDIDIASELLRNILRSGVDVVTLSDGEHYTRESLRDPLALIKSILIMQRAHEESLRKAERIQAAWDAKKEAAKAGIKVSKRCPAWLKLNDDRKSFSVIPEKVETVKRCFQLRLEGKSIWEIVRTLNDEGHQSMSQYKPGSFGQSSVQDLLKNRSVIGYFTPKGCEEIAGYYPAIIDETTFYKVQQLSHSRYGKRSVSDKPLSVNLFKGVIRCSECGHALIITGFSDTRNGIYRCPLRNENRCSAKGLSRKQTDGTLLALLSRLDRFDSDTTNTIDTLKLHREHISSNIEKLVQLSLEIEDLSAITSKLRQLKGELSQVDADIEKETQRLKSIDVGCLSDCDLTTKAGRIEAQLIIKSAVKEVVLNTAKRRCKVTFHNGKAITLPITENPSDNVTEAIQSLSEVTERGLIDVDEVII

SEQ ID NO: 5093 - protein, 470 aa, synthetic construct
MKGESELDKKAAIYIRVSTQEQATEGYSIQAQTDRLIKYVEAKDFILYKKYIDAGYSASKLERPAMQELIQDVQSKKVDVVIVYKLDRLSRSQKDTMYLIEDIFRPNDVELISMQESFDTSTAFGSATVGMLSVFAQLERKSISERMITGRVERAKKGFYHTGGQDRPPAGYQFNSDNQLIINEYEAAAIKDLFRLYNDGLGKSSISEYLKKDYPGKNKWLPSSIDRMLKNSLYIGKVKFSGAEYDGIHEPIIDEVTFYKTQKEIARRKQTNTKRYNYVALLGGLCECGICGAKMANRRAVGRKGKVYRYYRCYSKKGSPKHMMKTDGCSSKAQQQFIIDEAVINNLKNIDVEAELKRRSAPQTNTSLISSQIESIDKQINKLIDLFQVDSMPLDVISEKIDKLNKEKQSMEKLLERKNKLDKTELQHRFDVLKSFDWDNSSIESKRVVIEMLVQKVIIHDNSIEIILVE

SEQ ID NO: 5094 - protein, 523 aa, synthetic construct
MSRTVTAIPATKKLRSAAASSGVPAHRRVAAYARVSTEMEEQTSSYEAQIDYYTTYIHSRNDWQFAGMYCDEGISGTSMKRREGFQTMIDDALAGKIDLILTKSVSRFARNTVDSLTTVRKLKDAGVEVYFQKENIYTFDAKGELLITIMSSLAQEESRSISENVTWGHRKRFADGKIMVPYKSLLGYKKGEGGSLVIDETQAPTVRLIYQLFLDGMAISEIKTELAQRKILTPRGKEVWSTSTVRSILSNEKYKGDALLQKTFTTDFLTKKMKVNEGEVPQYYVSGNHEPIIAPRIWDQVQYELATRHANISSAKVGLFSTRLKCSQCGAWYGRKTWASNTKYKYTVWQCNHKYTDEHPCSSATVKDEQIKDSFVQALNQLIARHRYESQLPQVLGDMFDTSRLEEQAAACQAKLVELTEQIETLIAENQRCALDQDAYQNKYTKLDTTYRKTLARKTSLEADIVANTAKHAAITTTLNDLAGEPVSEFRPAQWSALIDHAIVGEDTIRFVFRVGEVVRVQL

SEQ ID NO: 5095 - protein, 543 aa, synthetic construct
MGKNGARVYSYLRFSDPRQATGSSADRQLAYASAWASKHGMELDATLTLRDEGLSAYHETHVKQGALGAFLRAVDEGRIPAGSVLIVEGLDRLSRAEPLLAQAQLGQIVNAGITVVTASDGREYNREGLKAEPMNLVYSLLVMIRAHEESDTKSKRVKAAVRRQCEAWVAGSYRGRIVSGKDPQWLAWDGDSWQFIPERVEAVRFALDAYRSGIGAARLVRLMHEKGMVLSDWGIAAQQVYRLVRLPALRGAKRISIDGEDFMLEDYYPRLLSDEEFSELETLVGQRYRRRGKDEIVGIVTGIGITRCGYCGTALVAQNLMQRVKADGSLEDGHRRLHCVSYSKNGGCNGGSCSSVPIERAVLAYCSDQMNLQRLLEPSSAGEDLRPRLVEAQKGVAEIERQLERVTDALLADDSGAAPLAFVRKARELEEDLERRRSAVRALEQELVAKSASAPAAGASKWAELAERAKSMADVAAREQARQLVMDTFETLVVYMRGVIPNPKGRYIDVMMKSRAGQTRWIRVDRRTGVWKEGADRPTTRRP

SEQ ID NO: 5096 - protein, 520 aa, synthetic construct
MKKAVYCYARVSSRGQAKDGYGMSRQQTMLRDYVAAYDDSQHNRGYEFGDISWLYAEGVSAYSGKNIEDGSVLKNFIDDVLQKKITNSVLVIENLDRFSRAAPNRAAGLFLSLINAGCDIHEVETEMIHHQYSDLNIISGGLQRAHNESKRKARLSIKNWDERIKNTIEGTSVLTHRVPSWIEVKNNKYVIKEGEAEKFNLIFKMYADGFGPAAIRDELKKKKMQINESEPTINHLVKIIKDQRLIGKFNSTGRKILDGMIIYPVVVEQSLFEAVNDLRKQRNPLGKVNVKANNLFAGLCICMNCGRYVQVNSVDKKGDTYFRCGGSLLKIDKCKERGFKYKIIENALLEHIRNFDFSMLRSNDDDIQIKINYLSIELATKENYSSEILADMEKEYIPDPNDRRILKNLQRRISEIRTEITRLKQSNVGYEKFSDLKESYTDDLLDSKNTNLRLDFNVKIKRVIKNIKMKRLGNAIMLVVNYIGVNEKQAMVIDSKTGDVDFMAVQNDDLKSVEYLINKS

SEQ ID NO: 5097 - protein, 505 aa, synthetic construct
MTLAFSYVRFSTKHQASGTSLERQVNASKLFCSQNGLTLSNQSYHDLGISGFKNVRRPELEQMLEAIQTGDIPSGSYILIEAIDRLSRKGISHTQDILKKILQYDVKVAFVGEDAKTLQGHILNKDSLNDLSSVILVALAADLAHKESLRKSKLVKASKAIAREKAADGEILPGKSVFYLDYDRKDKKYVFNKRVDLARKIIQMRLEGKGVRKIARILNEENIPGPTGKQWYQMSVKRLLKSPVLYGAYQTHQIIEEKYIPVSLIENYYPALIDYQTFSQIQFDDKRVSKGRPSRHKFSGVLYCECGAVICRKVNTSVTKKGTKEYQYFNCFGAIENRCKNNKAIRDLHIPLEKAIDKLQIKTRSVKNIKNEQIIAKHEKIDQLNKMLLELEMPPVSVLKTISTLEKELQELLEQPEVQAPKSADVKTLVAIKDADQYNLYLKRLVKRITIFQLNGPKNIRIKIEKTDGHYQSFIVNNGKIMFNADTKALQEHLRKLKEGTSDED

SEQ ID NO: 5098 - protein, 407 aa, synthetic construct
MARIIRVIKASAPSKLARKKVAAYARVSSDKDSMHQSLSTQISYFSDLIQRNPEWEFVRIYADEAKTGTKESREEFQNMLSDCREGKIDLIITKSVSRFARNTLTMLEVVRELKALNIDVYFEKENIHSISGDGELMLTILASFAQAESLSVSENCKWRVRKSYAEGESINLRFMYGYDISGRSISINEFEAQIVRQIFNDYISGIGATRIANDLRTRDVKRPRGGVWTSAKVMKIIKNEKYVGDSLLQKRYVSNHLEKRLVNNNGALPQYYVRNSHPAIISREIYDEANKILKEKTKVGASKKATRSPFRGLVKCAECGKYYRRKHNHGRVYLVCGSVIDYGKDACSSKYVRESRFIELLKSTLEIDCLDKELIEKQIQTVLINPDGALTIHLVSGKSIYFEEGCE

SEQ ID NO: 5099 - protein, 524 aa, synthetic construct
MSLAKAITVIPAAKKFSEISSSTWTTKKRVAAYARVSTDNEEQLSSFEAQRNYYAQYIRSKSEWSFVEVYADEGISATSTKKRDGFNRMVNDALDGKIDLIITKSVSRFARNTVDTLTTVRKLKEQGVEVYFEKENIYTLDSKGELLITIMSSLAQEESRSISENVTWGQRKRFAEGKVNLPYGQFLGYEKGEDNLPRIVEEEAQVVRRIYRLFLEGKTPSGIAKILTDEKIPSPGGKEKWPISTVRSILTNEKYKGDAILQKAFTVNFLTKKKKKNEGEIPMYYVENSHPSIVSPDVFDQVQYELKLRKKHNGYKTGVSCFSGRIKCGQCGSYYGSKVWHSNSKYRRVIWQCNHKYQDEEKCSTPHIYEENLKKAFIEELNRILLNKDKVISDLRLISHEIFDLNKLIEKEMCIQNEIIIVENLIEKCVKDNALVACDQEEYKAKYNELLKRHESAKADLNTIGQQRDEASTKRRGIEELIRRIGEQESIITSFDEELWLSLVDGVVVQPTGEFEFSLQGKIF

SEQ ID NO: 5100 - protein, 483 aa, synthetic construct
MKVAIYIRVSTEEQAEEGYSIAAQRARLEAYALSQGWEIVQWYVDEGESAKDLNRTDLKRMLKALEQGVFNCVLVYRLDRLTRSVLDLYKLLNMFDKYDVKFKSATEVYDTTTAIGRLFITLVAALAQWERENLGERVRMGMQQKAKEGKWTVSLPPLGYESNDSTLMINHQEAAIVKEIYRLYLSGMGMWKIAKNLNERGIHPRSGKAWGMNPIQYILKNPIYMGTSRYNYRVNKDQYFEVEGVAPAIIPEEEFNLVQQTIESRKDIHPRQATSKHIFSKVLKCGRCGSRLIGKSSHTKRGEKVYYSYNYYCPNKPRGLCDLPNISQNLFEQKFIQMLSKWDFTKEADELAQNEATAAVEDHTETIKEIEQELNGIEKRRSKWQYAWVNEMITDGDFQKRMKEEEEKEKMLRKELEGLTPKEAPLQDSDISEIWTDLKLNWQYMTIEQKKQFVLIALDFITVDKINKDKTPDSVEIKEVRFN

SEQ ID NO: 5101 - protein, 573 aa, synthetic construct
MKVAAYVRVSSYNQKQTGDSISGQKEYIKNWAYLTGNEIIKWYIDESASAFRDLRRCNFNLMLQDIENPNSEIEAIVVYSLSRFSRNLENQLTAQNLLETYNVRLISASEGIPDDHNTARLHTSFLGILNEHYSRQNSAVVTDRLQDTARKGYFCGGPIPLGYRSVEIEGDTSKKRKVLAVNDDEAPIVKEIFSLAEKGIDGKPMGVKAISIYMNNKGVLNRGKRWNRNSIDRVLTRRDYFGEHIHGKNRDPRKGLEPIIVNVPAIINKDQFFNVQDGLKSRELKNNENKCYRSDSLLVGMLKCSICNSNMVVVSGKGGKYKYYECSKKIRQDVKSCSSKMLPKPLIDNAVRRLLSERVITEENINYIYKDLKSRIRNLVEKSARNVASINRRINNNNFKVNNIIEQIASRQLEPNAQINKYITDKRNELESLNRELVTALKGTKLPIKQFGQTQVAQLVKNLKEIVLTGDEARVKQILLILLKEVEITPQKKISILGFNMALVFLASHAKTGTDFSVPVIDTIWRRDRDLNPRYAINVCRFSRPVLSTTQPSLRCGTYNREWSSRCKALNYN

SEQ ID NO: 5102 - protein, 560 aa, synthetic construct
MTKLYSYIRFSSMRQGEGSSYERQIKMAKEIADRYGLELVNDYQDLGVSAFKGANSKTGALSRFLDEIGRSIPVGSWLFIENLDRLSRQDIISAQELFLSIIRRGITIVTGMDNKIYSIETVTANPMDLMFSILLFIRGNEESQTKRNRTNSSALLKIKAHQQNPQSPAVAIEEIGKNMWWTDTTSGYVLPHPVYFPILQKIVKMKQEGHSTGSVLDYLNEHHEPPAPTSNKQHRKWSIAMVSRLFKTKALIGVKEVTVDGVQYELKDYYPRVLSDSEYYFLKNNLIKKAWSFGHAQEKTIPLLSGIGLLKCAHCGSPMVKRKAANGKVEQYRYTCDGEGSGRTDCLYPNWGFRASSLEGAVLQLLADKVWIAEDKANPIPEIQVQIDEISRKIDNLINLSAMTGATKELANQITDLNTQREALHEEIRLFEREMYSVDSQGWEKLAQFDLSDVQNEERLQIRLKIKGALRSIECARIDRNKNLFTLVYLDGLRQRLVIENNRGIRKGQIFVDLKTINDRQILESAGMVLHDHIDILIDEKAFYDGLPKEEDGPLSKFGI

SEQ ID NO: 5103 - protein, 452 aa, synthetic construct
MKAAIYIRVSTQEQIKNYSIQAQTEKLTALCRSKDWDVYDIFIDGGYSGSNMNRPALNEMLSKLHEIDAVVVYRLDRLSRSQRDTITLIEEYFLKNNVEFVSLSETLDTSSPFGRAMIGILSVFAQLERETIRDRMVMGKIKRIEAGLPLTTAKGRTFGYDVIDTKLYINEEEAKQLQMIYDIFEEEKSITSLQKRLKKLGFKVKSYSSYNNWLTNDLYCGYVSYADKVHTKGVHEPIISEEQFYRVQEIFSRMGKNPNMNRDSASLLNNLVVCSKCGLGFVHRRKDTVSRGKKYHYRYYSCKTYKHTHELEKCGNKIWRADKLEELIIDRVNNYSFASRNVDKEDELDNLNEKLKTEHTKKKRLFDLYISGSYEVSELDAMMADIDAQINYYEAQIEANEELKKNKKIQENLADLATVDFDSLEFREKQLYLKSLINKIYIDGEQVTIEWL

SEQ ID NO: 5104 - protein, 588 aa, synthetic construct
MPVAYSYIRFSTPEQIRGDSLRRQLEASAKYAADHALALDQSLNVRDLGVSAFTGSNIERGALGQFVAAIDEGRVQPDSYLLVESLDRLSRLPVTEALAVFQSIINRGITIVTLVDGAVYSKDRLRNDWTPLLIALVSMSRAHEESAVKSRRIKAAYDARKKRVIANKEVKIGRCPWWLKLSDDKTKYEVIEENAATIRLMFDLAKDGMGNALIAKELNARGIPTAQHSKYWQNSTVGFNLTNIALVGVLQMDQDNNGRTTTNTFVEDYYPPIIDKTLFYEVQAMRKARDRNKGTMNAGRKGQCYNIFQGTAKCGYCGSPMHIRRKPGINTGFLYCSKSLQGGGCISVSYNIRNLESEFITFTRELDLHRVLGETSADNGVTAKRASLAACNAMVEETETKQKNLVAAIEAGGEMPILVQRLQDVQAQLNDLKKQRLALQSEVQILSNSTRDEEASLEVLGQLMVQLESQETDLDEKLRLRFRMLSEVQKVVRRLDLFPGGPMLASDEVEALRSQLKDDGFDEGRINDYFSQLPVKPDRTARYFVAHLRNGISRTVRQGQVLEMDPMRSQKIAAAIASATEEEAADDA

SEQ ID NO: 5105 - protein, 506 aa, synthetic construct
MRTVITYLRFSSATQGAEGADSTRRQNELFKQWLRKNSDAQVVASFSDEGLSGYKGKHLTGQFGDMLARIESGEFSEGTVLLVEAIDRIGRLEHLETEALMNRIIAHGIEIHTLQDGLIYTRDALSDDLGISIIQRVKSYVAHQESKQKSFRVSQKWKQRAKLALAGEQRLTKMVPGWIDPDTFKLNEHAETVRLIFKLLLSGESLHNIARHLQANNISSFSRRKDANGFSVHSVRTVLRSESVIGTLPASQRNDRPAIPNYYEAAIDAATFNKAQEILDKNRKGRTPASDNPLTINIFKGLFRCQCGASVHPTGTKNKYAGVYRCNNNPDGRCDVPPLKRKPFDKWMIDNFLGMIDVGNDGEAEGKIASLQHEVEIVTTRIKKATALLLEMDDITELKAQVKELNQKRTELQTMIDNMRRKASLTDKELPQLKDIDLMTKAGRVECQLILSKHLKGLTLGKDSVTVTLQNDTEIIVPTDPLPLNDGTSIFEIAEKELLEIDAYQL

SEQ ID NO: 5106 - protein, 464 aa, synthetic construct
MKRAALYIRVSTMEQAKEGYSIPAQTDKLKAFAKAKDMAVTKIYTDPGFSGAKMERPALQEMISDIQNKKIDVVLVYKLDRLSRSQKNTLYLIEDVFLKNNVDFISMQESFDTSTPFGRATIGMLSVFAQLERDTITERMHMGRTERAKQGYYHGSGIVPLGYDYVDGELIINDYEAQIIQEIYDLYVNQGKGQQYITKRMVAKYPDKVKTLTIVKYALTNPLYIGKISWDGKVYDGHHTPIIDKSMYDKAQEIIARKAQKGGEQHGNQLGLLLGITYCGKCGAKVFRYVSGGKKYRYNYYMCRSVKKMLPSLVKDWNCKQPSLRQEVVEKKVIDSLKSLDFKKIERELKQVENKTKSKITTINNQISKKHNEKQKILDLYQYGTFDVTMLNERMKKIDNEINALTDNISNLEGTKSESLINKLETLKTFNWETETTENKILIIKEFVERIELFDDEVIIKYKF

SEQ ID NO: 5107 - protein, 560 aa, synthetic construct
MTKLYSYIRFSSSRQADSSSYERQKRTAKEIADRYGLELVTSYQDLGVSAFKGANSKTGALSRFLDEIGKSVPVGSWLVVENLDRISRQSIIEAQELFLSIIRRGITIVTGMDGKVYSKESVNANPLDLLLSVMMFARANEESQTKRNRTNSSALLKIKAHQQNPQSPAVAIEEIGKNMWWTDTTSGYVLPHPVYFPILQKIVKMKQEGHSTGSVLDYLNEHHTPPAPTSNKQHRKWSIAMVSRLFKTKALIGVKEVNVDGVQYELKDYYPRVLSDSEYYFLKNNLIKKAWSFGHAQEKTIPLLSGVGLLKCAHCGSPMVKRKAANGKVEQYRYTCDGEGSGRTDCLYPNWGFRASSLEGAVLQLLADKVWIAEDKANPIPEIQVQIDEISRKIDNLINLSAMTGATKELANQITDLNMQREALHEEIRLFEREMYSVDSQGWEKLAQFDLSDVQNEERLQIRLKIKGALRSIECARIDRNKNLFTLVYLDGLRQRLVIENNRGIRKGQIFVDLKTINDRQILESAGMVLHDHIDILIDEKAFYDGLPKEEDGPLSKFGI

SEQ ID NO: 5108 - protein, 576 aa, synthetic construct
MKLYSYQRWSSAVQEAGTTKARQEDAARAYALRNGLEYCEIVDSGVSAYRGANKQGALGKFIDAVQQGVIERGVTLYVESLDRISREGINNALRLFQDILELDITIVTGMDGKVFTKQSINDNPFDLMLSILVFIRANEESTKKSLRTNGNALALVERFKSGQSTNIKSMGGCPFWIDNSMSQYEAVKKDPKYWPIAEEIVQQFLDGKSVFQVVKYLNATYPEGCYGKPWNYANVRKVRLSKAIYGVKEITINGQKYTLDNYYPALCTEGEFLRLQIIKDNNKYIGKVGDQKNNINLLCGMKLFRCGHCGSTMMAMKHKNTIRYMCEKGRMDSNGCRLWSFGSLGIEHCLMLVLTYAYVDKNRKGLQNKTDYSTRIASKNEAIDEISKRITNTVELVSLGLSNVEEVKVLIEGLNKQRTVLKTELDVLVTQQALSDSIDFETLMHDFFTHAQYTVLQSVDHEYREELRKVVFAMMDSVIAWKYGKNLYFSFRIKDHDEYFNFVPGEAKNTYKLFIGGLPFNDEPEDDVALGKSLEGLVKAYRTVTEAQVKVIKMAGGMLEVVGYPVLDGKHFWTKK

SEQ ID NO: 5109 - protein, 487 aa, synthetic construct
MAYAVYVRVSSDKDEQVSSVENQIDICRYWLENNGFEWDENAVYFDDGISGTAWLERHAIQLVLEKARKKEIDTVVFKSIHRLARDLKDALEIKEILLGHGVRLITIEEGYDSHYEGKNDMKFEMYAMFASQLPKTLSVSITAALAAKVRRGGYTGGFVPYGYEIIDGKYAINEEEAALVREIFELYAQGFGYIKIANTINDKGARTRKGAPWTFSTLSKMIKNPAYKGTYIMQKYGTVKVNGRKKKVINPKEKWVIFEDHHPAIISHELWEKVNNKDPNKFKKKRRVSTTNELRGITVCAHCGTAMSKRNSINISKNGTETEYSYMICNWSRITARRECVRHVPIHYKDLRALVLSKLKEKEKDLDKEFGSDENQLQVKLRKLKKDINDLKFKRERLLDLYLEDERIDKDTFTIRNAKIEKEIGLKEMEIRKASNIEIQMKEKQEVRDAFALLEESKDLHSVFQKLIKRIEVAQDGAIDIYYRFEE

SEQ ID NO: 5110 - protein, 506 aa, synthetic construct
MRSVITYLRFSSAIQGAEGADSTRRQNELFKQWLRKNSDAQVVASFNDEGLSGYKGKHLSGQFGDMLSRIESGEFPEGTILLVEAIDRIGRLEHLETEALMNRIIAHGIEIHTLQDGLIYTRDALSDDLGISIIQRVKSYIAHQESKQKSFRVSQKWEQRAKLALAGEQRLTRNVPGWIDPETFKLNEHAETVRLIFNLLLSGESLHNIARHLQANNISSFSRRKDANGFSVHSVRTILRSETTIGTLPASQRNDRPAIPNYYEAAIDASTFNKAQEILCKNRTGRTPASDNPLTINLFKGLFRCQCGASVHPTGTKNKYAGVYRCNNHLDGRCDVPPLKRKPFDKWMIDNFLGMIDVVSDGESERKIAALQHEVETVTARIKKATALLLEMDDITELKAQVKELNQKRTELQTTIDTLKRKTSLSDKGLPQLKDIDLTTKAGRVECQLILSKHLKGLTLGKDSVTVTLQNDTEITIPTDPLPLNDGSPILEIAEKELLEIDAYQL

SEQ ID NO: 5111 - protein, 506 aa, synthetic construct
MRTVITYLRFSSAIQGAEGADSTRRQNDLFKQWLKKNSDAQVVASFSDEGLSGYKGKHLTGQFGDMLARIESGEFPEGTILLVEAIDRIGRLEHLETEALMNRIIAHGIEIHTLQDGLIYTRDALSDDLGISIIQRVKSYVAHQESKQKSFRVSQKWKQRAKLALAGEQRLTKMVPGWIDPDTFKLNEHAETVRLIFKLLLSGESLHNIARHLQSNGIKSFSRRKDANGFSVHSVRTILRSETTIGTLPASQRNDRPAIPNYYEAAIDVSTFNKAQEILDKNRKGRTPASDNPLTINIFKGLFRCQCGASVHPTGTKNKYQGVYRCNNHLDGRCDVPPLKRKPFDKWMLENFLGMIDVGNDGEAEGKIASLQHEVEIVTTRIKKATALLLEMDDITELKAQVKELNQKRTELQTTIDSMRRKTSLTDKELPQLKDIDLTTKAGRVECQLILSKHLKGLTLGKDSVIVTLQNDTEITIPTNPLPLNDGTSIFEIAEKELLEIDAYQL

SEQ ID NO: 5112 - protein, 492 aa, synthetic construct
MKCAIYIRVSTDKVEQKQSIENQKDLFKKFLIENDWDLYDFYIDVETGTTENRKDLIRLLEDANKKKFDILLSKELSRLARNSYLAHKIKNIIQKNGIQLLTLDNSINTLQDNTENFGLFAWLYEKESDNTSRRLKAAFKTRSSRGLFKGPIPPYGYYCKNGKLYVKNDNTPDIVKRIFSDYLSGKGFDAIAKSLFEENIPSPSTIAKKSNSNNRWNGSGVRSILENPHYTGSLVQNRTTSLNVVSKKRIQNSPNKYIIVKNTHEPIISNEQFDLVQSLIDKRRKKRPNQNVHLFSNMLFCSTCGKGMHYKKNRHGYICGLYNKLGKTACKSHLIKESELENIILNDLKELSSKINKKNYIKKIKKHILTIKSNSQNDINKYSLEIENLISQKNLALNKLIVDIISKQEYDSFVKTINIEINQLESLKFEAEQKSNSSSLTDSLKNIDIISNAILNIESVDRTLLNTLIDKIEIEEDGSPIIYYKFKELPAL

SEQ ID NO: 5113 - protein, 571 aa, synthetic construct
MKRIAIYSRKSRFTGKGDSIENQIEMCKEHILKFVSKDVEFIIYEDEGFSGGNINRPAFKRLMNDIKYGAIDLLICYRLDRISRNVADFSSVLDILQEHKVDFISIKEQFDTSSPMGRAMIYIASVFAQLERETIAERIKDNMLEMAKKGKWTGGKLPLGFTSKKTAYIDEEGKKRFKVNLVHDTKDLEFVKFLYEKYLELGSLHKLETYTHENNIRSASGKIFEKSTLKIILQNPIYVKADENVFNYFENKGWSVYGEPDGLHSLLSYNKTETAKKDGKLTKRNKDESESLVAVSNIEGYIDSSLWLKVQYQFKKNKDTFPRLGKTHNALLVGKLFCGNCGTRMIIQHGRTSPKTGVKNFYYVCSLKKTSKKKLCEAHNVKTDFLENLVLDSLEKLYDKKDFINESLKINLKENKNNIEEINNTKKLIELNNAKLNSLVEKLSLDFDNLISDVLIPQMKNLKLEINALESKLEELKLKKQESEMNKIEIDLISSLLNKCKNIKDLDRTEQKRIIDCLVDSIYYYSNDNNGNDKIKIKFINDIDSINTILSDEEKRQFEKLSFYSHSMSSI

SEQ ID NO: 5114 - protein, 565 aa, synthetic construct
MGFKKLVNDINVEKRRKLISIYCRVSTEEQSEKGYSIDEQERLLKEWCKANDYIIYKCYSDRGISGKNIKDRPALKELLRDAKEGKFDMVISWKINRVSRKLEDVLKIVNILEENNITFKSYSEPFETDTPAGRMQFQMMALIGEFERGTISQNIKMGMCAKAKYGNWCGGRVLGYDLVPNNSPEEEKKGKNKLEINEKEAEIVRFIFNEYSKGKGYKAITNQINKLGYKTKKGNNFSVGSIRDILTNPVYIGEIRYNVRQNWSEKRRRNINPNPIRVKGKHEAIIDRELWDKVQLILESKKGKPSRIYDGEYPLTGILRCPKCGAGMVISRTTNTLADCTKKRIAYYCCGNWKNKGTSVCNSNTIRVDKANEYVFKKIEELVSNEAMIKAVVKNINKERKEKVKPAKRLLGDIDKELEKLDKRKRKIFEAYEDDILTKEEFQIRKDELNEKIRILEEEKKPLLNTISEDISEEIPYEFIKDILMNFSKVLNSSVSREQQKKLLHMIISEITMNESREIDSIKLNINDKLVEYLVKEGGVPIKGIPSSFMLRNVGLKVLNLNIII

SEQ ID NO: 5115 - protein, 565 aa, synthetic construct
MGFKKLVNDIKIEKRRKIIAIYCRVSTDEQAEFGYSIDEQKRLLEEWCKANDYIIYKCYSDRGISGKNIKDRPALKELLSDAKEGKFDMVISWKINRVSRKLEDVLKIVSLLEKNNITFKSYSEPFETDTPAGRMQFQMMALIGEFERGTIAQNVKMGMIAKAKSGNWCGGRVLGYDLVPNNSPEEEKKGKNKLEINEKEAEIVRFIFNEYSKGKGYKAITNQINKLGYKTKKGNNFSVGSIRDILTNPVYIGEIRYNVRQNWSEKRRRNINPNPIRVKGKHEAIIDRELWDKVQLILESKKGKPSRIYDGEYPLTGILRCPKCGAGMVISRTTNTLADGTKKRIAYYCCGNWKNKGTSVCNSNTIRVDKANEYVFKKIEELVSNEAMIKAVVKNINKERKDKVKPAKRLLGDIDKELEKLDKRKRKIFEAYEDDILTKEEFQIRKDELNEKIRILEEEKKPLLNTISEDVSEEIPYEFIKDILMNFSKVLNSSVSREQQKKLLHMIISEITMNESREIESIKLNINDKLVEYLVKEGGVPIKGIPSSFMLINIGLKVLNLSIVI

SEQ ID NO: 5116 - protein, 489 aa, synthetic construct
MKQIAIYIRKSVKGDENSISLEAQTEIIKHYFKGENNFIIYKDDGFSGGNTNRPAFQKLMADAVENKFDTIACYKLDRIARNTLDFLTTFNLLKEYNIDLICVEDKYDPSTPAGRLMMTLLASLAEMERENIKQRVSDSMLNLAKQGRWTGGTPPFGYKVITLDGGKYLEIEDKNNIKYIFNEFINGKSIIKLGNEFNCNKKKISRILHNITYLQSSKDASIYLKQILGYEVIGESNGYGYLPYGNYKVVNGKKIKNTDGLKIACISRHEAIIDLNTFIKVQEKLKTFEGKKAPRISTKSFLAQMVQCTCGSNMLIVLGHKKKDGSRKLYFSCPNKCGNNFATVKEIEDDTLTVLKNVDFFNKIRQNNTNLNKDNSKIKSTILKELEKKKKLLDGLVNKLALVDSSLANVLIEKMESLNIDIKDLQNKIDLLEKEEIASSYNKEDFNLKEESRKHFIEQFENMDTKERQNAIRGVINKIIWTGKNIIIS

SEQ ID NO: 5117 - protein, 502 aa, synthetic construct
MNNKICMYLRKSRADEELEKTLGEGETLSKHRNALLKFAKEKNLNIVEIKEEIVSGESLFFRPKMLELLKEVEAQKYDGVLVMDMQRLGRGDMKDQGIILETFKNSNTKIITPQKTYDLNNDFDEEYTEFEAFMSRKELKMINRRMQGGRVRSVEEGNYIATNPPFGYDIDFIKKSRTLKINEDEAPAINLIFKLYIEGNGASAIADELNVLGYKTKLGNKFSQSSVLTIIKNPVYIGKIAWKRKDIKKSKTPGKVKDTRLRDVSEWIIADGKHKAIINTETWEAAQKILKSRYHIPYQLSNSPVNVFAGLITCGICGKKMVMRKARGINRLMCIYKCGNKSTRFDNVESDCLKYLKDYLTDYTAEIKNKIKESDNNIYISQISQLKKELTALNNQRLKLFDLLERNLYDEDTFLERSKNINDRIETVSSTLKSIEKLLNKKSKASYEEDIKFFKSVLDAYDETEDISKKNSLLKSILFKIEYTKTKKGKDYEIKLFPKLRK

SEQ ID NO: 5118 - protein, 488 aa, synthetic construct
MKKIAIYIRKSIKGDENSISLDAQIEVIKNYFKEDCNFTIYKDDGFSGGNTNRPAFKKLMIDASVNKFDTVACYKLDRIARNTLDFLTTFNTLNDYGIDLICVEDKYDPTTPSGRLMMTLLASLAEIERENIKQRVKDSMLKLAKEGRWTGGTAPFGYKIVTIDCGKYLELVDEANIKYIFNEFVSGKGILKLSKEFNCNKQNISRILRSITYLKSTEEANKYLEKFLNYEVIGVPNGCGYLPYGNYKNINGKKVKNNDSKLATVSKHKAVIDLDTFIKVQNRLKTFEGNPAPRISSKTFLAQMVKCKCGSNMNVILGKKKKDGSRKIYFACPKKCGNTFCDVSKIENDVLNTLKDVDLFNKIIKSSNPINKDYSKIKEPLLKEIDEKKKILDGLVCKLALANDSLTKILLDKIESLDLDINSIQEKINEIEKEEISKKVNENDIKIREMNRVNLIKNFDKMDMKERQSSIKKVINKIVWLGDTVLIK

SEQ ID NO: 5119 - protein, 549 aa, synthetic construct
MKNKLKSSLNIESPKIAIYMRVSTSKQTDNQSLDTQEKTINSYIASRHDWINPICYKYIESHSASIKPKVSNTLKESSFDSLKRPKLRELFLDATIGKFDYVLCASHDRLTRNTNEGIILKHLFSRLNITLIYCRPGETISSENEALNKFFENLLVNIAALESNITGGRVTLANKHKIQNNFWAGGPPPFGYNLVSQPSNKRNSFLEINFEEARIVKKIFELYNLGCSYNEILTRLNRDFTLPPKRIWTHNTLKEILRNPVYTGFLVWNKRGGARKPNRHSPNDFVKSNLVEKNIIISENEFLETQKLRNILSKDSKFLSTDFLLRDFLYCNKCNKKLLAKNYGNNKRFYYCSSHNNIEINKKCRSIKASKIESIILSNINDLINSSLQSEVQIEKFYDKYIENFNAELLDNKKSLEITINQLKSSTDLLELCVNEINISKDNLTVDYEDLSSSSTEFSFINALLEFQVVTQTEIKSLKARKEYLTYKINSSPKSFDDFKSNLNKSFKLFKYDEEKQKLISSPRSFRLFLFKVVKKIILSDHEITIIFK

SEQ ID NO: 5120 - protein, 537 aa, synthetic construct
MKKAAIYTRKSKFTEKGDSIESQIKLCSKYLDNINIKNYCIYTDEGFSGKNTDRPEFQRMLSDAKAKKFDVIICYKFDRISRNVSDFSNLINKLNELNISFISVVEQFDTNSAIGRAMMYLCTVFSQLERETISQRITDNMYSLATKGYWLGGETPTGFRSEKKFFNSNNKQKMYSSLVPIKEELDLVKLIFNKYLEFNSISKIEKYLLSNNIKTKRNKDWSKASISLILRNPAYVKADEETFKYIESTGSKVYGNPDGKHGLLIYKKNKGRKGAKHDISEWIYAVSEHEGIIDSDIWVAIQKQIKKNAILAPALGTSNIALLTGLIRCAKCNSPMRVAYGKRNPKTNKKNYYYVCTLKTKSGKTRCDSKNLPGLDLDNLILDKLKEMSLDKNTLLKELNKYKDTIESNFHNDVLKNIKNNISKNNSMIDNLLNNVALSTDSEVTAILLEKISKLKDENKLLTQKIDDLKSELEAQETLLNDCNSLITKLKYFSKFIDNSSIEEQKQLVSSVIEKVIADGDTGSIEIKFRPLLDFKI

SEQ ID NO: 5121 - protein, 470 aa, synthetic construct
MRVAIYIRKSRGTEEDLLKHEEVLTNLCNANNWSYDLYKEIGSSQDNQREQYNRMKENIENYSKIVVMALDRLSREKQEQAELTKLINKYNFEIVTPTRIYTKHDNLLMDIQELLARQEYQMIRARQIQGTKTSFERGNWVGGIPTIGYKYDRNIRKLVIDEEKVKIYLFIKELALKGYNSSTIVSECYKKNYRSLTNKDFTPTAINRILKCRTYLGEVPYSGEWRKGNHEPLCTYEEYDTICDYITHRRVGIKSKAKTFPLSNLIVCGQCGALYGSTRRKDRGNREYLKTCWRKNVATGEKCNNKGVNAYKVHQAIKQQLEKRMFELKNTLNNFDRTNFENMKNDIQAQIYSLEDNISVLESRNDNIRNMCENGLYTVATAKEKISKNEITIKEYQNKIEILKNKLNNISNKDIENNFEKTKEVLNILYKLNLDDEKNDELINKIYKTIIDKIEMTLSDEKKELKIYYK

SEQ ID NO: 5122 - protein, 570 aa, synthetic construct
MKTIAIYSRKSRFTGKGDSIENQIEMCKEHIKKFVSPNVEFLVYEDEGFSGGNTNRPAFQRLINDIKYGNIDLLICYRLDRISRNVADFSSVLDVLQEYKVDFISIKEQFDTSSPMGRAMIYIASVFAQLERETIAERIKDNMLEMAKKGKWTGGKLPLGFTSKKIAYIDEEGKKRFKVTLEHDSKDLEFVKFLYEKYLELGSLHKLETYTHENNIRSASGKIFEKSTLKIILQNPIYVKADENVFNYFENKGWSVYGEPDGLHSLLSYNKTETAKKDGKLTKRNKDESESLVAVSDVKGFIDSSLWLKVQYQFKKNKNTFPRLGKTHNALLVGKLFCGNCGTRMIIQHGRTSPKTGIKTFYYVCSLKKTSKKKLCSAHNVKTDFLENLVLDSLEKLYYKKDFINDSLKINLKENKDNIKEINTTKKLIELNKNKINSLIEKLSLDFDNVLSDILIPQIKKIKIENDVLESKLEELKLKKQESEMNRIEINLITSLLNKCKNIKDLTRTEQKQIIDCLVDSIYYYSNDNGNDKIKIKFINDIDSINTLLSDEEKRQFEKLSFYSHNMSSI

SEQ ID NO: 5123 - protein, 549 aa, synthetic construct
MKNKLKSSLNIESPKIAIYMRVSTSKQTDNQSLDTQEKTINSYIASRHDWINPICYKYIESHSASIKPKVSNTLKESSFDSLKRPKLRELFLDATIGKFDYVLCASHDRLTRNTNEGIILKHLFSRLNITLIYCRPGETISSENEALNKFFENLLVNIAALESNITGGRVTLANKHKIQNNFWAGGPPPFGYNLVSQPSNKRNSFLEINFEEARIVKKIFELYNLGCSYNEILTRLNRDFTLPPKRLWTHNTLKEILRNPVYTGFLVWNKRGGARKPNRHSPNDFVKSNLVEKNIIIPENEFLETQKLRNILSKDSKFLSTDFLLRDFLYCNKCNKKLSAKNYGNNKRFYYCHSHNNMEINKKCRSIKASKIESTILSNINDLINSSLQSEVQIEKFYDNYIENFNAELLDNKKSLEITINQLKSSTDLLELCVNEINISKDNLTVDYEDLSSSSTEFSFINALLEFQVVTQTEIKSLKARKEYLTYKINSSPKSFDDFKSNLNKSFKLFKYDEEKQKLISSPRSFRLFLFKVVKKIILSDHEITIIFK

SEQ ID NO: 5124 - protein, 537 aa, synthetic construct
MKKAAIYTRKSKFTEKGDSIESQIKLCSKYLDNINIKDYCIYTDEGFSGKNTDRPEFQRMLSDAKAKKFDVIICYKFDRISRNVSDFSNLINKLNELNISFISVVEQFDTNSAIGRAMMYLCTVFSQLERETISQRITDNMYSLATKGYWLGGETPTGFRSEKKFFNSNNKQKMYSSLVPIKEELDLVKLIFNKYLEFNSISKIEKYLLSNNIKTKRNKDWSKASISLILRNPAYVKADEETFKYIESTGSKVYGNPDGKHGLLIYKKNKGRKGAKHDISEWIYAVSEHEGIIDSDIWVAIQKQIKKNAILAPALGTSNIALLTGLIRCAKCNSPMRVAYGKRNPKTNKKNYYYVCTLKTKSGKTRCDSKNLPGLDLDNLILDKLKEMSLDKNTLLKELNKYKDTIESNFHNDVLKNIQNNISKNNSMIDNLLNNVALSTDSEVTAILLEKISKLKDENKLLTQKIDDLKSELEAQETLLNDCNSLITKIKYFSKFIDNSSIEEQKQLVSSVIEKVIANGDTGSIEIKFRPLLDFKI

SEQ ID NO: 5125 - protein, 502 aa, synthetic construct
MNNKICMYLRKSRADEELEKTLGEGETLSKHRNALLKFAKEKNLNIVEIKEEIVSGESLFFRPKMLELLKEVEAQKYDGVLVMDMQRLGRGDMKDQGIILETFKNSNTKIITPQKTYDLNNDFDEEYTEFEAFMSRKELKMINRRMQGGRVRSVEEGNYIATNPPFGYDIDFIKKSRTLKINEDEAPAINLIFKLYIEGNGASAIADELNVLGYKTKLGNKFSQSSVLTIIKNPVYIGKIAWKRKDIKKSKTPGKVKDTRLRDVSEWIIADGKHKAIINTETWEAAQKILKSRYHIPYQLSNSPVNVFAGLITCGICGKKMVMRKARGINRLMCIYKCGNKSTRFDNVESDCLKYLKDYLTNYTAKIKNKIKESDNNIYISQISQLKKELTALNNQRLKLFDLLERNLYDEDTFLERSKNINDRIETVSSTLKSIEKLLNKKSKASYEEDIKFFKSVLDAYDETEDISKKNSLLKSILFKIEYTKTKKGKDYEIKLFPKLRK

SEQ ID NO: 5126 - protein, 502 aa, synthetic construct
MTNKICIYLRKSRADEELEKTLGEGETLYKHRNALLKFAKEKKLNIVEIKEEIVSGESLFFRPQMLELLKEVEANKYDGVLVMDMQRLGRGDMKDQGIILETFKNSNTKIITPQKTYDLNNDFDEEYTEFEAFMSRKELKMINRRMQGGRVRSIEEGNYIATNPPFGYDISFIKKSRTLKINEHESKAVKLIFKLYIEGNGASFIATELNNLGYKTKLGNNFSSSSVLTIIKNPVYAGKIAWKRKDIKKSRTPGKIKDTRLRDKSEWIISDGKHEAIIDMETWNLAEEILKGRYHIPYQLANAPVNPFAGLITCGVCGKKMVMRKARGINRLMCIYKCGNKSTRFDNVESDCLDALKEYLVNYSAEIKNSTKKEDVDVYSNQISMLKKELSLLNNQKLKLFDLLERNIYDETTFLERSKNINDRIFSINNSLCNLEKLLKKKSISSYEEDIKFFKSVLDAYNETEDVSKRNTLLKSILYKIEYTKTEKGKDYEIKLFPKLRK

SEQ ID NO: 5127 - protein, 567 aa, synthetic construct
MGFKKLVNDIKVEKRRKLIAIYCRVSTEEQSENGYSIDEQERLLEEWCKKMGYVIYKCYSDRGISGKNIKDRPALKKLLSDAKAGKFDMVISWKINRVSRKLEDVLKIVNLLEKNNITFKSYSEPFETDTPAGRMQFQMMALIGEFERGTIAQNVKMGMIAKAKSGNWCGGRVLGYDLVPNNSPEEEKKGKNKLEINEKEAEIVRFIFNEYSKGKGYKAITNKMNKLGYKTKKGNNFSVGSIRDILTNPVYIGEIRYNVRQNWSEKRRRNINPNPIRVKGKHEAIIDRELWDKVQLILESKKGKPSRIYDGEYPLTGILRCPKCGAGMVISRTTNTLADGTKKRIAYYCCGNWKNKGTSVCNSNTIRVDKANEHVFKKIEELVSNEAMIKAVVKNINKERKDKVKPAKRLLGDIDKELEKLDKRKRKIFEAYEDDILTKDEFQTRKNELNEKIRILEEEKKPLLNTISEEVSEEIPYEFIKDILMNFSKVLNSSVSREQQKKLLHMIISEITMNESREIDSIKLNINDKLVEYLVKEGGVPIKGIPSSFMLKNIGLKVLDLDIAIIG

SEQ ID NO: 5128 - protein, 493 aa, synthetic construct
MRVAKFVRTSTDLQHKSIENQEEILDRWIKDNKCILYKTYSDEGISGTKKSKRIQWLQMIEDAKSRKFDIMICKSYSRFGRNQIESLEAIKTLRENNIRIVFLEDGLDSMTDTSRFGLMAWLAEEESKRTSVRIKGVQKHFRECGKIFNCIPPYGYDYDLNNKKFVVNIIEAKVVKEIFKLYIQGNGVNKIAKVLKDENIPTKNGGVWRGNTIKNIILNESYLGTLVQGKSSNVDVTINKREKINADDWIKHYNKHEAIIDKVTFIKANNIFKNNSLKAYKARNNTKGIERASNSSLFSNLVKCSCGTSMSIRRKKGRKPYYNCIDYERIGTACGHSSNSIREDYLIEFIYEEFNELISNNFNNLNIKNKNDIEIALNNELKIINGKIEKQVVLSNNLLNLFSTEVITIKQFKLQNESINNTLEVLMKNKEDVENKIENLSKNSTTNFKRTIKDIVKLPIEDWNNSMLKEVIDKIVIDINGTIKIYWSIEKEC

SEQ ID NO: 5129 - protein, 516 aa, synthetic construct
MLEEGQKLKCALYVRTSTTEQKDSLELQARYKNNNFDIDKIYSEEVSGRDILKRPEQIKLLNDCGIEVTSVQKQAVFITNDKKPLYDCIIVSNTSRWGRNVVQVKQIVEALHKKGVKLWFDDLGKFSDSKDLSLTLDMLFVLDENYSQTISQKVKSAMDKRKKEGYILANSRLIGYDRTEEGTLIKNKDSNMVKSIFEDYAYKNLAIRKIAEKYEISTSTITTLLKNAKYAGFMVYGIKKHGWDFSKLEIVKSDKIEPIISEELFWKVQEVRRSRSRIVEGSRITRNKIGVNNNTHSLSSKILCTNCGKNFHYKDRGYWICGTHSKYPKKCPMPTVRENKILRHLKSPYGLKAIRNGLETRLEVELKKLQLESIEPIKNELAELKGKSSKLLDLYMDSLIDKTTFEKRNKLLKDDIEKLENELKIYSDKENYRIKLLELQKEAKSLLDEYEKILESSEPEKIFDRVSKIEVGKIMDIKKGKEVSYIKSVRFKDFKILEDHQLFNELTKKEEKNKSW

SEQ ID NO: 5130 - protein, 567 aa, synthetic construct
MGFKKLVNDIKVEKRRKLIAIYCRVSTEEQSENGYGIDEQERLLEEWCKKMGYVIYKCYSDRGISGKNIKDRPALKELLSDAKAGKFDMVISWKINRLSRKLEDVLKIVNLLEKNNITFKSYSEPFETDTPAGRMQFQMMALIGEFERGTIAQNVKMGMIAKAKSGNWCGGRVLGYDLVPNNSPEEEKKGKNKLEINEKEAEIVRFIFNEYSKGKGYKAITNKMNKLGYKTKKGNNFSVGSIRDILTNPVYIGEIRYNVRQNWSEKRRRNINPNPIRVKGKHEAIIDRELWDKVQLILESKKGKPSRIYDGEYPLTGILRCPKCGAGMVISRTTNTLADGTKKRIAYYCCGNWKNKGTSVCNSNTIRVDKANEHVFKKIEELVSNEAMIKAVVKNINKERKDKVKPAKRLLGDIDKELEKLDKRKRKIFEAYEDDILTKDEFQTRKNELNEKIRILEEEKKPLLNTISEEVSEEIPYEFIKDILMNFSKVLNSSVSREQQKKLLHMIISEITMNESREIDSIKLNINDKLVEYLVKEGGVPIKGIPSSFMLKNIGLKVLDLDIAIIG

SEQ ID NO: 5131 - protein, 549 aa, synthetic construct
MKSKLKSSLNIESPKIAIYMRVSTSKQADNQSLDTQENTINSYIASRHDWINPICYKYIESHSASIKPKVSNTLKESSFDSLKRPKLRELFLDATIGKFDYVLCASHDRLTRNTNEGIILKHLFSRLNITLIYCRPGETISSENEALNKFFENLLVNIAALESNITGGRVTLANKHKIQNNFWAGGPPPFGYNLVSQPSNKRNSFLEINFEEARIVKKIFELYNLGCSYTEILTRLNRDFTLPPKRLWTHNTLKEILRNPVYTGFLVWNKRGGARKPNRHSHNDFVKSNLVEKNIIIPENEFLETQKLRNILSKDSKFLSTDFLLRDFLYCNKCNKKLLAKNYGNNKRFYYCHSHNNMEINKKCRSIKASKIESTILSNINDLINSSLQSEVQIEKFYDNYIENFNAELLDNKKSLEITINQLKSSTDLLELCVNEINISKDNLTVDYEDLSSNSTEFSFINALSEFQVITQTEIKSLKARKEYLTYKINSSPKSFDDFKSNLNKSFKLFKYDEEKQKLVSSPRSFRLFLFKVVKKIILSDHEITIIFK

SEQ ID NO: 5132 - protein, 537 aa, synthetic construct
MKKAAIYTRKSKFTEKGDSIESQIKLCSKYLDNINIKDYCIYTDEGFSGKNTDRPEFQRMLSDAKAKKFDVIICYKFDRISRNVSDFSNLINKLNELNISFISVVEQFDTNSAIGRAMMYLCTVFSQLERETISQRITDNMYSLATKGYWLGGETPTGFRSEKKFFNSNNKQKMYSSLVPIKEELDLVKLIFNKYLEFNSISKIEKYLLSNNIKTKRNKDWSKASISLILRNPAYVKADEETFKYIESTGSKVYGNPDGKHGLLIYKKNKGRKGAKHDISEWIYAVSEHEGIIDSDIWVAIQKQIKKNAILAPALGTSNIALLTGLIRCAKCNSPMRVAYGKRNHKTNKKNYYYVCTLKTKSGKTRCDSKNLPGLDLDNLILDKLKEMSLDKNTLLKELNKYKDTIESNFHNDVLKNIQNNISKNNSMIDNLLNNVALSTDSEVTAILLEKISKLKDENKLLTQKIDDLKSELEAQETLLNDCNSLITKLKYFSKFIDNSSIEEQKQLVSSVIEKVIADGDTGSIEIKFRPLLDFKI

SEQ ID NO: 5133 - protein, 570 aa, synthetic construct
MKTVAIYSRKSRFTGKGDSIENQIEMCKEHIKNFVSPNVEFLIYEDEGFSGGNTNRPAFQRLINDIKYGNIDLLICYRLDRISRNVADFSSVLDVLQEYKVDFISIKEQFDTSSPMGRAMIYIASVFAQLERETIAERIKDNMLEMAKKGKWTGGKLPLGFTSKKIAYIDEEGKKRFKVTLEHDSKDLEFVKFLYEKYLELGSLHKLETYTHENNIRSASGKIFEKSTLKIILQNPIYVKADENVFNYFENKGWSVYGEPDGLHSLLSYNKTETAKKDGKLTKRNKDESESLVAVSDVKGFIDSSLWLKVQYQFKKNKNTFPRLGKTHNALLVGKLFCGNCGTRMIIQHGRTSPKTGIKTFYYVCSLKKTSKKKLCSAHNVKTDFLENLVLDSLEKLYYKKDFINDSLKINLKENKDNIKEINTTKKLIELNKNKINSLIEKLSLDFDNVLSDILIPQIKKIKIENDVLESKLEELKLKKQESEMNRIEIDLITSLLNKCKNIKELTRTEQKQIIDCLVDSIYYYSNDNGNDKIKIKFINDIDSINTLLSDEEKRQFEKLSFYSHSMSSI

SEQ ID NO: 5134 - protein, 564 aa, synthetic construct
MRSPKAYSYVRFSTPKQAQGDSYRRQLQHARDYCLTHNLVLDDKAIEDFGVSAFRGSNRTDGALGRFIDAVKCGEIERGSYLLVESVDRLSRQAIEEALTQFLEIVREGIVIVTLSDNQVFRSGEVDFTKLIVSIVYMARANDESEMKSRRSRAAWSNGRQQARDNNKVIANSRLPSWLTLEGDKIVPIPERVAIVNEMFQMARTGQGYQQIAKVFRDKNYKTFGQGKVWRPAGIQSVIKSRAVIGEFQPHIIYDGKRIPDGEPIIDYYPVIVSPAIFAEVQHIVDKRSNHSGSYRKGLYNNLFSGVIRCQCGELLRFHNKGSKGQVRNYLVCPMEGVTGCQLPYLLYNRLEPQLLQAVCRLSKVMHQRQPSTAKVLTLKDELAVLQGQLDIEIKKRKKAAQSMLDFDDDATFRALFEECKATCQALEGKVLQLEDDIMRLELSNRTIYRLLRPEDLSSTEHRQQFNSQLKSSIQIEFIHDNTQLVAVYRDLDDNLMLEQAFGPKLMSSTVHDYDGHICVKTIADAPYVDPNWLSEEWDDYAEDSPDSGSGIDEEFGAWRAEDE

SEQ ID NO: 5135 - protein, 520 aa, synthetic construct
MKKAVYCYARVSSRGQAKDGYGMSRQQEMLRDYVAAYDDSQHNRGYELGDISWLYAEGVSAYSGKNIEDGSVLKTFIDDVLQKKITNSVLVIENLDRFSRAAPNRAAGLFLSLINAGCDIHEVETEMIHHQYSDLNIISGGLQRAHNESKRKARLSIKNWDERIKNTIDGTSVLTHRVPSWIEVKNNKYVLKKGESEKYNLIFKMYADGFGPAAIRDELKKRGMQINEREPTINHLMKIIKDQRLIGRFNSTGRKILDGMSIYPVVVEPELFEAVNDLRKQRNPLGKINVKANNLFAGLCICMNCGRYVQVNSVDKKGDTYFRCGGSLVKIDKCKERGFKYKIVENALLEHLRNFDFSMLRSDDNDIQVKINYLSMELVSNEKYSNEILADLEKEDIPDPNDRRILKNIQRRISEIRNEITILKQSNIGYETFNDLKDSYTDDLLDPKNTKLRLDFNVKVKRVIKNIKMKRYDNTIMLVVSYVGVNEKQAMVINSKTGEVVFMAVQNDDLKSIEYLINND

SEQ ID NO: 5136 - protein, 520 aa, synthetic construct
MLEEGQKLKCALYVRTSTTEQKDSLELQARYKNNNFDIDKIYSEEVSGRDILKRPEQIKLLNDCGIEVTSVQKQAVFITNDKKPLYDCIIVSNTSRWGRNVVQVKQIVEALHKKGVKLWFDDLGKFSDSKDLSLTLDMLFVLDENYSQTISQKVKSAMDKRKKEGYILANSRLIGYDRTEEGTLVKNKDSNMVKSIFEDYAYKNLAIRKIAEKYQLSTSTITTLLKNIKYAGFMAYGIKEHGWNFSKLEIVKSDKIEPIISKELFWKVQEVRRSRSRIAEGSRSTRNKIGVNNNTYSLSSKIVCTNCGKNFHRKDRGYWICGTHSKYPKKCPMPTVRENKILRYLKSPYGLKAIRNGLETTLEGELKKLQLESIEPIKNELAELKGKSSKLLDLYMDSLIDKSTFEKRNKLLKDNIEKLENELKIYSNKENYRVKLLELQKEAKSLLDEYEKILESSEPEKIFDRVSKIEVGKIMDIKKGKEVSYIKSVRFKDFKILEDHKLFDELIREEDTIRVEKQTI

SEQ ID NO: 5137 - protein, 565 aa, synthetic construct
MGFKKLVNDTKIEKRRKIIAIYCRVSTDEQAEFGYSIDEQKRLLEEWCKANDYIIYKCYSDRGISGKNIKDRPALKELLSDAKAGKFDMVISWKINRVSRKLEDVLKIVNLLEKNNITFKSYSEPFETDTPAGRMQFQMMALIGEFERGTIAQNVKMGMIAKAKSGNWCGGRVLGYDLVPNNSPEEEKKGKNKLEINEKEAEIVRFIFNEYRKGKGYKAITNKMNKLGYKTKKGNNFSVGSIRDILTNPVYIGEIRYNVRQNWSEKRRRNINPNPIRVKGKHEAIIDRELWDKVQLILESKKGKPSRIYDGEYPLTGILRCPKCGAGMVISRTTNTLADGTKKRIAYYCCGNWKNKGTSVCNSNTIRVDKANEYVFKKIEELVSNEAMIKAVVKNINKERKDKVKPAKRLLSDIDKELEKLDKRKRKIFEAYEDDIITKEEFQIRKDELNEKIRNLEEEKKPLLKTISEEVSEEIPYEFIKDILMNFSKILNSSVSREQQKKLLHMIISEITMNESREIDSIKLNINEKLVEYLVKEGGVPIKGIPSSFMLINVGVRILNLDIVI

SEQ ID NO: 5138 - protein, 549 aa, synthetic construct
MKNKLKSSLNIESPKIAIYMRVSTSKQTDNQSLDTQEKTINSYIASRHDWINPICYKYIESHSASIKPKVSNTLKESSFDSLKRPKLRELFLDATIGKFDYVLCASHDRLTRNTNEGIILKHLFSRLNITLIYCRPGETISSENEALNKFFENLLVNIAALESNITGGRVTLANKHKIQNNFWAGGPPPFGYNLVSQSSNKRNSFLEINFEEARIVKKIFELYNLGCSYTEILTRLNRDFTLPPKRIWTHNTLKEILRNPVYTGFLVWNKRGGARKPNRHSSNDFVKSNLVEKNIIIPENEFLETQKLRNILSKDSKFLSTDFLLRDFLYCNKCNKKLLAKNYGNNKRFYYCSSHNNMEINKRCRSIKASKIESIILSNINDLINSSLQSEIQIEKFYDKYIENFNAELLDNKKSLEITINQLKSSTDLLELCVNEINISKDNLTVDYEDLSSSSTEFSFINALLEFQVVTQTEIKSLKSRKEYLTYKINSSPKSFDDFKSNLNKSFKLFKYDEEKQKLISSPRSFRLFLFKVVKKIILSDHEITIIFK

SEQ ID NO: 5139 - protein, 537 aa, synthetic construct
MKKAAIYTRKSKFTEKGDSIESQIKLCSKYLDNINIKDYCIYTDEGFSGKNTDRPEFQKMLSDAKAKKFDVIICYKFDRISRNVSDFSNLINKLNELNISFISVVEQFDTNSAIGRAMMYLCTVFSQLERETISQRITDNMYSLATKGYWLGGETPTGFRSEKKFFNSNNKQKMYSSLVPIKEELDLVKLIFNKYLEFNSISKIEKYLLSNNIKTKRNKDWSKASISLILRNPAYVKADEETFKYIESTGSKVYGNPDGKHGLLIYKKNKGRKGAKHDISEWIYAVSEHEGIIDSDIWVAIQKQIKKNAILAPALGTSNIALLTGLIRCAKCNSPMRVAYGKRNPKTNKKNYYYVCTLKTKSGKTRCDSKNLPGLDLDNLILDKLKEMSLDKNTLLKELNKYKDTIESNFHNDVLKNIQNNISKNNSMIDNLLNNVALSTDSEVTAILLEKISKLKDENKLLTQKIDDLKAELEAQEILLNDCNSLITKLKYFSKFIDNSSIEEQKQLVSSVIEKVIADGDTGSIEIKFRPLLDFKI

SEQ ID NO: 5140 - protein, 549 aa, synthetic construct
MKNKLKSSLNIESPKIAIYMRVSTSKQADNQSLDTQEKTINSYIASRHDWINPICYKYVESHSASLKPKASNNLKESSFDSLKRPKLRELFLDATIGKFDYVLCASHDRLTRNTNEGIILKHLFSRLNITLIYCRPGETISSENEALNKFFENLLVNIAALESNITGGRVALANKHKIQNNFWAGGPPPFGYNLVSQPNNKRNSFLEINFEEARIVKKIFELYNLGCSYNEILTRLNRDFTLPPKRLWTHNTLKEILRNPVYTGFLVWNKRGGARKPNRHSPNDFVKSNLVEKNIIIPENEFLETQKLRNILSKDSKFLSTDFLLRDFLYCNKCNKKLLAKNYGNNKRFYYCHSHNNMEINKKCRSIKASKIESTILSNINDLINSSLESEVQIEKFYDKYIENFNAELLDNKKSLEITINQLKSSTDLLELCVNEINISKDNLTVDYEDLSSSSTEFSFINALLEFQVVTQTEIKSLKARKEYLTYKINSSPKSFDDFKSNLNKSFKLFKYDEEKQKLISSPRSFRLFLLKVVKKIILSDHEITIIFK

SEQ ID NO: 5141 - protein, 565 aa, synthetic construct
MGFKKLVNDIKVEKRRKLIAIYCRVSTEEQSENGYSIDEQERLLEEWCKKMGYVIYKCYSDRGISGKNIKDRPALKELLSDAKAGKFDMVISWKINRVSRKLEDVLKIVNLLEKNNITFKSYSEPFETDTPAGRMQFQMMALIGEFERGTIAQNVKMGMIAKAKSGNWCGGRVLGYDLVPNNSPEEEKKGKNKLEINEKEAEIVRFIFNEYSKGKGYKAITNQINKLGYKTKKGNNFSVGSIRDILTNPVYIGEIRYNVRQNWSEKRRRNINPNPIRVKGKHEAIIDRELWDKVQLILESKKGKPSRIYDGEYPLTGILRCPKCGAGMVISRTTNTLADGTKKRIAYYCCGNWKNKGTSVCNSNTIRVDKANEYVFKKIEELVSNEAMIKAVVENINKERKDKVKPAKRLLGDIDKELEKLDKRKRKIFEAYEDDILTKEEFQTRKNELNEKIRTLEEEKKPLLNTISEEVSEEIPYEFIKDILMNFSKVLNSSVSREQQKKLLHMIISEITMNESREIESIKLNINDKLVEYLVKEGGVPIKGIPSSFMLINVGLKVLNLDVVI

SEQ ID NO: 5142 - protein, 502 aa, synthetic construct
MEFIREDCIYARQSVDRKDSISIESQIDFCKYELKGGSCRVFKDKGYSGKNTDRPEFQKLLGEIRKGKVRRVIVYKLDRISRSILDFATMMELFQEYDVEFVSSTEKFDTSTPMGRAMLNICIVFAQLERETIQKRVTDAYYSRCLKGFHMSGQAPYGYQLEPTVVEGIRTKKMVADPIAADHVRLMFEMYAEPETSFGDITRYFEEQGIKIYEKSMVRSFLSQLLRNPVYAQADLELYEFFKSQGAAIVNDASDFAGTNGCYLYKGRDVKEDKDRCLKDQILVIAPHEALISSDTWLKCRKKLMANTTFQQGRKPKNTWLAGKIKCGHCGYALKATHVPNSTGYFRCTKRTENKGCPGCGKIRKEEFEQFIFSAMQEKFKDFQILHGREEKVNPKLTAYQVELAQVEAEIEKLLDTLTGANATLLAYANKKIEELDTRRQTISKAIAELSVETISPQQIKKLSYYLDNWDSIDFDDKRKAADGLISTIKATSDRVQIEWKI

SEQ ID NO: 5143 - protein, 516 aa, synthetic construct
MFPHFSITSIFLKKTRVVAYCRVSTGSDEQLVSLQAQKAHYESYIKANPEWEYAGLYYDEGISGTKKENRSDLLRMLSDCETGRIDLIITKSISRFARNTTDCLEMVRKLIDLGVHIYFEKENINTSSMESELMLSILSGLAESESISISENTKWAIQRRFQNGTFKISYPPYGYQNIDGQMIINPKQAEIVKYIFAEVLSGKGTQKVANDLNQKGIPSKRGGRWTATTIRGILTNEKYTGDVILQKTYTDSHFNRHTNYGEKNMYLVENHHEAIISPEDFEAVDAILNQRAKEKGIEKRNSKYLNRYSFSSKIICSECGSTFKRRIHSSGTRKYIAWCCSKHISNITECSMQFIRDEDIKTAFVTMMNKLIFGQKFILRPLFHGLRNQNNAASFRRIEELETKIENNMEQSQVLTGLMAKGYLEPALFNKEKNALEAERERLLAEKDQLTRSVNGNFAKVDEVDRLLKFATKSKMLTAYEDELFEDYVERIIVFSREEVGFELKCGITLKERLVN

SEQ ID NO: 5144 - protein, 650 aa, synthetic construct
MLKSLDRGKSMAQQDGVHNLKCKELYMDAQEDMHMNDYNKITALYSRLSVGDEDRDGGESNSIQNQKKFLESYARQLKLTNIRHYIDDDESGRFFDRSAYSRMIEDVENGKIGVCIMKDMTRWGRDYLQVGNAMEIFRRNNVRFIAVNNGIDSEKPDTLEFAPFINIMSEWYAKDISKKVKTGIKTKGMSGKPIATEALYGYVKSPDNKDFWIIDEEAAGVVRLIFRLFLDGKNRNQIAVYLTQAQIPTPTFYMKERGRGTCKNRALNEDNRYKWNKATLTHILTRQEYCGDVVNFKTTKHFRDKRNHYVDRSQWQITENVHEPIIDRADFETAQRILENAPVRRPNGDGEIHPLSGLLFCKDCGAKMHIRIDYRNGGKRHVAYCSEYHKGKAKNPKCHSPHIIDADLLMQTVAEVLKKIEDYSISNRAEFEALVKKNLAMQQTDQTKKQQKRIPQITTRLEQIDKVLNKLYEDNALGTIPQDRYEQMSQKYSEEYYALKTELSILQEQLSAYENAGGRAQKFLKLTERHAAFTDLTPAILNEFISRIEVHERDQKRARYAIQHISIYFNYIGRFENEVTQLAEPTEQEIRQMREEIEEAKKEKSRAYHRKYSREYRARNLEKQREYERIKAREYRARRKAQTAAAQPAQ

SEQ ID NO: 5145 - protein, 586 aa, synthetic construct
MQEVEVIKAKNVLARQARGKAIERLRVAAYCRVSTDSEDQLNSYKSQVQYYTDMIKKNKEWVLADIYADEAITGTQVTKREDFQRMINDCMNGEIDMVFTKSISRFARNTLDTLKYVRMLKERNIAVYFEDEKINTLTMDGELLLVVLSSVAQQEVENISANVKKGLKMKMKRGELVGFQGCIGYDYHPEDKTITVNQEEAEIVRYIFNRYVDGAGGSVIGQELESLGYKTKYGSSTWAPSTVIGIIKNEKYKGDILLGKTFTVDPISKRRLENMGEEDKFYMKDHHEPIISEEVFEKAQEILNRRNKNRTTVGSGKREKYSRKYAFSCMLECGFCGGTLTRRNWHSGSKYSKVIWQCVTATKKGKKFCKHSKGIPETAIEEAFVESYRLLCDDNKDVLEEFLQRMDDTLSSSVVSKQLAKAEKEIDALEKKKSKLVDMRLEEIIDKETYESKYADLVSKQEQLVEERQKLQETSDNEKDIKKRLKEFKKTLEQNEVLDKFDRYVFESIVEKVIVGGIDENGNVDPAQLTFVYKTGLKNSVDGAKFKTQRKNARGRHRTNELCSHDSNEVDKMCSDSSNDTCGNCS

SEQ ID NO: 5146 - protein, 531 aa, synthetic construct
MLAYGYCRYSSNLQDEKSIEQQKNELEEYAKKNNISIIKYYIDEAKSGTKDTRDSFQNMISDACKSKEIQAVLVWKTDRFARKAIDSLYYRNKLEKVGIKLISITQPIDTETPEGKLMSTMLAGVDEYYSQNLASNVKRALKLNAQNAQFNGGIAPLGYDIVNKKYVINEREASSVRFIYDMYIEGYSLIEIALKLNSMGFKTKKNKPFSKTSIYDIIGNEKYIGKYIFNKGTKSNHDGIRADAIILEDAIPQIICKEVFEKAMNKRTKRKNAENTAKNFYLLSGLIKCECGGSYVGTTIKKQKNGNTYVSGYYRCSNHNKLGKCQMPSLKQELIENKVIKMLTEELLNAETRENIVKAVNAQYIEAQKDCKNDVEILKENLSSINQEINNIVNAVAKGYATDSLLKRLEEIENTKKNIEDEINFKDNIATHNYITSEKIEEVLKKDLSELKDKSKEKLKILVQKYIKKIEVKTTEVLIYLDFGESSPKKLVAKMWFEHMTLRVWTECSSQLSYFAIWNLYYYNKFKRVCQ

SEQ ID NO: 5147 - protein, 559 aa, synthetic construct
MVTPATFVMKYFVYCRRSSEAEDRQVMSIESQRSELRRLFAGTPGIEIVEWYEESKSAKAPGRPIFDTIVNRIERGEASGIVAWAPDRLARNSIDGGRLIYLLDRGKLADMKFATYTFENNSQGKFMLQIMLGQSKYYSDALSDNVKRGNRTKVEHGWRPGNVPLGYKNDAATRTIVVDPVHFQLVRKMYDLMLTGAYSTRQVARVAREEWAFRSPKRRRSGGVPLSLSSTHRMLTNPFYAGLIRWNGQVYKGKHEPVVSIDEFEAVGRLIRKPGKQRSIRYAFAFTGMIRCGNCGLRVTAENKTNRQGHRYVYYHCTKRRVDIDCKEPSIEVKALEAQILGFLEKLTIEQQIYEWLIEELKHDLVFEATAQEAIRKSLETGIEEVAGQIAEMTSLRLRNLVTDEEFLATRRKLQTEKLRLEQELVGNGHQGATFEPIRDVISFKSRATDWFRNGTPVTKRLILDTFGSNLVLKDKKLLTDAVKPFSVLPPDTRCPRGRALGHTDRTSASHRSALRILRKMSRALNAEPKREKIIQNLQTLREHLAEGDEARDTGSKAA

SEQ ID NO: 5148 - protein, 576 aa, synthetic construct
MKLYSYQRWSSAVQEAGTTKARQEDAARAYALRNGLEYCEIVDSGVSAYRGANKQGALGKFIDAVQQGVIERGVTLYVESLDRISREGINNALRLFQDILELDITIVTGMDGKVFTKQSINDNPFDLMMSILVFIRANEESTKKSLRTNGNALALVERFKSGQSTNIKSMGGCPFWIDNSMSQYEAVKKDPKYWPIAEEIVQQFLDGKSVFQVVKYLNATYPEGCYGKPWNYANVRKVRLSKAIYGVKEITISGTLHTLDNYYPALCTEGEFLRLQVIKDNNKYIGKVGDQKNNINLLCGMKLFRCGHCGSTIMAMKHKDTIRYMCEKGRMDSNGCRLWSFGSLGIEHCLMLVLTYAYIDTNRKGVQNKTDYSTRIASKNEAIDEISKRITNTVELVSLGLSNVEEVKVLIEGLNKQRTVLKTELDVLVTQQALSDSIDFETLMHDFFTHAQYAVLQSVDHEYREELRKVVFAMMDSVIAWKYGKNLYFSFRIKDHDEYFNFVPGDAKNTYRMYIGGLPFNDEPEDDVALGESLEGLVEAYRTVTKGQTRVIQMAEEMLEVVGYPVLDGKHFWTKK

SEQ ID NO: 5149 - protein, 560 aa, synthetic construct
MRRAAVYARFSTELQNEKSTEDQIALCRAYAARNGLAIVAVYEDKARSGSSILGRDALMRLMEAADQNAFDIVVVEALDRLSRDMADLAGLHKRLSFLDIEIQAVHDGIADAVLIGIRGLVGQMQREDGAKKVRRGMAGVVRDGRHAGGRAYGYRPVLGHPGELEIVQEEADVIRRIFAAYSAGRAPRDLAGDLNRDGIAPPRGIRWNGSTINGNAQRGVGLLFNELYVGRIVWNKVRMVKNPDTGKRVSRPNPKDQWQTKEVAHLRIIDDETWHKAQARKAVRVNATSHVKRRPAHLLSGLLRCGVCGSGLSVHDRDKTGKTRIRCSAVRESGSCSNRRIIYLPEIEKAVLDGMRDQLKAPDLIEAYIRRYNQERRELSAQANAMRTALQGKRDRIEGERQRTIDLVIRSVIAEEDAKQRIAELKTQLSEVEAQLSGLDEPPSPVALHPATLRRYIETVDGLSKALADHATAADDRGPLIQNLRGLVHSVTVHPKRAREGFEIEVKGKLAALIGGAAFPNARYTEKPTGLGSRFNAAVTYDSGLEVVAGEGLEPPTPGL

SEQ ID NO: 5150 - protein, 519 aa, synthetic construct
MKKITKIDGNKGTSIIKPKLRVAAYCRVSTDSDEQLVSLEAQKSHYETYIKANPEWEYVGLYYDEGISGTKKENRSELLRMLSDCESKKIDLIITKSISRFARNTTDCLEMVRKLLDLGIYIYFEKENINTQSMESELMLSILSGLAESESISISENNKWAVQRRFQNGTFKISYPPFGYDNIDGQMVVNPEQAEIVKYIFAEVLSGKGTQKVADDLNQMGIPTKRGARWTATTIRGILKNEKYTGDAILQKTYTDSRFNKRTNYGEKNKYLIENHHEAIISHEVFEAVEAALNQRAKEKGIEKRNNKYQNRYSFSGKIICSECGSTFKRRIHSSGARKYVAWCCSKHLKQITECSMQFIRDEDIKKAFVTMMNKLIFGRKLILQPLLEALRGMNKSDNLSRIQELEKQIEKNAEQRELLVKLMAKGYLEPALFNRENNELQMEANNYMEQKEALIHALNGELSKVQEVSNLIKFTNKAEMLSDFNDQLFNDYVEKIIVFSRVEIGFILKCGITLRERM

SEQ ID NO: 5151 - protein, 521 aa, synthetic construct
MAVSKNVMIIPAIKRMGNNRKEDETPKLRVAAYCRVSTDSDEQASSYEVQIEHYTEFIKKNSEWEFAGIFADDGISGTNTKNRDEFNRMIDECMAGKIDMVITKSISRFARNTLDCLQYIRKLKDKNVAVYFEKENINTLDAKGEIMLTIMASLAQQESQSLSQNVKLGYQYRYQQGEVMVNCSRFLGYTKDENKRLVIVPEEAEIVKRIYREYLEGSSMDKIKKGLEADGILTGAGKKRWHTSTIRKILSNEKYIGDALLQKTYTVDFLTKKRVVNNGIVPQYYVENNHEAIIPREIFMQVQEELVRRSRGHISTSGKKRNFSSNHVFSQIIFCGECGEIYRRVHWNNRGKKSIVWRCVSRLENTGLTCHSRTVLEDMIGLATVEAINKLIGQKDGFLTILKENIETVISETDNNIVSEIDKKLEELQKDLLRLANSKEDYNDIADEIYRLRKERHKALAEEAGKKGSKQRLEEMEKFLNEQSTLLEEYDEQLVRRLIEKITVYDDKLTIEFKSGVEVDV

SEQ ID NO: 5152 - protein, 549 aa, synthetic construct
MKNKLKSSLNIESPKIAIYMRVSTSKQTDNQSLDTQEKTINSYIASRHDWINPICYKYIESHSASIKPKVSNTLKESSFDSLKRPKLRELFLDATIGKFDYVLCASHDRLTRNTNEGIILKHLFSRLNITLIYCRPGETISSENEALNKFFENLLVNIAALESNITGGRVTLANKHKIQNNFWTGGPPPFGYNLVSQSSNKRNSFLEINFEEARIVKKIFELYNLGCSYTEILTRLNRDFTLPPKRIWTHNTLKEILRNSVYTGFLVWNKRGGARKPNRHSPNDFVKSNLVEKNIIIPENEFLETQKLRNILSKDSKFLSTDFLLRDFLYCNKCNKKLLAKNYGNNKRFYYCSSHNNMKINKKCRSIKASKIESIILSKINDLLNSSLQSEVQIKKFYDNYIENFNTELLDNKKSLEITINQLKSSTDLLELCVNEINISKNNLTVDYEDLSSSSTEFSFINALLEFQVVTQTEIKSLKARKEYLTCKINSSPKSFDDFKFNLNKSFKLFKYDEEKQKLISSPRSFRLFLFKVVKKIILSDHEITIIFK

SEQ ID NO: 5153 - protein, 579 aa, synthetic construct
MAYTKTHIYTRVSKSSQQEGSGLDEQLRRIEAYMAQEGHLFNNSPTQYWQDIGLSAFGDANIQDGELAVLLNDIATGTIGKGHALVIYSLDRLSRRSSWDEDTIQKIVKAGVDIHDVSTPIVLKENDSFSKIIMELIVARGNNESKIKSERSLAGWNRRLQETLSTGVVLTKRLPFWIETDKDNKAVAIDEQVQIINTIFNDYVSGLSCPMIARKLNTTGIKTKSGKQWRSTTISKLIKDDRLQGNFRRSATSEPIPNIFPVVVSTDVFEIANRIIKANASGIKGRPRENNKTREVNNIITGLVRCGQCGSKVTTSKNARGVRYVVCLHRRNHEVCTQKAIRLEHLEKLTINNALGIDMNLVFSPKDTTSIVSTEAKLKSELEVLYVDLTDCKNKIAQRKEDKKRPSVALAEALTDIEDRIDEIENELSVLNVSEPIVDLGEHNLDELMCVSNTDLRMSLRKYLVQVLDTITFRTLDKDILIELKYNRDVYRHIIITDSKAQDVLNEISISKNNNITYYKSRSMTVVENVENETIKLHGDEPTVSDVLLLINYISVIDGKEWIGDYLHGVLERLIENTP

SEQ ID NO: 5154 - protein, 532 aa, synthetic construct
MKAAIYSRKSRFTGKGDSIENQIQLCIDYAKSIGVKDFLIYEDEGFSGSNIDRPQFKKMMQDAKDKKFSYLVCYRLDRISRNVSDFSTLIEKLNELNISFISIKEQFDTSTPMGRAMMFISSVFAQLERETIAERIKDNMYELARSGRWLGGNTPHGFNSEKITFLDENLKERSMYKLQVNNEQMEVVKLIYNKYLELRSLSKLYKYIYNNGIRGPRGGKFDPSSLSRILRNPAYVKANDEILDYLKNSGMDVVGTPDRKCGILTYAKNTANSIAAIAKHHGVIEPEIWLEVQNQLDKNRDKTPRISTGKTALLSGLIKCGKCGSNMRITYKGKKTDKDLKYYYICGTKKTLGSDSCNCKNLNGPLVESLVIDKIKNCKEESIISAFNSNNIKADNVFNAFKSETNLLKNQILDKERLIKNLVIELAKNTGSTASDYIVSQIESLNNEISILKDKINTLESSNINISSDSINIDIIVSNLKRFNDEVDNASLDDKRLLLSTIINSIVWDSSLGNLNIVYMGAEMDNSVSLSN

SEQ ID NO: 5155 - protein, 529 aa, synthetic construct
MTKAAFYGRFSSNNQREESVEAQLRASSDFADRNNYEIVAKYIDRAKSGTSSRKRTEFLRMIKDAEKGLFQVIIVHKLDRFSRDKYDSAFYKRKLKQCGVKLISVTEQLDDSPESVILESVIEGMAEYYSKNLARETMKGLKENAYQCKHTGGMPPLGYDVNLEKKYIINEREAESVRLIFEMYITGYSQSDMVNELNERGFKTKLGTIFRTNSIHSILTNEKYTGVYVYNKSAKKNAFGKRNSHAYKDESEIIRIEGGMPQIISKETFEKAQEVLKARKRAPGANKAKENYLLAGLIRCGCCGKHYQGNRRKAKNKPIYVSYRCSYRRLTSSKVCDNKEIRKEYIEEYVLSELERKIFNDKAIPLLVEGINENLQKKNKFEEEKKDVIIREIEEIEAQINNIVTAIASGFMQEEFKVKMNELKNRKSELEFKLLELKSDEITQVVTERDVRILLNNFSSYVMSRNIPECKKFIQSFVKEVIIYKEHIEVTFNVSFSLLKNNRGVEIKSKINRYALYERYSESFFIKVS

SEQ ID NO: 5156 - protein, 520 aa, synthetic construct
MKKAVYCYARVSSRGQAKDGYGMSRQQAMLRDYVAAYDDSQHNRGYELGGISWLYAEGVSAYSGKNIEDGSVLKTFIDDVLQKKIINSVLVIENLDRFSRAAPNRAAGLFLSLINAGCDIHEVETDMIHHQYSDLNIISGGLQRAHNESKRKARLSIKNWDERIKNTIDGTAVLTHRVPSWIEVKNNKYVIKKGESEKYNLIFRMYADGFGPAAIRDELKNRRMQINEREPTINHLMKIIKDQRLIGRFNSTGRKVLDGMSIYPIVVEPELFESVNDLRKQRNPLGKINVKANNLFAGLCICMNCGRYVQVNSVDKKGDTYFRCGGSLVKIDKCKERGFKYKIVENALLKHLRNFDFSMLRGEDNEIKVKINYLSMELVSKEKYRNEILADLEKEDIPDPNDRRILKNIQRRISEIRTEITTLKQSNIGYETFNDLKDSYTDGLLDPKNTKLRIDFNVKVKRVIKNIKMKRYDNTIMLVVSYVGVNEKQAIVINNKTEEVVFMAVQNDDLKSVEYLISND

SEQ ID NO: 5157 - protein, 558 aa, synthetic construct
MTKLYSYIRFSSMRQSDGSSYERQIRMAKEIADRYNLELVNDYQDLGVSAFKGANSKTGALSRFLDEIGRSIPVGSWLFIENLDRLSRQDIISAQELFLSIIRRGITIVTGMDNKIYSIETVTANPMDLMFSILLFIRGNEESQTKRNRTNSSALLKIKAHQQNPQSPAVAIEEIGKNMWWTDTTSGRVLPHPVYFPVLQKIVQLRQEGHSAGVILDYLNEHHEPPAPTSNKKHGKWSRAMVSRLFATKALIGVKTVNVDGVEYELRDYYPRVLSDSEFYFLRKNIIKKAWDYSHDKEKVIPLLSGIGVLRCVHCGATMVKQTAANGKREQYRYCCDGRKSGRTDCPYPNWGFRAVTLEGAVLQLLADKIWIAEDKTNPIPEIQVKIDEISRKIDNLINLSAMTGATKELANQITDLNSQREALHEEIRLFEREMYSVDSQGWDKLAQFDLSDVQNEERLKVRMKIKGALHEIECSRIDSKKNLFVLVYLDGLRQRLVIENNRGLKKGQIFVDLKTINDRQILESAGMVLHPCIEMIIDADWKAPEEIPGLLSEEFGI

SEQ ID NO: 5158 - protein, 540 aa, synthetic construct
MKQPYNTTIYNTALYLRLSRDDELQGESGSIQTQRMMLRQYAAEHGLTVVDEYIDDGWSGTNFERPSFQRMIDDIEDGKINCVVTKDLSRLGRNYILTGQYTEIYFPSKGVRYIAINDNVDTINGESELAPFLNILNEMHARQTSKKVKAAMHTRFANGAHYGAYAPLGYVKDPDKKGHLLIDPETRWIVEKIFDLAVHGRGAASITRILVEEKVPTPGWLNYERYGTFANIYAGAPAEKAYAWTIAQVKSILKEETYIGHSIHNKQSNISFKNKKKVRKPQEEWYRVENTHEAIISEEVFQKVQELIASRRRKRRNGTTQIFAGLIKCADCGWSLAYGENKQNKNPYGYYHCSKNGQGLRQCSMHYIRYDVLYAYVLARLQYWSMLAQKDEDKLLKRLLNASDRERNSAKKKQAAELKKAEKRKAEVDGLFAKMYEDWSAGRITEYNFNMLSEKYQNEQKELETKIRQLHETMEAAVQTAADAEKWIALMKQYVNPVELTAELLNTLIEKITVHEAVKGEDGSREQEVEIYYRFIGKID

SEQ ID NO: 5159 - protein, 531 aa, synthetic construct
MRTVKAYVYSRVSSMQQVDAFGLDRQISTVMDFLENAKLPVELGYRLDPNNHEVLESDKGLSGYKGHNFTKGSLGQFKRRVEAGEITEGCLLIESVDRFSRKQGYDAIDEFTFLIKRNIDIVEVETGQIYSYKLDHKLSALSTSIERAHQESKRKARISKKSWNRRKEESLATGVALNNNTPDWLSLSQDKKTYEIDAQKVQTITSIFEWYRDGYGVTEIVNRLNSEGNRYNGRGWNTVTVYNKLRDRRLNGYLIGKYKTIPKKDSESTTDTEKRILENIKIKKEANDNAQRIYPVVIDDELFTKIQSMMDRNVSSKKQRSTTTKQRNIFNGLTKCHECGSPMIVQNMSNGGQYLRCYRQRTKDEKCNSKMLRYFESEKVLLGHIKNLNLDEIYSDRKHAQSLDVLKRQLSDVNEKIVLLNDKVKSASDENELFAIMEFKRKRKLEKDELNQKISALENESEIVRLNYNYDIDKLTDQDNTALRRKANEHIAKVISAIKCRRIDSSYIGAYYLYDITYHRDILKHILITDY

SEQ ID NO: 5160 - protein, 629 aa, synthetic construct
MPQLYSYIRWSTDRQDKGTTRTRQVAAAKAYAEKAGLEMVEIIEPGVSAFRGKNRAGKLGDFIDAVKNAAIPSDSWLYCENLDRLSRDQVDEALRLFLELIGLGLTIVTGMDRKVYNRDTIRQNPTDLMISILMFIRGNEESETKSNRTVGNVVALVERHKEGLPVNIKSVGRHPFWIDDTGSQYEAVKKHPFYWNIAREIIDMFLSGNGVYSVKKYLDEKYPNGLKGREWDYQVLKKMRDNRALIGERTINLRGVPYKLENYYPWLCKDEAEFFLLEKRKQQNNYKSKKDGADTIKLLSGLSILRCSKCGGTMHSFMNHGKARYICTNGVHLQKNCSGWSITAQLVEHCTMIALLIGYMDKSRKNGSDTTLIEEELNEKEKLIKSLDSKISNLVTAIAIAPDVNSLAHSLNEINSKRKELVLSVEKLKERLVSLQGKGSFEVDIMEFLILIQWAVFTNMEDNDRDKIRKVIDAIIEYIVVDKTNDCITIKIKYYGNDEVLVFGGVDRKPHWRFSIDFDTGKEGALTVLENDLINMPEIQKAVGYLHKLKESYVAMYDAAVTMLSEVGYPEIKGSQFWPNTGKHEKVTVAFEGVVYTISFNGRLPKAITSALETTGLTRQQFIENFKVQ

SEQ ID NO: 5161 - protein, 573 aa, synthetic construct
MKVAAYLRVSSYNQKQTGDSISGQKEYIKNWANLTGNEIIKWYVDESASAFKGSRRYNFHLMLNDIKNPDSEIEAVVVYSLSRFSRNLENQLTAQNLLEEYNVRLISASEGISDDHNTARLHTSFLGILNEHYSRQNSAVVTDRLQDTARKGYFCGGPIPLGYISVEIEGDTSKKRKILAVNDDEAPIVKEIFSLAEKGIDGKPMGVKAISIYMNNKGVLNRGKRWNRNSVDRVLTRRDYFGEHIHGKNRDPRKGLEPIIVNVPSIISKDQFFNVQDGLKNRGLKNNENKCYRSDSLLVGMLKCSICNSNMVVVSGKGGKYKYYECSKKIRQDVKSCSSKMLPKPIIDNAVRRLLSERVITEENINYIYKDLKYRIRNLVEKSARNVASINRRINDNNSKVNTIIEKVASRELEPNDQINKYITDKRKELESLNRELVTALKGTKLPIKQFGKTQVAQLVKNLKEIVLTGDEARVKQILLILLKEVEITPQKKISILGFNMALVFLASHAKTGTDFSVPVIDTIWRRDRDLNPRYAINVCRFSRPVLSTTQPSLRCGTYNREWSSRCKALNYN

SEQ ID NO: 5162 - protein, 537 aa, synthetic construct
MKQQIYNTALYLRLSRDDELQGESSSITTQRSMLRLYAKEHHLNVIDEYIDDGWSGTNFDRPSFQRMIEDIEVGKINCVVTKDLSRLGRNYIMTGQYTELYFPSHNVRYIAIDDGVDSEKGESEIAPFKNIINEWVARDTSRKVKSAFKTKFAEGAYYGAYAPLGYKKHPDIKGKLLVDEETKWIVEKIFSLAYQGYGSAKITKILREEKVPTASWLNFTRYGTFAHIFEGEPESKRYEWTIAHVKAILKSEVYIGNSVHNRQSTVSFKSKKKVRKPESEWFRVENTHEPIIDKEVFYRVQEQIKSRRRQTKEKATPIFAGLVKCADCGWSMRFATNKANKTPYSYYSCSFYGQFGKGYCSMHYIRYDVLYQAVLERLQYWAKAVQQDEEKVLNKIQKVGNAERIREKKKKANALRKAENRQNEIDRLFAKMYEDRACEKITERNFIMLSGKYQKEQIELEQQITNLREELSKMEQDMIGAEKWIELIKEYSVPKELTAPLLNAMIEKILIHEATTNEENERIQEIEIYYRFIGKVD

SEQ ID NO: 5163 - protein, 626 aa, synthetic construct
MRNEKITPLYERLSRDDELQGESNSISNQKQMLEDFARRNGLPNPTHFTDDGISGTRFDRPGFLAMMEEVEAGRVEAIVIKDMSRLGRDYLKVGQVMEVLRQRGVRLIAINDGVDSLKGDDDFTPFRNIMNEFYARDTSRKIRSVFKSKGMSGKHLTGTVIYGYLWDEKREHWLVDEEAAEVVRRIFSLTLEGYGPYQIAYKLSTDRIEIPVVHLARFNEGVNRSKPVKDPYGWGSSTIVNILKKREYLGHTINFKTRKHFKDKKSHYVSEDEWTIFENTHEAIIDQQTFDLAQKIRSNVRRYPNGWGEAAPLTGLLYCADCGGKMYVHRTNNGKRVSQYTCSNYTKVPCGTLCPTQHRINESAVLTLVSDTLRAIAEYSRNDRTEFIHTVQETQVAQQSADISKKRRRLAAAQKRAGELEKLICKIYEDNALGKLPDARYKALDAQYAKEQDALEIEIAELEKAVTGYEQSQKSAEKFIALIDKYENFDTLTNTMLNEFVEKILVHERARKGSQDTTQEIEIYFNFLGRYIPPSLQPVPLTPEEQEELRKKEERKDRLHQNYLKRKASGAQKQYEDKIKAKKKAEMDAKKALIRAEDMKKGVFSTIGQLPKEEPRKGSIAASAAV

SEQ ID NO: 5164 - protein, 1198 aa, synthetic construct
MSKEKIKVYLYTRVSTSIQIDGYSLEAQKSRMKAFALYNDYEIVGEYEDAGKSGKSIEGRVQFTRMMEDIKSGKDGVSFVLVFKLSRFARNAADVLSTLQIMQDFGVNLICVEDGIDSSKDAGKLMISVLSAVAEIERENIRVQTMEGRIQKAKEGKWNGGFAPYGYQLIDGKLIINEEEAIAIRTIFDQYVNTSIGANGLSKYLENHGIRKIPRQNGKNPLFDAGLIRKILKNPVYNGKIAFGRRTLEKVHGTRNEYRQVEQDDYLVAEGIHEAIIPDELWQAAQVKLKAQAKKYEHVNKGKNMRTHLLSGIVKCPICGAGMFGNKSIKYKKDGTKYKDFYYYGCKHRLMNRGHKCTYNKQIREELLDDAVAEVIIKLVSNPKFASMIQEKINMKVDTSAIENEIDNYQNELRKSHSTKYKLIEEIDNLDVEDKHYKRRKNDLDDRLYRMYDKIEELESQLIEAKAKKETIEVEKLTGDNIYKVLIYFDKLYKVMNDVERRQLIEALISEIQIYEEKQPNGQWLKSITFKLPIIDEDLNISLENDEQVDGVSVPGVDPNTGFPLPDIGGGIGVEVTFDVVVESIPNPNPTNNIATIDYSYTPVEGGIPNDFSVDSNPVPVEVISADVEVTKLSEPTIVNPGEELIYTIKVVNNGPFPSENVVLTDDVPASIINPEYSLDGGVTFQPWTGSLNIGTLEVGETRVIIIRGIVNPSTVGIITNTAVVSSTTADPNLNNNTSTIETEVNLLADILVMKTAEPNSAVPGTLLRYTIQVENLGPANAENVILNDDIPASIINPEYSLDGGASFQPWNGSLNIGTLNSGISLTVLIQGTVSLNSSEYIVNTATVSSTTPDPDLSNNISTIITPVNPQAGISIIKVADEDVAVPGEEFVYTIEIFNEGPSNATNVVLTDDIPDVILNPEYSLDGGATFQPWNGSLNIGTVAPGQLIRIIIKGLVSSTATGDITNTAEVSADVPEPVTDSSTVTTPIVPSADIEVIKTSNMDTAVPGETFSYTITVINLGPSAAQSIVLTDDIPDVILNPEYSLDGGVTFQPWNGNLSIGTLDAGEIRSIIIRGTVSQTAVGTIINTATISSPTPDPNPDNNTSTDETDISPLADISVIKGNEPVAIPGGRFIYGIEIANAGPSFAENVTLTDNIPASILNPEYSIDNGVTFQPWNGSLNIGTLDAGEIRNIIIRG

SEQ ID NO: 5165 - protein, 403 aa, synthetic construct
MNRSGKKCVLYPRVSTEMQVDGFSLDGQKNSLKRFADREEMEIVNIYEDAGKSGKSIEGRTAFMQMLSDIENGLGIDYVLVYKFSRFGRNAADILNSLEHIQSFGVNLICIEEGIDSSQTSGKLLISVLSAVAEIERENIIEQTMNGRKEKARQGGWNGGFAPYGYFLKDKQLFIQEDEAEAVRIIFDKYVNGNMGFYKIANYLNLQGIQKVKRDNGTLTQWSTHFVRMIIDNPVYMGKIAFGRRTREKVKDTKNEYRQVHQDDYILADCQHDGIISEELWTQAHEKREITGVKAPSKIGRDRAHLLSGILKCPKCGGPMYTNKHAWTNKDGTYKEIYYYVCSKARTTRGKSCDYKAMLKKTDIEPLVVEAIRDLIKNEDFSAEIKSKIGKQIDTSTLNRERT

SEQ ID NO: 5166 - protein, 560 aa, synthetic construct
MSKEKIKVYLYTRVSTSIQIDGYSLEAQKSRMKAFALYNDYEIVGEYEDAGKSGKSIEGRVQFTRMMEDIKSGKDGVSFVLVFKLSRFARNAADVLSTLQIMQDFGVNLICVEDGIDSSKDAGKLMISVLSAVAEIERENIRVQTMEGRIQKAKEGKWNGGFAPYGYQLIDGKLIINEEEAIAIRTIFDQYVNTSIGANGLSKYLENHGIRKIPRQNGKNPLFDAGLIRKILKNPVYNGKIAFGRRTLEKVHGTRNEYRQVEQDDYLVAEGIHEAIIPDELWQAAQVKLKAQAKKYEHVNKGKNMRTHLLSGIVKCPICGAGMFGNKSIKYKKDGTKYKDFYYYGCKHRLMNRGHKCTYNKQIREELLDDAVAEVIIKLVSNPKFASMIQEKINMKVDTSAIENEIDNYQNELRKSHSTKYKLIEEIDNLDVEDKHYKRRKNDLDDRLYRMYDKIEELESQLIEAKAKKETIEVEKLTGDNIYKVLIYFDKLYKVMNDVERRQLIEALISEIQIYEEKQPNGQWLKSITFKLPIIDEDLNISLENDEQVETCVLLSHKNS

SEQ ID NO: 5167 - protein, 495 aa, synthetic construct
MAIAYSYIRFSSKAQAEGDSLRRQLQRTKEWCRKNNVELSDKNFQDLGISAFKEVTRPSLDDLLEAIKRQSIVEGDYIILENLDRLSRRGIRHTQKKLDEILLAGVNVVDLTNSLVLDKASGDDLVSVIRVAIAADLAYQESKKKSERVLAAKATQRKLVREGKVINKRLPFWITNSDGYQLNDKAQIVRDIIKQRTSGVGFHRIAMNLNGVYEAPKAKHWSDTTIRDIVKSRALYGSMVDKDGEVESVFPSLISFTEWQAIQAEHVSSAGGYTQHNHLARLVKCECGSAMSKKIQKSKTKTKTHEYNTWKCVAAASGGCKHKGVIRDLDVDIFKSLNHLKINKTKSDTQLNKISKQIEKKSVRQQELEQALLEDDAPIAVLTKAIKKTTEELKQLRSERDLLSVRTDSKLLIELQDNAVEFNIELRKLVEKIVVIPVNGNIWRITIHQHNGHIVKCLKSRKSQRNEWTRFFGKTEEIEKLLDDEMPTIDSDDLK

SEQ ID NO: 5168 - protein, 548 aa, synthetic construct
MDKIIYPYIRFSTKKQEHGHSLTRQITRIKEYALENGYKINDSLELRDLGKSGFKGLNAKEGALSVFLKLLEDEKIPKDGSAYLCIEQFDRLSRMPTDDAYQVFRKILKQNVNIITLMDEKVYRKEDLNNMVSILNSLILMEQAHLESQRKSDLISQIFKGKVKTLKSGGKVQFTYILPGWIDNNGTKEDPDFVLNEKVEVVKMIVDMYLGGETMGHIARILNENQIPQIARKRTKNQTNSWNSAKISHLLTNQTLLGKLHIRTTGDIIEDYYPAVISKDQWDLIQAKKRTQSVTKVAGRRSINIFQGRMFCADCGNKYYFETDDKKGKNGKRYVYHMLKCSGRRFHSCDSESLKYDTMANPDLFFFRNIKEENSEDISLIKEEIKNYNKDILLLNQEKDEIEDLLDNNEINFKAYTLAITKITDKVETLEKKIALNKQHLSFSSNDYRMDHFDKNDSESVANAKKFISSNYAAIIISSKHHAMVILLHSGEMMVKPLPNKKANILPVHRVINEIKNNIQDQDKKGLLDGKFKEILDAFNFQDKFVGL

SEQ ID NO: 5169 - protein, 489 aa, synthetic construct
MNPLPVSRTLKAVIYCRISSDKTGAGLGVERQEKDCRELARRLKMQVVEVLSENDTSAYSGAPRPKYERLLEMMRSGSIDAVLALHTDRLHRSLVELEEYVNASEQGSVTTHTVMAGPIDLSTPSGRLVARQLGAVARYEVEHAIERVKAAKLQMAQSGKYLGGQRPFGFEPGRTAIREEEAAVIREIVQRVIDGDSFRAIAMDFNRRGITTTHQREWNALKVRNVALRPINTGIVRHNGIDYEANSPAIIPRDQWEDFLIAVQLNRTRSNHPGTFRKHVLNGFVFCGECGKKMVHKTKVSRGKKSTIVSCESGNRQTGGNGGCGRVARSVDPIIELVRQSIIYRLNSPELVSALHAQKTSAETLKELHAKQRAAEGRAQEVLDDYYVHNLLTREQFERAKVQADAALKAINERIESEYSHAVTSAIDLNGNLEEAWENGTLEWRRDIIALLIDKIIVHRVPRETGYKRPMFCGKWRFDPDLIKIIWRA

SEQ ID NO: 5170 - protein, 528 aa, synthetic construct
MAKKVTVIPATINRFDFQPITSIRRRRVAGYARVSTDTEEQATSYEAQVDYYTTYIKSREDWEFVKVYTDEGISATNTNRRDGFNEMVQDALDGKIDLIITKSVSRFARNTVDSLVTVRKLKEKGVEIFFEKENIWTLDAKGELLITIMSSLAQEESRSISENTTWGKRKAFADGKVSLAYSNFLGYDKGPNGEFVINEEQAKIVRLIYKLYLEGFSHYKIAEKLTEMGIPTPMGKDKWWCSTVIQILTNEKYKGDALLQKEYTVDFLTKKKKKNEGEIPQYYVEGHHEPIIPPETFDLVRAEILRRQKIGTKYMGNSIYYAKIRCGNCGGIYGAKVWHSNDKYRRVVYQCNNKYQKKKKGCNCKTPHLYEHQIQEAFVSAFNQVMKDKDELVENMDVIIRVACDTSEVEQKLDDVRDEIKVLIQRTQEFVSQNARKEQDQIEYLRRYDEMVERYEALREEEGQLKAEIEERKLKSGVIKEYINRLSEQDEVLTEFDSDLWCGLVDFITVYAKGDVRVTFKDGTEIKA

SEQ ID NO: 5171 - protein, 501 aa, synthetic construct
MPVITTIHATLPSVKRRIRVAAYARVSDDELLHSLSAQVSYFSSYIQSNPEWKYVGVYADEAITGTSRKKRDDFNRLVEDCEAGLIDLVLVKSISRFARDTVDTLQVTRHLKELGIDVYFERERIHSMSDDGELLLTLLASFAQEESRSISENIKWAIRKRFQQGIPNGHKAPYGYRWDGEMFRIISEQGKVVKDIYRRYLAGEPAYSIAKGLEADGVVGQSGVPMDDSTIKNILSSISYTGTMVLQKNYINENHVRKYNKGELPQYAVEEMFEPLVSVEDFAKVQQIKQERAKAMPNKDFIKTAFSGMVKCGCCGCSVSRRTTKYGKKWNCNTRERKGKGECELRPIYETELMDAAMTALGAENFDEDEVRRRVEQITIHLDRVEFLLNNGSVKKVMRAYKKGYSGFSGKLTCGCCGGKLESDTWKMGPAGQKQKVKVWNCKNCSAKRVLDEEVRQAVQEILQSKDYEPLFASTFEDMVVFDERFELNDKERKKSVWQRK

SEQ ID NO: 5172 - protein, 446 aa, synthetic construct
MKRAALYTRVSTEEQARHGLSLADQLESLKQYAKDHDILVSGIYTDEGISARKRYVKRPALLRLLEDVKSDKIDIILFIKLDRWFRNVSDYYEVQRVLDSHGVSWQATEEDYETVTASGRFKVNIMLSVAQDEADRTSERIKFVFDGKRERREPLTGNCPTGYKIDEKKLIKDPAKESAVSAFFQKFMRCGSISETQSFILEEYGVRIEYQLASKMLDSPVYYGFYYGVDDMAPPYITREEYGRIQSMRNRVQRKTRENRVYLFSGLILCGECRTRMGGRKNTRGLSSFYNCPGHYIKRAGCENKTNLSERIIEQYILDSLECKVQEVKAEIEEISKAEKEKDYTPVIASAKTKLSRLKDLYVNNFIDMDEYRKDRQSLLEKIEELECKQSKCVAPDLTRIERILSEGWRADYESVDRKSKRDFWRLILKEIRIFPDRHIEYDLDI

SEQ ID NO: 5173 - protein, 538 aa, synthetic construct
MCLVENGGKEAQQVAEVICIPKTKPERTGYQIRSIRVCAYCRVSTDADGQYHSYDAQMEYYRGLIQKNPAWEFCGIYADEGISGTRRWGREDFQRMLEECEKGRIDLILTKSITRFARNTVDTLSTVRHLKEIGVSVYFEKERLNTMTEESEGILTVYGAVAQQESENISQNVHWSAVNRFKHGTFVISRRPYGYDKDEAKELAVKKDEAAWVRRMASMYMNGMSGVRIAEYLNQNQVAAPYGGLWSSEAVLRILFNEKTVGDCLHQKTYSTGTVPFRTERNHGKKPQYFIRDDHEGILCRDEQMRLQQIKRHRLGHRARMKSCGNEGAYILSGKVVCGECGRVFIRKKEQRQKGVSIKWRCPGHRSEACQCYTNEIWEADIERMFVNTFNTLKEHADEIVDPVIRGMKKMQETNGLHEALDTLNQKKLELKEQRHILRQLKANECIDSALYFEESRKIEQELSRCRSEEKQLHSRGIHQDTITGLQAALHQLQGYDGKMQEFDGDQFILLVREVSVGKERELGFHLRCGLKLYEPVI

SEQ ID NO: 5174 - protein, 542 aa, synthetic construct
MPRAERIVEVIPATWNPTDESSREIRKLRVAAYCRVSTELEQQQSSYDIQIEYYTRHIMQNPNWIFAGVFADDGRSATNTFRRDDFNQLMDQCLKGKVDMVITKSISRFARNTVDCISWVRKLKEKNVAVYFEKENLNTLDDSTEMILTILSSQAQEESRAISTNVKWGYARKFEKGESTRQRSYGFRKAPTGEMCIVEEEAAVIRNMARWFLDGDSLERIKHRLEDAGIETTTGKKIWSTGTIYNILINEKIMGDVLLQKTFTSDYLTKRRVKNSGQQKQYYVKNHHEAIIPKTVYYKIQEEIARRSSLKKAGTRKGKTAQGVYSSKYALTGIMVCNECGAHYRRTTWAKSGKKVIVWRCINRLEHGTKRCHESPTLKEEVIQEAIMGKLHSLSIDQEEENFLNGVKEDILRAARVVGGACTEEEIDKTIEELRDQLMDYVGMAAREHGGENWYSDRMRKLGLQISELKKRRESIREQEKIRDEYEHLDQEISRIIGETGGTLGAEFDNIFIRQIVREIRVISKNKLQIQLRTGMMLDVNL

SEQ ID NO: 5175 - protein, 537 aa, synthetic construct
MKQQIYNTALYLRLSRDDELQGESSSITTQRSMLRLYAKEHHLNVIDEYIDDGWSGTNFDRPSFQRMIEDIEAGKINCVVTKDLSRLGRNYIMTGQYTELYFPSHNVRYIAIDDGVDSEKGESEIAPFKNIINEWVARDTSRKVKSAFKTKFAEGAHYGAYAPLGYKKHPDIKGKLLVDDETKWIIEKIFSLAYQGYGSAKITKQLRAEKVPTASWLNFTRYGTFAHIFEGKPESKRYEWTIAHVKAILKSEVYIGNSVHNMQSTVSFKSKKKVRKPESEWFRVENTHEPIIDKEVFYRVQEQIKSRRRQTKEKATPIFAGLVKCADCGWSMRFGTNKTNKTPYSYYACSYYGQFGKGNCSMHYIRYDVLYQAVLERLQYWAKAVQQDEEKVLNKIQKAGNAERIREKKKKASTLKKAENRQNEIDRLFAKMYEDRACEKITERNFVMLSNKYQKEQIELEQQITSLREELSKMEQDMIGAEKWIELIKEYSVPKELTAPLLNAMIEKILIHEATTNEDNERIQEIEIYYRFIGRVE

SEQ ID NO: 5176 - protein, 612 aa, synthetic construct
MEVEIIKAKGAGEDTSTGRKIDRLRVAAYCRVSTDDEDQIKSYNSMVRYYTDLIKSNKQWVFAGVFADKAITGTKTDKREEFQLLIQECLSGNIDLVIAKSIPRFARNTLDTLKYVRMLRERNIAVYFEVEKINTLKDGEFLLTILSSVAQQEVENTSAYVKKGLKMKMKRGELVGFQGCLGYDYDVVTKSLSINEEGAETVRYIFDRYVAGAGSTMIARELNEQGIPTIKGNPWTSSSVMGIINNEKYKGDILLGKTFTVDPISKRRLENLGEEDRFYIKNHHEPIISEEKFARAQEIRERRNGGRKKGVAPGKREKFSRQYAFSCMLECGFCGANLSRRRWHSSSKYTKTIWQCVESTKHGKRFCPDSKGIPEQVIEDAFIESYRMLCTDHKDVLEEFIKRVEKTLSEDSIEDKIEKLNRSVYNIQYKRKKLLENYLEGVVAKDIYEETDVGYEKKLSEAKTQLSMLEQQYDNEGSLQRRLADFRKALSKNQILEEFDRGIFESIIEKVIVGGYDENGEKDPYKIIFVYKTGFKNEIGNAKERFGKKSKAVEKAKEMCSHIVDEVKDVCSYVSDNTRWRMKHRSKFDNRDWRSESLIMSADLIPLERQRN

SEQ ID NO: 5177 - protein, 551 aa, synthetic construct
MTRAYTYIRFSTPEQSEGNSLERQQAAIDAFVREKNLTLTESSAFQDLGVSSYRGANLRNGLGKFIAEVDAGRVPKGSYLLVESLDRLSRQKVMDALSLLVSLIDKGIKIVPLNDDGAQVLDKASGLGPLVIALSVMHRANEESETKSRRVKAAWQAKRRNAANKPVSRRAPEWLEFDEATGSFKPIPERVDAVRKIYELADAGLGRGRIVKYLNSNGFASFRNPNEGWQTSSVSKILRNRSLIGFYQPHRMYYDSATGVKKRVPDGDEVPGYYPKVLEEDLFLRVNARQYAPIASLVGRQGETLTNLFTGFVYCHWCGAPMSMANKGPGRKGGRYLVCSKGRRGKDCKYRSWNYDDVEMYVLYALRQLDLAAVLAGVDTNQRRQDIRTELARVSLELADSERRLASLSAELVSQAPANVRTLVSVVATLEGVADEQRRRCDELQAEDAALGMAVDDPGTFAQNLLRLYDQMASVEKQQLYLLRVRLRQNISRLLSRIDVMAVGRGEPHVTKNGNNSPKLFLTFKDGRRRMVLPIGKNSVHLSDLPPIGKG

SEQ ID NO: 5178 - protein, 551 aa, synthetic construct
MATKARVYSYLRFSDPKQAAGSSADRQLEYAKRWAAAHGMALDAALSMQDEGLSAYHQRHVTKGALGVFLAAIDKGRIPAGSVLIVEGLDRLSRAEPIQAQAQLAQIINAGITVVTASDGREYNRAGLKAQPMDLVYSLLVMIRAHEESDTKSKRVRAAIHRQCKGWQDGTWRGVIRNGKDPSWTRLDPETKAFQLVPERAEAVKLAIRMFRDGHGAVRIMRTLAEEGLQLTNGGNPAGQLYRILRNRALIGEKVLEIDGEEYRLAGYYPALLSAEQFADLQQATEQRAKQKGTGEIPGLITGLRISYCGYCGSAMVAQNLMNRGRREDGGPQHGHRRLICVGNSQGMGCAVAGSCSVVPIEHAIMSYCADQMNLARLFEGGDRSGALAGKLAIARARVADTTAKVERITDAMLADDAGDAPAAFMRRARELEAALVEQQAEVDALEHELAAVASSPTPAVAKAWADLQEGVKALDYDARTKARQLVADTFERISIYHRGTEPEQTRSWKGTIDLVLVAKRGSARILHVDRQTGEWRGGEEVRDLPDDAIQ

SEQ ID NO: 5179 - protein, 551 aa, synthetic construct
MATKARVYSYLRFSDPKQAAGSSADRQLEYAKRWAAEHGMALDAALSMQDEGLSAYHQRHVTKGALGVFLAAIDEGRIPAGSVLIVEGLDRLSRAEPIQAQAQLAQIINAGITVVTASDGREYNRAGLKAQPMDLVYSLLVMIRAHEESDTKSKRVRAAIHRQCRGWQDGTWRGVIRNGKDPSWTRMETQTKTFQLVPERAEAVKLAIRMFRDGHGAVRIMRTLAEEGLQLTNGGNPAGQLYRILRNRALIGEKVLEIDGEEYRLAGYYPSLLSAEQFADLQQATEQRAKQKGTGEIPGLITGLRISYCGYCGSAMVAQNLMNRGRREDGGPQHGHRRLICVGNSQGMGCAVAGSCSVVPIEHAIMSYCADQMNLARLFEGEDRSEALGGRLAIARARVADTTAKIERITDAMLADDAGDAPAAFVRRAREMEAALAAQQAEVEALEHEIAAVGSSPTPAVAKAWADLQEGVKALDYDARTKARQLVADTFERISIYHRGTEPEQTRSWKGTIDLVLVAKRGSARILHVDRQTGEWRGGEEVRDLPDDPIQ

SEQ ID NO: 5180 - protein, 531 aa, synthetic construct
MKQAISYVRFSSDRQKHGSSVERQEGMIAEWIKAHPDYGTSELKFSDLGKSGFHGEHIKEAGGFGKLLVAVEEGLIKQGDVVLVEAIDRTGRLEPMDMLTLVINPILKAGVSIITLDDNTTYSKESVNTAQIFLLVAKIQAAHGYSAALSTRVADSYKKRRKDAAKHGIVPRRITPVWLNPDGTPRDEVVPWIKTAFELYVSGVGKSTIAKRMRESGVERLAKASGPGVEGWLRNKAVIGKWETLVGTPDHQVIDDIYPAIIEASLFYKAQVHAEKMKTQRPIKTANHFLVGLVRCGECEKNYIVQNLHGKPHSMRCRTRQSQNDCTNSHCVPKPVLDAIYRYTSVTAAVEAVQQQRMGVNEKEIVTREAELLTLAKRVEGLAEAVKQAGPMPELIEALKQSRIEREAAETALVILRSTVVPPAGEYWTNIGKVWDLTTDDAQRLSAMLRNIGYYLTVNSTGEITSSHSDVSYRYIGVDRALDKYKLLVNGKLTLIPKGYVDDYPYHEPFQGGEETTWDDADYENLRLQYE

SEQ ID NO: 5181 - protein, 547 aa, synthetic construct
MPRLISYVRMSTSEQLKGFSLERQRNLIADFARKNGLSLEDSHILEDIGRSSFSDDTEQKELTKFFEDLEKDKFQPGDVFALENIDRLTRRGPIDALMKVNQIISKGLKLAIISDKEQRILEEIDVFSIITLSIDASRANKESQVKSDKGLQNWAFKRELAATHKIAMTAQAPAWIDTETYYIMDETKNKQVKRRRYVLNEDKAKTVRLIFELFQNGNGSLKIKNILNEQNIPTFKGIEYWEPSTISKIIRNPATYGMYQPKKQNTGKRDLVAIGEPIENYFPAVISKEIFDQCQQITATNTTRKGRRGKLFTNLFTGLLKCADCDGPIHLLNPGIDKRAKNPKPVNYLICKKGKFTKECITKRLRYEDFENVMLKAIQEINLADVLHENNPLENLIKQQRNLQADIEKKKKLLENFERNFIENDGDLPSFMIAQAKQAEIDIKSLDSEIKSIRLEISQLNVYNSNIDNAIDELKVNSTYEARSKINLILHEIIKHIVIDFELDDYGVMFKNGAKRFINNGIIQNVFRTENTKQRDDEINEILNHKN

SEQ ID NO: 5182 - protein, 613 aa, synthetic construct
MTSKPKAYSYIRFSSPEQARGDSRRRQSAAAIEYAKEHGLELVKDAEYAFADLGVSAYRGDQVNRLSSNLGRFYEYVKAGKIEPGSYLLVESLDRLSREQVPEALSRFLLLLNADIIVVTFGDGTVYKKSSDSIQLIMSIIHMGRAHQESHWKGSRVSDAWQEKQALARSEGKPLGAACPQWLKYDGEKYQVIPERVEVVERVFNLTIQGYGQRAIVKLFNNEGVPVFGTKNRNKSGLWGNSSIAKILGNRSVLGEYQPNIWKDNKRAPSGNVIEGYYPAVIDQDIFYAAWNERKVRDVSKVTNQSANFNVWSKIAICSYCGSAMHLVNKGKPPKGQKYLRCSKSSKGACDNKSIRLDRSELIFKEMLAKINLIGVVKNDVVALRNNIAGLSGRISATSSKLQDLNDLIKEYPSASLAQSIKEVDSQIQTFIAERDRLTGLVAAQHVIDKAQFMADLDLKTYEGRYLANQQVRRQQIKVRMKRDEVRIQFNVQSNSIPKLTFVWDHGKDWIVVPLSGESLRASIRQNDMAKTALIERLPKLMESVRLDESMQPYLENLPFEEKRYKTDYKLSERDAQRVQAATDRWLATLNQNSPTSDIDETLLLGGEDPKLA

SEQ ID NO: 5183 - protein, 589 aa, synthetic construct
MTKKNGEVGDSVRRQMENQRKAVETYNLHVVDVFEDLGKSAFRGKHRLKGALSLFLASLDEGKIPTGAYLLIESFDRLSRERMTDGLTVVLTILRKGIKIITTDDLKLYDLSIKGKDLEQTIMITVLLERANNESTTKSDRQKAKWDGRRERIIKGEKKFLNKNVPWWISLNESTGEYSLIPDRVAELKTIYELLMVKNLGLRAAAAHINENNPIKVVFGKNPKSSGWTARGIKRMIDTPSLYGSLELCEYIYDNGKSVPDRKTVQVMDNFYPAAFSKHEVDVLKAKISSRMTSKERPTKRDLQYYNIYHGLIKCAFCGGNVRFSQKQKYSYLVCRNSEIKLCKYPKTLSMQYERFHEVFFKYAEHYNFDLLIKSGGNDNDVVVKEITELEETIASEKYKAQKFTEKLLDMFDGDIPSEQEAALITRNKKIKLMEAKAKALRAKIVYVDTDAETISDAIQLASKLVETKDGRLELSNYLTKVIDKMVVDFGKAHNRDGDYVKVLFKNKDFSHHMLIGKTTAYSYDSDGELFLDTLQGITREDGYYLEAQKAQDEWFDVPDFTDAEIAADELAKTTNPSYVNEEFIIDAE

SEQ ID NO: 5184 - protein, 547 aa, synthetic construct
MPRLISYVRMSTSEQLKGFSLERQRNLIADFARKNGLSLEDSHILEDIGRSSFSDDTEQKELTKFFEDLGNDKFQKGDVFALENIDRLTRRGPIDALMKVNQIISKGLKLAIISDKEQRILEEIDVFSIITLSIDASRANKESQVKSDKGLQNWAFKRELAATHKIAMTAQAPAWIDTETYYIMDETKNKQVKRRRYVLNEDRAKTVKLIFELFQNGNGSLKIKNILNEQNIPTFKGIEYWEPSTISKIIRNPATYGMYQPKKQNTGKRDLVAIGEPIENYFPAVIGKEVFDQCQQITATNTTRKGRRGKLFTNLFTGLLKCADCDGPIHLLNPGIDKRAKNPKPVNYLICKKGKFTKECITKRLRYEDFENVMLKAIQEINLADVLHENNPLENLIKQQRNLQADIEKKKKLLENFERNFVENDGDLPSFMIAQAKQAEIDIKSLDSEIKSIRLEISQLNVYNSNIDNAIDELKVNGTYEARSKINLILHEIIKHIVIDFELDDYGVMFKNGAKRFINNGIIQNVFRTENTKQRDDEINEILNHKN

SEQ ID NO: 5185 - protein, 539 aa, synthetic construct
MTRKTPAYAYVRMSTVEQARGDSERRQLAQIERFLTENNAELIEPVFLDRLSSFNGKNVKKGAIKDFLERVKRNEIEKGSILIIESFDRISRQGGYIAHSVILDIIKYGIDIATLSPVKKYSINSENQFIEGIEIQTLLYRAYDESKTKSNRITEQHKQRRENAKKGKIAYGSLPFWIEKTDEGLKIKEEEANDVKLCLSLLKTYGMYAVTAKMNLLQTSSKKITKETVSHLLNRPAVCGDLQTNKIEYDESGNQKRVKHEIIHDYYPALISRSEFEELRTEIQSRKKSAVNKSAGRVSGFKNIFRNVMRCFACDAPMRLSHMKWIGGEKKYLVCTASESNQCRDAGRKWYNYNDVENAFFSNFNLNILKANLLKEKSSNSNLKALENAQSEYLKIEEQKENIIKAIELGTVNKALVNRLNELEQQTEKLNEKIDELKALLALDTAQKHLNDFNYSELDEALKDENKRAIINKILKSETVSISISDFNKSFDFTIHIVSSNELDLEISYNSKDEYIDVEFNKISKDKRARFFNHIRRSY

SEQ ID NO: 5186 - protein, 514 aa, synthetic construct
MAIITKIEENKAVIGKKKVAAYCRVSTDQDDQLLSLETQKAHYESWIQGHFDWEYAGLYYDEGLSGTKMDTRPSLLRMMEDCKHGLIDYVVTKSVSRLARNTADFLTIVRTLLDLGIPIYFEKENIDTGSMENELMLSIMSSIAESESVSISENNKWSIQRKFKNGTYKCSYPPYGYDWDKKNGEMVVNPEQAEIVRYIFAQTLAGVGTHDIAKDLMAKGVPTKKGGKWTGHTVNGIIRNEKYTGDCLFQKTYTDSSFVRRRNLGELDQYYVEDHHEAIISREDYEAANDVIDRRRQEKGIELDNGKYQNRYPLSGKVICGECGGTFKRKTYTHKVVLACTQHIDDKEKCSMKYVDLEAVEVAFATMMNRLVYGRNKVLRPFYEALQQSNQTEALLKIHDIQEQLDALVEKKQTIKGLFAKGVIEPAVYTQSLNGVTAEVERLTTEKDALSYIASSEISHIEETRKLLSFADKGEFLDCFDGEIFETYVDRIVVKSQTELEFQMKCGLNLIERI

SEQ ID NO: 5187 - protein, 434 aa, synthetic construct
MIEDCMAGKIDFVISKSISRFARNTLDCLQYIRQLKDKGIAVFFEKENINTMDTKGELLLTIMASLAQQESESLSQNVKLGLQFRYQAGKVQVNHNRFLGYTKDDDGNLIIEPTEAAVIKRIYREYLEGASYRDICNGLMADGILTGAGKKKWIPSTIHKILSNEKYIGDALLQKTITTNLLEKKREINNGLAPQYYVEDSHEAIIPRDLFMRVQEEMVRRANLRSGEDGKKKRIYSSKYALSSLCTCEKCGDIYRRIAWNNRGKHSTVWRCCTRVEHGPGECDAPTIQETDLQAAVMKAINKVVGQKSTVIANLETILEQTVICADEELAELDEKIKAVQLELVDRATSSEGYEDLARESDRLNEEKQKILVTLAEDKGRQEKKAELIDFLHEQTNEFEEFDDGLVRRLIEQITVHESGTFTVEFKSGTMVEV

SEQ ID NO: 5188 - protein, 515 aa, synthetic construct
MKTAIYLRKSRADLEAEARGEGETLAKHRTTLLKIAKEMNLNVLSVREEIVSGESLVKRPEMLALLEEIEDNKYDVVLCMDMDRLGRGGMKEQGIILETFKRSNTKIMTPRKTYDLNDEWDEEYSEFEAFMARKELKIITRRMQRGRVASVEAGNYLGTHAPFGYDIHRLNKRERTLTINPEEASVVRMIFDWYANEDMGASAIRSKLNDLGYKSKLGNDWNPYSILDILKNNVYIGKVTWQKRKEVKRPDAVKRSCARQDKSDWIIADGKHEPIIPESLFEQVQEKLNSRYHVPYNTNGIKNPLAGIIKCSKCGYSMVQRYPKNRKETMDCKHRGCENKSSYTELIEKRLLEALKEWYINYKADFEKHKQGEKLKETQVIQMNEVALRKLEKELVDVQKQKNNLHDLLERGVYTVDIFLERSNVVSDRINEITSTMENLKKEIKTEIKKEKVKKDTIPQVEHVLDLYFKTDDPKKKNSLLKSVLEKAVYKKEKWQRLDDFELVLYPKLPQDGDI

SEQ ID NO: 5189 - protein, 515 aa, synthetic construct
MKTAIYLRKSRADLEAEARGEGETLAKHRTTLLKIAKEMNLNVLSVREEIVSGESLVKRPEMLALLEEIEDNEYDVVLCMDMDRLGRGGMKEQGIILETFKRSNTKIMTPRKTYDLNDEWDEEYSEFEAFMARKELKIITRRMQRGRVASVEAGNYLGTHAPFGYDIHRLNKRERTLTINPEEASVVRMIFDWYANEDMGASAIRSKLNDLGYKSKLGNDWNPYSILDILKNNVYIGKVTWQKRKEVKRPDAVKRSCARQDKSDWIIADGKHEPIIPESLFEQVQEKLNSRYHVPYNTNGIKNPLAGIIKCSKCGYSMVQRYPKNRKETMDCKHRGCENKSSYTELIEKRLLEALKEWYINYKADFEKHKQGEKLKETQVIQMNEVALRKLEKELVDVQKQKNNLHDLLERGVYTVDIFLERSNVVSDRINEITSTMENLKKEIKTEIKKEKVKKDTIPQVEHVLDLYFKTDDPKKKNSLLKSVLEKAVYKKEKWQRLDDFELVLYPKLPQDGDI

SEQ ID NO: 5190 - protein, 522 aa, synthetic construct
MTTRNVTVIPARKRIGNSAKAEELPKLRVAAYCRVSTDSEEQATSYEAQIEHYTNYIKSNPEWELAGIFADEGITGTNTKKREEFNRMIEECMQGKIDMIITKSISRFARNTLDCLKYIRQLKEKNIPVYFEKENINTLDSKGEILLTIMASLAQQESQSLSQNVKLGIQYRYQQGKIHINHNRFLGYTKDKDGNLVIVPEEAEIVKRIYREYLEGSSMLQIARGLEADGILTGAGNPRWHTSTINKILRNEKYIGDALLQKTYTVDFLSKKRVANNGIVPQYYVENSHEPIIPREIFMQVQEQLVRRRCVHISKNGKKRNYSNKHPLSQMVFCGNCHEIFRRVHWNNRGKKSIVWRCISRLENTGLFCTVSTILEDTLKEKIVEAINIAVSGKNSFLAILKKNIETVLSVDLDETTADIDKRLEELQTELIQKANLKEEYNNIVNEIYRLRDLRQETLSRNALRQDKRDRIAEMTDFLNMQTGGITEFDDKLVRKLVEKAIVYDDRLVVEFKSGLEIEVNL

SEQ ID NO: 5191 - protein, 522 aa, synthetic construct
MRKVTRIDGNNALQAFKPKVRVAAYCRVSTDSDEQMASLEAQKDHYESYIKANPDWEFAGIYYDEGISGTKKENRTELLRLLADCENKKIDFIITKSVSRFARNTTDCIEMVRKLTDLGVFIYFEKENINTQCMEGELVLTILSSLAENESLSIAENSKWSIRRRFQNGTYKISYPPYGYDYVDGKLLINKEQAEIIKRIFSEALDGKGTQIIADGLNSDKIPTKRGSHWTATTIRGILSNEKYTGDVLLQKTYTDENFKRHYNHGEKDQYMIKDHHEAIISHEEFEAAQEILKQRGKEKGVIKGSSKYQKRYPFSGKIKCAECGSNFKRRIHGSGDRKYIAWCCTKHIKDASSCSMKFVREDAIHQAFVVMINKLIFGHKFILRPLLQSLKKTNYSDNITKIQEMEAKIKENTERVQVIMGLMAKGYLEPALFNTQKNELLKEAAILKEQKEAIERAIDGSQTILVEVEKLLKFATKAEKQIDAFDSKIFEDFIEEIIVFSQEEIGFKMKCGLNLRERLVK

SEQ ID NO: 5192 - protein, 528 aa, synthetic construct
METTTRRRAVTYQRFSSVRQVGNSSLERQNEETKNWLLRNPDVEVIDSFVDQAMSGWSGKHLKDGSLGQLMKAVDDGIITSGTLILVEHFSRLSRQNITDAEKLMHRIWDAGITLVTVRDGTEYTPAAANDMVLRIRLLVEMEQAFKESEWRSAKVKASYTNRENKAKEGIVPKMRKPFWLNSDGTLNELHEAVKDMFSLYKDGNGQQRIVVALREKYSDTAIQKLNPSTVMRWIQADITRGYWRGNRIYEAAIDDETFFEVQTIHKNRLYENVKPDRNWPLSGLMKCGVCGRGMSIQKSGTSNPVVRCSSKQRDKSCNRKTTFPYFIVHQYMMSIVKKYALRKYTNVTSNKELRHELLVVERDLLKARQELSELKAFYKQQKAEGKKTFATLEILEEEYENVENLQNKEKELKSSLEAFANGGASIESRKLVLDGRNFNLEMHKLNFKIVVGEEEVSAEGFDEELPTLKYLGYSRKTRSYEWTQGSHRLIQRWPSSSITDEILMLDDYRQNLYAKNFIEKQLSRHES

SEQ ID NO: 5193 - protein, 550 aa, synthetic construct
MGDSAKNGLVYSYLRFSDPKQSAGGSTDRQLAYAAKWAAEHDLKLDTHLSLRDEGLSAYHQQHIKSGALGVFLRAVEEGRVPFGSVLIVEGLDRLSRAEPIQAQAQLAQIVNAGITVVTASDGKTYSRQRLKDNPMDLVYSLLVMIRAHEESDTKSKRVKASVRRLCEKWIDGSYRGRVEQGHDPAWLTRNDADGWDFKPETVKAILRTIEMYKQGLGGKRIIEKLNAEGLRIYPTSKENQTLQVYRVTKMPQLAGHKPISVDGDEYLLKGYYPPLLSELEWEDLQRVVKSSGRRRVKGDLPHVITGIGITFCGYCGHPMAGQHLASKKRLSDGRIRDGYRRLLCSAAATFSAVCPVRGSTSVAPIERAIMSYCSDMMNLQGLFEADTSSESRKELLKAQKNVEAIKAQLDKLTDAMLASADEGIPLTFARRARQLEEDLAVAEKSLTAQERDIAMLARRDISGADEKWRALAAGVEAQDIETRLQARQLVADTFSRISVYHHGLRPNHTPKSRDYYIDLMLVAKGGSSRWLRIDRDGNWVHGENYEAAD

SEQ ID NO: 5194 - protein, 558 aa, synthetic construct
MNREGKKCVLYPRVSTEMQVDGYSLEGQKNSLKRFADREEMEIVGIYEDAGKSGKSIEGRPAFKKMLSDIKNGLEIEYILVYKLSRFGRNAADILNSLEFVQSYGINLICIEEGIDSSQTSGKLLISVLSAVAEIERENIIEQTMNGRREKARQGGWNGGFAPYGYYLKDNQLLIEETEAEAIRIIFDKFGNSDIGLGGVAKYLNLQGIKKIPRQNGKLETWSSHLIRQILDNPVYCGKIAYGRRTREKVKGTKNEYKQVHTDDYILEDGQHEGIVSEELWQKVHAKRKATGIKQPSKVGKDRSHLLTGVLKCPICGSSMYTNKHAWTNKDGTYKEVYYYICGRNKQERGHHCDYKASLRKIDIEPLVVEAVKELVSDAYFAKEIEKRIGVQTDTSTVDKELANYENKLKEVDLNKARLENEIDNLPADARFRERKIHDMTLRLDALYDTMAELEERIEDAKLRKSSIEMEAITLDNVYKIMQNFGKLYAIMSDEEKKSLITYLIKEIQIYPNGESEMPLKSIEFNFPIYIDGRQVRKVLWERGNTVETCVLLQRRTM

SEQ ID NO: 5195 - protein, 532 aa, synthetic construct
MKAAIYSRKSRFTGKGDSIENQIQLCIDYAKSIGVKDFLIYEDEGFSGSNIDRPQFKKMMQDAKDKKFSYLVCYRLDRISRNVSDFSTLIEKLNELNISFISIKEQFDTSTPMGRAMMFISSVFAQLERETIAERIKDNMYELARSGRWLGGNTPHGFNSEKITFLDENLKERSMYKLQVNDEQMEIVKLIYNKYLELRSLSKLYKYVYNNGIRGPRGGKFDPSSLSRILRNPAYVKANDEILDYLKNSGMDVVGTPDRKCGILTYAKNTSNSIAAIAKHHGVIEPEIWLEVQNQLDKNRDKTPRISTGKTALLSGLIKCGKCGSNMRITYKGKKTDKDLKYYYICGTKKTLGSDSCNCKNLNGPLVESLVIDKIKNCKEESIISAFNSNNIKTDNVFNIFKSETNLLKNQILDKERLIKNLVIELAKNTGSTASDYIVFQIESLNNEISILKDKINTLESSNINISSDSINIDIIVSNLKRFNDEVDNASLDDKRLLLSTIINSIVWDSSLGNLNIVYMGAEVDNSVSLSN

SEQ ID NO: 5196 - protein, 537 aa, synthetic construct
MKQQIYNTALYLRLSRDDELQGESSSITTQRSMLCLYAKEHHLNVIDEYIDDGWSGTNFERPSFQRMIEDIEAGEINCVVTKDLSRLGRNYIMTGQYTELYFPSHNVRYIAIDDGVDSEKGESEIAPFKNIINEWVARDTSHKVKSAFKTKFAEGVHYGAYAPLGYKKHPDIKGKLLVDDETKWIVEKIFSLAYQGYGSAKITKVLREEKVPTASWLNFTRYGTFAHIFEGKPESKRYEWTIAHVKAILKSEVYIGNSVHNMQSTVSFKSKKKVRKPESEWFRVENTHEPIIDKEVFYRVQEQIKSRRRQTKEKATPIFAGLVKCADCGWSMRFATNTANKTPYSYYACSYYGQFGKGTCSMHYIRYDVLYQAVLKRLQYWAKAVQQDEEKVLNKIQKAGNAERIREKKKKASAFKKAENRQNEIDRLFAKMYEDRACEKITERNFVMLSSKYQKEQIELEQQITNLREELSKMEQDMIGAEKWIELIKEYSVPKELTAPLLNAMIEKILIHEAITNEDNERIQEIEIYYRFIGKVD

SEQ ID NO: 5197 - protein, 548 aa, synthetic construct
MSKKVAIYCRVSTVEQAEEGYSIDEQRRRNIEYCEKEGHEVFKVYEDRGISGKNISGRPGLKDLLQDANTGKFDLVIVWKLNRISRKLIDILNIVDTLDKNKIAFRSLTESFETETPAGKLQLNIMGAIGEFERGTIAENVKMGMIARAREGKWNGGKVLGYDIVEIPSEGKKRKDTKLVINEKEAMTVRRIFELYSEGHGYKATVNRVNQEGHRSKKGNAFATATIKEILKNPVYIGKIRYNLRQDWNEKRRKNINPDPILVDGEHEAIIDTETWERVQIILKDRSKTHNRVYDSELILSGLLKCPVCGASMTVSRSTRKRKDGTKAVNEYYSCGNWKNKGTAVCNSNSVKAEVADEVVINKLIETVNNELLLKKVINNINKNKSSKLKPKLDEMNLVNKEIDKLNSKKNSSIELFEDGILTKSELADRVKKLNEEIDTLKFRLDELKQDVMLAEGEPVPFELVSQVMKKFGQVFKESSTRQQRKQLLNLLVSKVTIDKSRAIDTIELQINEDVIKYLVKEGSSEEDEDPSFFDISMLNCACLKFVI

SEQ ID NO: 5198 - protein, 558 aa, synthetic construct
MLQADKITALYCRLSQEDMQAGESESIQNQKLILQKYADEHHFFNTRFFVDDGFSGVSFEREGLQAMLREVEAGNVATVITKDLSRLGRNYLKTGELIEIVFPEYEVRYIAINDGVDTAREDNEFTPLRNWFNEFYARDTSKKIRAVKQAKAQRGERVNGEAPYGYLIDPNNRNHLIPDPETAHVVKQIFAMYVRGDRMCEIQNWLRDNKILTVGELRYRRTGSKRHPRPQLNAWYNWPDKTLYDILTRKEYLGHTITGKTYKVSYKSKKTKKNPEEKRYFFPNTHEPLIDEETFELAQKRIATRHRPTKVDEIDLFSGLLFCADCGYKMYAVRGAGTPERKHAYTCGNYRNRARNDMLCTTHYIRKSVLKELVLADLQRVMSYVKEHEQEFVETANECSAKAIQKTLTQQRRELDKAQSRIDELNILFRKLYEDNALGKLSDEQFAFLTSGYDEEKKTLTRRIAELSQEIDTATERSADVKRFVVLVRKYTAIEELTYENVHEFIDRILIHELDKETNTRKIEIFYSFVGRVDTGDKPTESISYFRQIGADVKSYAI

SEQ ID NO: 5199 - protein, 521 aa, synthetic construct
MTGKKAVVYARFSSDNQRDESIDAQLRAINEYADKNNIKIVNQFIDRAKSATSDKRPEFQNMIKFCEADTTGISMVIVHKLDRFSRDKYDSAMYKQKLKVKGIRVVSVLENLDNSPESLILESVIEGMAQYYSANLAREVAKGQKENALKALHNGGDAPLGYDVAHDKTYTVNEEEAQALKIIFDRYIKGYSYSKIIDELNILGYKTKRGNKFGKNSLHGILNNEKYTGVYVFNKTQRKGVDGKRNGHKQKSEEEIIKIEGGMPQIIDKGVFKQAQDMIQKRKKTPGAHKATTTYLLTGLIKCGECGHAFQGNKRKDSYGNEYVSYRCGCRKQKRECNNREIKRDYLEEFILQELEKNILNDEAIPILSKALNEKLNDKNESNAELLKNLEQKLDKVNKEISNILNAIMNGIVNSMLKDKLDELEQVKFNLDLKMNELKIENKVVDGVGVTEDQIRGMFSRFKEFVLERNIPECKKFIGDYIKEVIVYKDHIEVIFNVVFCFVDNDITHDLHIITERGKIT

SEQ ID NO: 5200 - protein, 537 aa, synthetic construct
MKQQIYNTALYLRLSRDDELQGESSSITTQRSMLRLYAKEHHLNVIDEYIDDGWSGTNFDRPSFQRMIEDIEAGKINCVVTKDLSRLGRNYIMTGQYTELYFPSHNVRYIAIDDGVDSEKGESEIAPFKNIINEWVARDTSRKVKSAFKTKFAEGAYYGAYAPLGYKKHPDIKGKLLVDEETKWIVEKIFSLAYQGYGSAKITKILREEKVPTASWLNFTRYGTFAHIFEGKPESKRYEWTIAHVKAILKSEVYIGNSVHNRQSTVSFKSKKKVRKPESEWFRVENTHEPIIDKEVFYRVQEQIKSRRRQTKEKATPIFAGLVKCADCGWSMRFATNKANKTPYSYYSCSFYGQFGKGYCSMHYIRYDVLYQAVLERLQYWAKAVQQDEEKVLNKIQKVGNAERIREKKKKASALKKAENRQNEIDRLFAKMYEDRACEKITERNFIMLSGKYQKEQIELEQQITNLREELSKMEQDMIGAEKWIELIKEYSVPKELTAPLLNAMIEKILIHEATTNEENERIQEIEIYYRFIGKVD

SEQ ID NO: 5201 - protein, 537 aa, synthetic construct
MKQQIYNTALYLRLSRDDELQGESSSITTQRSMLRLYAKEHHLNVIDEYIDDGWSGTNFDRPSFQRMIEDIEAGKINCVVTKDLSRLGRNYIMTGQYTELYFPSHNVRYIAIDDGVDSEKGESEIAPFKNIINEWVARDTSRKVKSAFKTKFAEGAHYSAYAPLGYKKHPDIKGKLLIDDETKWIIEKIFSLAYQGYGSAKITKQLRAEKVPTASWLNFTRYGTFAHIFEGKPESKRYEWTIAHVKAILKSEVYIGNSVHNMQSTVSFKSKKKVRKPESEWFRVENTHEPIIDKEVFYRVQEQIKSRRRQTKEKATPIFAGLVKCADCGWSMRFGTNKANKTPYSYYACSYYGQFGKGNCSMHYIRYDVLYQAVLERLQYWAKAVQQDEEKVLNKIQKAGNAERIREKKKKASTLKKAENRQNEIDRLFAKMYEDRACEKITERNFVMLSSKYQKEQIELEQQITSLREELSKMEQDMIGAEKWIELIKEYSVPKELTAPLLNAMIEKILIHEATTNEDNERIQEIEIYYRFIGKVE

SEQ ID NO: 5202 - protein, 972 aa, synthetic construct
MKPEIKKLLILNLPYLLFVWLFDKVGAAVRLSPGADASAKLLHLGDGFTAAFSSIAPSFHPADLALGIAGAVIVRLIIYTKGKNAKKYRRGTEYGSARWGGADDIKPYTDPVFENNIPLTQTERLTMNSRPKQPKYARNKNILVIGGSGSGKTRFFVKPSLMQCTSKDFPTSYIVTDPKGTLILETGKMLQRYKYRIKVLNTINFKKSMKYNPFAYLRSEKDILKLVNTIIANTKGDGEKSGEDFWVKAEKLYYTALIGYIWYEAPEDEKNFTTLLEMINASEAREDDEDFQNPVDLMFERLEEKDPEHFAVKQYKKYKLAAGVVCFRRLLNQSIGKSPKTYNEERRIRMDTRMITALYERLSRDDDVEGESNSIQNQKKLLEDYAKQHGFPNPVHFTDDGISGTCFDRPGFLEMMKQVEAGRVEYLCIKDMSRLGRDYLKVGQIMEILRQKGVRLIAINDGVDSARGDDDFTPFRNIMNEYYARDTSRKIRSTFQSKGKSGKHVTGLVIYGYLWNETRDQWLVDEYAAGVVKRIFQMTINGMGPYQIAAKLKEDKILIPSAYLATHNEGVNKSKTFKDVYGWGSSTVVNILDKREYLGHTVNFKTRKHFKDKKSHYVPEDEWLIFENTHEAIIDQETFDLAQKVRSNVRRYPDGWGDVAPLTGLMYCADCGGKMYVHRTNNGKRISQYTCSKYTKVPCGTLCPTQHRINESVVLELISDLLKAIAEYAKHDRDEFIRVVQEAQDSHIAADVKRQRTKLNTAKQRLNELEVLLCKIYEDNILGKLPDARYATLDAQYAKEQATLKAEVSTLEAFLENHEKNRKSAERFITLIEKYENFDNLTIAMLNEFIDKILVHERDRKGSRETTQEVEIYFNFVGKFVPPTYAEAELTPEELEELRKREERKDRLHQNYLKRKASGAQKRYEDKIKAKKKAEMDAKKNAIRAEDVARGVFIPVSNMPKLEPQIAPQKGA

SEQ ID NO: 5203 - protein, 588 aa, synthetic construct
MKEVEVIKARNDLQTRTRGKTIELMRVGAYCRVSTDSADQLNSYKSQVAYYTDMIKKNKEWVLADIYADEAITGTQVAKREDFQRMINDCMNGEIDMVITKSISRFARNTLDTLKYVRMLKERNIAVYFEDEKINTLTMDGELLLVVLSSVAQQEVENISANVKKGLKMKMKRGELVGFQGCLGYDYHKDTKTITVNEEEAEIVRYIFNRYIEGAGGSVIAHELENLGYKTKYGSSTWVQSTVIGIIKNEKYKGDLLLGKTFTVDPISKRRLENFGEEDKFYIRNHHEPIISEEVFEKAQEILARRNVNRGKIGEGNTKREKYSRKYAFSCMLECGFCGGTLTRRNWHSSSQYSKVIWQCVTATKKGKKFCKHSKGIPETAIEEAFVESYRLLCDDNKDVLEEFLQRMDDTLSSSAVSKQLAKAEKEIDALEKKKSRLVDMRLEEIIDKETYESKYADLVSKQEQLVEERHKLQETSDNEKDIKKRLKEFKKTLEQNEVLDKFDRYVFESIVEKVIVGGLDENGNVDPAQLTFVYKTGLKNSVDGAKFKPQRKNARGRHRTDELCSHDSNEVDKMCSDSSNDTCGNCS

SEQ ID NO: 5204 - protein, 550 aa, synthetic construct
MKVAIYARYSSDNQRDASIADQFRMCRLHAEKQGWHIVEEYSDHAISGASLIRPGIQALMADAMGGRFDLILAEAMDRLSRDQEDIAGIFKRMSYADVKMFTLSEGEVTHLHVGLKGTMNALFLKDLADKTRRGQRGRVEAGKSGGGNAYGYDVVKKLDANGEPIRGDRTINEFQAEVVRRIFRDYAAGKSAKTIAFALNKEGIPAPSGGDWGFSTINGNPKRGNGILNNEMYIGKIVWNRQRFVKDPNTGKRQARPNPEEEWVIQETPELRILDDDLWNAVKARQEKNKIARKENGEADLSRINTRRRPKYLFSGLTKCSCCGGGYSAISATLIGCATARNKGTCDNRVNIRRDELEARVLNALRTKLVDPELFTHFCEVFTQEMNRLRMEGRAEIASAEAEIAKIDRELETLLNLILKGGAADALNAKMVAIEKRKKELELFLAEADEPPPLLHPSMALQYRKRVQQLYDALQDEDEGKRIEAADTLRSLVDQIELTPVDGKVEIAVQGDLAGILTISTQSKNPAAGATGSQVKMVAGAGFEPATFRL

SEQ ID NO: 5205 - protein, 502 aa, synthetic construct
MEFIREDCIYARQSVDRKDSISIESQIDFCKYELKGGSCRIFKDKGYSGKNTDRPEFQKLLGEIRKGKVRRVIVYKLDRISRSILDFATMMELFQEYDVEFVSSTEKFDTSTPMGRAMLNICIVFAQLERETIQKRVTDAYYSRCLKGFHMSGQAPYGYQLEPTVVEGIRTKKMVADPVAADHVRLMFEMYAEPETSFGDITRYFEEHDIKIYGKSMFRTFLSQLLRNPVYAQADLELYEFFKSQGAAIVNDASDFAGTNGCYLYQGRDVKEDKDRCLKDQILVIAPHEALISSDTWLKCRKKLMANTTFQQGRKPKNTWLAGKIKCGHCGYALKATHVPNSTGYFRCTKRTENKGCPGCGKIRKEEFEQFIFSAMQEKFKDFQILHGREEKVNPKLTAYQVELAQVEAEIEKLLDTLTGANATLLAYANKKIEELDTRRQTISKAIAELSVETISPQQIKKLSYYLDNWDSIDFDDKRKAADGLISTIKATSDRVQIEWKI

SEQ ID NO: 5206 - protein, 537 aa, synthetic construct
MKQQIYNTALYLRLSRDDELQGESSSITTQRSMLRLYAKEHHLNVIDEYIDDGWSGTNFERPSFQRMIEDIEAGKINCVVTKDLSRLGRNYIMTGQYTELYFPSHNVRYIAIDDGVDSEKGESEIAPFKNIINEWVARDTSRKVKSAFKTKFAEGAYYGAYAPLGYKKHPDIKGKLLVDEETKWIVEKIFSLAYQGYGSAKITKVLREEKVPTASWLNFTRYGTFAHIFEGKPESKRYEWTIAHVKAILKSEVYIGNSVHNRQSTVSFKSKKKVRKPESEWFRVENTHEPIIDKEVFYRVQEQIKSRRRQTKEKATPIFAGLVKCADCGWSMRFATNKANKTPYSYYACSYYGQFGKGTCSMHYIRYDVLYQAVLERLQYWAKAVQQDEEKVLNKIQKAGNAERIREKKKKASALKKAENRQNEIDRLFAKMYEDRACEKITERNFIMLSGKYQKEQIELEQQITNLREELSKMEQDMIGAERWIELIKEYSVPKELTAPLLNAMIEKILIHEATTNEENERIQEIEIYYRFIGKVD

SEQ ID NO: 5207 - protein, 582 aa, synthetic construct
MQEVEVIKAKNVLARQARGKAIERLRVAAYCRVSTDSEDQLNSYKSQVQYYTDMIKKNKEWVLADIYADEAITGTQVTKREDFQRMINDCMNGEIDMVFTKSISRFARNTLDTLKYVRMLKERNIAVYFEDEKINTLTMDGELLLVVLSSVAQQEVENISANVKKGLKMKMKRGELVGFQGCIGYDYHPEDKTITVNQEEAEIVRYIFNRYVDGAGGSVIGQELESLGYKTKYGSSTWAPSTVIGIIKNEKYKGDILLGKTFTVDPISKRRLENMGEEDKFYMKDHHEPIISEEVFEKAQEILNRRNKNRTTVGSGKREKYSRKYAFSCMLECGFCGGTLTRRNWHSGSKYSKVIWQCVTATKKGKKFCKHSKGIPETAIEEAFVESYRLLCDDNKDVLEEFLQRMDDTLSSSVVSKQLAKAEKEIDALEKKKSKLVDMRLEEIIDKETYESKYADLVSKQEQLVEERQKLQETSDNEKDIKKRLKEFKKTLEQNEVLDKFDRYVFESIVEKVIVGGLDENGNVDPAQLTFVYKTGLKNSVDGAKFKTQRKNARGRHRTNELCSHDSNEVDKMCSDSSNDTL

SEQ ID NO: 5208 - protein, 582 aa, synthetic construct
MQEVEVIKARNVLSKQARGKAIERLRVAAYCRVSTDSEDQLNSYKSQVQYYTDMIKKNKEWVLVDIYADEAITGTQVIKREDFQRMINDCMNGDIDMVITKSISRFARNTLDTLKYVRMLKERNIAVYFEDEKINTLTMDGELLLVVLSSVAQQEVENISANVKKGLKMKMKRGELVGFQGCLGYDYHPEDKTITVNKEEAEIVRYIFNRYVEGAGGSVIGQELENLGYKTKYGSSTWAPSTVIGIIKNEKYKGDILLGKTFTVDPISKRRLENMGEEDKFYMKDHHEPIISEEVFEKAQEILNRRNKNRTTVGNGKREKYSRKYAFSCMLECGFCGSTLSRRNWHSSSEYSKVIWQCVTATKKGKKFCPDSKGIPETAIEEAFIESYRLLCDNNKDVLDEFLQRLDDTLSNSTVNKQLSKIEKEISAVEGKKNKLVDMRLEDSIDKDTYETKYAALMEKAEQLVADRQKLQETAANEKDIKRRLKEFKSTLEQNEVLDVFDRHVFESIVEKVIVGGYDEDGKKDPAQLTFVYKTGVKNSVDGSRFKPQRKNARGRHRTDELCSHGSNEVDKTCSDRSNDTL

SEQ ID NO: 5209 - protein, 707 aa, synthetic construct
MSRTSRITALYERLSRDDDLTGESNSITNQKKYLEDYARRNGFENIRHFTDDGFSGVNFNRPGFQSLIKEVEAGNVETLIVKDMSRLGRNYLQVGFYTEVLFPQKNVRFLAINNSIDSNNASDNDFAPFLNIMNEWYAKDTSNKIKAIFDARMKDGKRCSGSIPYGYNRLPSDKQTLVVDPVASEVVKRIFTLANDGKSTRAIAEILTEEKVLTPAAYAKEYYPEQYNGNKFTNPYLWAMSTIRNILDRQEYLGHTVLRKSVSTNFKLHKRKSTDEEEQYVFPNTHEPIISQELWDSVQKRRSRVNRASAWGTHSNRLSGYLYCADCGRRMTLQTHYSKKDGSVQYSYRCGGYASRVNSCTSHSISTDNVEALILSSVKRFSRFVLNDEQAFALELQSLWNEKQEEKPKHNQSELQRCQKRYDELSTLVRGLYENLMSGLLPERQYKQLMKQYDDEQAELETKMETMKTELAEEKVSSVDIKHFISLIRKCKNPTEISDTMFNELVDKIVVYEAEGVGKARTQKVDIYFNYVGQVDIAYTEEELAEIETQKEQEEQQRLARQRKREKAYREKRKAQKIAENGGEIVKTKVCPHCNKEFIPTSNRQVFCSKECCYQARQDKKKTDREAERGNHYYRQRVCAACGNSYWPTHSQQKFCSEECQRVNHNKKTLEFYHHKREKEKSQCKDLSQTKERVSDMNLSGTITTPA

SEQ ID NO: 5210 - protein, 460 aa, synthetic construct
MDKIKRVALYIRVSTEEQVLHGDSIRTQTEALEQYAKDNNFIIVDKYIDEGYSATNLKRPNLQRMIEDVKNNKIDLVMITKIDRLSRGVKNYYKIMEILEKHKCDWKTILENYDSSTAAGRLHINIMLSVAENEASQTSERIKFVFNNKIRRGEVISGSTPFGYKIVDKHLVIDGEKAEIVRECFTSYEKLTSMIKVLQHINNSFNANFSYNFIYKLLKNNIYTGTYIHNNLAVENFCDAIISSEQFNTVQKLLSKNTKVYNNKYLNSLGMQYIFSSMVICKCGRKMSGTYCLSSDKKIYKYYRCHVSQTTKKCSNTKRLSEKKLEAFLLKNVRRQLEEIAFGYESNNNKSKNKNNNNQLKNKIKKQINKLQDLYFDDLIDKEDYKLKYQKLNTQLIKLENNNSEEKKSIINLKNIRSFLEINFEKIYSDLSDQEKRTLWTSIIDTIVIDENKNLTINFL

SEQ ID NO: 5211 - protein, 503 aa, synthetic construct
MNNRIDAIYARQSVDKKDSISIESQIEFCKYELKGGNCKEYTDKGYSGKNTDRPKFQELVRDIKRGLIAKVVVYKLDRISRSILDFANMMELFQQYNVEFVSSTEKFDTSTPMGRAMLNICIVFAQLERETIQKRVTDAYYSRSQRGFKMGGKAPYGFHTEPIKMDGINTKKLVVNPEEAVNIRLMFEMYADPATSYGDITRYFAEQGILFYGKELIRPTLAQMLRNPVYVQADLDVYEFFTSQGTVLVNDAADFTGMNGCYLYQGRDVKPSKKNDLKDQMLVLAPHKGIVPSETWLACRKKLMNNMKIQSARKATHTWLAGKIKCGNCGYALMSIVNRVGRQYLRCTKRLDNKSCVGCGKIYTAELETIVYQQMVKKLESHKTLTGRKKAAKANPKIAALQVELAHVDGEIEKLVDSLTGANNVLLSYVNVKIAELDGRKQKLVKRIADLTVEAISPEQVSQISGYLDTWDSVSFDDKRRVVDLMITTIAATSDSLNITWKI

SEQ ID NO: 5212 - protein, 578 aa, synthetic construct
MEVELIKAHDSFDGSARRKIERLRVAAYCRVSTDDEDQIKSYNSMVTHYTELIKNNKEWIFSGIYADKAITGTKVDKREEFQRLIQDCMDGKIDMIIAKSLPRFARNTLDTLKYVRMLKERNIAVYFEVEKINTLKDGEFLMTILSSVAQQEVENTSAYVKKGLKMKMKRGELVGFQGCLGYDYDVETKSISINEEGAVVVRYIFDRYVAGAGSTMIARELNEQGHLTIRGNPWTSSSVMGIINNEKYKGDILLGKTFTVDPISKRRLENLGEEDRYYIHDHHEPIITEEQFERAQEMRRRRNGNRKCGVTPGKREKFSRQFAFSCMVECGFCGSNLSRRRWHSSSKYKKTIWQCVKSTKEGKRFCPDSKGIPEQVIEEAFIESYRMLCNDNKDVLEEFLKRTEKALGENSIEDQLHKLKKSIDKVSLKRKKLLDNYLKGIIEQDIYEETDVELKTELTNTRAKLEYLQQQSDEKSSLQRRLSDFKKALSHNEVLEEFDRGIFESIVEKVIVGGLDEDGNKDPYKITFIYKTGFKNEIGNAKERFGKSSGIGDKVKKMCSDISDEVKGVCSDVSLNTL

SEQ ID NO: 5213 - protein, 499 aa, synthetic construct
MTSVMPWERPGSKIDDRHLQRLAVIYVRQSTRQQLVDHQESTRLQYALVDRAVALGWQADRVLVIDEDLGRSGSSAHARTGFQRLVTEIGLDHVGLVLGIEMSRLARSGKDWYQLIELCALSGAVLADTDGVYDPAEYNDRLLLGLKGTMSEAELHLIKQRMWSGRLNKARRGELAFPLPSGYVRRSSGEVAFDPDEQVQTVIRLVFAQFERLGTLHGVLRYLVENDIQLGIRLREGPDKGTLEWRRPNRMTLQTLLHNPAYAGIYAYGRRRVDPRRQDPARPSTGRVVRSRDGWHVMIPNVLPAYITVAQFEANEAKLAANRARAEAMGAVRGGPALAAGLVHCGRCNRRMSVRYHTQHSKALPEYVCARDVTNYGAQKSCQLLNSACVDAFVEQQVLVALTPAAVEVSLHAADQVLAERAELERLWSQRLERAAQVADRARRSHHLAEPENRLVVRQLEKEWEDALAEAQPREWTPGFMRRAIAYVMRSAVARTRLA

SEQ ID NO: 5214 - protein, 532 aa, synthetic construct
MKAAIYSRKSRFTGKGDSIENQIQLCIDYAKSIGVKDFLIYEDEGFSGSNIDRPQFKKMMQDAKDKKFSYLVCYRLDRISRNVSDFSTLIEKLNELNISFISIKEQFDTSTPMGRAMMFISSVFAQLERETIAERIKDNMYELARSGRWLGGNTPHGFNSEKITFLDENLKERSMYKLQVNDEQMEIVKLIYNKYLELRSLSKLYKYVYNNGIRGPRGGKFDPSSLSRILRNPAYVKANDEILDYLKNSGMDVVGTPDRKCGILTYAKNTSNSIAAIAKHHGVIEPEIWLEVQNQLDKNRDKTPRISTGKTALLSGLIKCGKCGSNMRITYKGKKTDKDLKYYYICGTKKTLGSDSCNCKNLNGPLVESLVIDKIKNCKEESIISAFNSNNIKTDNVFNIFKSETNLLKNQILDKERLIKNLVIELAKNTGSTASDYIVSQIESLNNEISILKDKINTLESSNINISSDSINIDIIVSNLKRFNDEVDNASLDDKRLLLSTIINSIVWDSSLGNLNIVYMGAEVDNSVSLSN

SEQ ID NO: 5215 - protein, 537 aa, synthetic construct
MKQQIYNTALYLRLSRDDELQGESSSITTQRSMLRLYAKEHHLNVIDEYIDDGWSGTNFERPSFQRMIEDIEAGKINCVVTKDLSRLGRNYIMTGQYTELYFPSHNVRYIAIDDGVDSEKGESEIAPFKNIINEWVARDTSRKVKSAFKTKFAEGAYYGAYAPLGYKKHPDIKGKLLVDEETKWIVEKIFSLAYQGYGSAKITKVLREEKVPTASWLNFTRYGTFAHIFEGKPESKRYEWTIAHVKAILKSEVYIGNSVHNRQSTVSFKSKKKVRKPESEWFRVENTHEPIIDKEVFYRVQEQIKSRRRQTKEKATPIFAGLVKCADCGWSMRFATNKANKTPYSYYACSYYGQFGKGTCSMHYIRYDVLYQAVLERLQYWAKAVQQDEEKVLNKIQKAGNAERIREKKKKASALKKAENRQNEIDRLFTKMYEDRACEKITERNFIMLSGKYQKEQIELEQQITNLREELSKMEQDMIGAEKWIELIKEYSVPKELTAPLLNAMIEKILIHEATTNEDNERIQEIEIYYRFIGKVD

SEQ ID NO: 5216 - protein, 389 aa, synthetic construct
MKSKKAVVYARFSLDNQRDESIDAQLRAINEYEDKNNIKIVNQFIDRAKSATSDKRPEFQNMIKFCEADTTGISMVIVHKLDRFSRDKYDSAMYKQKLKVKGIRVVSVLENLDNSPESLILESVIEGMAQYYSANLAREVAKGQKENALKALHNGGDAPLGYDVAHDKTYTVNEEEAQAVKIIFDRYIKGYSYSKIIDELNDLGYKTKRGNKFGKNSLHGILNNEKYTGVYVFNKTQRKGVDGKRNGHKQKSEDEIIKVEGGMPVIIDKEVFEQAQEMIQKRKKTPGAHKATTTYLLTGLIKCGECGHAFQGNKRKDSYGNEYVSYRCGCRKQKRDCNNREIKRDYLEEFILQELEKNILNDEAIPALSKALNEKLNYKNESMQSYLKT

SEQ ID NO: 5217 - protein, 540 aa, synthetic construct
MKQPYNTTIYNTALYMRLSRDDELQGESGSIQTQRMMLRQYAAEHGLNVIDEYIDDGWSGTNFDRPDFQRMIDDIEDGKINCVVTKDLSRLGRNYILTGQYTEIYFPSKGVRYIAVNDNVDTINGENELAPFLNILNEMHARQTSKKVKAAMRTRFANGAHYGAYAPLGYVKDPDKKGHLLIDPETRWIIEKIFDLAVHGRGAASITRILVEEKVPTPGWLNFQRYGTFANIYAGAPEEKAYAWTIAQVKSILKEETYIGHSVHNKQTNISFKNKKKVRKPKEEWYRVENTHEAIISEDVFRQVQEQICNRRRRQKNGTTQIFSGLVKCADCGWSLAYGMNSQNKNPYAHYHCSKYGQGLHQCSMHYIRYDVLYAYVLSRLQYWSVLAQQDGDKLLKRLLNASDKERNTARKRQTAELKKAEKRKAEVDTLFAKMYEDWSAGRITEYNFNMLSEKYQGEQRELDVKIERLHEAMETAAQTAVDAEKWIGLMKQYVNPTELTAELLNTLIEKILVHEAVKSEDGSREQEVEIFYRFIGKIE

SEQ ID NO: 5218 - protein, 493 aa, synthetic construct
MDNRIDAIYGRQSIDKKDSISIESQFEFCRYELKGGEGREYKDKGYSGKNIERPDFQRLLQDIKLGLIKRVIVYKLDRISRSIVDFAKLMELFKQYNVEFVSCTEKFDTSTPMGRAMLNICIVFAQLERESIQMRVQDAFYSRCTKGYYMRGRTPYGFDTEPIVMDGIKTKKLVENAEMDFAELMYQMYAEPSSSYGDITRYFVKNSIDVYGKALQRAFISKLLRNPVYVQADMDIYEYFKAQGVKIESPPEMFTGDNSCYLYQGREGEEQILVIAPHQGRIPSSLWLTVQRKLSQNTSFQNGRKCHNTWLAGKIKCGRCGYALVGLRAQNGVTYLRCKQRADNGSCEGAGTLTAQSMESFVYGEMVEKMRKYHTLKGGKEPGYNPKLTAARVALAKTESEIEKLLDTLSGANPLLLQYANNRIEELDAERQKQLKLVADLTANSVSDTQIDCITNYLNDWESVSFDDKRKVVDILISHIDATSESVTIHWKI

SEQ ID NO: 5219 - protein, 515 aa, synthetic construct
MQYLIYLRKSRADQEAELRGEGETLARHEKALLELARRQHLPIADIYREVVSGETIASRPMMQQLLSEVEQGVWDGVLVMEVERLARGDTIDQGIVAQAFKLSDTKIITPIKTYDPNNEFDEEYFEFGLFMSRREYKTIKRRLNNGRQASVKEGKYVGNRPPYGYERIKIENDKGFTLKPLEKEAQVVRMMFRWYAYGAHGISTIADQLNEMAIPSKTGKQWVYPTVRDILQNPVYVGKIRWGWRGQRKRVKNGSVSVSRPRSDDYLLADGIHPPIVDQQLFDQVQKKFSTHKPLPTSAREMKNPLAGLVICAKCGAKMQRRPYQRENIRTGLICPNNKCRNVSAPFDDVEQKLIEVLAEYIKEEKLRINNGHTQIDDSVLQILQNQLSDLREETVDLNKQNDNIHDFLEKGIYDVDTFLQRSQKISSRITEIEEKQKTLQQEIIEENKRIESATSIIPMTEQLLLQYESMSALEKNSMLKEVLRCVKYERERSIRDGGTADNFTLYLYPKISHK

SEQ ID NO: 5220 - protein, 500 aa, synthetic construct
MAYLIYLRKSRMDMEAEARGEGETLARHRTALLALARPMGLEIGAIYEEIVSGETIAARPQMQRLLSEVEAGQWEGVLVMEVERLARGDSIDQGIVSQAFKYSGTKIITPAKTYDPANEFDEEYFEFGLFMSRREYKTIKRRMVAGRIASVKEGKYMGKTDPYGYFRVKVPNGKGYTLKLNPPQAAIVREVFNLRLQGVGCYMIARRLNARGERTSAGIAWSAQSVRNVLRNCLYAGFVTWGHKAAQPVVRSGVLTKPRRYVADYVKVKGMHPALVSEADFDAVQHLLDSTPGLPLKKGHEIKNPFVGLLYCGKCGHVITYGAAAAAPPCTGRLDCRWAACDNVSSFCADVEDAVLHALRLWLAEYEVDTDQQNSVGRELDDRAAQAQDEIRSIHTAQRKLRTQLDRAAELVEQEIYTPEYFVSRRNQINAQLTELDRALAKASERALCIDRERRASPSMLPKLQHVLEAYPTAQSAQEKNDLLRTVISRIVYLKNAPRA

SEQ ID NO: 5221 - protein, 532 aa, synthetic construct
MKAAIYSRKSRFTGKGDSIENQIQLCIDYAKSIGVKDFLIYEDEGFSGSNIDRPQFKKMMQDAKDKKFSYLVCYRLDRISRNVSDFSTLIEKLNELNISFISIKEQFDTSTPMGRAMMFISSVFAQLERETIAERIKDNMYELARSGRWLGGNTPHGFNSEKITFLDENLKERSMYKLQVNDEQMEIVKLIYNKYLELRSLSKLYKYVYNNGIRGPRGGKFDPSSLSRILRNPAYVKANDEILDYLKNNGMDVVGTPDRKCGILTYAKNTSNSIAAIAKHHGVIEPEIWLEVQNQLDKNRDKTPRISTGKTALLSGLIKCGKCGSNMRITYKGKKTDKDLKYYYICGTKKTLGSDSCNCKNLNGPLVESLVIDKIKNCKEESIISAFNSNNIKTDNVFNIFKSETNLLKNQILDKERLIKNLVIELAKNTGSTASDYIVSQIESLNNEISILKDKINTLESSNINISSDSINIDIIVSNLKRFNDEVDNASLDDKRLLLSTIINSIVWDSSLGNLNIVYMGAEVDNSVSLSN

SEQ ID NO: 5222 - protein, 537 aa, synthetic construct
MKQQIYNTALYLRLSRDDELQGESSSITTQRSMLRLYAKEHHLNVIDEYIDDGWSGTNFERPSFQRMIEDIEAGKINCVVTKDLSRLGRNYIMTGQYTELYFPSHNVRYIAIDDGVDSEKGESEIAPFKNIINEWVARDTSRKVKSAFKTKFAEGAYYGAYAPLGYKKHPDIKGKLLVDEETKWIVEKIFSLAYQGYGSAKITKVLREEKIPTASWLNFTRYGTFAHIFEGKPESKRYEWTIAHVKAILKSEVYIGNSVHNRQSTVSFKSKKKVRKPESEWFRVENTHEPIIDKEVFYRVQEQIKSRRRQTKEKTTQIFAGLVKCADCGWSMRFGTNTANKTPYSYYACSFYGQFGKGYCSMHYIRYDVLYQAVLERLQYWAKAVQQDEEKVLNKIQKVGNAERIREKKKKASALKKAENRQNEIDRLFAKMYEDRACEKITERNFIMLSGKYQKEQIELEQQITDLREELSKMEQDMIGAEKWIELIKEYSVPKELTAPLLNAMIEKILIHEATTNEDNERIQEIEIYYRFIGKVD

SEQ ID NO: 5223 - protein, 537 aa, synthetic construct
MKQQIYNTALYLRLSRDDELQGESSSITTQRSMLRLYAKEHHLNVIDEYIDDGWSGTNFERPSFQRMIEDIEAGKINCVVTKDLSRLGRNYIMTGQYTELYFPSHNVRYIAIDDGVDSEKGESEIAPFKNIINEWVARDTSRKVKSAFKTKFAEGAYYGAYAPLGYKKHPDIKGKLLVDEETKWIVEKIFSLAYQGYGSAKITKVLREEKVPTASWLNFTRYGTFAHIFEGKPESKRYEWTIAHVKAILKSEVYIGNSVHNRQSTVSFKSKKKVRKPESEWFRVENTHEPIIDKEVFYRVQEQIKSRRRQTKEKATPIFAGLVKCADCGWSMRFATNKANKTPYSYYACSYYGQFGKGTCSMHYIRYDVLYQAVLERLQYWTKAVQQDEEKVLNKIQKAGNAERIRAKKKKASALKKAENRQNEIDRLFAKMYEDRACEKITERNFIMLSGKYQKEQIELEQQITNLREELSKMEQDMIGAEKWIELIKEYSVPKELTAPLLNAMIEKILIHEATTNEDNERIQEIEIYYRFIGKVD

SEQ ID NO: 5224 - protein, 707 aa, synthetic construct
MSRTSRITALYERLSRDDDLTGESNSITNQKKYLEDYARRNGFENIRHFTDDGFSGVNFNRPGFQSLIKEVEAGNVETLIVKDMSRLGRNYLQVGFYTEVLFPQKNVRFLAINNSIDSNNASDNDFAPFLNIMNEWYAKDTSNKIKAIFDARMKDGKRCSGSIPYGYNRLPSDKQTLVVDPVASEVVKRIFTLANDGKSTRAIAEILTEEKVLTPAAYAKEYHPEQYNGNKFTNPYLWAMSTIRNILDRQEYLGHTVLRKSVSTNFKLHKRKSTDEEEQYVFPNTHEPIISQELWDSVQKRRSRVNRASAWGTHSNRLSGYLYCADCGRRMTLQTHYSKKDGSVQYSYRCGGYASRVNSCTSHSISTDNVEALILSSVKRFSRFVLNDEQAFALELQSLWNEKQEEKPKHNQSELQRCQKRYDELSTLVRGLYENLMSGLLPERQYKQLMKQYDDEQAELETKMETMKTELAEEKVSSVDIKHFISLIRKCKNPTEISDTMFNELVDKIVVYEAEGVGKARTQKVDIYFNYVGQVDIAYTEEELAEIETQKEQEEQQRLARQRKREKAYREKRKAQKIAENGGEIVKTKVCPHCNKEFIPTSNRQVFCSKECCYQARQDKKKTDREAERGNHYYRQRVCAACGNSYWPTHSQQKFCSEECQRVNHNKKTLEFYHHKREKEKSQCKDLSQTKERVSDMNLSGTITTPA

SEQ ID NO: 5225 - protein, 541 aa, synthetic construct
MQTSQGLVYSYLRFSDPRQAAGNSADRQAEYAKSWAAARGLTLDESLSLRDEGLSAFHQRHIKQGALGVFLQAVDEGRIPVGSVLVVEGLDRLSRAEPIQAQAQLAQIINAGITVVTASDGREYNRERLKAQPMDLVYSLLVMIRAHEESDTKSKRVKASIKRLCDGWVAGHYRGLIRNGSDPRWVRLVDGHWELIPERVEVVRFAIEKYREGYGADRAHAMMQERGFDTSYLGISPQQIYRLIKLVALKGAKQISVDGEDFLLKDYYPRLLSDVEFDELQLLRGQRSRRRGKGAIPGVVTGIGITYCGYCGTPMTAQNVMHKVRSDGTLMDGHRRIMCMSYMNKGGCDVGGSCSVAPVERAVMSFCSDQMNLLRLQQPVGPSGDLQQGVMISRKYVVDLEAQLGRITEALALGEGDGVLPITFLRKARDLEEQLTAAKAKLHQEERELAGIASRQRPADAKVWLDLAAGVEAQEVEARDKVRQLMIDTFDRIVIYMRGVVPEGRRAWYIDVLLISKAGQRRWLRVERKSGKWAAGVDRPD

SEQ ID NO: 5226 - protein, 541 aa, synthetic construct
MKNVKKKRIGLYARVSTEMQTDGYSIQGQLNQLKDYCQFQGYEVVDEYTDRGISGKTTQRPELQRMLKDAKENKLDCIMVYKTNRLARNTSDLLSIVEKLYKLNVEFFSLTEKIEIATSTGKLMLQILASFSEFERNTIVENVYNGQRQRAIEGYYQGNLPLGYDKIPDSKKELMINQHEAHIVKYIFESYAKGHGYRKIANALNHKGYVTKKGKPFSISSITYIISNPFYIGKIQFAKYRHWSDKRRKGLNEEPIIADGKHAPIIDKALWDKVQFKRQESRKKPQVHGKGTNLLTGIVKCPKCGAAMAASNTTNTLKDGTKKRIRYYSCSNFRNKGSKVCSANSVRADVLEKYVMDQILEIIKSKKVLKKLVEKINEKSQIDVSSLNHDIAYKQSQCEEIKAKMHTLTKTIEDSPDLDSVLKPTILSYQDELNQINNQIHQLKQDKQAEALHYDADMIVNVLQAIFKDIDKLEKSQLKSLYLTVIDRIDIRKHEHHKKQFYVTLKLNNEIIKQLFNNHPLDEVLLSTSSLFLPQTLYLTI

SEQ ID NO: 5227 - protein, 526 aa, synthetic construct
MTIAYSYIRFSTAAQREGDSVNRQIAASREWCRQRGIELSDKTYEDLGVSAYRDKKRVDLAAMLEAVEMGTIKENDYIILESLDRLSRQGIDKTQEIIKSILRHGVKIVSLQDGLELDTSSVNDLVSVIRIALSADLAHKESLKKSERVAAAKQAQREQAKRGKAINKRLPYWLEKDGDGYQFNEGVDAVRLMIQLRTDGLGFHKIAMALNASEFKPRWADHWSDTTIRNILSSPALYGRYQFRDGDGVDDYYPALVSYAEFKSFQSTYTASAGGQEHHNHLFGLVRCGACGAAMSKKVSKRKVAGEWKHYKGWICTKTLSGACTQKSPMMDLDTLVIKAVKRLKVSDSKKVSREANQLDREIDTKKARLDEITQALVSGSGSVSVLSAAASTIDKELKELLAQRKDSVRTSKDEIQALYGLRDDPERFNIALRRVVDRIKVFHKGDSTWHVAIHQRNGHLISVAAFRKSQRSPWEYMFGNTSEMELIGAVVELEPWEMVEESMNPEDWETGITNPDYEHKEVCED

SEQ ID NO: 5228 - protein, 571 aa, synthetic construct
MSRPPKAYSYIRFSTTKQAQGDSYRRQIQQAIDYCTEHNLQLDEKAIEDFGVSAFRGSNRIDGALGRFIEAVKGGAIEKGSYLLVESMDRLSRQTILKALSQFIEILNAGIVIVTLSDGEIFRVTDDGKDFDFAKLIISIVYMARANDESEMKSLRSRAAWSNGRKAARESNKVMKNARLPSWLTREGERIVPIPERTAIVSEMFEMAQSGCGYEQIAKVFLEKGYKTFGKEADWRPAGIQAVIKSRAVIGEFQPHVIENGERVPDGEPILGYYPTIVSPAVFEEVQHLIGKRSKHSGSYRKGTYSNLFSGVLRCQCGESLRYGNKGRAGSPRYYLMCPKHNTHGCSMPHLLYNKVEPQLLQAVSLLAVVMEQRKTTTEKMMALKDELAILRRELELEVKRRKKAAQSMLDNDNDADFRELFIQCKANCQALEEQISQLENELMSRELSEKTLSQNLNSEDLDSTDQRQRFNGQLKAVLREIQFSYDGYDLAAVFKDIDGEFMLEQAFEPKLVGSTVRDRDGMTLIKTIAEAPYIDANWVKEEIDEYESFQKESDSEFDDDFEDLSSEESK

SEQ ID NO: 5229 - protein, 430 aa, synthetic construct
MAGKIDMIITKSISRFARNTLDCLKYIRQLKDKNIAVFFEKENINTMDSKGEIMLTIMASLAQQESQSLSQNVKLGIQYRYQQGEVQVNHKRFLGYTKDENKQLVIDPEGAEVVKRIYREYLEGASLLQISRGLEADGILTAAGKAKWRPETLKKILQNEKYIGDALLQKTYTVDFLSKKRVKNNGIVPQYYVENSHEPIIPRELFMQVQEEMVRRANLRGRKGGKKRVYSSKYALSSIVYCGHCGDIYRRVHWNNRGYKSIVWRCVSRLEEKGSECTAPTINEETLQTAVVKAINELLANKEPFLSTLQKNIATVFNEENDNATDDIEGKLEELQQQLLIQAKSKNDYEDVADEIYRLRELKQNALAENAEREGKRQRIAEMTDFLNEQSCELEEYDEQLVRRLIEKVTVFDDKLTVEFKSGVEIDIEI

SEQ ID NO: 5230 - protein, 549 aa, synthetic construct
MKNKLKSSLNIESPKIAIYMRVSTSKQTDNQSLDTQEKTINSYIASRHDWINPICYKYIESHSASIKPKVSNTLKESSFDSLKRPKLRELFLDATIGKFDYVLCASHDRLTRNTNEGIILKHLFSRLNITLIYCRPGETISSENEALNKFFENLLVNIAALESNITGGRVTLANKHKIQNNFWAGGPPPFGYNLVSQPSNKRNSFLEINFEEARIVKKIFELYNLGCSYNEILTRLNRDFTLPPKRLWTHNTLKEILRNPVYTGFLVWNKRGGARKPNRHSPNDFVKSNLVEKNIIIPENEFLETQKLRNILSKDSKFLSTDFLLRDFLYCNKCNKKLSAKNYGNNKRFYYCHSHNNMEINKKCRSIKASKIESTILSNINDLINSSLQSEVQIEKFYDNYIENFNAELLDNKKSLEITINQLKSSTDLLELCVNEINISKDNLTVDYEDLSSSSTEFSFINALLEFQVVTQTEIKSLKARKEYLTYKINSSPKSFDDFKSNLNKSFKLFKYDEEKQKLISSPRSFRLFLLKVVKKIILSDHEITIIFK

SEQ ID NO: 5231 - protein, 537 aa, synthetic construct
MKKAAIYTRKSKFTEKGDSIESQIKLCSKYLDNINIKNYCIYTDEGFSGKNTDRPEFQRMLSDAKAKKFDVIICYKFDRISRNVSDFSNLINKLNELNISFISVVEQFDTNSAIGRAMMYLCTVFSQLERETISQRITDNMYSLATKGYWLGGETPTGFRSEKKFFNSNNKQKMYSSLVPIKEELDLVKLIFNKYLEFNSISKIEKYLLSNNIKTKRNKDWSKASISLILRNPAYVKADEETFKYIESTGSKVYGNPDGKHGLLIYKKNKGRKGAKHDISEWIYAVSEHEGIIDSDIWVAIQKQIKKNAILAPALGTSNIALLTGLIRCAKCNSPMRVAYGKRNPKTNKKNYYYVCTLKTKSGKTRCDSKNLPGLDLDNLILDKLKEMSLDKNTLLKELNKYKDTIESNFHNDILKNIQNNISKNNSMIDNLLNNVALSTDSEVTAILLEKISKLKDENKLLTQKIDDLKSELEAQETLLNDCNSLITKLKYFSKFIDNSSIEEQKQLVSSVIEKVIADGDTGSIEIKFRPLLDFKI

SEQ ID NO: 5232 - protein, 588 aa, synthetic construct
MKEVEVIKARNDLQTRTRGKTIELMRVGAYCRVSTDSADQLNSYKSQVAYYTDMIKKNKEWVLADIYADEAITGTQVAKREDFQRMINDCMNGEIDMVITKSISRFARNTLDTLKYVRMLKERNIAVYFEDEKINTLTMDGELLLVVLSSVAQQEVENISANVKKGLKMKMKRGELVGFQGCLGYDYHKDTKTITVNEEEAEIVRYIFNRYIEGAGGSVIAHELENLGYKTKYGSSTWVQSTVIGIIKNEKYKGDLLLGKTFTVDPISKRRLENIGEEDKFYIRNHHEPIISEEVFEKAQEILARRNVNRGKSGEGNTKREKYSRKYAFSCMLECGFCGGTLTRRNWHSSSQYSKVIWQCVTATKKGKKFCKHSKGIPETAIEEAFVESYRLLCDDNKDVLEEFLQRMDDTLSSSVVSKQLAKAEKEIDALEKKKSKLVDMRLEEDIDKETYESKYADLVSKQEQLVEERQKLQETSDNEKDIKKRLKEFKKTLEQNEILDKFDRYVFESIVEKVIVGGLDENGNVDPAQLTFVYKTGLKNSVDGAKFKPQRKNARGRHRTAELCSHDSNEVDKMCSDSSNDTCGNCS

SEQ ID NO: 5233 - protein, 532 aa, synthetic construct
MKAAIYSRKSRFTGKGDSIENQIQLCIDYAKSIGIKDFLIYEDEGFSGSNIDRPQFKKMMQDAKDKKFNYLVCYRLDRISRNVSDFSTLIEKLNELNISFISIKEQFDTSTPMGRAMMFISSVFAQLERETIAERIKDNMYELARSGRWLGGNTPHGFNSEKITFLDENLKERSMYKLQVNDEQMDVVKLIYNKYLELRSLSKLYKYIYNNGIRGPRGGKFDPSSLSRILRNPAYVKANDEILEYLKNNGMDIVGTPDKKCGVLTYAKNTTNSIAAIAKHHGVIEPEIWLEVQNQLDKNRDKTPRIATGKTALLSGFIKCGKCGSNMRITYKGRKTDKDLKYYYICGTKKTLGADNCNCKNLNGPLVESLIIDKIKNCKEESIISTFNNNNIKTGNIFNVLKSETNLLKNQILDKEKLIKNLVIELAKNTDSIASDYIVSQIENLNSEINILKDKLNTLESSNANISSDSINLDIIVSNLKRFNDEVDNASLDDKRLLLSTIINSIVWDSNLGNLNIIYMGAEMDNSVSLSN

SEQ ID NO: 5234 - protein, 620 aa, synthetic construct
MSSEKIIALYERLSREDENLGESYSIQNQKKLLEDFCREKGWTRFRHFTDDGISGTTFERPSFKEMISLVEDGEVETIVLKDMSRLGRDYLVVGQLREFFRKKGVRLIAINDNHDSSNGDDDFLVFRDVMNEMYAKDISKKIRSTFKSKGKSGKHVASVTPYGYLKDENDGNHWIIDEEAAEVVRLIFKWTIDGLGPYQIANLLQEKKVEIPAVHMARFGQGNNRHKQVKDPYGWGSSTVVGILKKREYLGHTVNFKTQKHFKDKKSHYVSEDNWVIFENTQDAIIDQDTFDTVQKLRANVRRYPDGWGEHHVLTGLMYCADCGAKMYVHRTSNGKRIAQYTCSAYTKVPCGTLCKTQHRINESVVLELIGDMLKAIFESAKYDRAEFLETITTAQSSQEDAEVKKVKARIKVARNRCEELEKLICRIYEDNILGKLPDSRYEVLDKQYANEKSELDAEIMELEKRIAEYDGNRNSASRFMALIDKYEKFEELTPAMVNEFVDKVLVHERDRKGSIQTTQEIEIYFNFVGRYVPPAMEVELTPEEQAEIDRINRIKDKRHQQYLRRKESGWQRKYEERVKSEKREKLQAMKEEIRKQDRENGVYATVGSLALKPTVGTPE

SEQ ID NO: 5235 - protein, 540 aa, synthetic construct
MKQPYNTTIYNTALYMRLSRDDELQGESGSIQTQRMMLRQYAAEHGLNVIDEYIDDGWSGTNFDRPDFQRMIDDIEDGKINCVVTKDLSRLGRNYILTGQYTEIYFPSKGVRYIAVNDNVDTINGENELAPFLNILNEMHARQTSKKVKAAMRTRFANGAHYGAYAPLGYVKDPDKKGHLLVDPETRWIIEKIFDLAVHGRGAASITRILVEEKVPTPGWLNFQRYGTFANIYAGAPEEKAYAWTIAQVKSILKEETYIGHSVHNKQTNISFKNKKKVRKPKEEWYRVENTHEAIISEDVFRQVQEQICNRRRRQKNGTTQIFSGLVKCADCGWSLAYGVNSQNKNPYAHYHCSKYGQGLHQCSMHYIRYDVLYAYVLSRLQYWSVLAQQDGDKLLKRLLNASDKERNTARKRQTAELKKAEKRKAEVDTLFAKMYEDWSAGRITEYNFNMLSEKYQGEQRELDAKIERLHEAMEAAAQTAVDAEKWIGLMKQYVNPTELTAELLNTLIEKILIHEAVKSEDGSREQEVEIFYRFIGKIE

SEQ ID NO: 5236 - protein, 540 aa, synthetic construct
MKQPYNTTIYNTALYLRLSRDDELQGESGSIQTQRLMLRQYAAEHGLTVVDEYIDDGWSGTNFERPSFQRMIDDIEDGKINCVVTKDLSRLGRNYILTGQYTEIYFPSKGVRYIAINDNVDTINGESELAPFLNILNEMHARQTSKKVKAAMHTRFANGAHYGAYAPLGYIKDPDKKGHLLIDPETRWIVEKIFDLAVHGRGAASITRILVEEKIPTPGWLNYERYGTFANIYAGAPTEKAYAWTIAQVKSILKEETYIGHSVHNKQSNISFKNKKKVRKPQEEWYRVENTHEAIISEEVFQKVQELIASRRRKRRNGTTQIFAGLIKCADCGWSLAYGENKQNKNPYGYYHCSKNGQGLRQCSMHYIRYDVLYAYVLARLQYWSMMVQKDEDKLLKRLLNASDRERNSAKKKQAAELKKAEKRKAEVDGLFAKMYEDWSAGRITEYNFNMLSEKYQNEQKELETKIRQLHETMEAAVQTAADAEKWIALMKQYVNPVELTAELLNTLIEKITVHEAVKGEDGSREQEVEIYYRFIGKID

SEQ ID NO: 5237 - protein, 591 aa, synthetic construct
MQEVEVIKAKNVLARQARGKAIERLRVAAYCRVSTDSEDQLNSYKSQVQYYTDMIKKNKEWVLADIYADEAITGTQVTKREDFQRMINDCMNGEIDMVFTKSISRFARNTLDTLKYVRMLKERNIAVYFEDEKINTLTMDGELLLVVLSSVAQQEVENISANVKKGLKMKMKRGELVGFQGCIGYDYHPEDKTITVNQEEAEIVRYIFNRYVDGAGGSVIGQELESLGYKTKYGSSTWAPSTVIGIIKNEKYKGDILLGKTFTVDPISKRRLENMGEEDKFYMKDHHEPIISEEVFEKAQEILNRRNKNRTTVGSGKREKYSRKYAFSCMLECGFCGGTLTRRNWHSGSKYSKVIWQCVTATKKGKKFCKHSKGIPETAIEEAFVESYRLLCDDNKDVLEEFLQRMDDTLSSSVVSKQLAKAEKEIDALEKKKSKLVDMRLEEIIDKETYESKYADLVSKQEQLVEERQKLQETSDNEKDIKKRLKEFKKTLEQNEVLDKFDRYVFESIVEKVIVGGLDENGNVDPAQLTFVYKTGLKNSVDGAKFKTQRKNARGRHRTNELCSHDSNEVDKMCSDSSNDTCGDGSVIVQT

SEQ ID NO: 5238 - protein, 584 aa, synthetic construct
MKEVEVIKARNDLQTRTRGKTIELMRVGAYCRVSTDSADQLNSYKSQVAYYTDMIKKNKEWVLADIYADEAITGTQVAKREDFQRMINDCMNGEIDMVITKSISRFARNTLDTLKYVRMLKERNIAVYFEDEKINTLTMDGELLLVVLSSVAQQEVENISANVKKGLKMKMKRGELVGFQGCLGYDYHKDTKTITVNEEEAEIVRYIFNRYIEGAGGSVIAHELENLGYKTKYGSSTWVQSTVIGIIKNEKYKGDLLLGKTFTVDPISKRRLENFGEEDKFYIRNHHEPIISEEVFEKAQEILARRNVNRGKIGEGNTKREKYSRKYAFSCMLECGFCGGTLTRRNWHSSSQYSKVIWQCVTATKKGKKFCKHSKGIPETAIEEAFVESYRLLCDDNKDVLEEFLQRMDDTLSSSAVSKQLAKAEKEIDALEKKKSRLVDMRLEEIIDKETYESKYDDLVSKQEQLIEERHKLQETSDNEKDIKKRLKEFKKTLEQNEVLDKFDRYVFESIVEKVIVGGLDENGNVDPAQLTFVYKTGLKNSVDGAKFKPQRKNARGRHRTDELCSHDSNEVDKMCSDSSNDTL

SEQ ID NO: 5239 - protein, 624 aa, synthetic construct
MQEKLTALYERLSHDDDLMGESNSISNQKQMLSEYAESHGLTPYIHFTDDGISGTRFDRPGFVNMMDAIKAGQIGTVIIKDMSRLGRDYLMVGQIQEMLRQKQVRLIAINDGHDSLNGDDDFLPFRNIMNEWYAKDTSKKIRSTFKAKGNSGKHVASTTPYGYLKDPDNKEHWIVDEEAAQVVRRIFQMTMDGYGPYQIAKKLKEDQVEIPSVHMARHGAGLWQGRVDEIKDPYAWGSSTVAGILKKREYLGHTVNFKTRKHFKDKKSHYVSEDNWTVFEDTQEAIIDQETFDNVQRIRKNVRRYPDGWGEAHPLTGLMYCADCGAKMYVHRVNNGKRIPQYTCSAYSKIPVGTLCPTQHRINADIVMELIKDLLKAIAEYSHLNREEFIETVKTTQSSQQSSEIVRLKNRLAEAKKRLQELEKLICRIYEDNILGKLPDERYTVLDGQYSKEQKELTAEISELEAEVAGYENSRRSAERFIALIDKYQNFDELTTYMLNEFVEKILVHERDRKGSRQTTQEIEIYFNFVGRYLPPHFGEVQLTPEEEEELRKREARKDRLHQNYLRRKANGKQKEYEDKVKEKKKAEIEAKKEAIRQEDIAKGVFVPVAMLPIAEPKKGVASV

SEQ ID NO: 5240 - protein, 540 aa, synthetic construct
MKQPYNTTIYNTALYMRLSRDDELQGESGSIQTQRMMLRQYAAEHGLNVIDEYIDDGWSGTNFDRPDFQRMIDDIEDGKINCVVTKDLSRLGRNYILTGQYTEIYFPSKGVRYIAVNDNVDTINGENELAPFLNILNEMHARQTSKKVKATMRTRFANGAHYGAYAPLGYVKDPDKKGHLLIDPETRWIIEKIFDLAVHGRGAASITRILVEEKVPTPGWLNFQRYGTFANIYAGAPEEKAYAWTIAQVKSILKEETYIGHSVHNKQTNISFKNKKKVRKPKEEWYRVENTHEAIISEDVFRQVQEQICNRRRRQKNGTTQIFSGLVKCADCGWSLAYGMNSQNKNPYAHYHCSKYGQGLHQCSMHYIRYDVLYAYVLSRLQYWSVLAQQDGDKLLKRLLNASDKERNTARKRQTAELKKAEKRKAEVDTLFAKMYEDWSAGRITEYNFNMLSEKYQGEQRELDAKIERLHEAMEVAAQTAVDAEKWIGLMKQYVNPTELTAELLNTLIEKILVHEAVKSEDGSREQEVEIFYRFIGKIE

SEQ ID NO: 5241 - protein, 558 aa, synthetic construct
MLQQSNSTITSIYPMGNQTEELTALYCRLSQDDKQEGDSNSIINQKKILKRYAIEHGYEPYVFFVDDGFSGTNFNRPDFQRMIAEVEAGRIKRVIVKDMSRLGRDYLQVGMYTEIMFPNMDVHFIAVNDGVDSHVGDNEFTPFRNIINEWYAKDTSKKIRAVKRSKGMAGEHIGSHAPYGYMKNPDNKKEWLIDEEAAEVVREIFRLCVNGYGPTRIANILTERKILCPTYYALEHGEKPRTVLPPDKYLWSATVVSHILERMDYLGHTVNFKTHVKSYKNRKKIDNSPEQWRIFENTHEAIIDKETFEIVQKIRSGKRRPTKMGDMPMFSGLLYCADCGSKMTFHRQMAQSAEKHNFVCSNYRHNSKSCTMHYIRNVVVEQIVLENLKEVIRYVSDYEDEFVQMVMDTDMRQRNKELSQKKKRLTEIHSRIQELDKIFQRIYEDNISGKLSDERFMKLSKGYEEEQHTLQKEQTSLEKELQKEEKQSVDVKQFLSVVRKYTNLTELTPEIVHEFIDKIIVHAPDKSSGKRLQEIEIIYNHIGVFDHSKVTLWKGKAV

SEQ ID NO: 5242 - protein, 547 aa, synthetic construct
MKLLVTYIRWSTKEQDSGDSLRRQTNLIDAFYAKHQEEYYLLPAHRYVDKGKSGFHQQHKNQGSDFRRMFENVMSGTIPEGSLIVVENFDRFSRADIDTAIDDVRQILRKGVSILTLGDGELYDKSALTDPVKLIKHIIIAERAHQESLVKQKRIAQVWNHKTQLARELKKPMGKQAPGWLELSDDGSHYIVDEDKASLVNLIYDKRLSGMSMFAICKWLNEQGYPTINQRKVRISKTKKPDGNWSALSVKHILTSRSVLGYLPAKISTEDRKTVLREEIEGFYPQIVTDSKFYAVQQLLEETGKGKTSGGEHWLYVNILKGIIRCKCGLVMTPTGIRKPVYQGTYRCNGNKESRCNYGTVSRKLLDSQLCSRLFSKLSQLHDEATDTARLDELQRRLTTVDSELEKLTETLIQLPNITQIQEALRVKQEEKDELIAQLSREKARVKSVSSLDLSGLDMESVEGRTEAQIIIKRLVKEIVVSGNEKLVDIYLHNGNMIRGFPLDGKDDHTLTLEEATDEMQPLDDMLIFGEPVTRVYPAGDMEEVDA

SEQ ID NO: 5243 - protein, 532 aa, synthetic construct
MKAAIYSRKSRFTGKGDSIENQIQLCIDYAKSIGVKDFLIYEDEGFSGSNIDRPQFKKMMQDAKDKKFSYLVCYRLDRISRNVSDFSTLIEKLNELNISFISIKEQFDTSTPMGRAMMFISSVFAQLERETIAERIKDNMYELARSGRWLGGNTPHGFNSEKITFLDENLKERSMYKLQVNDEQMEIVKLIYNKYLELRSLSKLYKYVYNNGIRGPRGGKFDPSSLSRILRNPAYVKANDEILDYLKNSGMDVVGTPDRKCGILTYAKNTANSIAAIAKHHGVIEPEIWLEVQNQLDKNRDKTPRISTGKTALLSGLIKCGKCGSNMRITYKGKKTDKDLKYYYICGTKKTLGSDSCNCKNLNGPLVESLVIDKIKNCKEESIISAFNSNNIKTDNVFNIFKSETNLLKNQILDKERLIKNLVIELAKNTGSTASDYIVSQIESLNNEISILKDKINILESSNINISSDSINIDIIVSNLKRFNDEVDNASLDDKRLLLSTIINSIVWDSSLGNLNIVYMGAEVDNSVSLSN

SEQ ID NO: 5244 - protein, 507 aa, synthetic construct
MKRVISYIRFSSEKQAKGDSLRRQSKMVTDWLKAHPEYYLDESLTFRDLGVSGFTGKHLQGGLGDFLTAIEKGLVKAGDTLLIESLDRLSRQDVDQASELLRNILRSGVDVVTLSDGEHYTKESLKDPLALIKSILIMQRAHEESLRKSERIQAAWDAKKESAKAGIKISKRCPAWLKLNDDRKSFSVIPEKVETVKRCFQLRLEGKSIWDIVRTLNAEGHQTLNQYKAGSFGQTSVQDLLKNRSVIGYFTPKGCGEIAGYYPSIIPETDFYRVQQLSYSRYGRKPVSENPMAVNLFKGVIRCSECGHTLIINGFTEKRHGIYRCPCKQENRCNAKGLSRKQTDGTLLALLSRIDRFEPEQINVIDTLKLQREGILKNIEKLVELSLIIDDMTAITSKLKQLKSELSLIESDIEKENQRIKSIDTGSLSDCDLSTKAGRIEAQLIIRGVVKEAVLDTTNKRCKVVFHNGKVIDLPITENPSEAVTEAIQSLSEIASKGLLDIDEFSL

SEQ ID NO: 5245 - protein, 541 aa, synthetic construct
MPKAISYIRFSTKIQSVGDSTKRQSKYINDWLKRNPDYWLDESLRFQDLGISGFSGANAKSGAFGEFLAAVESGYIEAGSVLLVESLDRVSRQDIDTAGEQLRKILRSGVEVVTLVDNEWYTKESLKDSLSMIKAMLVMERAHEESAMKSTRLRSVWAAKRERAAKGEIMSKRCAAWLKVSEDRSHFEFIPENVKAVQRVFQLRLEGLSHVKIAKQMNDGGFSTLNQFKSVTGGWSQSSVTELLSNRSVIGFKVPSKSMAVKGVAEIPNYYPSIISEQQFYAVQQLKQGSGRKPSSDLPLLTNLFKGVLRCSECGFIVVVAGVSAKRSGIYKCSMKSEGRCNSVGFSRLQTDKALVQGLLYNSNRLSLNRDSGSAIGTLQSELEQLHKQRERLIKLAMLADDTESMAKDLKALNSQIKDAEKAVSEVHQREQSSQLETISHLDLTVKKDRIEAQIIIKRIVKEIRLNTAGKKCDVFLHNGLKLLNFPLDRVVDGAQWLEVLPLIDGDEFDFEGFTTKPRHLVLEEAPEWVKEIEAQPNQPL

SEQ ID NO: 5246 - protein, 594 aa, synthetic construct
MNDVQVIKANRNENRIRGRKVEILRVAAYCRVSTDSEDQLNSYKSQVMYYTDLIKKKPEWSLADIYADEAITGTQVTKREDFQRMINDCMNGDIDMVITKSISRFARNTLDTLKYVRMLKEKGIAVFFEDENINTLTMDGELLLVVLSSVAQQEVENISSNVKKGLKMKMQRGELVGFQGCLGYDYHKDTKSISVNEKEAEIVRYIFNRYIEGAGCTVIANELENLGYKTKYGSSRWVQSTVIGIIKNEKYKGDLLLGKTFTVDPISKRRLENFGEEDKFYIRDHHEAIISEEIFEEAQKILAKRNVNRGVHQEGQKRNKFSRKYAFSCMIKCGFCGGTLSRRNWHSSSAYTKTIWHCVTATKHGKKNCPHCKGIPEEVIENAFVKSYQLLCSDQHEVVSEFLQKVEDILKDDASLKRLPKIEKEMTDLQRRKEKLLDLRLDNNIDRDIYDKKNQELSEQLKKLQAEQLQLVELSKNQESTKTRIREFRKNLNSGELLENFDRVVFESVVERIIIGGYNDEGVEDPLKITFVYKTGIHSNLNAKDFKPKRKNAAAVHTDAELCSYASVEDNKLCLHSSSDTCGDGSIIVQTWCR

SEQ ID NO: 5247 - protein, 555 aa, synthetic construct
MSKEKIKVYLYTRVSTSIQIDGYSLEAQKSRMKAFALYNDYEIVGEYEDAGKSGKSIEGRVQFTRMMEDIKSGKDGVSFVLVFKLSRFARNAADVLSTLQIMQDFGVNLICVEDGIDSSKDAGKLMISVLSAVAEIERENIRVQTMEGRIQKAREGKWNGGFAPYGYQLIDGKLLINEEEAIAIRTIFDQYVNTSIGANGLSKYLENHGIRKIPRQNGKNPLFDAGLIRKILKNPVYNGKIAFGRRTLEKVHGTRNEYRQVEQDDYLVAEGIHEAIIPDELWQAAQVKLKAQAKKYEHVNKGKNMRTHLLSGIVKCPICGAGMFGNKSIKYKKDGTKYKDFYYYGCKHRLMNRGHKCTYNKQIREELLDDAVAEVIIKLVSNPKFASMIQEKINMKVDTSAIENEIDNYQKELRKSHSTKFKLIEEIDNLDVDDKHYKRRKTDLDDRLYRMYDKIEELEGQLIEAKAKKETIEAEKLTGDNIYKVLIYFDKLYKVMNDVERRQLIEALISEIQIYEEKQPNGQWLKSITFKLPIIDEDLNISLDNDEQVDIRLVL

SEQ ID NO: 5248 - protein, 620 aa, synthetic construct
MSSEKIIVLYERLSREDENLGESYSISNQKKLLEDYCREKGWTRFRHFTDDGISGTTFERPSFKAMMELVEDGEVETIILKDMSRLGRDYLVVGQLREFFRKKGVRLIAINDNHDSYNGDDDFLVFRDVMNEMYAKDISKKIKSTFKSKGKSGKHVASVTPYGYLKDENDGNHWIVDEEAAEIVRQIFKWTIDGLGPYQIATLLQEKKVEIPAVHMARFGQGNNRHKTFKDPYGWGSSTVVGILKKREYLGHTVNFKTQKHFKDKKSHYVSEDNWVIFENTQEPIIDQQTFDTVQKLRANVRRYPDGWGEHHVLTGLMYCADCGAKMYVHRTSNGKRIPQYTCSAYSKVPVGTLCNTQHRINESVVLELIGDMLKAIFEYAKYDRSEFIETIATAQSTQEDAEVKKVRARITVAKNRCEELEKLICRIYEDNILGKLPDSRYEVLDKQYSKEKAELDAELKELEVKLTEYEKSKNSASKFMALIDKYEKFEELTPAMINEFVDKVLVHERDRKGSIQTTQEIEIYFNFVGRYVPPAMMTEPTPEEQAEIDRINRIKDRRHQQYLRRKESGWQRKYEERVKSEKRAKIEAMKEEIRRQDRENGVYATVGSLALEPKIGTPR

SEQ ID NO: 5249 - protein, 560 aa, synthetic construct
MKKEKIKVYTYKRVSTAMQIDGYSLDAQRARMKAYADFNDYEIVGEYEDAGKSGKSIEGRLQFRQMMEDVKSGKDNISYVLVFKLSRFGRNAADVLSTLQVMQDFGVNLICVEDGIDSSKDAGKLMISVLSAVAEIERENIRVQTMEGRIQKAREGKWNGGFAPYGYQLVNGKLEINEEEAVAVRTIYDQYVNTDIGSNGISKYLENHGIRKIQRQNGKNPLFDAHLVRLILKNPVYCGKIAYGRRKTEKVHGTRNEYHLVEQDNFLLVDGLHEAIIPEDVWNAAQVKLVAQAKKYEHVNKGKNERTHLLSGIVKCPICDAGMYGNKSIKHKKDGTKYKDFFYYGCKHRSMQRGHKCDYKKQIREELLDDAVAEVIVKLVSNPNFATMMQEKINMKVDTTAIDQEIENYEKQLRQDYSIKSKLMEEIDNLDPDDRHYIRRKADLDDRLYRMYDKIEELESQLIDARAKKTSIEAEKITGDNIYKVLICFDKLYFAMNDVERRQLIEALIAEIQIYEERKPNGQWLKSIRFKLPIIENDLRIGLDNSEHVETCVLLQRRTM

SEQ ID NO: 5250 - protein, 363 aa, synthetic construct
MEIVNIYEDAGKSVKSIEGRSAFMQMLSDIENGLGIDYVLVYKLSRFGRNAADILNSLEHIQSFGVNLICIEEGIDSSQTSGKLLISVLSAAAEIERENIIEQTMNGRKEKARQGGWNGDFAPYGYFLKDKQLFIQEDEAEAVRIIFDKYVNGNMGFYKIANYLNLQGIQKVKRDNGTLTQWSTHFARMIIDNPVYMGKIAFGRRTREKVKCTKNEYRQVHQDDYILADSQHDGIISEELWTQAHEKREITGVKAPSKIGRDRAHLLSGVLKCPKCGGPMYTNKHAWTNKDGTYKEIYYYVCIKARTTRGKSCDYKAMLKRTDIEPLVVEAIRDMIKNEDFAAEIKSKIGKQIDTSTLDRERT

SEQ ID NO: 5251 - protein, 521 aa, synthetic construct
MRTILYARYSSDLQNALSTVDQLASLRERADREGWTVIDTFADEEISGRAGIGEMQRPGLNAMLTRVERGDVDQILAEATDRIARHSGDAHAVREHLEHFGARLFTLADGHVDEITGTIKGLMDSRFLKDLADRIRRGQRGQHGRGFNPGGLAYGYNVVKKIGDDGEIVRGLLEVNEEEAAIVRRIFEETLAGVSSRAIVKALNEEGVPSPSGGLWATNVIHGDRIRANGILRNNLYRGVMVYGRTRRAYHPKTRRYVSRVNPVNEWRFVDVPHLRIVSDEHWAAIEAHYAAFDGDIRTKKRHPKRLLSGLGKCSVCGGTWTVISPEKWGCSTAKNKQACTNTRTISTGLYEKRTLGHLKAILLNPDAIELFVERYNIGIQKRRAEVGANRAPLEKNAADLRARISRLVDAIADGAGEFQEFKDRLRTARADLANVEQQLQALIEAAPIVLPHDLADRYRTIIAELDVALATEGTARERAASAIRELIEAITLSPKTQGRGVEIQVTGRMANIINLAKDSA

SEQ ID NO: 5252 - protein, 537 aa, synthetic construct
MKQQIYNTALYLRLSRDDELQGESSSITTQRSMLRLYAKEHHLNVIGEYIDDGWSGTNFERPSFQRMIEDIEAGKINCVVTKDLSRLGRNYIMTGQYTELYFPSHNVRYIAIDDGVDSEKGESEIAPFKNIINEWVARDTSRKVKSAFKTKFAEGAYYGAYAPLGYKKHPDIKGKLLVDEETKWIVEKIFSLAYQGYGSAKITKVLREEKIPTASWLNFTRYGTFAHIFEGKPESKRYEWTIAHVKAILKSEVYIGNSVHNRQSTVSFKSKKKVRKPESEWFRVENTHEPIIDKEVFYRVQEQIKSRRRQTKEKATPIFAGLVKCADCGWSMRFATNKANKTPYSYYACSYYGQFGKGTCSMHYIRYDVLYQAVLERLQYWAKAVQQDEEKVLNKIQKAGNAERIREKKKKASALKKAESRQNEIDRLFAKMYEDRACEKITERNFIMLSGKYQKEQIELEQQITNLREELSKMEQDMIGAEKWIELIKEYSVPKELTAPLLNAMIEKILIHEATTNEDNERIQEIEIYYRFIGKVD

SEQ ID NO: 5253 - protein, 540 aa, synthetic construct
MKQPYNTTIYNTALYMRLSRDDENYGDSVSIETQRTILQQYAKEQGLHVVGEYVDDGWSGTNFERPDFQRMMDDVEAGKVNCIVTKDLSRFGREHVMMDYYLEFLFPEKRVRYIAVAENEDTEKGLSDFVPFKNLFNEWFAKDTSRKVKAAFKAKFATGQRIGAYAPIGYRKHPEIKNKLIIDEETRWIVEKIFDLAIHGRGAASITRILIEEKVPTPGFINFQRDGTFANIYAGAPEEKSYAWTIAQVKSIMKDETYIGHTIHYRETNISFKNKRRVRKPQSEWVRVENTQEPIVSEQVFRQVQEQIANRRRKCKDGTTQIFSGLVKCADCGWSLSYGENRQNSKPYGHYHCSKYGQGTRQCSMHYIRYDVLYAYVLSRLQYWSGLVQHDEERLLKRLLNATDKGQAAARKKQAAELKKAEKRKAEVDTLFARMYEDWAAGRITEYNFSMLSGKYQSEQAELDTKIEQLQSAIATESQNAADAEKWIALMKECVNPTELTAELLNTLIEKIVVHEAVKGEDGSREQEVEIFYRFIGKID

SEQ ID NO: 5254 - protein, 539 aa, synthetic construct
MNRTKKYVAGLYCRLSRDDGNTGESMSIWSQKAMLKQFAEKEHISIFDYYVDDGYSGTNFERPSFQKMIKDIENGRINCVITKDLSRLGRNYLESGAYIEMYFPQKNVRYIAITDGIDTLNSGEIDIMPFKNILNEMYAKDTSKKVKSAIKSRMREGRYIGSNAPFGFKKDPNDKNRLIIDEETRHIIELIYKLCLEGKGTQIISQEMMDRKIPRPSAFVENAEKLYELTDENKYKWTHRMVLSVLRDPVYCGNIARNKRPTLSFKNSKRIYVPKDDYILVKDTHEGIVSEEIWEQAQDMIDKRKCNNKSGMRYDNIFKGLVKCPTCGYALTPKADYRLNKEDIIDFVHFSCSNYKKYGNIACSSHRIEARDLYNIVLEDIQYHGQMALSSREDLVEKIAERIDKDKIEERKNAVKKLKDSKDKLDELDKSFEKLYEDRLSESITERNFNMMNAKLSRSQDELLDEIHSLEEQINMVTQTQENCEKFIENLSKYAKIKELNRYILNQVVDKICVYDKEEVDGELKQEVEIHYKFIGKIN

SEQ ID NO: 5255 - protein, 403 aa, synthetic construct
MNRSGKKCVLYPRVSTEMQVDGFSLDGQKNSLKRFADREEMEIVNIYEDAGKSGKSIEGRPAFMQMLSDIENGLGIDYVLVYKFSRFGRNAADILNSLEHIQSFGVNLICIEAGIDSSQTSGKLLISVLYAVAEIERENIIEQTMNGRKEKARQGGWNGGFAPYGYFLKDKQLFIQEDEAEAVRIIFDKYVNENMGFYKIANYLNLQGIQKVKRDNGTLTQWSTHFVRMIIDNPVYMGKIAFGRRTREKVKDTKNEYRQVHQDDYILADCQHDGIISEELWTQAHEKREITGVKAPSKIGRDRAHLLSGILKCPKCGGPMYTNKHAWTNKDGTYKEIYYYVCSKARTTRGKSCDYKAMLKKTDIEPLVVEAIRDLIKNEDFSAEIKSKIGKQIDTSTLNRERT

SEQ ID NO: 5256 - protein, 586 aa, synthetic construct
MQEVEVIKARNVLSKQARGKAIERLRVAAYCRVSTDSEDQLNSYKSQVQYYTDMIKKNKEWVLADIYADEAITGTQVTKREDFQRMINDCMNGEIDMVITKSISRFARNTLDTLKYVRMLKERNIAVYFEDEKINTLTMDGELLLVVLSSVAQQEVENISANVKKGLKMKMKRGELVGFQGCLGYDYHPEDKTITVNQEEAEIVRYIFNRYVEGAGGSVIGQELENLGYKTKYGSSTWAPSTVIGIIKNEKYKGDILLGKTFTVDPISKRRLENMGEEDKFYMKDHHEPIISEEIFEKAQEILNRRNKNRTTVGSGKREKYSRKYAFSCMLECGFCGSTLSRRNWHSSSEYSKVIWQCVTATKKGKKFCPDSKGIPETAIEEAFIESYRLLCDNNKDVLEEFLHRLDETLSNSTVSKQLSKIEKEISAVEGKKNKLVDMRLEDSIDKDTYETKYTALMEKLEQLASDRQKLQETAVNEKDIKRRLKEFKTTLEQNEVLDVFDRHVFESIVEKVIVGGYDEDGNKDPAQLTFVYKTGMKNSVDGSRFKPQRKNARGRHRTDELCSHESNEVNSLCSDNSADTCGNCS

SEQ ID NO: 5257 - protein, 548 aa, synthetic construct
MKLLVTYIRWSTKEQDSGDSLRRQTNLIDAFYSKHKEDYYLLPAHRYVDKGKSGFHQQHKNQGSDFRRMFENVMSGGIPEGSLIVVENFDRFSRADIDTAIDDVRQILRKGVSILTLGDGELYDKSALTDPVKLIKHIIIAERAHQESLVKQKRIAQVWNHKTQLARELKKPMGKQAPGWLELSDDGSHYIIDEDKASLVNLIFDKRLSGLSMFAICKWLNEQGYPTINQRKVRISKTQKPDGNWSALSVKHILTSRSVLGYLPAKVSTEDRKTVLREEIEGFYPQIVTDSKFYAVQQLLEETGKGKTSGGEHWLYVNILKGLIRCKCGLVMTPTGIRKPVYQGTYRCNGNKESRCNYGTVSRKLLDTQLCSRLFSKLSQLHNEATDTARLDELQRRLTTVDSELEKLTETLIQLPNITQIQEALRVKQEEKDELIAKLSREKARVKSVSSLDLSGLDMESVEGRTEAQIIIKRLVKEIVVSGNEKLVDIYLHNGNMIRGFPLDGKDDHTLTLEEATDEMQSLDDMLIFGEPVTRVYPAGDMEEVDYS

SEQ ID NO: 5258 - protein, 503 aa, synthetic construct
MPQRNNGIAYSYVRFSSKRQEVGDSLRRQTEMAEEYAIKNGLKLSSKNFQDLGISAFREGKRASLVDMLAAIEEGQITAGSTIIIEALDRLSRRGIDATLETVKEILRKDVQVVSLSDGLLLTKKSLNDLQSVIRIAVAADLAHKESERKALRLRETKGQQREAALSGKPINKILPFWLQRTEAGYAFSDKAGVARQIVQLKQEGKGSNMIAKTLNRLGIAGVRTAQWNHASITKMLKNPALYGAYQTGETTKDRELIKLELVEAYYPALINKEEWLLLQSDQSKSKRGRRSANNPYSGLLRCECGGALVKRQHTVKGKLYVYHGCLNARDGRCTQNISIKGLDGALTTILGRLEFKKKQTLSQSIHQERQQLEARINDLNSKLQVLDDIPLSVIKSIGTMESRLKEITDQIAKDEREQRGIEAVKSEKLSSITDGLELNLLLKRVLKSITVIRSGRGWAVKVLHLSGHKQNFLMVDDEIKFLSDTIALQKLLAGFRETTENS

SEQ ID NO: 5259 - protein, 455 aa, synthetic construct
MANEIKQVALYIRVSTDQQAKHGDSLDEQQHTLNEYVRQQGNMRVFKTYIDDGISGQKLYRDEFQKLLDDVKKGRIDTILFTKLDRWFRNLRHYLNIQEILDKNNVTWLAVTQPFFNTETAMGRSFVNQSMGFAELEAQMTSERIRAVFDNKIRKGEVVSGKVPLGYEIKDKHLVPNEKAEIVKEIFQYYLETGSMRATVRHLENHFSMTRDYQSVRQMLTNRKYIGELRDNKNFCKPIIDRDVFERVQLQLSKNIRMNKKRDYMFTGLLVCSECGCNYSATAVISRYVRKDGTTNPNERHLYRCTKNRNNTKKCSNKKGIYETTLENFLIENIEKQAEELSVKMQQEPEVKKTKNTNDKIKKKIDRLKKAYLNEVITLEEYKKDREELEALLIPERDNKIAKIDLNSLHNYSTAEFRDGYKQLTISEKSSLWRQVIKNIVVYPDGNLKINFLGY

SEQ ID NO: 5260 - protein, 514 aa, synthetic construct
MKKVYSYIRFSSTKQAFGDSHRRQSKAIQDWLANHPDHILDESLSFEDLGRSAFHGDHLKEGGALRAFLEAVKQGLIPPDSVLLVESLDRVSRQSISHAQETIRGILEQGITVVTLSDGETYNRQSLDDSLVLIRMIILQERSHNESVIKSDRIKKAWSHKRQQFEQDGTKITGNCPGWLKLNSDKKSFSLIPHHIETIHRIFDEKLSGKSLHAIARDLNLENIPTITNKRVDTGWTPTRVRDLLLKESLIGVAYGVSDYFPPAISKEKFHAVQMIRGQGKGKKPTSRQPSSIDILKGICKCAECGSTLRQRNTKKTPEGRYPRGYLECRNRQLGRCNSKAFNRSLIEDILIQKVFPTLQYLSLKSNGDNISVTTLKADITSLEKGINNLISLAEKGLGDLDTLAQRITNNRVELESKKKDLRQAEAILSLRSDNDIQDSDRKTVEGRIKLQLAIKSFVKEIIFDYDKQEITIRLLNGKSFSGISVAREDKDFDHSSMFEVLQKSLLDVDGVCL

SEQ ID NO: 5261 - protein, 506 aa, synthetic construct
MRTVITYLRYSSAIQGAEGADSTRRQNDLFKQWLKKNSDAQVVASFSDEGLSGYKGKHLTGQFGDMLARIESGEFPEGTILLVEAIDRIGRLEHLETEALMNRIIAHGIEIHTLQDGLIYTRDALSDDLGISIIQRVKSYVAHQESKQKSFRVSQKWKQRAKLALAGEQRLTKMVPGWIDPDTFKCNEHAETVRLIFKLLLSGESLHNIARHLQANNISSFSRRKDANGFSVHSVRTVLRSESVIGTLPASQRNDRPAIPNYYEAAIDAATFNKAQEILDKNRKGRTPASDNPLTINIFKGLFRCQCGASVHPTGTKNKYQGVYRCNNHLDGRCDVPPLKRKPFDKWMIDNFLGMIDVGNDGEAEGKIASLQHEVEIVTTRIKKATALLLEMDDITELKAQVKELNQKRTELQTTIDSMRRKTSLTDKELPQLKDIDLTTKAGRVECQLILSKHLKGLTLGKDSVIVTLQNDTEITIPTNPLPLHDGTSIFEIAEKELLEIDAYQL

SEQ ID NO: 5262 - protein, 507 aa, synthetic construct
MKRVISYIRFSSEKQSRGDSLRRQSKMVTDWLKAHPEYYLDESLTFRDLGVSGFTGKHLKGGLGDFLTAIEKGLVKAGDTLLIESLDRLSRQAVDRASELLRNILRSGVDVVTLSDGEHYTSESLKDPLALIKSILIMQRAHEESLRKSERIQAAWDAKKEAAKAGIKVSKRCPAWLKLNDDRKSFSVIPEKVATVKRCFQLRLEGKSIWEIVRTLNDEGHQTLNQYKPGKFGQTSVQDLLKNRSVIGYFTPKGCEEISGYYPAIIDETTFYKVQQLSYARYGRKPASDKPMAVNLFKGVIRCSECGHALIITGFSDTRNGIYRCPLRNENRCSAKGLSRKQTDGTLLALLSRLDRFDSDMTNTIDTLKLHREHISSNIEKLVQLSLEIEDLSAITSKLRQLKNELSQVDADIEKETQRLKSIDVGCLSDCDLSTKAGRIEAQLIIRSAVKEVVLNTAKRRCKVTFHNGKSITLPITENPSEDVTEAIQSLSEVTERGLIDVDEVII

SEQ ID NO: 5263 - protein, 507 aa, synthetic construct
MKRAISYIRFSSEKQSRGDSLRRQSKMVTDWLKAHPEYYLDQDLSFRDLGVSGFTGKHLKGGLGDFLTAIEKGLVKAGDTLLIESLDRLSRQDVDQASELLRNILRSGVDVVTLSDGEHYTKESLRDPLSLIKSILIMQRSHEESLRKSERIQAAWDAKKEAAKAGIKVSKRCPAWLKLNDDRKSFSVIPEKVETVKRCFQLRLEGKSIWEIVRTMNAEGHQTLHQHKPGSFGQSSVQDLLKNRSVIGYFTPKGCEEISGYYPAIIDETTFYKVQQLSHYRYGRKPVSAKPLSVNLFKGVIRCSECGHALIITGFSDTRNGIYRCPLRNENRCSAKGLSRKQTDGTLLTLLSRLDRFDSDTTNTIDTLKLHREHISSNIEKLVQLSLEIEDLSAITSKLKQLKGELSQVDADIEKETQRLKSIDTGSLSDCDLSTKAGRIEAQLIIKSAVKEVVLNTAKRRCKVTFHNGKLIDLPITETPSDNVTEAIQSLSEVTERGLIDVDEVII

SEQ ID NO: 5264 - protein, 537 aa, synthetic construct
MKQQIYNTALYLRLSRDDELQGESSSITTQRSMLRLYAKEHHLNVIDEYIDDGWSGTNFERPSFQRMIEDIEAGKINCVVTKDLSRLGRNYIMTGQYTELYFPSHNVRYIAIDDGVDSEKGESEIAPFKNIINEWVARDTSRKVKSAFKTKFAEGAYYGAYAPLGYKKHPDIKGKLLIDEETKWIVEKIFSLAYQGYGSAKITKILREEKVPTASWLNFTRYGTFAHIFEGKPESKRYEWTIAHVKAILKSEVYIGNSVHNRQSTVSFKSKKKVRKPESEWFRVENTHEPIIDKEVFYRVQEQIKSRRRQTKEKATPIFAGLVKCADCGWSMRFATNKANKTPYSYYACSYYGQFGKGTCSMHYIRYDVLYQAVLERLQYWAKAVQQDEEKVLNKIQKAGNAERIREKKKKASALKKAENRQNEIDRLFTKMYEDRACEKITERNFIMLSGKYQKEQIELEQQITNLREELSKMEQDMIGAEKWIELIKEYSVPKELTAPLLNAMIEKILIHEATTNEENERIQEIEIYYRFIGKVD

SEQ ID NO: 5265 - protein, 507 aa, synthetic construct
MRAVIYARFSSDNQREESITAQVRACSEYAKQKGYHIVKIYADEARSALTDDRPNFLRMISDAKLGLFDIVLIHKLDRFARNRYDSAIYKRELRRCGVRIESVLEQLDDSPESIILESVLEGLAEYYSRNLAREVMKGMMENALQGKHNGGLPPLGYDVDPETKKLVVNESEARIVRLIFELYAQGKSYNDIISALNQYGFKTKKGKPFGKNSIFEILRNKKYIGIYIFNRSAPKKEGKRNHHLTKAPDEIIEIPGTIPTIIDEELFWRVQSIMDKRKRNRASNKAKTVYLLSGLIYCGECGNAMIGDSSSYLTKKSKEHKKLYYYTCNYNGRTGQCNSQKVRKELVEEFVLKQLRERFFAEKAIPELAEKIYSSFTSQKKEMGKEVKYIEKELKETGRKIANLVNALANGASTVNSIVEQLKLLESKKATLEVQLQEWYLKLQDNIVTKDNIIAFLKSKKEQLDSNDPVALKSLCQEFIDKVTVNNDKTDVEFKITVVIDGGGGGN

SEQ ID NO: 5266 - protein, 526 aa, synthetic construct
MRAVIYARFSSDNQREESITAQVRACSEYAKQKGYHIVKIYADEARSALTDDRPNFIRMINEAKLGLFDVVLVHKLDRFARNRYDSAIYKRELRRCGVKVESVLEQLDDSPESIILESVLEGLAEYYSRNLAREVMKGMMENALQGKHNGGLPPLGYDVDPETKKLVVNESEARIVRLIFELYAQGKSYNDIIFTLNQHGFKTKKGKPFGKNSIFEILRNKKYIGIYVFNRSVSKKEGKRNNHLSKAPDEIVEIPGAIPAIIDEELFWRVQSIMDKRKRNRASNKAKTVYLLSGLIYCGECGNAMIGDSSSYLTKKNKEHKKLYYYTCNYNGRTGQCNSQKVRKELVEEFVLKQLRERFFAEKAIPELAEKIYSSFTSQKKEMGKEVKYIEKELKETERKIANLVNALANGASTVNSIVEQLKLLESKKATLEVQLQEWYLKLQDNVVTKDNIIAFLKSKKEQLDSNDPVALKSLCQEFIDKVTVNNDKTDVEFKITVVIDGGGGGNRTHRPEDKNRKLLRGQPVF

SEQ ID NO: 5267 - protein, 547 aa, synthetic construct
MKLLVTYIRWSTKEQDSGDSLRRQTNLIDAFYSKHKNDYYLLPAHRYVDKGKSGFHQQHKNQGSDFRRMFENVMSGAIPEGSLIVVENFDRFSRADIDTAIDDVRQILRKGVSILTLGDGELYDKSALTDPVKLIKHIIIAERAHQESLVKQKRIAQVWNHKTQLARELKKPMGKQAPGWLELSEDGSHYIVDEDKASLVNIIYDKRLSGMSMFAICKWLNEQGYPTINQRKVRISKTKKPDGNWSALSVKHILTSRSVLGYLPAKISTEDRKTVLREEIESFYPQIVTDSKFYAVQQLLEETGKGKTSSGEHWLYVNILKGLIRCKCGLVMTPTGIRKPVYQGTYRCNGNKESRCNYGTVSRKLLDTQLCSRLFSKLSQLHDEATDTAKLDELQRRLNTVDSELEKLTETLIQLPNITQIQEALRVKQEEKDELIVQLSREKARVKSVSSLDLSGLDMESVEGRTEAQIIIKRLVKEIVVSGNEKLVDIYLHNGNMIRGFPLDGKDDHTLTLEEATDEMQSLDDMLIFGEPVTRIYPAGDMEEVDA

SEQ ID NO: 5268 - protein, 506 aa, synthetic construct
MRTVITYLRFSSATQGAEGADSTRRQNELFKQWLRKNSDAQVVASFNDEGLSGYKGKHLSGQFGDMLSRIESGEFPEGTILLVEAIDRIGRLEHLETEALMNRIIAHGIEIHTLQDGLIYTRDALSDDLGISIIQRVKSYLAHQESKQKSFRVSEKWKQRAKLALAGKQRLTKMVPGWIDHDTFKINEHAETVRLIFKLLLSGESLHNIARHLQSNGIKSFSRRKDANGFSVHSVRTILRSETTIGTLPASQRNDRPAIPNYYEAAIDAATFNKAQEILDKNRKGRTPASDNPLTINIFKGLFRCQCGASVHPTGTKNKYAGVYRCNNHLDGRCDVPPLKRKPFDRWMIDNFLGMIDVGNDGEAEGKIASLQHEVEIVTARIKKATALLLEMDDIDELKIQIKELNQRRTELQTTIDNMRRKASLTDKELPQLKDIDLTTKAGRVECQLILSKHLKGLTLGKDSVIVTLQNDTEITIPTNPLPLNDGTSIFEIAEKELLEIDAYQL

SEQ ID NO: 5269 - protein, 506 aa, synthetic construct
MRTVITYLRFSSATQGAEGADSTRRQNELFKQWLRKNSDAQVVASFSDEGLSGYKGKHLTGQFGDMLARIESGEFPEGTLLLVEAIDRIGRLEHLETEALMNRIIAHGIEIHTLQDGLIYTRDALSDDLGISIIQRVKSYVAHQESKQKSFRVSQKWKQRAKLALAGEQRLTKMVPGWIDPDTFKCNEHAETVRLIFKLLLDGESLHNIARHLQANNISSFSRRKDANGFSVHSVRTILRSETTRGTLPASQRNDRPAIPNYYEAAIDASTFNKAQEILDKNRKGRTPASDNPLTINIFKGLFRCQCGASVHPTGTKNKYAGVYRCNNNPDGRCDVPPLKRKPFDKWMIDNFLGMIDVGNDGEAEGKIASLQHEVEIVTARIKKATALLLEMDDIDELKIQLKELNQKRTELQTMIDNMRRKASLTDKELPQLKDIDLMTKAGRVECQLILSKHLKGLTLGKDSVTVTLQNDTEITIPTNPLPLNDGSPIFEIADKELLDIDAYQL

SEQ ID NO: 5270 - protein, 507 aa, synthetic construct
MKRVISYIRFSSERQAKGDSLRRQSKMVNDWLKAHPEYYLDQDLSFRDLGVSGFTGKHLKGGLGDFLTAIEKGLVKAGDTLLIESLDRLSRQAVDRASELLRNILRSGVDVVTLSDGEHYTRESLRDPLSLIKSILIMQRSHEESLRKSERIQAAWDAKKEAAKAGIKVSKRCPAWLRLNDDRKSFSVIPDKVETVKRCFQLRLEGKSIWEIVRTLNAEGHRSMNQYKPGKFGQTSVQDLLKNRSVIGYFTPKGCEEIAGYYPSVIDETTFYKVQQLSHSRYGRKPVSAKPLSVNLFKGVIRCSECGHALIITGFSDTRNGIYRCPLRNENRCSAKGLSRKQTDGTLLTLLSRLDRFDSDMTNTIDTLKLHREHISSNIEKLVQLSLEIEDLNAITNKLKQLKNELSQVDADIEKETQRLKSIDTGSLSDCDLTTKAGRIEAQLIIKSAVKEVVLNTAKRRCKVTFHNGKSITLPITENPSEDVTEAIQSLSEVTERGLIDVDVVEI

SEQ ID NO: 5271 - protein, 507 aa, synthetic construct
MKRVISYIRFSSERQAKGDSLRRQSKMVNDWLKAHPDYYLDQDLSFRDLGVSGFTGKHLKGGLGDFLTAIEKGLVKAGDTLLIESLDRLSRQDIDIASELLRRILRAGVDVVTLSDGEHYTRESLKDPLSLIKSILIMQRSHEESLRKSERIQAAWDAKKEAAKAGIKISRRCPAWLKLNDDRKSFSVIPEKVETVKRCFQLRLEGKSIWEIVRTLNDEGHQSMSQYKPGKFGQTSVQDLLKNRSVIGYFTPKGCEEISGYYPAIIDETTFYKVQQLSHYRYGRKPVSDKPLSVNLFKGVIRCSECGHALIITGFSDTRNGIYRCPLRNENRCSAKGLSRKQTDGTLLTLLSRLDRFDSDMTNTIDTLKLHREHISSNIEKLVQLSLEIEDLSAITIKLKQLKNELSQVDADIEKETQRLKSIDVGCLSDCDLTTKAGRIEAQLIIKSAVKEVVLNTAKRRCKVTFHNGKVIDLSITENPSEDVTEAIQSLSEVTERGLIDVDEVII

SEQ ID NO: 5272 - protein, 547 aa, synthetic construct
MKLLVPYIRWSTKEQDSGDSLRRQTNLIDAFYAKHKDDYYLLPAHRYVDKGKSGFHQQHKNQGSDFRRMFENVMSGVIPEGSLIVVENFDRFSRADIDTAIDDVRQILRKGVSILTLGDGELYDKSALTDPVKLIKHIIIAERAHQESLVKQKRIAQVWNHKTQLARELKKPMGKQAPGWLELSEDGSHYIVDEDKASLVNIIYDKRLSGMSMFAICKWLNEQGYPTINQRKVRISKTKKPDGNWSALSVKHILTSRSVLGYLPAKISTEDRKTVLREEIESFYPQIVTDSKFYAVQQLLEETGKGKTSSGEHWLYVNILKGLIRCKCGLVMTPTGIRKPVYQGTYRCNGNKESRCSYGTVSRKLLDTQLCSRLFSKLSQLHDEATDTAKLDELQRRLNTVDSELEKLTETLIQLPNITQIQEALRVKQEEKDELIVQLSREKARVKSVSSLDLSGLDMESVEGRTEAQIIIKRLVKEIVVSGNEKLVDIYLHNGNMIRGFPLDGKDDHTLTLEEATDEMQPLDDMLIFGEPVTRIYPAGDMEEVDA

SEQ ID NO: 5273 - protein, 559 aa, synthetic construct
MKTKLYSYIRFSSMRQNDGSSYERQIRMAREIAAKYDLELVNDYQDLGVSAFKGANSKTGALSRFLDAIGRSVPVGSWLFIENLDRLSRADIVSAQELFLSIIRRGITIVTGMDNKIYSLDTVTANPMDLMFSILLFIRGNEESQTKRNRTNSSALIKIKAHQENPQNPAVAIEEVGKNMWWTDTTSGYVLPHPTYFPVVQEIVELRKNGRSTAEILDHLNETYTPPPAVSNKKHSKWSRAMVERLFHTRALIGIKEVSVDGVNYELNNYYPRVIDDPTFYHLKKNIGARAWNFGDKEEVKPIPLLSGIGLLKCDHCGCAMVKVKGTNKRSDQYRYTCDAIRSRRLDCEHPNWSFRGDQLEKAVLQLLADKIWIAEDKANPVPALKVQIDEISRKIDNLIALSAMTGATKELADQITALNSERETLYNQIKMAEEEMYSVDSQGWEKLAEFDLEDVYNEERLKVRFKIKQALRRIGCSRIDRNKNLFVLEYIDGKTQRVVIENSRGTRKGRIFIDLKTINDRQILESNGLVLHPCLDMLTDKNWKPEEEIPGPLQEFGI

SEQ ID NO: 5274 - protein, 558 aa, synthetic construct
MKGKIALYSRVSTSEQSEHGYSIHEQEQVLIKEVVKNYPGYDYETYIDSGISGKNIEGRPAMKRLLQDVKDNKIEMVLSWKLNRISRSMRDVFNIIHEFKEHGVGYKSISENIDTSNASGEVLVTMFGLIGSIERSTLISNVKMSMNAKARSGEAITGRVLGYKLSLNPLTQKNDLVIDENEANIVREIFDLYLNHNKGLKAITTILNQKGYRTINQKPFSVFGVKYILNNPVYKGYVRFNNHQNWAVQRRSGKSDKNDVILVKGKHEAIISEDVFDQVHEKLASKSFKPGRPIGGDFYLRGLIKCPECGNNMVCRRTYYKTKKSKERTIKRYYICSLFNRSGSSACHSNAINAEVVERVINVHLNRILSQPDVIKQIASNVIEELKQKHSKQTEIKYDIDSLEKQKAKVKTQQERLLELFLDDQMDSEMLKAKQSQMNGQLEMLDKQIKEAQQATESQAEVPNYDKLKSHLTMMISRFSVYLREATPEAKNQLMKMLIDSIEITTDKQVKLVRYKIDESLIPQSLKKDWGSFFMPKFQFEIDGRKNYFIDQITTFTT

SEQ ID NO: 5275 - protein, 507 aa, synthetic construct
MKRVISYFRFSSEKQAKGDSLRRQSKMVTDWLKAHPEYYLDESLTFRDLGVSGFTGKHLKGGLGDFLTAIEKGLVKAGDTLLIESLDRLSRQAVDRASELLRNILRSGVDVVTLSDGEHYTKESLRDPLSLIKSILIMQRAHEESLRKSERIQAAWNRKKELISEGIKISKRCPAWLKLNDDRKSFSVIPEKVETVKRCFQLRLEGKSIWEIVRTLNAEGHQTLNQYKAGSFGQTSVQDLLKNRSVIGYFTPKGCEEISGYYPSIIHETDFYKVQQLSYARHGRKPASAKPLSVNLFKGVIRCSECGHALIITGFSDTRNGIYRCPLRNENRCSAKGLSRKQTDGTLLTLLSRLDRFDSDTTNTIDMLRLHREHISSNIEKLVQLSLEIEDLSAITIKLKQLKGELSQVDADIEKETQRLKSIDVGCLSDCDLTTKAGRIEAQLIIKSAVKEVVLNTAKRRCKVTFHNGKVIDLSITENPSEDVTEAIQSLSEVTERGLIDVDEVII

SEQ ID NO: 5276 - protein, 506 aa, synthetic construct
MRTVITYLRFSSAIQGAEGADSTRRQNDLFKQWLKKNSDAQVVASFSDEGLSGYKGKHLSGQFGDMLSRIESGEFSKGTILLVEAIDRIGRLEHLETEALMNRIIAHGIEIHTLQDGLIYTRDALSDDLGISIIQRVKSYLAHQESKQKSFRVSEKWKQRAKLALAGEQRLTKMVPGWIDPETFKLNEHAETVRLIFKLLLDGESLHNIARHLQANNISSFSRRKDANGFSVHSVRTILRSETTRGTLPASQRNDRPAIPNYYEAAIDAATFNKAQEILDKNRKGRTPASDNPLTINIFKGLFRCQCGASVHPTGTKNKYQGVYRCNNHLDGRCDVPPLKRKPFDKWMIDNFLGMIDVGNDGEAEGKIAALQHEVEIVTARIKKATALLLEMDDITELKTQVKGLNQKRTELQTTIDNMRRKASLTDKELPQLKDIDLTTKAGRVECQLILSKHLKGLTLGKDSVTVTLQNDTEITIPTDPLPLNDGTSIFEIAEKNLLNIDTFQL

SEQ ID NO: 5277 - protein, 510 aa, synthetic construct
MKKVITIEPAKQVTHMVDLPSFTKRRVAGYARVSTDHEDQTTSYEAQMTYYTDYINSRSDWEFVKMYSDEGISGTNTKKRLGFQEMVEDALDGKIDLILTKSVSRFARNTVDSLSTVRKLKEAGVEIYFEKENIWTFDSKGELLITIMSSLAQEESRSISESVTWGRRHQLAEGQVTFSYSQVLGFKKCDTGGFEIDQEEAKIVRYIFHQVLLGNNPNKIARELTAQGIPTPQGKRKWSYGTVKRMLRNEKYKGDALLQKSFTTDFLTKSTKPNEGELPQYYVENNHEAIIKREVFDLVQVELDKLEKKRQTSNIFTGRLFCGDCGSAFGSKVWHSTSKYKRTIYQCNAKYKGEHKCQTPHVTEEEIKGWFLSAMNQLLGNREEIIANTELLIDMAKDTTPLESEIADLERHLETIRQDIEDLVDRNARKAQNQDLYQEQYDTLVTAYQEKQKELQETRSALEEQKSKQLSLDGFIQKFKEQDASSQTSTKNSGRPALSDWISKKIRKSA

SEQ ID NO: 5278 - protein, 481 aa, synthetic construct
MKKVAIYVRVSTLNQAEEGYSISEQTDKLKAYCVAKGWTVAEIYTDAGFTGSNIDRPGLQQLINDISVQKFDTVLIYKLDRLSRSVRDTLYLAKDVFAKNNIDFVSLSENIDTSSAMGGLFLTILSAISEFERETIKERMQLGKLGRAKSGKSMMWSRTAFGYLHNTDTGVLEIEPLQAEVVKQIFQEYLNGMSITKLRDKLNSEGHTGKDKPWSYRALRATLANPVYTGKVKYNNQIFDGLHQAIISPELFQAVQSELEIRQKEAYQKNNNPRPFQSKYILSGIAKCGYCKTPLQVILGSVRKDGSRDIKYQCKNRFPRKTKGVTIYNDNKKCDSGFYYMSDIEAEVIDQISLLQLNNGALENLISINSEPVIDTTEFEKQLINIDNKIKRLSDLYINDMISLVEMKQRSENLKKDRDALKAKITSSNKTSTTDRLKTARKLIGNKPIESLSYDQQKNIINRIISRVYVTAETVDITWSL

SEQ ID NO: 5279 - protein, 559 aa, synthetic construct
MKTKLYSYIRFSSMKQADGSSYERQKRTAAEIAAKYDLELVTSYQDFGVSAFKGANSKTGALSRFLDEIGRSVPVGSWLVVENLDRISRQSIIEAQELFLSIIRRGITIVTGMDGRVYSRESVNANPIDLLLSVMLFARANEESQTKRNRTNSSALIKIKAHQENPQNPAVAIEEVGKNMWWTDTTSGYVLPHPTYFPVVQEIVELRKNGRSTAEILDHLNETYTPPPAVSNKKHSKWSRAMVERLFHTRALIGIKEVSVDGVNYELNNYYPRVIDDPTFYHLKKNIGARAWNFGDKEEVKPIPLLSGIGLLKCDHCGCAMVKVKGTNKRSDQYRYTCDATRSRRLDCEHPNWSFRGDQLEKAVLQLLADKIWIAEDKANPVPALKVQIDEISRKIDNLIALSAMTGATKELADQITALNSERETLYNQIKMAEEEMYSVDSQGWEKLAEFDLEDVYNEERLKVRFKIKQALRRIGCSRIDRNKNLFVLEYIDGKTQRVVIENSRGTRKGQIFIDLKTINDRQILESNGLVLHPCLDMLTDKNWKPEEEQAGPLQEFGI

SEQ ID NO: 5280 - protein, 559 aa, synthetic construct
MTFWDQHGQEVEISQADQKWLDDAYFTTQQMRLPVDSPRAALSYRVSTKGQVDHDDIPMQKIACRKFAQEHGWRVVLEKAEKGVSGSKVSASKRDVIQELRSEASKGNFDILLVYMFDRLGRIESETPFVLEWFVQHGIQMWSTHEGQQRIESHGDKLMNYIRFWQAAGESEKTSMRTRDRIRQIVSSGHFAGGFVPYGYRAINKGRVNKRDQPVKDLEIDPDEAAWVREVFTKVAEEGASGYAMAQMLNQRGLRTRQGAEFQSSNIKRMIQHEGYTGYIITKAARSEFMPQLQIIDEALFAKANEMISKRSKKALKDKNAAQKSSNPTLLAGIVVCAHCGAKMSAFLHTDRYKLADGSIRERVQAKYNCYQRGQHLRECDGQALYLAERVDRIVVAYADELFRKIKSEPYDKSIEQRIRQQDAEHNRQKQAAEKKIKAAQYKQQRYEDEVLKCLDGRSAFSQEMLARLIAQAEAEVRQAKDECAVLLQNNDDRTTVQQIRSYYDEFLGWANEFDLATVQRKRAILAQLFEKVEVGKGYRITIHVRGTYKQFLGEEPHE

SEQ ID NO: 5281 - protein, 558 aa, synthetic construct
MTKLYSYIRFSSMRQSDGSSYERQIRMAKEIADRYNLELVNDYQDLGVSAFKGANSKTGALSRFLDEIGRSIPVGSWLFIENLDRLSRQDIISAQELFLSIIRRGITIVTGMDNKIYSIETVTANPMDLMFSILLFIRGNEESQTKRNRTNSSALLKIKAHQQNPQNPAVAIEEIGKNMWWTDTTSGRVLPHPVYFPVLQKIVQLRQEGHSAGAILDYLNEHHEPPAPTSNKKHGKWSRAMVSRLFNTKALIGVKTVNVDGVEYELRDYYPRVLSDSEFYFLRKNIIKKAWDYSHDKEKVIPLLSGIGVLRCVHCGATMVKQTAANGKREQYRYCCDGRKSGRTDCPYPNWGFRAVTLEGAVLQLLADKIWIAEDKTNPIPEIQVKIDEISRKIDNLINLSAMMGATKELANQITDLNSQREALHEEIRLFEREMYSVDSQGWDKLAQFDLSDVQNEERLKVRMKIKGALHEIECSRIDSKKNLFVLVYLDGLRQRLVIENNRGLKKGQIFVDLKTINDRQILESAGMVLHPCIEMIIDADWKAPEEIPGLLSEEFGI

SEQ ID NO: 5282 - protein, 509 aa, synthetic construct
MRRAISYIRFSSERQLKGDSVRRQSKLVTDWLDKNPEFYLDSSLSFKDLGKSAFSGKHLKGGLGDFLTAIEKGLVKAGDTLLIESLDRLSRQDIDIASELLRRILRAGVDVVTLSDGEHYTKESLKDPLSLIKSILIMQRAHEESLRKSERVQAAWNRKKELISEGIKISKRCPAWLRLNDDRRTFTIIPDKVEVVKRAFDLRLQGLSFWAITRTLNDEGHLSLNQYTPKQKGWSDTAVKKLLRNRAVIGCFTPAGREEVQGYYPAIISESLFYRVQQLNTGQYGRASVSSNPLSVNLFRGIIKCSECGATIVLGGYALKRFGMYRCPNRSANRCSAKAISRKQTDATILYMLALCDRFETENTDTIDSLRLQREDLQRKISKMAELAIELDDMTIITEKLRDMKNALSKLNHDIEEETKRIKAITTGSLKDIDRTTKEGMIETQLLIKGVLKEIVIDAAKRRCKVTFHNGRAITLPITENPSKDVTEAIQSLSEVTERGLIDVDEVII

SEQ ID NO: 5283 - protein, 507 aa, synthetic construct
MKRVISYIRFSSERQAKGDSLRRQSKMVNDWLKAHPEYYLDQDLSFRDLGVSGFTGKHLKGGLGDFLTAIEKGLVKAGDTLLIESLDRLSRQDVDRASELLRNILRSGVDVVTLSDGEHYTRESLKDPLALIKSILIMQRAHEESLRKSERIQAAWDAKKEAAKAGIKVSKRCPAWLKLNDDRKSFSVIPEKVETVKRCFQLRLEGKSIWEIVRTLNAEGHRSMNQYKPGKFGQTSVQDLLKNRSVIGYFTPKGCEEISGYFPPIIPETDFYKVQQLSHSRYGKRSVSDKPLSVNLFKGVIRCSECGHALIITGFSDTRNGIYRCPLRNENRCSAKGLSRKQTDGTLLTLLSRLDRFDSNTTNTIDMLRLHREHISNNIEKLVQLSLEIEDLSAITIKLKQLKGELSQVDADIEKETQRLKSIDVGCLSDCDLTTKAGRIEAQLIIKSAVKEVVLNTAKRRCKVTFHNGRAITLPITENPSEDVTEAIQSLSEVTERGLIDVDVVEI

SEQ ID NO: 5284 - protein, 542 aa, synthetic construct
MAERVYCLYRVSTNKQVDHDENNQADIPMQRKACHDFAAKMGWVIVGEEQETGVSGYKVSADDRDKLQLIKKYAEQGKFDILLVFMFDRLGRKSDETPFVVEWFTKKGVRVWSVQEGEQRFESHTDRLTNYIRFWQADGESQKTSMRTKTALGQMVEEGRFRGGSAPYGYRLEKSGILNKRKHEVYMLVIDEDEARVVRMMFDLCISSGYGRWRLANFLNDHGIKNRKGQNWHDASVGGILHNPLYKGILRSGETYAGPFEALQIIAPDQFDLAQKLMLERTNERKERRTVPLNTTGQSLLSGNIFCGHCGGRLVLTTNGTTTRLADGTPVHKKRIRYVCYNKTRRRQECTGQTGYTMHILDGIVTEVLHQVFDKMQGASNDMIVGSAVQKQMAMIRSELQRARAENTKANKEYESLKAEVLKAIQGKSALPQDVLTEMLEDTRQKVLSTSERITTLTAELNDGNSKIEEMKAEFNRIVSWSKIFDESPMEVKKMICGYIIKKVSVFRDYRIKIEFNINVEQFLNGIDSIDECDTYELPMAQ

SEQ ID NO: 5285 - protein, 534 aa, synthetic construct
MNTIRPLVSLRSPTAYSYIRFSSAIQAQGDSLRRQTKLAQEYCQKHSLTLSEQSFTDLGVSAFNSANTNEDNGLGQFLKALEQGVIPSGSFLLVESLDRLSRAKVQTALRQLLNIIEYGITVVTLIDNRTYSSESETTDLIISLAVMERAHNESKTKSERIKAAWANKRANPTTTNRTSLAPFWLKLNKDKRTYTVIEKNAETVRRIFQMSINGHGIIGIARKLNEEKIPSPKGGSWSNTSICRILNSKAVIGEYTPNIGRTSTNTPISDYYPSIIDESTFYLSQSRKAERSKPKSAGRKTTFPNVFNQVAKCGVCGATMYYDNKSPTLKYLTCREFKKKNCTNRPIRIEFMHKFIIEQYLLPKNFQHHINMTTETSKQGDSISSIEEKIKEEEQALNQLMKIAKNLTSHIAIQHMENRDRKIMQLKEELEETKAQQAEVTLTPRIGFKQAQQLVANALQMEVNDKKPNCTDPELIREYRVTLNRSLKDVFNFLRIHNLKSASEITVECNQLTYAIDRKSLKLIHENLYWKSKV

SEQ ID NO: 5286 - protein, 571 aa, synthetic construct
MDTHAGVYGRQSARRANKSEVSTEDQLKEGVARARQMGATKIATYEDLGISAFSGDERPDFDRLIADCRAGRINLVIVYYVSRFSRLEVADALPVCQELLNLGVTIVSLTEGTFKRDNIMDLIHLIFRLDAAHQESKNKSVAVKRAKATSKELGGWSGPAPYGFETYEDTVTRTGEDGRTRTLVIKRLRPNKTECDVVSTHIFPPILEHMGKPYASGYMKFHPGSISGVTTTMNRKPIPTRGAKTGKERKASQWDRKTVTRILMDPRFAGYAAEAVYNKEGRGRKITGYRILRDEDGQPIPTPWPPIINPADWWRVQEWLQGRKDSNPNNKGDSLLSGLGIMRCTCTATWKATRYPATKDHPEGQRAYRCNIGQRTTTAHTGTPTITMDALDNYVANRIFGLIRAAEDDEDTLLILMEVTRRYGRLREAPETAGERDQILTERAEVRDGLASLFDDRDAGLFRTEFALARFRKSASALQDRLEALDARLAALEEASAPKLPLAQWQAWDQDPTGPGSWWARRTLEERREFVKLFVKRITIRPLRRARVAEPLHQRVTIEWHRPTEELDMVA

SEQ ID NO: 5287 - protein, 511 aa, synthetic construct
MKCAIYARVSTRREEQQNSLQNQIALAESLAREQGFTVVGRYIDDGISGAGMRNRSEILQLVEDAKKKKFDVIIAKSVSRLGRNPRNSMEMADQLERIPVRLILPEDNYDTETSNSRFMFNLKAILAEEENAKLSERIKLGLRSSTKQGKRRVSLPPYGYAVNPVTRKLEIDETAASIVREIFRLYLHEGRGMFKICNLFMQRGIPTPRATTGAANAGTKWHQNSIKGIHNNPVYTGKLVFHREETTGTLAESELYKIRREVKNDKHIVIENAHPAIVSDDDYNAVQELMKKKGKHKSNGKESLFSYIVKCPDCGSGMHFKPDRRNGAYVCGGYVKFTSSYCSSHIIEEQALLQTVKNDLKALIKDRVKIEHLYGLAEEKAKALQSSTTKELKRLDRELAQLDKRFDRLLVLHLKGAIFTEQFKQQNERITQQQQELANKKAELQSSLDAKKDLNEQLQAFRKEVERFTNLDIDDEQVMKQVLQRLIHKIEVFEGGKIKIHYYFSHPLPSN

SEQ ID NO: 5288 - protein, 520 aa, synthetic construct
MSRPTHLDVFVYLRKSRKDVEEERKALESSTPFDTLAKHRRELLELNRREGHNVIGIFEEIVSGEYLSERPEAQEMLRQIEDGLVEGVVVMDLDRLGRGDMIDAGTIFRAFKFSETLIITPTEVIDCNAEGAELLFGVKSIIAREELKQINKRLQGGRRRSAKDGKSITRRPPYGYDRDENLKLIPNPVEAPIVRKVFELMANGYGRQAVVKHLDSLGVKPPEGDLWEQSTVSHIVKNEAYLGHIIWGKEKHMKRNGKRVRKKVPPELWIRHENAHEAIVTQKEFDDANTALRDRWRTPTKEGVSLSNPLAGIIKCGICERALFLMRSPNRPNAQLRCINPRCQTIQKGALLPIIEQRVLQALETLADKSRLSENEVAASMHEKKEDMLETKQKQIAVLNKELADLNSMRETAFEMLEKKIYSEEVFLQRHKSISDKLREAEASISRLQKECAEELHRREHQQTIIPKVRSVLENYNSMEDMEQKNHLLKSILEKVLYIRKKEWTKKDQFELEIIPRFPV

SEQ ID NO: 5289 - protein, 558 aa, synthetic construct
MTKLYSYIRFSSMRQSDGSSYERQIRMAKEIADRYNLELVNDYQDLGVSAFKGANSKTGALSRFLDEIGRSIPVGSWLFIENLDRLSRQDIISAQELFLSIIRRGITIVTGMDNKIYSIETVTANPMDLMFSILLFIRGNEESQTKRNRTNSSALLKIKAHQQNPQSPAVAIEEIGKNMWWTDTTSGRVLPHPVYFPVLQKIVQLRQEGHSAGSILDYLNEHHEPPAPTSNKKHGKWSRAMVSRLFHTKALIGVKTVNVDGVEYELRDYYPRVLSDSEFYFLRKNIIKKAWDYSHDKEKVIPLLSGIGVLRCVHCGATMVKQTAANGKREQYRYCCDGRKSGRTDCPYPNWGFRAVTLEGAVLQLLADKIWIAEDKTNPIPEIQVKIDEISRKIDNLINLSAMTGATKELANQITDLNSQREALHEEIRLFEREMYSVDSQGWDKLAQFDLSDVQNEERLKVRMKIKGALHEIECSRIDSKKNLFVLVYLDGLRQRLVIENNRGLKKGQIFVDLKTINDRQILESAGMVLHPCIEMIIDADWKAPEEIPGLLSEEFGI

SEQ ID NO: 5290 - protein, 594 aa, synthetic construct
MDEFLNLRATNITETGKKLYAVAAARTSTEDQFIRGNSIIEQNSRINQWAEKNNVMIVAREDIDHSAYRGLDEDPRMLRLLEKAKSDSRVSLFLVDEKSRFARRKVLRVKWADELRKHCVEVIGVSEPQYDRKSVMGVWWEGMSETKDEARSAEIAYFTMRGMLRNFQERDLKTGNCYRNGGPPAYGYKNIHVTRGKDTRGKDIIKLLWDVEEEQAKIVRYVVLTCWLSKNMTLKSIRNHLQSTEPKWDGRRDLVLNAKGKPWSLSSIREMCVKALEGYYNGIGYFNRTGKDLVGSGQKWKNTEEWLRVENAHPKIISDEEYMELVKVKGPEMERRKKPGFRVPRAENSRYLFSGKNLVGENMFICLRCGGPMKGSPSGGYLYYICSNRDNQASCDNNAHLAQDEIEKIVVEHIKGFFTPAMLDEIVREAERLANTDDSEREEAEKYIKKSIEEKQRGIENILEAIKHAKDLVIMPTLTAELDRLQKEKTYLLNDLDELKEEMPKTAKIDKDLVFKKVNFLEKVLRDKDISNYDKKMAVRGFVKQLQYDPADNILHIYFWPSPVDQSSPEVLGELNQKAREIYSPALRGGDTQI

SEQ ID NO: 5291 - protein, 505 aa, synthetic construct
MPKTEEKQAVKAVIYARYSSDRQREESIEGQLRVCEDYARRNNITIVHTYADRAMTGRSDQRPEFQMMIRDAATMSFDIVLVYKLNRFARNRYDSARYKHKLKQYGVRVVSAMENIADDPSGILLESLIEGMAEYYSAELAENVTRGMTENALEGKWAGGIVPLGYKLDEKHHLVIDEPKAAIVRQIYQLALEGHNQKYIIDELNKHHYTNSAGRPFSYNTLRVILKNERYTGTFIWRDIRKENAIPVIIDKMTFEAVQKHMQFRKKNHIRSCSKDFHLTGKLFCGRCSSKMVGVSGTSKQGVLYYYYACTSHLKKKCPSKNIRQDALENLICKITTQILSKPEAIKAIAKQAMKMQKDKKESLEIQSLQNQIADINKKLKNCIQAVENGLISETMTNHIKNYENRLQGLKDEVSRQKLLEGSIHLTEQHIEFFFYSISQKLKTADKYKSILLSSLVRCVIVHENYIEIQFNYKNELPILQNPVKVESSYLNQMVTQERFELPTP

SEQ ID NO: 5292 - protein, 550 aa, synthetic construct
MLKREYLVGLGIEFILNYLRKSRQDEELEKRTKEDTLKAQKDLMDRFLEPIGIPYEQRSEIGSGDKIESRPVFQGVIRDLREKKYQAIAVKEISRMGRGSYTDMGVIYDLIQENRIFIITPYKVYDPRNPSDLRQIRFELFMSREEFETTRERLFGGRVNNAMGGMWVSGKAPFGFTYNKKTRKLEVDEEEAAVVRILFDYYVNGVPTKNGKRRDVSFRALATYLKRNTLIKTPKGKTDWHPIAIRQLITNERYNGVLRFRTTQRINGKRIARPEEEHIIRRDAVPRIISEELWHSAQEKVNESAHKPRTKMEFSPCELAGLCVCIKCGRRMIRQYSVQKYKTKEGKVSTYHKEFLWCTQPGCTFVKYRAVEEDLIATLQYFSALDNERLQDQIGKVIASNKKSQELTLSKEALSEHVNQRRKELKAREKFIYEKYESGKYTDEVFDERMAELKGELKKLEEMETAVEGVQEGEEEINVEAVRGNLESVLQQYESTNDKTEKNEILRSVFEHVVIEIIEKGRGRIPAKHMIYPVLKFNLLKSNSFGLMMV

SEQ ID NO: 5293 - protein, 523 aa, synthetic construct
MADQYCIYLRKSRADLEAEARGEGETLKRHKSILLQLSKKLGLDVTEIYSEIVSGESIADRPVVQQVLQEVEEGLWRGVLVMEVERLARGDTIDQGVVARAFALEGTLIVTPLKTYDPNNEYDQEYFEFGLFMSRREYKTINRRLQSGRIASVKEGNYIGNLPPYGYVKVKLEDGSLTLAHHSDQADIVRLIYQWYTVGAVDDDGQLKRLGTGAIAKKLNRMGIPSAKQSIWTVATINALLRNPVYTGKVKWGGRASVKKKTEKGIVKSRPRAKIEDIILVEGKHEAIIDQETFDLARKMLASKYHVPVPAGKIINPLAGLVRCAKCGRAMTYRPYNDRNIKPHIMCSNQMCTNKSSKFEHVEAAVLAWIKGWIAHHKSQWDVSEDRGAKDATQIKIKALGKMEEELNKLKKQKGSLHDLLEQGVYDMDTFLERSGVLSKRLDDQAASIAQLTQEIEQERQREAAQSDIVPKAENAIALYYETETMSGRNELLKTVIDHCVYNKEKHQREDDFTLEVYPKTLA

SEQ ID NO: 5294 - protein, 553 aa, synthetic construct
MKLLVTYIRWSTKEQDSGDSLRRQTNLIDAFYAKHKEVYYLLPAHRYVDKGKSGFHQQHKNQGSDFRRMFENVMSGVIPEGSLIVVENFDRFSRADIDTAIDDVRQILRKGVSILTLGDGELYDKSALTDPVKLIKHIIIAERAHQESLVKQKRIAQVWNHKTQLARELKKPMGKQAPGWLELSDDGSHYIIDEDKASLVNLIFDKRLSGMSMFAICKWLNEQGYPTINQRKVRISKTKKPDGNWSALSVKHILTSRSVLGYLPAKISKEDRKTVLREEIEGFYPQIVTDSKFYAVQQLLEETGKGKTSSGEHWLYVNILKGIIRCKCGLVMTPTGIRKPVYQGTYRCNGNKESRCNYGTVSRKLLDTQLCSRLFSKLSQLHDESSDTARLDELQRRLTTVDIELEKLTETLIQLPNITQIQEALRVKQEEKDELIAQLSREKARVKSVSSLDLSGLDMESVEGRTEAQIIIKRLVKEIVVSGNEKLVDIYLHNGNMIRGFPLNGKDDHTLTLEEATDEMQSLDDMLIFGEPVTRIYPAGDMEEVNADEVDYS

SEQ ID NO: 5295 - protein, 587 aa, synthetic construct
MTVTDAIKIGISYLRVSTKEQAEKGGQAEGFSIPAQREANRRKAESIGVVIVAEFIDAGESAKSADRPDLQRMLRYLAENPVDYVFVHKVDRLARNRVDDVEITLAIKKAGATLVSATENIDETPSGMLLHGIMSSIAEFYSRNLATEVHKGMSQKAKTGGTPGKAPLGYLNVVLRTLEGREERTVEVDPERAELISWAFEAFASGTWTLRSLADELETRGLTTKRTPKMPSRPIRPNVLHSILTNPYYRGEVVYQGVIYPGRHTPLTNLVTWQKVQDVLAANLVGERQRDHPHYLKSSVFCGDCGSRLIITNAKNRHGVVYPYFVCLGRHQKTTSCTRKALLITKIEKMVEDHWSTVRLAPELRDAIEEGLRSELATHRKEAEDEHKQLVAEKAKLTAQRQKLLEAIYSGAVPMDLIASEQQRITDQLTAIEARLGAATATFDAIEANLTRALDLARDCHAAYLASDPQLRRLFNQAFFTHLMIDEDGVHSEYAEPFDTLLDGDVLDAGRAALADRAEGQAKLREVLERPASSANKKTPSTLAGGLSVHLSTPVRGVEGSNTTTLVPPAGFEPATPALRSFLGAGL

SEQ ID NO: 5296 - protein, 520 aa, synthetic construct
MRNVTKIDQVDLSIFKRLRVAAYCRVSTDSNEQELSLDTQRKHYESYIKANSEWEYAGIYYDDGISGTKTAKRDGLLRLVEDCEKGLIDLVITKSISRFSRNTTDCLTLVRKLLNYDVYIIFEKENIHTGSMESELMLAILASMAESESRSISENEKWSIKKRFQNGTYVISYPPYGYANVNGEMVIVPEQAEVVKEIFAGCLAGKSTHVIAKELNEKGVPSKKGGKWTGGTINGILTNEKYIGDALFQKTITDAAFKRKRNYGEEEQYYCEEHHEAIIDRETFEKAKEAIRQRGLGKGNCSEDISKYQNRYAMSGKIKCGECGRSFKRRYHYTSHGRSYNAWCCSGHLEDSKSCSMKYIRDDDLKRVFLTMMNKLRFGNDLVLKPLLIAITTDNSKKNIHSVEEIEKEIAANEEQRNHLSTLLTRGYLERPVFTDAHNKLITEYEHLLAKRDLLYRMDDAGYTMEQKLKELVDFLNGTEPFTEWDDTLFERFIEKVNVLSRDEVEFEFKFGLRLKERMD

SEQ ID NO: 5297 - protein, 524 aa, synthetic construct
MAGAKNITVIPARKRVGNTATPDNKPKLKVAAYCRVSTDSDEQATSYDAQVEHYTEFIRKNFEWEFAGIYADDGISGTNTKKREEFNRMIEDTMAGKIDMIITKSISRFARNTLDCLKYIRQLKEKNVPVFFEKENINTMDSKGEVLLTIMASLAQQESESLSKNVKMGLQFRYQNGEVQVNHNWFLGYTKDENGHLIIDEEQAVVVRRIFREYLQGASLKSIADGLMADGIPTATGNKKWRGDGIRKILTNEKYMGDALLQKTYTVDVLTKKRVSNNGIVPQYYVENNHEAIIPRQLFMQVQEELLRRAHLKTENGKTKRVYSSKYALSSIVYCGKCGDLFRRVAWKARGASYNKWRCASRIEKGPKEGCDADAISEVELQNAVVRAINKTLGGREQFLLQLQHNIEEVLNGDSTATLEYIDQRMAKLQEKLVMCVNKNVEYDVIANEIDALREKKASVVTKDAEQEMLKKRIDEMRQFLQTQTNRVTEYDEQMVRRLIEKITVFDDKLIFEFKSGMTIELKR

SEQ ID NO: 5298 - protein, 523 aa, synthetic construct
MAVSRNVTVIPAIKRIGNNKNSESKPKIRVAAYCRVSTDSEEQASSYEIQIEYYTNYIKRNKEWELAGIFADDGITGTNTKKRDEFNRMIEECMAGNIDMIITKSISRFARNTLDCLKYIRQLKDKNIAVFFEKENINTMDSKGEVLLTIMASLAQQESQSLSQNVKLGIQYRYQQGEVQVNHKRFLGYTKDENKQLVIDPEGAKVVKRIYREYLEGASLLQIARGLEADGILTAAGKAKWRPETLKKILQNEKYIGDALLQKTYTVDFLSKKRVKNNGIVPQYYVENSHEPIIPRELFMQVQEEMVRRANIRGGKGGKKRVYSSKYALSSIVYCGQCGDIYRRVHWNNRGYKSIVWRCVSRLEEKGSECTAPTINEETLQAAVVKAINELLTNKEPFLSTLQKNIATVLNEENDNTTDDIDRRLEELQQQLLIQAKSKNDYEDVADEIYRLRELKQNALVENADREGKRQRIAEMTDFLNKQSRELEEYDEQLVRRLIEKVTIYEAKLTVEFKSGIEIDEEI

SEQ ID NO: 5299 - protein, 529 aa, synthetic construct
MTYQEGGELMKKITKIEGNQDYIFKPKTRVVAYCRVSTDSDEQLVSLQAQKAHYETYIKANPEWEYAGLYYDEGISGTKKENRSGLLRMLSDCETRSIDLIITKSISRFARNTTDCLEMVRKLMDLGVHIYFEKENINTGSMESELMLSILSGLAESESISISENTKWAIQRRFQNGTFKISYPPYGYQNIDGRMIVNPKQAEIVKYIFAEVLSGKGTQKIADDLNRKGIPSKRGGRWTATTIRGILTNEKYTGDVILQKTYTDSRFNRHTNYGEKNMYLVENHHEAIISHEDFEAVEAILNQRAKEKGIEKRNSKYLNRYSFSGKIICSECGSTFKRRIHSSGRREYIAWCCSKHISHITECSMQFIRDEDIKTAFVTMMNKLIFGHKFILRPLLNGLRSQNNAESFRRIEELETKIENNMEQSQMLTGLMAKGYLEPAMFNKEKNSLEAERESLFAEKEQLTHSVNGIFTKVEEVDRLLKFTTKSKMLTAYEDELFKNYVEKIIVFSREVVGFVLKCGITLKERLVN

SEQ ID NO: 5300 - protein, 452 aa, synthetic construct
MLRVALYIRVSTEEQALNGDSIRTQIEALEQYSKENDFNIVGKYIDEGCSATNLKRPNLQRLLRDVEKDKVDLVLMTKIDRLSRGVKNYYKIMETLEKHKCDWKTILENYDSSTAAGRLHINIMLSVAENEAAQTSERIKFVFQDKLRRKEVISGTIPIGYKIENKHLVIDKEKKYIVKAIFDEYEKSGSVRTLIETINNLHGELYSYNKIKNILRNELYIGIYNKRGFYVEDYCEPIISNKQFKQIQRILEKNKKTTPNKNIHYHIFSGLLKCKECGYTLKGNSSNVGEKLYLSYRCSTFYLNKNCVHNVTHNEKHIENYLLTNLKPQLHKHMVKLEAQNEKIRRNKKSNKKDEKKKIMKKLDKIKDLYLEDLIDKETYRKDYEKLQSQLDNITEEQESQIIDTSHIKKFLDIDINEMYSDLSRVERRRFWLSIIDYIEIDNNKNITINFI

SEQ ID NO: 5301 - protein, 506 aa, synthetic construct
MRTVITYLRFSSATQGAEGADSTRRQNELFKQWLRKNSDAQVVASFSDEGLSGYKGKHLTGQFGDMLARIESGEFSEGTVLLVEAIDRIGRLEHLETEALMNRIIAHGIEIHTLQDGLIYTRDALSDDLGISIIQRVKSYVAHQESKQKSFRVSQKWKQRAKLALAGEQRLTKMVPGWIDPDTLKLNEHAETVRLIFKLLLSGESLHNIARHLQANNISSFSRRKDANGFSVHSVRTVLRSESVIGTLPASQRNDRPAIPNYYEAAIDAATFNKAQEILDKNRKGRTPASDNPLTINIFKGLFRCQCGASVHPTGTKNKYAGVYRCNNHLDGRCDVPPLKRKPFDRWMIDNFLGMIDVGNDGESERKIAALQHEVEIVTARIKKATALLLEMDDITELKAQVKGLNQKRTEIQTTIDTLKRKTSLTDKELPQLKDIDLTTKAGRVECQLILSKHLKGLTLGKDSVTVTLQNDTEITIPTNPLPLNDGSPIFEIADKELLDIDAYQL

SEQ ID NO: 5302 - protein, 487 aa, synthetic construct
MKYAVYVRVSTDKDEQVSSIQNQIEICRYWIEKNGFEWDENSIYKDEAVSGTAWLERRAMQLILGKARKKELDTVVFKSIHRLGRDLRDALEIKEILLGHGVRLVTIEEGYDSYYEGKNDLKFEMYAMFASQLPKTLSVSISAALAAKVRRGEYTGGTVPYGYKIVDKKYVINQEEAEIVREMYELYDNGLGYLRISNALNDVGKYKRSGKLWTYSAVKLIITNPMYKGDYVMGRSTEVKVDGRKKRIQEPREKWAVFENHHPAIIERPLWDKINNPKINKKIKRRVAVTNELRGIARCIHCGSPFVLHTYKYKNKEGEELNYGYLTCGTYKLTGGRGCVKHSGLRYERLRSLVLRKLKEKERDLEKVFKLNDKDKHQEKQKKLRKEKKELEIKRERLLDLYLDGGSIDKATFTKRDANFAKNIKEKELEILKLDDVKALIVEQQKVKDAFKLLEDSENLYPVFKKLIARIDISQNGAIDIRYRFEE

SEQ ID NO: 5303 - protein, 484 aa, synthetic construct
MNTYTSQYIAIYCRVSTDDQVKEGVSLEEQQERLQAYCKAMNWSEDVVLYIEDGFSGKNIDRPHLKKLIEDVKAKEIKKILVTKLDRMSRKLLDLLTLIDLFQEHDVSFVSISESFDTNTPSGRLTLQVLGAVSEFERERIRERVFENMHHAASKGKWLTQHPYGYRLENKELVIHEDEAKVVQDIFGWYTQEGHGFYAIAKKLNILGIPSRQNKQWSIRSIKLLLSNPVYKGTLVWNRKDRSKKKEQLKQKEEWIIKENVVPSIVTEDVWHIAEKRMQQTSLSPRSQTSPHLLGGLLKCGKCGSGMSIGWSGSKNNRYRVYRCSANKNKGTCTSKQYRSEKLEELFKDGLSNLCESFRFSTHPSLSIQDQKNSVTNQVKVATAKKRYQRKVEAYASGLIELEDLQEEKRRLDTLNLALQPSSASNSNVNLSQIEEWIKNKLKNVHDALNVVPVEELKPLIQTIIEKIILNGEEELEIILHPII

SEQ ID NO: 5304 - protein, 544 aa, synthetic construct
MNQKKYQRIEDVIKTGSKAAFYARYSTDQQDESMQVHSAKNVLEEYGCEWQEDNKYIDQKTSAVKNTAEQREEFQRLIRDARKKKFDFIISYKSDRIARNTKEHYEFRREMNKLGIPVILSSTKEIYTEGEIVPQTVKDALTQIEPAITAERTRDTFESKVERGEWIGGEAPYGYSYDKSTGDFIMIEKEKRVVVEIFRLFKLGYGLQQITDKLSSGQWDVTQKWYKDKIKYIITNPFYSGYLTMNRYSKGKLNVNMSDWTWSEKQESIQMFMPREEWEFCFRLYLQRRESHTVRKINTPFWLRDILFCEECQSPFRTKNQRTTNKRKSGEKIKYGKMIYECKKCKLKLEMETIHEKFKIHMVPIIKNTLEKHREDFIQKTKRNIEEECESISQTQQELENTQMKLLNNIYKLDVKISQLYEDVMTGKMEIDKSMEDQKDIDTQDEQVENPNNKLIEMLLTGRSKKYSELEDGKRQQEMLKEKLKKLKNSIYVLENGVQDEIFHFSLEEEQIQSVRNFLLQFLQGVYVRKDLSLRYEVYENLIH

SEQ ID NO: 5305 - protein, 501 aa, synthetic construct
MKPNIKEVAIYLRKSRDESDGKEDVLAKHESLLLEYAKNHNLKYKIYKEIGSSEYIDSRPKMVRLLSDVSQKLYDAVLVVDLDRLSRGDLEEMGRISRVFRDSKTIVITPTKTYDFNNEDQALINNFEMVFANHEFRMIRKRMIRGKQQGTKAGKWTNGRPPFPYVYNRLTKELDVDPDKVKVYELMKKMFLEDMKATYEIAWKLNELGFKTNRNSYWYENTVRRILKNEVHLGKVVYGKTSGSGSKKKLNASGVQIKDRSEWIIAEGSHQPLKTEEEHQRILAILESRRYTPKGTRTNVQVLSKLIYCGKCNRVMSFTGKASGKKYVKTCLTTDRFGNRCHNRCLNVEVIYAQLFLDLEDYEQQLLNHEPKEEQSDNSTLQLALQNKYEELERLENGIERIKDLFIDEIIDKLEMQKRIEKQKQLMQTKKEEIRSIEQSLAVIENVRTDNDRLHAIREFKKAWDTEGINKRELNTLAKQLIDRIEYVREGNNIEMKIYFL

SEQ ID NO: 5306 - protein, 515 aa, synthetic construct
MKTAIYLRKSRADLEAEARGEGETLAKHRTTLLKIAKEMNLNVLSVREEIVSGESLVKRPEMLALLEEIEDNKYDVVLCMDMDRLGRGGMKEQGIILETFKRSNTKIMTPRKTYDLNDEWDEEYSEFEAFMARKELKIITRRMQRGRVASVEAGNYLGTHAPFGYDIHRLNKRERTLTINPEEASVVRMIFDWYANEDMGANAIRSKLNDLGYKSKLGNEWNPYSILDILKNNVYIGKVTWQKRKEVKRPDAVKRSCARQDKSDWIIADGKHEPIIPESLFEQVQEKLNSRYHIPYNTNGIKNPLAGIIKCAKCGYSMVQRYPKNRKETMDCKHRGCENKSSYTELIEKRLLEALKEWYINYKADFEKHKQGDRLKEIQVIQMNEAALRKLEKELVDVQKQKNNLHDLLERGVYTVDMFLERSNVVSDRITEITSTMENLKKEIKTEIKKEKVKKDTIPQVEHVLDLYFKTDDPKKKNSLLKSVLEKAVYKKEKWQRLDDFELVLYPKLPQDGDI

SEQ ID NO: 5307 - protein, 533 aa, synthetic construct
MKTAAIYARRSKVVETGDSIENQIQLCTNYLKNIGINNTLIYSDEGFSGKNTERPGFVRLMNDAKQKKFDTLVCYKVDRLSRNIGDFSNLINELEKNEISFISVIEQFDTRAAMGKAMMYICSVFSQLERETISQRVCDNMYSLATNGYWLGGEFPFGFSSSRKNFTDSSGNNRSYSELIPIEKEINLVKLIFNKYIELGSLSQVEKYLLQNNIKTRRGKDWSKASIKNIISNPVYVKANDKTIEYFKSQGIKTYGEPDDIHGILIYKKRKGKSGKIRNPDEWIYAVSTHEGIIDSDSWLEVQKIAEINKYKAPALGSSHKALLSGIIRCAQCGSSMRVSYGVPNKLTKKRKHYYMCTLKHNSGKVRCASKNVDGPEVDKLVINKLKELSLDKSYLVQRLKDYKESFATSSENILSKNIQNEISKNKEQIDNLVNNITLTEDPQLVQILLDKLTKLKSKSVELTNSLNKLNDELAKQDILINNCDNIIQKLKNLSTLIDDLDVPQKRSLLSSVIDKVFVDGDTGAVKIKFKTK

SEQ ID NO: 5308 - protein, 549 aa, synthetic construct
MKNKLKSSLNIESPKIAIYMRVSTSKQTDNQSLDTQEKTINSYIASRHDWINPICYKYIESHSASIKPKVSNTLKESSFDSLKRPKLRELFLDATIGKFDYVLCASHDRLTRNTNEGIILKHLFSRLNITLIYCRPGETISSENEALNKFFENLLVNIAALESNITGGRVTLANKHKIQNNFWAGGPPPFGYNLVSQPNNKRNSFLEINFEEARIVKKIFELYNLGCSYNEILTRLNRDFTLPPKRLWTHNTLKEILRNPVYTGFLVWNKRGGARKPNRHSHNDFVKSNLVEKNIIIPENEFLETQKLRNILSKDSKFLSTDFLLRDFLYCDKCNKKLLAKNYGNNKRFYYCHSHNNMEINKKCRSIKASKIESTILSNINDLINSSLQSEVQIEKFYDNYIENFNAELLDNKKSLEITTNQLKSSTDLLELCVNEINISKDNLTVDYENFNSNSTEFSFINALSEFQVITQTEIKSLKARKEYLTYKINSSPKSFDDFKSNLNKSFKLFKYDEEKQKLISSPRSFRLFLFKVVKKIILSDHEITIIFK

SEQ ID NO: 5309 - protein, 551 aa, synthetic construct
MDKKKVAIYARVSTVEQAEEGYSIDEQERLLREYCDKHDLEVYKSYSDRGISGKDIKHRPELKEMLKDSEENKFDMVLVWKINRLSRKLADVLKMVELFDKNNVTFKSYSEPFETNTPAGKMQFQMMALIGEFERGTIAQNVKMGMLARAREGKWCGNRVLGYDIVPVEGSLNKKRKETKLVINEKEAETVKLIFSEYSNGNGYKAITNKLNKLGYKTKKGNNFSVGSIKDILTNPVYIGKIRYNVRQDWSEKRRKNINPNPIIVDGLHDAIISEELWDKVQKILESKKGKPARIYDGEYPLTGILRCPVCGAGMVIMRTTNKLKDGTKKRITYYACGNWKNKGTAVCNSNAIRVDKANEYVFGKIEELLSNEKMIKSIIDNINKTRRSNVEPNKKKLEKIDKELSKLKIRKTKILEAYEDDLITKEELVERKSELDKNISALEEERQKLLITVTDENQTEVSYDVIKEILQSFGRVMSNCTSREKQKMLLHMIVSEITIGKDREIDSIKLKINDCLIDYLSNEEEVPMKGASSFMLRNMNTNIFNLYIDI

SEQ ID NO: 5310 - protein, 549 aa, synthetic construct
MKNKLKSSLNIESPKIAIYMRVSTSKQTDNQSLDTQEKTINSYIASRHDWINPICYKYIESHSASIKPKVSNTLKESSFDSLKRPKLRELFLDATIGKFDYVLCASHDRLTRNTNEGIILKHLFSRLNITLIYCRPGETISSENEALNKFFENLLVNIAALESNITGGRVTLANKHKIQNNFWAGGPPPFGYNLVSQPSNKRNSFLEINFEEARIVKKIFELYNLGCSYNEILTRLNRDFTLPPKRLWTHNTLKEILRNPVYTGFLVWNKRGGARKPNRHSPNDFVKSNLVEKNIIIPENEFLETQKLRNILSRDSKFLSTDFLLRDFLYCNKCNKKLLAKNYGNNKRFYYCSSHNNMEINKKCRSIKASKIESTILSNINDLINSSLQSEVQIEKFYDNYIENFNAELLDNKKSLEITINQLKSSTDLLELCVNEINISKDNLTVDYEDLSSSSTEFSFINALLEFQVVTQTEIKSLKARKEYLTYKINSSPKSFDDFKSNLNKSFKLFKYDEEKQKLISSPRSFRLFLFKVVKKIILSDHEITIIFK

SEQ ID NO: 5311 - protein, 533 aa, synthetic construct
MKTAAIYARRSKVVETGDSIENQIQLCTNYLKNIGINNTLIYSDEGFSGKNTERPGFVRLMNDAKQKKFDTLVCYKVDRLSRNIGDFSNLINELEKNEISFISVIEQFDTRAAMGKAMMYICSVFSQLERETISQRVCDNMYSLAANGYWLGGEFPFGFSSSRKNFTDSSGKNRSYSELIPIEKEINLVKLIFNKYIELGSLSQVEKYLLQNNIKTRRGKDWSKASIKNIISNPVYVKANDKTIEYFKSQGIKTYGEPDEIHGILIYKKRKGKSGKIRNPDEWIYAVSTHEGIIDSDSWLEVQKIAEINKYKAPALGSSHKALLSGIIRCAQCGSSMRVSYGVPNKLTKKRKHYYMCTLKHNSGKVRCASKNVDGPEVDKLVINKLKELSLDKSYLVQRLKDYKESFATSSENILSKNIQNEISKNKEQIDNLVNNITLTEDPQLVQILLDKLTKLKSKSVELTNSLNKLNDELAKQDILINNCDNIIQKLKNLSALIDDLDVPQKRSLLSSVIDKVFVDGDTGAVKIKFKTK

SEQ ID NO: 5312 - protein, 533 aa, synthetic construct
MKTAAIYARRSKVVETGDSIENQIQLCTNYLKNIGINNTLIYSDEGFSGKNTERPGFVRLMNDAKQKKFDTLVCYKVDRLSRNIGDFSNLINELEKNEISFISVIEQFDTRAAMGKAMMYICSVFSQLERETISQRVCDNMYSLATNGYWLGGEFPFGFSSSRKNFTDSSGKNRSYSELIPIEKEINLVKLIFNKYIELGSLSQVEKYLLQNNIKTRRGKDWSKASIKNIISNPVYVKANDKTIEYFKSQGIKTYGEPDDIHGILIYKKRKGKSGKIRNPDEWIYAVSTHEGIIDSDSWLEVQKIAEINKYKAPALGSSHKALLSGIIRCAQCGSSMRVSYGVPNKLTKKRKHYYMCTLKHNSGKVRCASKNVDGPEVDKLVINKLKELSLDKSYLVQRLKDYKESFATSSENILSKNIKNEISKNKEQIDNLVNNITLTEDPQLVQILLDKLTKLKSKSVELTNSLNKLNDELAKQDILINNCDNIIQKLKNLSALIDDLDVPQKRSLLSSVIDKVFVDGDTGAVKIKFKTK

SEQ ID NO: 5313 - protein, 549 aa, synthetic construct
MKNKLKSSLNIESPKIAIYMRVSTSKQADNQSLDTQEKTINSYIASRHDWINPICYKYVESHSASLKPKVSNTLKESSFDSLKRPKLRELFLDATIGKFDYVLCASHDRLTRNTNEGIILKHLFSRLNITLIYCRPGETISSENEALNKFFENLLVNIAALESNITGGRVALANKHKIQNNFWAGGPPPFGYNLVSQPNNKRNSFLEINFEEARIVKKIFELYNLGCSYNEILTRLNRDFSLPPKRLWTHNTLKEILRNPVYTGFLVWNKRGGARKPNRHSPNDFVKSNLVEKNIIIPENEFLETQKLRNILSKDSKFLSTDFLLRDFLYCNKCNKKLLAKNYGNNKRFYYCSSHNNMEINKRCRSIKASKIESIILSNINDLINSSLQSEVQIEKFYDKYIENFNAELLDNKKSLEITINQLKSSTDLLELCVNEINISKDNLTVDYEDLSSSSTEFSFINALLEFQVVTQTEIKSLKAHKEYLTYKINSSPKSFDDFKSNLNKSFKLFKYDEEKQKLISSHRSFRLFLFKVVKKIILSDHEITIIFK

SEQ ID NO: 5314 - protein, 537 aa, synthetic construct
MKKAAIYTRKSKFTEKGDSIESQIKLCSKYLDNINIKDYCIYTDEGFSGKNTDRPEFQRMLSDAKAKKFDVIICYKFDRISRNVSDFSNLINKLNELNISFISVVEQFDTNSAIGRAMMYLCTVFSQLERETISQRITDNMYSLATKGYWLGGETPTGFKSEKKFFNSNNKQKMYSSLVPIKEELDLVKLIFNKYLEFNSISKIEKYLLSNNIKTKRNKDWSKASISLILRNPAYVKADEETFKYIESTGSKVYGNPDGKHGLLIYKKNKGRKGAKHDISEWIYAVSEHEGIIDSDIWVAIQKQIKKNAILAPALGTSNIALLTGLIRCAKCNSPMRVAYGKRNPKTNKKNYYYVCTLKTKSGKTRCDSKNLPGLDLDNLILDKLKEMSLDKNTLLKELNKYKDTIESNFHNDVLKNIQNNISKNNSMIDNLLNNVALSTDSEVTAILLEKISKLKDENKLLTQKIDDLKSELEAQETLLNDCNSLITKLKYFSKFIDNSSIEEQKQLVSSVIEKVIADGDTGSIEIKFRPLLDFKI

SEQ ID NO: 5315 - protein, 502 aa, synthetic construct
MNNKICIYLRKSRADEELEKTLGEGETLSKHRNALLKFAKENKLNVTDIKEEIVSGDSLFFRPKMLELLKEIENNMYYGVLVMDIDRLGRGGMKDQGIILDAFKESKTKIITPLKTYDLDNEMDEELTEFKTFFSRRELKTINRRMQGGRVRSVEEGNYIATNPPFGYDITFIKKNRTLKINEYESNAVKLIFKLYTEGNGASFIANELNNLGYKTKLGNNFSPSSVLTIIKNPVYVGKIAWKRKDIKKSKTLGKVKDTRLRDVSEWIIADGKHQAIITNENWEAAQTILKGRYHIPYQLSNAPVNPLAGLITCGVCGKKMVMRNVRGINRLMCIYKCGNKSTRFDNVESDCLESLRDYLINYSAEIKNSIKKEDIDIYSNQITNLKKELTTLNNQRLKLFDLLERNLYDEATFLERSKNINDRIETITQTLKSLEKKVKKNSYTSYEEDIKYFKNVLDAYNLTKDISKKNNLLKSILYKVEYTKNNKGKDYEIKLFPKLRK

SEQ ID NO: 5316 - protein, 520 aa, synthetic construct
MLEEGQKLKCALYVRTSTTEQKDSLELQARYKNNNFDIDKIYSEEVSGRDILKRPEQIKLLNDCGIEVTSVQKQAVFITNDKKPLYDCIIVSNTSRWGRNVVQVKQIVEALHKKGVKLWFDDLGKFSDSKDLSLTLDMLFVLDENYSQTISHKVKSAMDKRKKEGYILANSRLIGYDRTEEGTLVKNKDSNMVKSIFEDYAYKNLAIRKIAEKYQLSTSTITTLLKNIKYAGFMAYGIKEHGWDFSKLEIVKSDKIEPIISEELFWKVQEVRRSRSRIAEGSRVTRNKIGVNNNTYSLSSKIVCTNCGKNFHRKDRGYWICGTHSKYPKKCTMPTVRENKILRYLKSPYGLKAIRNGLETTLEGELKKLQLESIEPIKNELAELKGKSSKLLDLYMDSLIDKTTFEKRNKLLKDGIEKLENELKIYSNKENYRIKLLELQKEAKSLLDEYEKILESSEPEKIFDRVSKIEVGKIMDIKKGKEVSYIKSVRFKDFKILEDHKLFDELIREEDTIRVEKQTI

SEQ ID NO: 5317 - protein, 533 aa, synthetic construct
MKTAAIYARRSKVVETGDSIENQIQLCTNYLKNIGINNTLIYSDEGFSGKNTERPGFVRLMNDAKQKKFDTLVCYKVDRLSRNIGDFSNLINELEKNEISFISVIEQFDTRAAMGKAMMYICSVFSQLERETISQRVCDNMYSLATNGYWLGGEFPFGFSSSRKNFTDSSGKNRSYSELIPIEKEINLVKLIFNKYIELGSLSQVEKYLLQNNIKTRRGKDWSKASIKNIISNPVYVKANDKTIEYFKSQGIKTYGEPDDIHGILIYKKRKGKSGKIRNPDEWIYAVSTHEGIIDSDSWLEVQKIAEINKYKAPALGSSHKALLSGIIRCAQCGSSMRVSYGVPNKLTKKRKHYYMCTLKHNSGKVRCVSKNVDGPEVDKLVINKLKELSLDKSYLVQRLKDYKESFATSSENILSKNIKNEISKNKEQIDNLVNNITLTEDPQLVQILLDKLTKLKSKSVELTNSLNKLNDELAKQDILINNCDNIIQKLKNLSALIDDLDVPQKRSLLSSVIDKVFVDGDTGAVKIKFKTK

SEQ ID NO: 5318 - protein, 521 aa, synthetic construct
MIPNRNVVIIPAMKRAGNNGNKNEVPKLRVAAYCRVSTDSEEQSSSYDVQIEHYTEFIKKNNEWAFAGIFADDGISGTNTKKREEFNKMIDECMAGKIDMIITKSISRFARNTLDCLHYIRKLKEKNVAVYFEKENINTLDAKGEIMITIMASLAQQESQSLSQNVKLGYQYRYQQGQVMVNCSRFLGYTKDENKKLVIVPEEAEIIKRIYREYLEGSSMDKIKKGLEADGVLTGAGGKRWHTSSIRKILSNEKYIGDALLQKTYTVDFLTKKRVKNNGIVPQYYVENNHEAIIPREIYMQVQEELVRRSRGHISSSGKRRNFSSSHAFSQIVFCGECGEIFRRVHWNNSGKKSIVWRCVSRLESTGLSCNARTVAEDILYEKSVEAINILLGQKSDFLPQLKKNIETVVFETSNEAVEKIDKKMLELQKELLQKANAKEDYNDVAGKIYRLREERHRALTEQAERKGSKQKLEEMEKFLNEQDGLLEEYDERLVRMLIDKVTVFDDMLTVEFKSGAEIEV

SEQ ID NO: 5319 - protein, 520 aa, synthetic construct
MLEEGQKLKCALYVRTSTTEQKDSLELQARYKNNNFDIDKIYSEEVSGRDILKRPEQIKLLNDCGIEVTSVQKQAVFITNDKKPLYDCIIVSNTSRWGRNVVQVKQIVEALHKKGVKLWFDDLGKFSDSKDLSLTLDMLFVLDENYSQTISQKVKSAMDKRKKEGYILANSRLIGYDRTEEGTLVKNKDSNMVKSIFEDYAYKNLAIRKIAEKYEISTSTITTLLKNAKYAGFMVYGIKKHGWDFSKLEIVKSDKIEPIISEELFWKVQEVRRSRSRIAEGSRATRNKIGVNNNTYSLSSKIVCTNCGKNFHRKDRGYWICGTHSKYPKKCTMPTVRENKILKHLKSPYGLKAIRNGLETTLEGELKKLELESIEPIKNELAELKGKSSKLLDLYMDSLIDKITFEKRNKLLKDNIEKLENELKIYSDKENYRIKLLELQKEAKSLLDEYEKILESSEPEKIFDRVSKIEVGKIKDVKKRKEVSYIKSVRFKDFKVLEDHQLFDELIREEDTIRVEKQTI

SEQ ID NO: 5320 - protein, 537 aa, synthetic construct
MKKAAIYTRKSKFTEKGDSIESQIKLCSKYLDNINIKDYCIYTDEGFSGKNTDRPEFQKMLSDAKAKKFDVIICYKFDRISRNVSDFSNLINKLNELNISFISVVEQFDTNSAIGRAMMYLCTVFSQLERETISQRITDNMYSLATKGYWLGGETPTGFRSEKKFFNSNNKQKMYSSLVPIKEELDLVKLIFNKYLEFNSISKIEKYLLSNNIKTKRNKDWSKASISLILRNPAYVKADEETFKYIESTGSKVYGNPDGKHGLLIYKKNKGRKGAKHDISEWIYAVSEHEGIIDSDIWVAIQKQIKKNAILAPALGTSNIALLTGLIRCAKCNSPMRVAYGKRNPKTNKKNYYYVCTLKTKSGKTRCDSKNLPGLDLDNLILDKLKEMSLDKNTLLKELNKYKDTIESNFHNDVLKNIQNNISKNNSMIDNLLNNVALSTDSEVTAILLEKISKLKDENKLLTQKIDDLKSELEAQETLLNDCNSLITKLKYFSKFIDNSSIEEQKQLVSSVIEKVIANGDTGSIEIKFRPLLDFKI

SEQ ID NO: 5321 - protein, 549 aa, synthetic construct
MKNKLKSSLNIESPKIAIYMRVSTSKQTDNQSLDTQEKTINSYIASRHDWINPICYKYIESHSASIKPKVSNTLKESSFDSLKRPKLRELFLDATIGKFDYVLCASHDRLTRNTNEGIILKHLFSRLNITLIYCRPGETISSENEALNKFFENLLVNIAALESNITGGRVTLANKHKIQNNFWAGGPPPFGYNLVSQPSNKRNSFLEINFEEARIVKKIFELYNLGCSYNEILTRLNRDFTLPPKRLWTHNTLKEILRNPVYTGFLVWNKRGGARKPNRHSPNDFVKSNLVEKNIIIPENEFLETQKLRNILSRDSKFLSTDFLLRDFLYCNKCNKKLLAKNYGNNKRFYYCSSHNNMEINKKCRSIKASKIESTILSNINDLINSSLQSEVQIEKFYDKYIENFNAELLDNKKSLEITINQLKSSTDLLELCVNEINISKDNLTVDYEDLSSSSTEFSFINALLEFQVVTQTEIKSLKARKEYLNYKINSSPKSFDDFKSNLNKSFKLFKYDEEKQKLTSSPRSFRLFLFKVVKKIILSDREITIIFK

SEQ ID NO: 5322 - protein, 494 aa, synthetic construct
MLKVATFSRTSTDNISQSKSIGNQEDVYKSWIEKNNCVLYKNYIDEGISGTKGRYRVEWKELIQDGKEKKYDILLSKSYSRFGRNMVETLSAIKELREAGIRIIFIEDNLDSTKDTTNFGLFSWLAEMESKKTSERIKTVFDNFKEKGKIYNCIAPWGYDYDIEKKNFVINEVEASIIRRIFKLYVQGNGTTRIANILTSEGIKGKNGGVIRGNTIKNTILNEVYVGTLVQGKSEGIDVTISKRNKIEQEKWIKHLNNHEAIITYETFIEANKIFKVNSEKAKKHRYSIKGIERSSNASLFSNLLICSNCGASITIRRKKGKKIHYNCSEYEKVGVSVGHTSNRIDEDFLVEYILFRLNELIERDFDIININANVDIKKELENQLQAVEKSINEQMKKTRNLINLYDEKVISMNQFKLENETISNTLDSLMKNKEILEDKIKNIPQETGSFKKDVESVLKIPVEQWNNSMLKTIIKKIYVNNDGTINVQWIIEG

SEQ ID NO: 5323 - protein, 523 aa, synthetic construct
MAVSRNVTVIPAIKRVGNNKTSESKPKIRVAAYCRVSTDSEEQASSYEIQIEHYTNYIKKNKEWELAGIFADDGITGTNTKKREEFNRMIEECMAGKIDMIITKSISRFARNTLDCLKYIRQLKDKNIAVFFEKENINTMDSKGEIMLTIMASLAQQESQSLSQNVKLGIQYRYQQGEVQVNHKRFLGYTKDENKQLVIDPEGAEVVKRIYREYLEGASLLQISRGLEADGILTAAGKAKWRPETLKKILQNEKYIGDALLQKTYTVDFLSKKRVKNNGIVPQYYVENSHEPIIPRELFMQVQEEMVRRANLRGRKGGKKRVYSSKYALSSIVYCDHCGDIYRRVHWNNRGYKSIVWRCVSRLEEKGSECTAPTINEETLQTAVVKAINELLANKEPFLSTLQKNIATVFNEENDNATNDIDSKLEELQQQLLIQAKSKNDYEDVADEIYRLRELKQNALVENAEREGKRQRIAEITDFLNEQSYELEEYNEQLVRRLIEKVTIYEDKLTVEFKSGIEIDIEI

SEQ ID NO: 5324 - protein, 534 aa, synthetic construct
MKTAAIYARRSKVVETGDSIENQIQLCTNYLKNIGINNTLIYSDEGFSGKNTERPGFVRLMNDAKQNKFDTLVCYKVDRLSRNIGDFSNLINELEKNEISFISVIEQFDTRAAMGKAMMYICSVFSQLERETISQRVCDNMYSLATNGYWLGGEFPFGFSSSRKNFTDSSGKNRSYSELIPIEKEINLVKLIFNKYIELGSLSQVEKYLLQNNIKTRRGKDWSKASIKNIISNPVYVKANDKTIEYFKSQGIKTYGEPDDIHGILIYKKRKGKSGKIRNPDEWIYAVSTHEGIIDSDSWLEVQKIAEINKYKAPALGSSHKALLSGIIRCAQCGSSMRVSYGVPNKLTKKRKHYYMCTLKHNSGKVRCASKNVDGPEVDKLVINKLKELSLDKSYLVQRLKDYKESFATSSENILSKNIQNEISKNKEQIDNLVNNITLTEDPQLVQILLDKLTKLKSKSVELTNSLNKLNDELAKQDILINNCDNIIQKLKNLSALIDDLDVPQKRTLLSSVIDKVFVNGDTGAVKIKFKSFN

SEQ ID NO: 5325 - protein, 424 aa, synthetic construct
MIITKSISRFARNTLDCLKYIRQLKDKNIAVFFEKENINTMDSKGEIMLTIMASLAQQESQSLSQNVKLGIQYRYQQGEVQVNHKRFLGYTKDENKQLVIDPEGAEVVKRIYREYLEGASLLQISRGLEADGILTAAGKAKWRPETLKKILQNEKYIGDALLQKTYTVDFLSKKRVKNNGIVPQYYVENSHEPIIPRELFMQVQEEMVRRANLRGRKGGKKRVYSSKYALSSIVYCDHCGDIYRRVHWNNRGYKSIVWRCVSRLEEKGSECTAPTINEETLQTAVVKAINELLANKEPFLSTLQKNIATVFNEENDNATNDIDSKLEELQQQLLIQAKSKNDYEDVADEIYRLRELKQNALVENAEREGKRQRIAEITDFLNEQSYELEEYNEQLVRRLIEKVTIYEDKLTVEFKSGIEIDIEI

SEQ ID NO: 5326 - protein, 549 aa, synthetic construct
MKNKLKSSLNIESPKIAIYMRVSTSKQTDNQSLDTQEKTINSYIASRHDWINPICYKYIESHSASIKPKVSNTLKESSFDSLKRPKLRELFLDATIGKFDYVLCASHDRLTRNTNEGIILKHLFSRLNITLIYCRPGETISSENEALNKFFENLLVNIAALESNITGGRVTLANKHKIQNNFWAGGPPPFGYNLVSQPNNKRNSFLEINFEEARIVKKIFELYNLGCSYTEILTRLNRDFTLPPKRLWTHNTLKEILRNPVYTGFLVWNKRGGARKPNRHSPNDFVKSNLVEKNIIIPENEFLETQKLRNILSKDSKFLSTDFLLRDFLYCNKCNKKLSAKNYGNNKRFYYCHSHNNMEINKKCRSIKASKIESTILSNINDLINSSLQSEVQIEKFYDNYIENFNAELLDNKKSLEITINQLKSSTDLLELCVNEINISKDNLTVDYEDLSSSSTEFSFINALLEFQVVTQTEIKSLKARKEYLTYKINSSPKSFDDFKSNLNKSFKLFKYDEEKQKLISSPRSFRLFLFKVVKKIILSDHEITIIFK

SEQ ID NO: 5327 - protein, 549 aa, synthetic construct
MKNKLKSSLNIESPKIAIYMRVSTSKQTDNQSLDTQEKTINSYIASRHDWINPICYKYIESHSASIKPKVSNTLKESSFDSLKRPKLRELFLDATIGKFDYVLCASHDRLTRNTNEGIILKHLFSRLNITLIYCRPGETISSENEALNKFFENLLVNIAALESNITGGRVTLANKHKIQNNFWAGGPPPFGYNLVSQPSNKRNSFLEINFEEARIVKKIFELYNLGCSYNEILTRLNRDFTLPPKRLWTHNTLKEILRNPVYTGFLVWNKRGGARKPNRHSHNDFVKSNLVEKNIIIPENEFLETQKLRNILSKDSKFLSTDFLLRDFLYCDKCNKKLLAKNYGNNKRFYYCHSHNNMEINKKCRSIKASKIESTILSNINDLINSSLQSEVQIEKFYDNYIENFNAELLDNKKSLEITTNQLKSSTDLLELCVNEINISKDNLTVDYENFNSNSTEFSFINALSEFQVITQTEIKSLKARKEYLTYKINSSPKSFDDFKSNLNKSFKLFKYDEEKQKLISSPRSFRLFLFKVVKKIILSDHEITIIFK

SEQ ID NO: 5328 - protein, 523 aa, synthetic construct
MAKVTTIPATISRFTATPINEKKKRRTAAYARVSTDSEEQLTSYSAQVDYYTNYIKSRDDWEFVSVYTDEGITGTNTKHREGFKRMVADALAGKIDLIVTKSVSRFARNTVDSLTTVRQLKEKGVEIYFEKENIWTLDSKGELLITIMSSLAQEESRSISENCTWGQRKRFADGKVTVPFKRFLGYDRGPDGNLVLNKDEAVIIRRIYSMFLQGMTPHGIAARLTADGIKSPGGKDKWNAGAVRSILTNEKYKGDALLQKSYTVDFLTKKKKVNEGEIPQYYVEGNHEAIISPEVFEMVQQEMERRSKRGRRSGVHLFSGKIRCGECGSWYGSKTWHSNDKYKKIIWQCNHKFDGDHKCTTPHLTNEDIHRYFISAVNQLLAQKDTIIASLTGGLALAFDLTPLQAQETALIEEVQMLADAVEKCIYENAHVALDQTEYQKRYDGLVHRYDEAKVKLGAITEQIADKKARRGTIEEFLKVLREQDGLVTDFQTNLWCGLVDFMTVYSADDVRITFKNGAEIKA

SEQ ID NO: 5329 - protein, 588 aa, synthetic construct
MRIVNKIEAKTPQMPRRKRVAAYARVSMESERLQHSLSAQVSFYSSLIQSNPAWEYVGVYADNGITGTKAEAREEFNRMIADCEAGKIDIVLTKSISRFARNTVDLLNTVRRLKELGVSVQFEKERIDSLTEDGELMLTLLASFAQEEIRSLSDNVKWGTRKRFEKGIPNGRFQIYGYRWEGDHLVIHEEEAKIVRLIYDNYMNGLSAETTEKQLAEMGVKSYKGQHFGNTSIRQILGNITYTGNLLFQKEYVQDPISKKSRINRGELPQYFVENTHEAIIPMEVYQAVQTEKARRRELGALANWSINTSCFTSKIKCGRCGKSYQRSNRKGRKDPDANYTIWVCGTRRKTGNAKCQNKDIPEQILKEACAVVMGLDTFDEIIFSEQIDRIEIPAPNEMIFYFKDGHIVPHHWESTMRKDCWTDERRAAKGRYVQEHQLGPNTSCFTSRIRCDSCGENYRRQRSRHKDGSFDSVWRCASGGKCQSPSIKEDALKNLCADAMGLEEFSETVFREQIVCIHITAPYQLSIRFFDGHTFETAWENKRKMPRHTEERKQHMREVMIQRWREKRGESNDNTGDDKPIHGNADQ

SEQ ID NO: 5330 - protein, 575 aa, synthetic construct
MTKRKLYSYVRWSSDRQSKGTSLERQTAKAKEFAHSHNLELVELLDAGLSAYRGKNTTQGALGGFIQAVESGAIPNDSYLFVENLDRLSRQDILTANKLFSHLLELGLTVVTGMDGRIYTRQSVTANPTDLMLSILLFSRANEESATKQKRVYGNIAALVERHKAGLPTTIKTAGSHVWWVDASGDKHTAVQPHPTLWKAARKAVELFLDGYSAHAVCDYLNEHYDAPPVRVTKATNNPDNLGKWSYPLLRRMKTSRTLIGERTINAGDITYTLENYYPPLCSPTEFAQLQDLNENNKLTQGPKKTRITLLSGLGILKCGHCGGAMTFMIGTKGKIRYMCANGKDRIGNCKAWSIGLDILERTLVPALVRGYMDYTLGGNAKGDDIKESIQSAQEALQAIESQIENITNAITLGGNLAPLVERMGALSKVKDSQLLEVERLNRLALLSESESGAIDKITDFILQIRPNVLTDLNHPLRLQLREAVRAVIESCTVHKREDRGLAIVYTIKGSPFRTVHAFVAANRGHYKETVVNIGSDGQPLPDVGDPQKFDDAITKIVDEMGLPPIDGGLMWARR

SEQ ID NO: 5331 - protein, 503 aa, synthetic construct
MPQRNNGIAYSYVRFSSKRQELGDSLRRQTEMAEEYAIKNGLKLSSKNFQDLGISAFREGKRASLVDMLAAIEEGQITAGSTIIIEALDRLSRRGIDATLDTVKEILRKDVQVVSLSDGLLLTKNSLNDLQSVIRIAVAADLAHKESERKAIRLRETKGQQRQAALSGKPINKILPFWLQRTETGYAFSDKAGVARQIVQLKQEGKGSNMIAKALNKLGIAGVRTAQWNHASITKMLKNPALYGAYQTGETTKDRELIKLELVEAYYPALISKEEWLLLQSDQSKSKRGRRSADNPYSGLLRCECGGALVKRKHTVKEKLYVYHGCLNAKDGRCTQNISIKGLDGALTTILGRLEFKKRQTLDQSIHQERQQLEARINDLNSKLQVLDDIPLSVIKSIGTMESRLKEITEQIAKDEREQRGIEAVKSEKLSSITDGLELNLLLKRVLKSITVIRSGNGWAVKVLHLSGHKQNFLMVDGEIKFLSDTIALQNLLAGFREATENN

SEQ ID NO: 5332 - protein, 503 aa, synthetic construct
MPQRNNGIAYSYVRFSSKRQELGDSLRRQTEMAEEYAIKNGLKLSSKNFQDLGISAFREGKRASLVDMLAAIEEGQITAGSTIIIEALDRLSRRGIDATLETVKEILRKDVQVVSLSDGLLLTKNSLNDLQSVIRIAVAADLAHKESERKALRLRETKGQQREAALSGKPINKILPFWLQRTEAGYAFSDKAGVARQIVQLKQEGKGSNMIAKTLNKLGIAGVRTAQWNHASITKMLKNPALYGAYQTGETTKDRELIKLELVEAYYPALINKEEWLLLQSDQSKSKRGRRSANNPYSGLLRCECGGALVKRQHTVKGKLYVYHGCLNAKDGRCTQNISIKGLDGALTTILGRLAFKKKQTLSQSIHQERQQLEARINDLNSKLQVLDNIPLSVIKSIGTMESRLKEITDQIVKDEREQRGIEAVKSEKLSSITDGLELNLLLKRVLKSITVFRSGNGWAVKVLHLSGHKQNFLMVDGEIKFLSDTIALQNLLAGFRATTENS

SEQ ID NO: 5333 - protein, 452 aa, synthetic construct
MLRVALYIRVSTEEQALNGDSIRTQIEALEQYSKENDFNIVDKYIDEGCSATNLKRPNLQRLLRDVEKDKVDLVLMTKIDRLSRGVKNYYKIMETFEKHKCDWKTILENYDSSTAAGRLHINIMLSVAENEAAQTSERIKFVFQDKLRRKEVISGTIPIGYKIENKHLVIDKEKEYIVKSIFDEYEKLCSVRSLIDIINNLCGELYSYNKIKNILKNELYIGIYSKRGVYVENYCEPIISKEQFKRIQRILEKNKKSTPNKNRYYHIFSGILKCKECGRTLKGNSSNVREKLYLSYRCSTFYLNKNCIHNVTHNEKHIENYLLTNLKPQLHKHMVKLETQNEKIRQNKKSNKKDEKKKIMKKLDKIKDLYLEDLIDKETYRKDYEKLQSQLDNITEEQESQIIDTSHIKKFLDIDINEMYNNLSRVECRRFWLSIIDYIEIDKDKNITINFI

SEQ ID NO: 5334 - protein, 558 aa, synthetic construct
MTKLYSYIRFSSMRQSDGSSYERQIRMAKEIADRYNLELVNDYQDLGVSAFKGANSKTGALSRFLDEIGRSIPVGSWLFIENLDRLSRQDIISAQELFLSIIRRGITIVTGMDNKIYSIETVTANPMDLMFSILLFIRGNEESQTKRNRTNSSALLKIKAHQQNPQSPAVAIEEIGKNMWWTDTTSGRVLPHPVYFPVLQKIVQLRQEGHSAGVILDYLNEHHEPPAPTSNKKHGKWSRAMVSRLFNTKALIGVKTVNVDGVEYELKDYYPRVLSDSEFYFLRKNIIKKAWDYSHDKEKVIPLLSGIGVLRCVHCGATMVKQTAANGKREQYRYCCDGRKSGRTDCPYPNWGFRAVTLEGAVLQLLADKIWIAEDKTNPIPEIQVKIDEISRKIDNLINLSAMTGATKELANQITDLNSQREALHEEIRLFEREMYSVDSQGWDKLAQFDLSDVQNEERLKVRLKIKGALHEIECSRIDSKKNLFVLVYLDGLRQRLVIENNRGLKKGQIFVDLKTINDRQILESAGMVLHPCIEMIIDSDWKAPEEIPGLLSEEFGI

SEQ ID NO: 5335 - protein, 482 aa, synthetic construct
MEEWLEANPDYLLDDLTYKDLGISAYHGTHATRGAFSDFMDAVEGGYIEYGTALLVESLDRLSREKIGEATERLKSILKAGIDVVTLSDHTHYTKDSLDDPYSLIKAILIAQRANEESEIKSRRMKSAWKKKREEAAASGKIITRSCPRWLKVNQRGDSFELIPEHARTIKEIFRLRLKGQSLNGIVKMLNDKKVITLTGEIGVWNPSTIEKILVNKALIGINVPSYRTIANGIQEIPGYFPRVISDTTFYAVREFRKPPFGKDKHTDNPYLINLFRSVMKCKVCGHSIILNSIDGKGMGYYVCPMRRLHRCNTPSIRRDIADVNLITTVVIHADKFQTNSTSRGSTRSLQDRNIEVLKSIDKLIEALQIAPEVTALAEKIKALHKEFKSNEVTMRVAKNKQRLAVSEDVTNLDLTLKEDREKCRRFIFKTFKEIVLDTENKTCDICFSNGFKLINFPLLKSTNSEQLISALAYTDDSTLIL

SEQ ID NO: 5336 - protein, 506 aa, synthetic construct
MRHVITYLRYSSAIQGAEGADSTRRQNDLFKQWLKKNSDAQVVASFNDEGLSGYKGKHLSGQFGDMLSRIESGEFSKGTILLVEAIDRIGRLEHLETEALMNRIIAHGIEIHTLQDGLIYTRDALSDDLGISIIQRVKSYLAHQESKQKSFRVSQKWKQRAKLALAGEQRLTRNVPGWIDPETFKLNEHAETVRLIFKLLLDGESLHNIARHLQSNGIRSFSRRKDANGFSVHSVRTILRSETTIGTLPASQRNDRPAIPNYYEAAIDAATFNKAQEILDKNRKGRTPASDNPLTINIFKGLFRCQCGASVHPTGTKNKYQGVYRCNNHLDGRCHVPPLKRKPFDKWMIDNFLGMIDVGNDGEAEGKIASLQHEVEIVTTRIKKATALLLEMDDIDELKIQLKELNQKRTELQTTIDNMRRKASLTDKELPQLKDIDLTTKAGRVECQLILSKHLKGLTLGKDSVTVTLQNDTEITIPTNPLPLNDGSPIFEIADKELLDIDAYQL

SEQ ID NO: 5337 - protein, 516 aa, synthetic construct
MKTAFGYGRFSTDRQREESIEAQEIAIRDFCKRNKIKLLEFYADRGLSGTNDNREQFQNMLDEADKGKVDFVVVHKLDRFARNRYDSAVVRKRLADHGVKLLSVLENVNDDSPEDVILMSVLEGMAEYYSKNLSREVKKGMYRNVEKGIYNGGFLPYGYKVNNETRMIEIDDYEASIVKEIYNLYLDNNGYVTIANKLNERGLKTKRGNDWTADTIGKLLKNEKYKGTYFHGKSKVIRNGRKQKVIKNTEWKQEETYPIIIEAEIWETARRKRTMNKPKGGKKHNYLLVGYVKCKKCGANYIGSSSAPYENHVYRFYTCSKHNRKKCDAKIINADMLEATVIDFIKETFFNKESLNEYINEGLELLNDKSDNEERINSLKKEIQACDKKLDNILDVYLDEEMSKEKYLARKNKIEDKMQYLQSELEYLTTTAEVLTKKDVKKAINYLLKNVDDSYEYKKMMVDTFLDHVIVDDETFEITLIYNLFRKSCNFLCNDDSTNPYSSKKAFTASPPLQIN

SEQ ID NO: 5338 - protein, 521 aa, synthetic construct
MAKITKIEKRQQNNRVKKMRVAAYARVSTESAEQLLSLEVQKEHYENYIKANSYWEYAGLYFDEGISGTKIEKRESLLKLLDDCEKGKIDRVITKSISRFARNTVDCLEMVRKLTGLGVAIYFEKENIDTEHMSSELMLSILSSIAESESRSISENSKWSLKRRFENGTYVISYPPYGYENVDGKMVVVPSEAEIVKEIFRMAISGLGSYLIANELNKRGIATKKNIKWHSSTVQAILKNEKYTGDVIFQKTYTDENFNRHQNRGEKVRYMMKNHHEPIISHEDFELVKTVVGQRRKEKNIDGSDNKYQKRYALSGKVYCGECGSKVKRCMRYAQSGDYAAWTCVRHIEDKKSCNMKYIREEHIKAAYVQMMNKLIAGKNTMLKPFVDTLRGGNNKDRLRHILELDKKIEKLNEQAQVLTKLLSSGYIELDVFYAENNNISLELDDLEKEKASVSSIVSGDLNHLNEAQKLLRFINKSDCIKDFIDDTFSEFVEKITIEDRLKFTFHLKCGLNLTEEVVVK

SEQ ID NO: 5339 - protein, 523 aa, synthetic construct
MNSKVIVIPAKKKKGNSIKESEKKKLRVAAYARVSTDSDEQATSYDTQVDHYTNYIKKNPDWEFAGVFSDEGISGTYTKKRAGFNKMIEEAMEGNIDYIITKSISRFARNTLDCLKYIRKLKENNIPVYFEKENINTMDAKGEVLLTIMASLAQQESQSLSQNVKLGVQYRFQQGQVQVNHNRFLGYTKDEEGKLVIVPEEAKIIKRIYREYLEGASLRDIKEGLEKDKIVNGAGNKKWHVSNLNQILTNEKYMGDALLQKTYTVDFLNKKRVKNDGIAPQYYVENNHEAIIPKEIFMRVGEEMYRRANMVSGKGKRRIYSSKYALSSIVYCSKCGDIYRRIAWNNRGKKYTVWRCCTRVTHGPDACHARTIKEEDLQEAVVEAINKLISESNELKEIIKENIEKVITGDGTSQIEEIDKEMLKVQEELLKVANAKKDYTDLVERVEELRNEKEKILLEMAEEKNEQSRLKELEEFLDNQELEIESYDEELVRKLIDKIVIYEENLKVVFKSGLEVEIDKDKK

SEQ ID NO: 5340 - protein, 520 aa, synthetic construct
MKKITKIEANQKEESILRVAAYARVSTDEEAQLVSLKTQKAHYEKMIAENKSYTFAGLYFDEGITGTKKECRDGLLKMLKDCEDGKIDFILTKSISRLARNTTDCLEIVRRLLDLNIGIYFEKENIDTRTMESELMLSILSSLAESESRSISENNKWSIKKRFQNGTFIISSPPYGYENIDGKMVVNEEEGKIIKEIFEQYLSGKGTHKIAEDLNKRKIKGQKGAKWHGSTINGILKNEKYIGDVIYQKTYTDENYNRHKNKGEEDQYKIIDNHEAIVSREDFEKVQDLIRIRAIAKGNGENTKRYQNRYSLSGKIKCGECGSSFKRRHHYNGKEKYIAWTCSEHLKDINKCYMKFIKDKDIKLAFATLVNKLVFGKDSILTPLLESLKRVDSKEEVEKINGIEERLEKLKERKEVLSKLITSGVLDASVYAKESSEISSEESYLLREKERIKKAILGNDEEIRELEKLIGILGKSEMIDHFEGDLFEEIIDHIQVVNRETLDFHLKCGLVLREEVKNNV

SEQ ID NO: 5341 - protein, 520 aa, synthetic construct
MNSKVIVIPAKKKKGNSIKESEKKKLRVAAYARVSTDSDEQATSYDTQIDHYTNYIKKNPDWEFAGVFSDEGISGTYTKKRAGFNKMIEEAMEGNIDYIITKSISRFARNTLDCLKYIRKLKENNIPVYFEKENINTMDAKGEVLLTIMASLAQQESQSLSQNVKLGFQYRFQQGQVQVNHNRFLGYSKDEDGKLVIVPEEAKIIKRIYREYLEGASLRDIKEGLEKDKIVNGAGNKKWHVSNLNQILTNEKYMGDALLQKTYTVDFLNKKRIKNDGIAPQYYVENSHEAIIPKEIFMRVGEEMYRRTNMVSGKGKRRIYSSKYALSSIVYCSKCGDIYRRIAWNNRGKKYTVWRCCTRVTHGPEACEARTIREEDLQEAVVEAINQLISESSQLKEIIKENIEQVITWNVSSRIEEIDKEMLKVQEELLKVANAKKDYTDLADKVEELRNEKEKILLNIAEEKNEQNRLKELEEFLDNQELEIESYDEDLVRKLVDKVVVYDEELKIVLKSGVEVNVCV

SEQ ID NO: 5342 - protein, 520 aa, synthetic construct
MKKITKIEANQKEESILRVAAYARVSTDEDAQLVSLKTQKSHYEKMISENKSYTFTGLYYDEGITGTKKECRDGLLKMLKDCEDGKIDFILTKSISRLARNTTDCLEIVRRLLDLNIGIYFEKENIDTRTMESELMLSILSSLAESESRSISENNKWSIKKRFQNGTFIISSPPYGYENIDGKMVVNEEEGKIIKEIFEEYLAGKGTHKIAENLNKRKIKGQKGASWHGSTINGILKNEKYTGDVIYQKTYTDENYNRHKNKGEEDQYKIIDNHEAIVSRENFQKVQDLIKIMAIAKGNGEDTKRYQNRYSLSGKIKCGECGSSFKRRHHYNAKDKYIAWTCSEHLKDINKCSMKFIKDKNIKLAFVTLVNKLVFGKDSILIPLLETLKRVDSKEEVEKINKIEENLEKLKDRKEVLSKLITSGVLDASIYAKESSEISSEESYLVKEKERCKKAILGNDEEIRELEKLIGILDKSKMLDHFESELFVEIIDHIQVFNRETLDFYLKCGLVLREEVKEDV

SEQ ID NO: 5343 - protein, 540 aa, synthetic construct
MKQPYNTTIYNTALYMRLSRDDENYGDSVSIETQRTILQQYAKEQGLHVVGEYVDDGWSGTNFERPDFQRMMDDMEAGKVNCIVTKDLSRFGREHVMMDYYLEFLFPEKRVRYIAVAENEDTEKGLSDFVPFKNLFNEWFAKDTSRKVKAAFKAKFATGQRIGAYAPIGYRKHPEIKNKLIIDEETRWIVEKIFDLAIHGRGAASITRILIAEKVPTPGFINFQRDGTFANIYAGAPEEKSYAWTIAQVKSIMKDETYIGHTIHYRETNISFKNKRRVRKPQSEWVRVENTQEPIISEQVFRQVQEQIANRRRKCKDGTTQIFSGLVKCADCGWSLSYGENRQNSKPYGHYHCSKYGQGTRQCSMHYIRYDVLYAYVLSRLQYWSGLVQHDEERLLKQLLNATDKGQAAARKKQAAELKKAEKRKAEVDTLFARTYEDWAAGRITEYNFSMLSGKYQSEQAELDEKIEQLQSAIATESQNAVDAEKWIALMKECVNPTELTAELLNMLIEKIVVHEAVKGEDGSREQEVEIFYRFIGKID

SEQ ID NO: 5344 - protein, 486 aa, synthetic construct
MKLRAILYLRLSVSDDASTSIARQERDLRELAEREDWEIVAVLTDDGISGRKVRANALEALRQLRTGEADVLAVWKLDRWTRQGLSAVGDLVDTLDSRKGEALFVALKDGLRSDQPAWRMIAVVLAETARTEAENTALRAKSSFKTLRHGGRFSGGMVPYGYRTAPAPDGPGRVLEVDPAEAKIVREIADRILDGESLTKITTWLNVNGIPSAKSEYRKALREGRPADGADRGTWYLSTIKAVWTADHLLGRVIHNGSPVQDEHGLPKRIWEPILDLSTLTSLRARLDPPRGTGPKARSRAARLLSGLLFCAYCDMKLYVRSSGGRPIYGCPSSAKGTVCASPRVVAQKVEDYVAERFLALVGDLPEIEEHDVVTDPGTVEALAEVELAIRDTSAALADDDADLATLLDRLAVLKERRTDLKNRPAAIEKIVKETGRTLREAWEATDDVDKRRKLLMEGIDHVRVSSRTRRGNIFEPDRLKILWRS

SEQ ID NO: 5345 - protein, 503 aa, synthetic construct
MIKIRVAIYCRKSVFVEGSVSIETQINLCKDYINKKYSNSTFEIFEDEGFSGGNTNRPAFQKMLKLIELNQLDIVICYKIDRIARNTLDFLNTLEKFKNKNVELISVSEGFDPNTQIGKMMLTLLASFAEMERSNIQQRVSDNMLSIAKKGRWTGGSAPTGFMHGENGGIEISNGELILDIFDMKYHNTLNSKIITHAEEKHNHKFTGVTLANAFRKPIYVKSSESVSLYLKHKGYTVLGEENLTNSYLTYTDKDNKYAVVSNIPGLINPEVWLDINKRMDENITRTGNRFSEKYWLTKTLHCKCCGKTYCGHTKSTKTRYYKKDGTEKIYESTTYYYMCRDMLRGKLKTCTNTKRVKKDYLEVRVSELIYSLKDIDNFNAAYNVNSVDNKKLIASLERKIKSIDKNINNLTDKLSLLSNEASIIFINKIETLVKEKSNIKNEILSLEMHELENINNNHDFVFYNISNFNDNMTVDEKRACCMNIFKEITYDPKEDTFEFSFK

SEQ ID NO: 5346 - protein, 406 aa, synthetic construct
MERTIKVIQKGISKIPSKKRVAAYARVSSGKDAMLHSLSAQVSYYSNLIQNNNEWSYVGVYADEAVTGTKDNREEFNKLLDECRNRKVDMIITKSISRFARNTVKMLETVRELKELNVDVFFEKENIHSMSGDGELMLTILASFSQEESRSVSENCKWRIRKGFEQGELINLRFIYGYRIDKGKIEIYEEEAQIVRMIFQDYLDGYGCTVIAKKLREMKVKKLRGGKWNSERVADIIKNEKYIGNALLQKKYVKDHLTKKLIKNKGTIPQYYAEETHPAIIDIETFKRAQEIMKVNRIKYKCEPGKKNYIFTSKIQCGICGKNYKHKDRNGRSTWVCSNHHKYGDEGCIAKPICEEQLIKLLNVVLQIKEFDEDIFNETIEKIKIEESRTVIVILKNGKVIKKGMV

SEQ ID NO: 5347 - protein, 532 aa, synthetic construct
MTTARRVTMIPAVETFATVSSEGSLRLKRVAAYARVSTDNEEQLSSYEAQVDHYTGYIQSNNQWKFVEVYADEGISATSTKKRDGFNRMIKDALAGKIDLIITKSVSRFARNTVDTLTTVRKLKDKGVEVYFEKENIYTLDSKGELLITIMSSLAQEESRSISENVTWGQRKRFADGKVSLPYKQFLGYEKGEDGLPKIVESEAKTVRLIYKMFLEGTAGTTIAKYLSENNIPSPAGKKVWSESTIRSILHNEKYKGDAILQKSFTVDFLTKKKKVNEGEVPQYYVENSHPAIISAEVFDLAQAEFERRRSDRGLRRSNSCFSGKIICGECGGFYGSKTWHSNSKYRKVVWRCNHKYDNNERCKTPHIYEDKLKELFVKAFNEMIENKDEILRDYKEIIDRLGDTSKLEKEKLQLENEAEILIELLKKQVERNAHAALNQEEYEEKYNELVTKYEEVKNRVEEAEKNVFKQKIKFENIKEFIGRLEKCNELITGFDEGIWNSVINKIEVNSKDEIVFEFKNGNVYSTGDGFI

SEQ ID NO: 5348 - protein, 616 aa, synthetic construct
MTKNVLFYARYSTDRQNEVSIETQIELCEAFVKQKGWKLVATYSDSAVSGMSFMLRPGIQRLLAHVKRERIDVVLCVTVDRLSRDVEHSARILKDLNYQNTEIWTVHASQAITKLELHFRATLSDELVDQIRFRTREGMKTAVKKGKASTCLAYGYRLSQQRDANGDRIKGQRDIDPVKAEIVRRIFKMYADGISPRDIAHILNNEGIIGPRGAAWRDTAIRGSKTIGTGILNNPSYIGRIVWNKRQYRKNPDTERRTARMNDADQWVWADVPTMRIVSDDLWERVRARDAEIGDLYQNARTNRLNATHRPEYLLSGMLECAECGGPYAISGKDRYSCTNRKKRLPIDDLGGACCSNSKTITRHELEERVLNCIPVAFYSLDIFDRISQKMVAHEVSKLKTIPSRKDQVTSELASIKSKQASLMQQIQDRHAEGRPRLAILDDQLDDLEAAREKLAMELATTDLPAEDFQEKIAKLKKQFNPANTEIAIRKLLFLARNDGDEQAKRRLMPIVRDLIHTVVIGKTPGHQPASLQVHGDIANIMASMDVIDVMQQQFVAAAQNDLLTRIASGEIDTEHKKKKLLEAYSEELLRRFPEWENLQVSVVAGAGFEPAAFRL

SEQ ID NO: 5349 - protein, 638 aa, synthetic construct
MSKVAIYVRVSTVHQVDKDSLPFQRQELINYTKYALNIDEYEIFEDAGYSAKNTKRPKYQQMMARIRNNEFTHILVFKIDRISRNLKDFTEMYEEIKDYQVTFVSKSEQFDTSTPMGEAMLKIILVFAELERQMTAERVFTIMLDRAEKGLWNGATVPIGYVWSDEVKFPVIDKDEAVIVQYIYDLYEKLRSTIKVAIRLNEENIQTKRGGEWTPKTVRDILRNPFYIGTYRYNVRKNNSKSRYKDKSEWIVKENNHPAIIDKEQYFRVNIILNQNFRGNLHVQRENMHTHIFGKKLFCGNCGKLLFSAKDRERKDGYRPSRYTCSTNESRAAGHSCSNFISDVTLLPFMLNYVSNLIRLQDKVTPNHTLRDIESLLLRGEPFVDVLGVDKEGLKITKDMILAGFEKSIYNFKPEDIDGESSLEINKLKKSLDKYKTALERLENLYLFGEEAISEKEYIFKKRKLMEKHEELTLELNNLYESLPIPSNVNNAWMNKAKKFLLSQEIYRNRDTDYRRLIDNVGEEMLLDFFNTIIEKVIIHEKKVTSIIFKNGLTHHFAHKPFEKRIKRKNNTRFYYRKFMDQVLNYIKENGPVRRVDIENLTNLKRTTTNTLLNELIDQNLIEKRGVSVKIRYYYKGK

SEQ ID NO: 5350 - protein, 527 aa, synthetic construct
MPRKPAKHPAKPKRGKKLEIEEPGVLYGRYSSHNQKDISVEQQFEKGYELAAEYGIRIIDTYADRAVSGRTDKRRDFQRMMTDAAKGKFRYVIAWKSNRMGRNMLEALINEARLQDLGVRVLYVEEDFDDTAAGRFAARSMMNVNQFYSENMAEDIKRGLYDNAANCMVANGHLPYGYKADETLHYAIDEPKAAVIREIFTRVSCGEAFVDIMASLNVRGIKTSYGRPWGRSSFQKILSNERYRGIYIYGDVRKEGGIPRIISDELYFKVQEVITTKKNPQGRHRVNGDYLLTGKLFCGHCKSPMTGVSGTGRSGNLHYYYVCQKRRTEKTCDKKNVRRDEIELQVAQAIKDYALKDDVIEWIADSTVAYNERKEAESKVGILEDQLAGTEHGIKNIMSAIEQGIITETTKSRLVELESERATIKANIAAARADIVTVSRDDIISGLEMFRDGDVHDKKYQARLFDTFLVAVYAYDDDLRLVFSFSGNKNTIQIPIESAVNAVENNEAECSFKLCSAPPKIPITLFG

SEQ ID NO: 5351 - protein, 505 aa, synthetic construct
MKGVIYARVSTDREEQKSSLHNQIVLAENVAREKGIMVVDRYIDSKSGTGLKSREGILQLIEDAKKKKFDVVIAKSVSRLGRNMLQSLQTADQLERLHIRLIMPEDSYDTDTSSTRLMFNLKAALAEEESAKLAERVKLGLQSVAREGKFASSIPPYGYKVNPTTKKLEIDEDYAPYVRKIFDYYLHQGWGMSKIGNHFMRQQVPTPRAVANCKNAGTRWHQQTLKRILTNPNYTGDLVQCRSETTKYLGKSETYKIRKEVDPERYIVVKDSHPAIVSREDFDAVQALIKAKRKAKSNGRESLFANIAVCSDCGSGMHFKSDRRNGAYVCGTYVKHSSSFCSSHIIEEKKLLKLVRNDAQNLMKSANNIDELYGLAEEKALLKQSSILKEIKSLENQAEKLSNQFNSLLSLHAEGIITKEQFKVKNQSISELQHALANRKMELESQLEQKKNQEKNILAFKRIVDNFLNLDEKDQQDMKQILQRMIDKIKVSEEGEIDIHYNLAP

SEQ ID NO: 5352 - protein, 523 aa, synthetic construct
MAVSRNVTVIPAIQRIGNNKNSESKPKIRVAAYCRVSTDSEEQASSYDIQIEHYTNYIKKNKEWELAGIFADDGITGTNTKKREEFNRMIEECMAGKIDMIITKSISRFARNTLDCLKYIRQLKDKNIAVFFEKENINTMDSKGEVLLTIMASLAQQESQSLSQNVKLGIQYRYQQGEVQVNHKRFLGYTKDENKQLVIDPEGAEVVKRIYREYLEGASLLQIARGLEADGILTAAGKSKWRPETLKKILQNEKYIGDALLQKTYTVDFLSKKRVKNNGIVPQYYVENSHEPIIPRDLFMQVQEEMVRRANLRGGKGGKKRVYSSKYALSSIVYCGHCGDIYRRVHWNNRGYKSIVWRCVSRLEEKGSECTASTINEEILQTAVVKAINELLANKVPFLSTLQKNIATVLNEENDNATVDIDGKLEELQQQLLIQAKSKNDYEDVADEIYRLRELKQNALVENAEREGKRQRIAEMTDFLNEQSCELEEYDEQLVRRLIEKVTIYEDKLTVEFKSGIEIDEEI

SEQ ID NO: 5353 - protein, 521 aa, synthetic construct
MKKITKIEGNLANSFIKPKTRVVAYSRVSTDSNEQLVSLQAQKAHYETYIKANPEWVYAGLYYDEGISGTKKENRSDLLRMLSDCETGRIDLIITKSISRFARNTTDCLEMVRKLIGLGVHIYFEKENINTGSMESELMLSILSGLAESESISISENSKWAIQRRFQNGTFKISYPPYGYQNIGSQMIVNPKQAEVVKYIFAEVLSGKGTQKIADDLNQKGIPSKRGGRWTATTIRGILTNEKYTGDVILQKTYTDSHFNRHTNYGEKDMYLVENHHEAIISHEDFEAVDAVLNQRAKEKGIEKRNSKYLNRYAFSSKIICSECGGTFKRRIHSSGPRKYIAWCCSKHISNITECSMQFIRDEDIKTAFVTMMNKLIFGQKFILRPLLNGLRNQNNAASFRRIEELETKIENNMEQSQMLTGLMAKGYLEPALFNKEKYSLEAERERLLVEKDQLTRSVNGNFAKVEEVDRLLKFATKSKMLTAYEEELFENYVEKIMVFSREKVGFELKCGITLKERLVN

SEQ ID NO: 5354 - protein, 558 aa, synthetic construct
MTKLYSYIRFSSMRQSDGSSYERQIRMAKEIADRYNLELVNDYQDLGVSAFKGANSKTGALSRFLDEIGRSIPVGSWLFIENLDRLSRQDIISAQELFLSIIRRGITIVTGMDNKIYSIETVTANPMDLMFSILLFIRGNEESQTKRNRTNSSALLKIKAHQQNPQNPAVAIEEIGKNMWWTDTTSGRVLPHPVYFPVLQKIVQLRQEGHSAGVILDYLNEHHEPPAPTSNKKHGKWSRAMVSRLFNTKALIGVKTVNVDGVEYELRDYYPRVLSDSEFYFLRKNIVKKAWDYSHVKEKVIPLLSGIGVLRCVHCGATMVKQTAANGKREQYRYCCDGRKSGRTDCPYPNWGFRAVTLEGAVLQLLADKIWIAEDKTNPIPEIQIKIDEISRKIDNLINLSAMMGATKELANQITDLNSQREALHEEIRLFEREMYSVDSQGWDKLAQFDLSDVQNEERLKVRMKIKGALHEIECSRIDSKKNLFVLVYLDGLRQRLVIENNRGLKKGQIFVDLKTINDRQILESAGMVLHPCIEMIIDADWKAPEEIPGLLSEEFGI

SEQ ID NO: 5355 - protein, 503 aa, synthetic construct
MLELQNRIQHVAIYLRKSRNKEGEETEETLKKHRKRLIDIANKNKWDYELFQEVGNSMNENRPEYQKLLSKLSEGIFDAVLSVNLARVTRDDAETPKFMSLLRQEDILFITDSERIYDLEVQEDWQALKFTGFVNNWEYENIKAQLRKGKKDSAKMGRWSNGVPNYGLVYNRFDRSLEIDQQKADAVKLAFQLVIDGLGVDKVAKELNRLGYKTNRGRYFSGNAITRMIRAEIYKSVIISNRVKGRNLYEGKLRPKDQWIIAENAAPPIIDEETWNMANEALDQRKLLSPRGKQKKHPLSNLIKCGICGRTHTVSRRRDRNDALAIQPCNKTDPLGKNKCNNRGIKHDTMISLVIEAIHEKHHEISSELIKFEEDTEVNDIKQIKINKLQEQINKSKKALNILQIQLEEELINISSFKERRKIRQVELSKLEKELSELLEETKEDALKSKKSFANKLDFFLENWHTIDGADLNHELMSFINKIIWYAPRDSESPPQLKFEWRV

SEQ ID NO: 5356 - protein, 489 aa, synthetic construct
MKAAIYVRVSTAEQAAEGYSIRAQTERLKAYCVSQGWEIFEFYIDDGYSAKDTNRPNLKRMMKHIEEGLIDCVLVYRLDRLTRSVRDLYTILETFDKYDCKFKSATEVYDTTTAMGRMFITIVAALAQWERENTGERIRMGMEQKAREGNWVINQAPYGYEIDKENKTLVINNHESLLIKRIYDDYLSGKTMRNIAIDFNKSNITTKSGAIWNDFKIKYILSNPLYIGTMRYNYRTNKENYFEVDDAHPAIISKETFENVQKIKESRRVVHPRSATSKFIFSGIAKCARCGSPLAGKYGYYKSKTKKDHVSRPRSYYCTKRRLGKCDLPNIGENHLEMQFLNYLNTFKIKAEILEDVSEEKEGTENDEKIKMLQKELKEINNRRKKWQYAWVNEMISDEDFSNRIEEENSKETNIKNQLPSLEPRGEKMNTEDLYGILLDIKSNWNQLEALEKKTLLQMFVKRILVNRDKKSPNEAKVNFVNILEVEFY

SEQ ID NO: 5357 - protein, 558 aa, synthetic construct
MTKLYSYIRFSSMRQSDGSSYERQIRMAKEIADRYNLELVNDYQDLGVSAFKGANSKTGALSRFLDEIGRSIPVGSWLFIENLDRLSRQDIISAQELFLSIIRRGITIVTGMDNKIYSIETVTANPMDLMFSILLFIRGNEESQTKRNRTNSSALLKIKAHQQNPQSPAVAIEEIGKNMWWTDTTSGRVLPHPVYFPVLQKIVQLRQEGHSAGSILDYLNEHHEPPAPTSNKKHGKWSRAMVSRLFHTKALIGVKTVNVDGVEYELRDYYPRVLSDSEFYFLRKNIIKKAWDYSHDKEKVIPLLSGIGVLRCVHCGATMVKQTAANGKREQYRYCCDGRKSGRTDCPYPNWGFRAVTLEGAVLQLLADKIWIAEDKTNPIPEIQVKIDDISRKIDNLINLSAMMGATKELANQITDLNSQREALHEEIRLFEREMYSVDSQGWDKLAQFDLSDVQNEERLKVRMKIKGALHEIECSRIDSKKNLFVLVYLDGLRQRLVIENNRGLKKGQIFVDLKTINDRQILESAGMVLHPCIEMIIDADWKAPEEIPGLLSEEFGI

SEQ ID NO: 5358 - protein, 547 aa, synthetic construct
MKLLVTYIRWSTKEQDSGDSLRRQTNLIDAFYSKHKNDYYLLPAHRYVDKGKSGFHQQHKAQGSDFRRMFENVMSGAIPEGSLIVVENFDRFSRADIDTAIDDVRQILRKGVSILTLGDGELYDKSALTDPVKLIKHIIIAERAHQESLVKQKRIAQVWNHKTQLARELKKPMGKQAPGWLELSEDGSHYIVDEDKASLVNIIYDKRLSGMSMFAICKWLNEQGYPTINQRKVRISKTKKPDGNWSALSVKHILTSRSVLGYLPAKISSEDRKTVLREEIEGFYPQIVTDSKFYAVQQLLEETGKGKTSSGEHWLYVNILKGLIRCKCGLVMTPTGIRKPVYQGTYRCNGNKESRCNYGTVSRKLLDTQLCSRLFSKLSQLHDEATDTAKLDELQRRLNTVDSELEKLTETLIQLPNITQIQEALRVKQEEKDELIVQLSREKARVKSVSSLDLSGLDMESVEGRTEAQIIIKRLVKEIVVSGNEKLVDIYLHNGNMIRGFPLDGKDDHTLTLEEATDEMQSLDDMLIFGEPVTRIYPAGDMEEVDA

SEQ ID NO: 5359 - protein, 556 aa, synthetic construct
MAMMNEMEYRTIGSALAGGYRAAVYCRLSKDDDLQGESASIANQRDMLEKYCEKQGWEVVAVYQDDGFTGLNMERPDLQRMLRAIERRQINLVITKDLSRLGRNYLQTGHLIEDFFPRNGVRYIAMNDGIDTLRDNNDIAPFKNILNEMYSKDISKKVHSSYLLKAQKGQFTGCLAPFGYRKDPEDKNHLLIDEETAPIVRLIFGYALNGHGPNYIRRRLEEEKIPCPTWWNRERGLRNTRTKWEKKDPEKGRYMWDFSVIKDLLMNPVYTGAIASQKKDYRFKIGTIGEKKPEDWIVVEGQHEPLIDRMSFDIVQNKLKSRQRPGQTNEISLFAGLIKCGECGKSLTVRYTNAKHPQQIYSCKTYNAFGKNHCTQHRIDYDTLYSHVLRKIRECARAALMDGEAVADRLTNTCEAEQREQREAMERSLTRDEERIEVLDKMVMRLYEDMIAGRISEQNFNTMLEKTQTEQAELKAKVSEGRKRLSDEVQLANDAKQWVEAIQEYANITELDAATLNRLIKEIVVHERIDEDKTRHISIEIHFNLKPIPEVEQVTA

SEQ ID NO: 5360 - protein, 590 aa, synthetic construct
MKTVEKIERKLPVLKTRKRVAAYARVSMESERMQHSLSAQVSYYSALIQKNPEWEYAGVFADYGISGTGTKKRDEFNHMLAECEAGNIDIILTKSIQRFARNTVDLLNTVRHLKELGIEVRFEKEKINSLSGDGELMLSILASFAQEESRSISENVKWGTIKRFKQGIPNGKFSIFGYEWQDDKLVIVPEEAEIIRWMYAEYMKGASRIEIGRALMDRGIYTRQGKPWVDSNVKVILTNITYTGNMLFQKEYCEDPITKHRRKNYGEMPQYFVEDTHEAIIPMDEWQAVQAEFKRRRDLGPFGNKSLKLSAFSTKITCGCCRKHYRHSGKRNTAGEVYYIWICQTKSQKGVSACPSKNIPEKMLQNTAAKVLGLDKFDEDVFSQQIEEVIVIGDDTLTFRFYDGHEVTTKWQSTAKTDWWTDERRKLWGERHKRKDTNPNRNTFYEFTGFIKCGCCGANYRCQSGKRKDGTPTRSWYCTGPRSECRNPAIRDETMKRLVTEILGLDEFDEAAMDAQIESATILDHMVTFYFRDGHIESRDFLDKRHGTPWTEERREKAKKSMKAAWTDERREAMSERIKKIRSEKKWPNP

SEQ ID NO: 5361 - protein, 529 aa, synthetic construct
MAKVRVIPSTLNPLTQSPISETKKKKVAAYARVSTDSDEQYTSYEMQVKYYKKFIQEHDGWIYVNVYADEGITGTNTKKRDSFNQMINDALDRKIDLIITKSISRFARNTLDTISITRKLKASGVEVFFEKEGLWTFDSKSELILTIMASIAQEESRSISANVTMGKRWGMQEGKVSFAYKNFLGYKKENGKIVIDEEQAIIVRRIYSMFLKEGKTCSGIAVQLKKEGILTPSGNSSNWQKNTVLSILTNEKYKGDALLQKTFTANFLEHNVKRNNGQLPQYYVENSHPAIINRYEWEQVQTELARRQEIGRNYSGAGAFASKLVCEDCGGFYGMKVWHSNSKFKKMILQCNNKFKKEKSRCQTPHLTEDEVKEMFIRAYNETMKDKTKVIEDTEAVIAMLTNTDEIDKRISSLTSEIEIVSELVKKLIRENSSAAQSQEDYQTKYNELSSRYDKTKKALEKAMQDKTHKQGQGIKLQSFLESLKQKECIIDQWDEELWMIMVEKAIVHRDKSITFKFYNGIEIIIAAA

SEQ ID NO: 5362 - protein, 441 aa, synthetic construct
MEMKITKISTLPQLDRKKRVAAYARVSTGKDAMLHSLSAQVSYYNNLIQNNNEWEFAGIYADEAMSGTKDNREEFNRMVDDCKAGKIDLIITKAISRFARNTATLLSTIRELSSVGVDVFFEEQNLHSISGDGEMILTLLASCAQEEARSASENVKWRVKKDFKQGILNGGNDCYGYKLIDKKFVLVPEEAEIVKMIFAWYICGEGVVAISKKLDDMGIKPVRAKYWLPNTIMRMLKDRCYVGDLILQKTYVTDYVSKKKKRNHGEFDKYFVENDHEPIIDIETFKKANALMVERAKRFKAQDRTALRYPLSGKIVCGECGSRFGHKVYMHSSPGWICSAFDRKGKKACQSRKVPEYAMDEAVDAVIGGYDNIKVLDFIEVFNNNRLLFHLKNKEIKEFIWEERSRSQSWTDEMREEAKKRTIINNKNKKRGANGKWQKSE

SEQ ID NO: 5363 - protein, 499 aa, synthetic construct
MIAIYARQSLDKKDSISIETQIELCKKEIGDEPYKEYVDRGYSGKNTNRPQFKAMMQDVENGVIGKIIVYKLDRLSRSTLDFGELMDALSKHSVEFSSTREKFDTSTPIGKAMLNIIMVFAQLERETIQVRVQDNFRMRSARGAYDAKAPYGYAKTKVTVQGKAVSTLKPDKAYSLMVKKIFEQYAYTSTSLGYLARTLNQQGIKSANGAAWDSCKLSKLLCNPIYVKADAEVYKYYRAKGMEITNDIDDFRGQYGCVTYGQWDRAKNKFAQLSGLTLSIGLHEGIIDAKTFLACQYKLAENTQINNTGRGKHSWLTGLLKCGCCGKAMKVMTYKETATFRCSGAMNTGLCSDSPSVGVREIEEAVEREIFAHVARHQELVVQKRKEEDNKSHNYKIAIAKLDDQIANLITALADGTELTMKYINGRISELQKQRDILAAELQQHKNATKQQDDIKQFHDIINLWPGMTIPQKHEIAMMLIKRVEIQEDTTRIYWKYDL

SEQ ID NO: 5364 - protein, 518 aa, synthetic construct
MNYRSFEMRLLVYLRKSRSDVEEERKAAAEGREYDTLARHRRNLMDVIKREGHILVEPPYEELVSGDSIIERPEVQKMLNRMDEGDIDGVLVIDIDRLGRGDMYDSGILDRAFRYNNIKLITPTEIYDPEEENWELVFGVKSLVARQELKSINKRLQGGRRDKAKMGRSISKKPPYGYLRDENLKLYPDPDTAWVIQKIFEMTVKGNGRQAIAKKLDEWSVAPPDTNRNHWSPSTITAIVKNEVYIGKIIWGKITYLKRGGQYTRRKMKPEEWIVKDEAHEPLVTKELFDAANAAHSGRFRPSTKANNVLSNPLAGILKCELCGYTMLYQPRKDRPNSMIYCTKAQCRGKQKGAMLYLVENRILVSLEQYIKEFEIPKQQDAKNNSSIIQFQEKALDKKKKEIAEANKQKSALHDFLEKGVYDINTFMERQKVLVDRIEKLKDETRLIVEDMEKEKFREKNTKQFIPLVKSVLTAYRETDDIEKKNRLLKSVLERATFLRKKEWTKIDQFVIQLYPKI

SEQ ID NO: 5365 - protein, 489 aa, synthetic construct
MSPQANTRDKYQIKKVAVYIRVSTEEQAKEGYSISAQKQRLKAYCIAQDWNIAGFYVDEGISAKNMQRDDLQRMLQDIKAGLIDCVLVYRLDRLTRSVLDLYKMLEIFDEYDCKFKSATEVYDTTTAMGRMFITIVAALAQWERENTGERVSMGFHEKTRQGKYPLNFRPYGYDLNLKTGELTINNEEAEVVRLIYDFYLNKGMGAGKICKYLNQNHIPTRRGNTWIAKPLMQILKNTLYSGTFVYGAETLKTPVIIEQEKFDMVQETIKRRRTQNPKQIAGEHIFTGVLRCHVCGHAVTGYRSYHVTPNGEKISYKNYRCLRIKTGQCKGARSFSERNLENAFLDFIRNFDFDQSAYEIANDKINMINKGKQTHSKESILKDIEKLKGRIKKWQYAWANEQLTDDEFMERMDEERTLEASLQTKLLEVEPTLPELNKAAIKEILANFKSNWHKLEQLEKRSLVQLVIKNVSYYFNDKKEIIVNDIEFY

SEQ ID NO: 5366 - protein, 558 aa, synthetic construct
MTKLYSYIRFSSMRQSDGSSYERQIRMAKEIADRYNLELVNDYQDLGVSAFKGANSKTGALSRFLDEIGRSIPVGSWLFIENLDRLSRQDIISAQELFLSIIRRGITIVTGMDNKIYSIETVTANPMDLMFSILLFIRGNEESQTKRNRTNSSALLKIKAHQQNPQNPAVAIEEIGKNMWWTDTTSGRVLPHPVYFPVLQKIVQLRQEGHSAGSILDYLNEHHEPPAPTSNKKHGKWSRAMVSRLFNTKALIGVKTVNVDGVEYELRDYYPRVLSDSEFYFLRKNIIKKAWDYNHDKEKVIPLLSGIGVLRCVHCGATMVKQTAANGKREQYRYCCDGRKSGRTDCPYPNWGFRAVTLEGAVLQLLADKIWIAEDKTNPIPEIQVKIDEISRKIDNLINLSAMMGATKELANQITDLNSQREALHEEIRLFEREMYSVDSQGWDKLAQFDLSDVQNEERLKVRMKIKGALHEIECSRIDSKKNLFVLVYLDGLRQRLVIENNRGLKKGQIFVDLKTINDRQILESAGMVLHPCIEMIIDSDWKAPEEIPGLLSEEFGI

SEQ ID NO: 5367 - protein, 529 aa, synthetic construct
MSTARAVTVIPPTITRLQNNILRMHVKKRVAAYARVSTNDEEQQTSYEAQIDYYTQHIKSNSDWEFVEVYTDEGISGTNTKKRDGFKRMIQDALDGKIDLILTKSVSRFARNTVDTLTTVRQLKEKGVEVYFEKENIYTLDSKGELLITIMSSLAQEESRSISENVTWGQRKRFADGKVSLPYKQFLGYEKGADGLPKIVESEAEIVRLIYKLYLQGKTQNFIARHLTEKGIPTPGGKQKWNVSTILSILQNEKYKGDAVLQKRFTVDFLTKKTKVNEGEVPQYYVENSHSAIIEPEVFDMVQAEIKRRKPMGRRQSGVVGFSSKIVCGECGGFYGSKVWHSTDKYRRTVWQCNNKFKNGTRCKTPHLSEEALQRAFVEAFNRVVEDKARIIEDFEAIIGVLMDTAALDKESAKLRDECAVVMELIRRCVEENAHSAMDQDEYQERYNGLVARYETAKNRLDAISDEKQARGVKRESISLFLADLRQRDSIVEAFDQELWYATVDTVMVASTGILTFLFKNGMELKVQV

SEQ ID NO: 5368 - protein, 436 aa, synthetic construct
MRSITKLEPSAPQIPARKCVAAYARVSSGKDAMLHSLSAQISYYSAMIQKRRDWEYVGVYADEALTGTKDERPEFQRLMNDCRNGLIDMVITKSIARFARNTVTMLEAVRELKLLGVDVYFEKENIHSISGDGEVMLTILASYAQEESRSVSENCKWRIRKRFKNGELVSLRFIFGYRIVKGDVKVYEKEAAIVRMIFDDYIGGMGGSKIAQKLRAMDIPALRGGTWDSERVVAIVKNEKYAGNALLQKKYVTDHLTKKEVWNKGVLPMYFAEGTHPAIIDADTFEKAQAIMEQRRQRFRTKSDTPNRYPFSGKILCVNCGKNYKRKTANDNFYWNCSTYLQEGKATCPAKQIPEDTLYTVTAEVLGIQVFDAEIFAERVSEIQVPENNRLLFIFRDGRRVEKIWQDKSRRDSWDDAMRQAAREQQIENLKRRNRE

SEQ ID NO: 5369 - protein, 592 aa, synthetic construct
MPKIWPYIRFSSEEQKKGDSLRRQQDLIDKFAARPEIVAEGATIDTSLDLNDLGVSGYTGKNLLQGRFKTFLDAVDSGIVKPGDYLAVEALNRVTRLNPRASLPILLGLLEKGVKIAITDSSLIYTNTGDITQLYIAIGELQRGYSESQEKGRRVREAWDDKKKRAFATGEIATSRLPLWLRAVKTTEKGMVIRTVEVIPERVAVVKEIYRLSDTNVGAIATARILTEKGIPTFTRENGRKNPNYGDFWQPSYVKKILDNRAVMGHYQPMTWEKLPDNRRRRINHGPEIENYFPEVIAPELFRRVQEKRKGRAIEGQGNKGKKFSNLFTKIAHCSKCGATASHVNKGPNPRKGGRYLVCYRARHGECSYNAWRYDEVETAILKFLAEADIKSIIQDENRAEDLINKKYEVDAQISDIQEMLDAFKADFKRLKGRVTDLERELALENEQSIEALKSQAKKLEQEIFNAFEQQKADIEKDIQVLRNLSHTADETTVFEVRSKINERLKLVVKDILIDFQTKIVEIQFRNGNVRYLSEKASITYSEPTQKDLEDREMMDEVWASMSENERQQIIDHSIPAEIANDSHRLVKFFES

SEQ ID NO: 5370 - protein, 538 aa, synthetic construct
MQENYIVGIYARLSRDDERAGESVSIENQKEMLSRYVREQGWTLYDYYCDDGVSGTTFDRPGLNRLVQDATDHKINLVLCKDLSRLGRDYIEAGKYTDFVFPSLGCRFIALNDGVDTLRKNNEMLVILKNVMNDLYARDTSSKIKAVKLSTFKSGKYVGCYAPLGYKKSEADKHVLEIDPVTAPVVRHIFDLRLQGHGFRKIALQLNAEKVPAPRSFYYMAEGRENLRGETPFWNDVTVKTILRNEVYIGHMVQNKTGTVSYKNHKQVSKPESEWIKVENTHEPLISQETWDAVQRMDNHPARGRSGKSGTVALFGGLLRCMDCGSSMRYMRDYRKKVSEKEPEYKAYVCNRYASGGKNACSSHYINQKVLTQIVMTDIRCKAMWAQNSRETLRTQLLAREQNASVERTRTLQAELNAIGKRLPELDKLIQSAYEDKVLGRIPESVCVNLLNRYEAERREKQERRKELTEQLAARLETESSVDAWLDMMQDYAQLEELDRPTLVRLIQKIEISERYPVDDHEERDIHIYYNFVGYIEA

SEQ ID NO: 5371 - protein, 575 aa, synthetic construct
MSSNKPKAYSYIRFSTPEQARGDSYRRQREAAEKFCLENDLEFVSSKEYLFFDKGKSAFHGRNVDDAGELARFLGYVNDGHILPGSYLIVESLDRLSRERVREALPRFLELINRGIRIYTSADRMLYTEKSDERDILISVMVMSRAHGESSLKGQRVSAAWKAKQKRARERGLPLGRACPYWLSLENGKYTFIESRVDVVRKVFNLSISGHGQRAIAKILNQDGVPVFGSAARNKSGFWGASSVSKLLSNRALLGEYQPTNLIDGVRTKAGEPISDFFPRVLSEETFYQAQNTRVVRKAYGSTKNSKEFNIWQGIAKCGLCGGAMHLVNKGGNLKYLRCYNSAKGVCQARSLRLDITEVAYREVLAKVDSLSLVQDAHAKIKKDLDVADAKYVQLIERQGKLMSQAANVDIDLPDLFVQMLSELQQEVDICSKLREKLRSDLQKDRIINKSEFFSRLDLVSQEGRAKSNYLLKSLDILVSLRAFESAHIFCVYVEGYRSFSIVLNDGDALFYPYTRGALDSIRTQGDESEVSLLGEKEIKESELRLVKSAADRIKDLMVSETSSNGLTRLRKRPL

SEQ ID NO: 5372 - protein, 558 aa, synthetic construct
MTKLYSYIRFSSTRQADSSSFERQKRTAKEIAEKYGLELVTSYQDLGVSAFKGANSKTGALSRFMEEIGRSVPVGSWLVVENLDRLSRQSIIEAQELFLSIIRRGITIVTGMDGKVYSKESVNANPLDLLLSVMMFARANEESQTKRNRTNSSALLKIKAHQQNPQSPAVAIEEIGKNMWWTDTTSGRVLPHPVYFPVLQKIVQLRQEGHSAGAILDYLNEHHEPPAPTSNKKHGKWSRAMVSRLFATKALIGVKTVNVDGVEYELRDYYPRVLSDSEFYFLRKNIIKKAWDYSHVKEKVIPLLSGIGVLRCVHCGATMVKQTAANGKREQYRYCCDGRKSGRTDCPYPNWGFRAVTLEGAVLQLLADKIWIAEDKTNPIPEIQVKIDEISRKIDNLINLSAMMGATKELANQITDLNSQREALHEEIRLFEREMYSVDSQGWDKLAQFDLSDVQNEERLKVRMKIKGALHEIECSRIDSKKNLFVLVYLDGLRQRLVIENNRGLKKGQIFVDLKTINDRQILESAGMVLHPCIEMIIDSDWKAPEEIPGLLSEEFGI

SEQ ID NO: 5373 - protein, 530 aa, synthetic construct
MIAAIYSRKSKFTGKGESIENQIQLCMDYAKNLGINEFLVYEDEGFSGKSMDRPKFKEMLKDAKDKKFDYLICYRLDRISRNVSDFSTLIEDLNKLNISFVSIKEQFDTSTPMGRAMMYISSVFAQLERETIAERVRDNMYELARTGRWLGGMPPYGFISTQINYYDENMNQRKMYKLKVDEDTIEIVKLIFDKYLELRSLSKLYKYMYENGIKGTRGGNLDPSALSLILKNPAYVKADKNVVDYLRKSNIDVMGDIDKIHGILTYAKNTDSPIAAVAKHKGVIDSDKWIEAQRLLNSNKAKAPRAGTGSKALLSGLLKCSKCGSNMRITYKNSKSGTIYYYICGTKKSLGVSACDCKNIRSDKAESKVIDELKNKSIKSIMSSYKDSKLENSKNSKNIKTEINSINNQIKEKETYIDNLVMQLAKVTESSASTFIINKLESLNNDLSNLKSQLESLNTMSMENKQVDININMLIDNLNKFNKEIDTSDINKKRLLLSTVVDYMTWDSDTDTIKVNLIGINPSNTIASDK

SEQ ID NO: 5374 - protein, 530 aa, synthetic construct
MISAIYSRKSKFTGKGESIENQIQLCMDYAKNLGINEFLVYEDEGFSGKSMDRPKFKEMLKDAKDKKFDYLICYRLDRISRNVSDFSTLIEDLNKLNISFVSIKEQFDTSTPMGRAMMYISSVFAQLERETIAERVRDNMYELARTGRWLGGMPPYGFISTQINYYDENMNQRKMYKLKVDEDTIDIVKLIFDKYLELRSLSKLYKYMYENGIKGTRGGNLDPSALSLILKNPAYVKADKSVVDYLRKSNIDVMGDIDNIHGILTYAKNTDSPIAAVAKHEGVIDSDKWIEAQRLLNANKAKAPRAGTGSKALLSGLLKCSKCGSNMRITYKNSKSSTIYYYICGTKKSLGVSACDCRNIRSDKAEFKVIDELKNKNIKSIMSSYKDSKLENAKDRKNIKTEINLINNQIKEKEIYIDNLVMQLAKVTESSASTFIINKLESLNNDLSNLKSQLESLNTVSIKNKQVDININMLIDNLNKFNKEIDTSDINKKRLLLSTVVDYMTWDSDTDTIKVNLIGINSSNTIASGK

SEQ ID NO: 5375 - protein, 530 aa, synthetic construct
MIAAIYSRKSKFTGKGESIENQIQLCMDYAKNLGINEFLVYEDEGFSGKSMDRPKFKEMLKDAKDKKFDYLICYRLDRISRNVSDFSTLIEDLNKLNISFVSIKEQFDTSTPMGRAMMYISSVFAQLERETIAERVRDNMYELARTGRWLGGMPPYGFISTQINYYDENMNQRKMYKLKVDEDTIEIVKLIFDKYLELRSLSKLYKYMYENGIKGTRGGNLDPSALSLILKNPAYVKADKSVVDYLRKSNIDVMGDIDNIHGILTYAKNTDSPIAAIAKHKGVIDPDKWIEAQSLLNANKSKAPRAGTGSKALLSGLLKCSKCGSNMRITYKNSKSGTIYYYICGTKKSLGVSACDCRNIRSDKAESKVIDELKNKSIKSIMSSYKDSKLENSKNIKNIKTEINSINNQIKEKETYIDNLVMQLAKVTESSASTFIINKLESLNNDLSNLKSQLESLNTMSMENKQVDININMLIDNLNKFNKEIDTSDINKKRLLLSTVVDYMTWDSDTDTIKVNLIGINPKNTIASGK

SEQ ID NO: 5376 - protein, 509 aa, synthetic construct
MKTCIYLRKSRSDEEAEKQGEFETLSRHRSTLLKVAKEQNLNIVEIKEEVVSGESIAYRPKMLELLEEVKNGFYDSVLVMDIDRLGRGNMQDQGLILETFKKSNTKIITPRKTYDLNNEWDEEYSEFEAFMARKELKLITRRMQRGRVKSVEEGKFIASKPPYGYKFVFDEFGNKSMVIDEDKAEVVRMIFDLYVNKHYGGVKIATHLNSLGLKTTTGRTWYDKGVRDILKNKTYAGYVVWNKVERGKNSSKTRPIDERIEAKGIHEPIIDESIFLEAQSLFKSNFIPSTKQHTTITNPLAGLIVCSECGHKMIAQQSTYKNKEIVKFVKCLNCGKNRGVRLDILEKDIINELADWVDAYNLSIKDLDSNENKNPNLESYYSIIKSLESEYQTLMKQKENLHNLLEQGIYDVDTYLDRSKILTDKIDLNRSNLSQAKKDLENEKESVFSIADIIPQIKKVLELYYQSSDMQERNELLKEVIDYIDYSREPKKRTSRFNIKIYPRLIKNK

SEQ ID NO: 5377 - protein, 520 aa, synthetic construct
MTEKNIMVIPARKRVGSTAAKEKIKKLRVAAYCRVSTETEEQNSSYEVQVSHYTEFIKKNNEWEFAGIFADDGISGTNTKKRDEFNRMIAECMDGNIDMVITKSISRFARNTLDCLQYIRQLKDKNISVYFEKENINTTDAKGEVLLTIMASLAQQESQSLSQNVKLGLQYRYQQGKVQVNHKRFMGYTKDEDGNLTIVPEEAEIIKRIYREYLEGQSLVGIGRALEKDGILTAAGKPRWRPESVKKILQNEKYIGDALLQKTVTVDFLTKKRVKNEGHVPQYYVENSHEAIIPKELFLQAQEEIHRRSNIYTGEGKNKRIYSSKYALSAITFCGDCGDIYRRVYWNIHGRKEFVWRCVTRIEQGPEVCKNRTVKEDELYGAVMTAINKLLAGGNNMIKTLEENIHAVIGETTEYQISEINNSLEEKQKELIKLANKGQDYDHLADEIDELRDKRQILLVEDASLSGENERINELIEFIRKNKFRTLEYDDKLVRKIIQSVTVYEGHFVIAFKSGIEMEI

SEQ ID NO: 5378 - protein, 477 aa, synthetic construct
MMDRNKVAIYVRVSTQGQVDDGYSLDEQVDLLTNYCKLKEWTLYDVYVDPGISGKNMHRPEIERLTRDAKRKLFDIVLIYDLKRLGRSQKENIVLVEDVFNPNGIRLVSFTENFDASTPVGKMVFGMLSAYAELDRANIAERMMMGKIGRAKAGKAMSWGMPPFAYDYNKETGDLELDEVKAPIVEMIYSEFLKGASVNKIVQKLNSMSYHGKNHEWKHHAVTVIIDNPVYCGMMKYMGQTYQAKHTPIIDKKTFELAQLERKKRLSKYHDADWLGPFQRKYIGSKICYCGLCGAHLKSEKDKKNKLTGIRSISFFCPNTRSRGTGECTNPRFKQSVLEGYILNEVAKLQQNPEKLKDIKPAEDNELHNKIATYEKKIKQNSSKLSKLNDLYLNDLISLDDLKQQSKSLLNENEFMEEQIKLLSATTREDELRKKIDTFLAFPDILTADYDTQKQAVELVISRVEATKEGIDIFFNF

SEQ ID NO: 5379 - protein, 413 aa, synthetic construct
MSVKKIRVNKQKHKQRICAYIRVSTTNGSQLESLENQKQYFENLYSNRDDIDFVGVYHDRGISGSKDNRPNFQAMIEDCRKGMIDIIHTKSIARFARNTVTVLEISRELKAIGVDIFFEEQNIHTLSSEGEVMLSVLASIAEDELRSMSGNQRWAFQKKFQRGELVINTKRFLGYDLDENGELIINQEEALIVRQIFALYLEGYGTHRIAKLLNEKGVATVTGAKWHDTTICQILRNEKYNGSVLLQKYFHDGVNGPKKLNQGELEQYLIEDNHEAIISMEDWQTVQDKLNSRRWQQGRNKTYKFTGLLKCQHCESTLKRQVSYKKKIVWCCSKYIKEGKVACRGMRVPEVDISNWEITSPVTVIERDRDGEKYYSYSGQESSDQCSSSGQEENQGSRLLSSVHRPRRTAIKL

SEQ ID NO: 5380 - protein, 430 aa, synthetic construct
MSTDQEEQLSSYENQVNYYREFISKHEDYELVDIYADEGISATNTKKRDAFNRLIQDCRASKVDRILVKSISRFARNTLDCIKYVRELKELGVGVTFEKENIDSLDSKGEVLLTILSSLAQDESRSISENATWGIRKKFERGEVRVNTTKFMGYDKDDNGRLIINPQQAETVKFIYEKFLDGYSPESIAKYLNDNEIPGWTGKANWYPSAIQKMLQNEKYKGDALLQKTFTVDFLTKKRVQNVGQVNQYYVENSHEAIIDKDTWELVQLELTRRRDFREEHQLKAYIMQNDDNPFTTKVFCAECGSAFGRKNWTTSRGKRKVWQCNNRYRVKGQIGCQNNHIDEETLEKAIVIAVELLSENVDLLHGKWNKILEENRPLEKHYCTKLAEMINKPSWEFDSYEMCQVLDSITISEDGQISVKFLEGTEVDL

SEQ ID NO: 5381 - protein, 430 aa, synthetic construct
MSTDQEEQLSSYENQVNYYREFISKHEDYELVDIYADEGISATNTKKRDAFNRLIQDCKAGKVDRILVKSISRFARNTLDCIKYVRELKELGVGVTFEKENIDSLDSKGEVLLTILSSLAQDESRSISENATWGIRKKFERGEVRVNTTKFMGYDKDENGRLIINPQQAETVKYIYEKFLEGYSPESIAKYLNDNEIPGWTGKANWYPSAIQKMLQNEKYKGDALLQKTFTVDFLTKKRIANDGQVNQYYVENSHEAIIDKDTWELVQLELARRKAYREEHQLKSYIMQNDDNPFTTKVFCKECGSAFGRKNWTTSRGKRKVWQCNNRYRVKGQIGCQNNHIDEETLEKAVVMAVELLSENVDLLHGKWNKILEENRPLEKHYSTKLAEVINKPSWEFDSYEMCQVLDSITISEDGQISVKFLEGTEVDL

SEQ ID NO: 5382 - protein, 413 aa, synthetic construct
MSVKKIRVNNQKHKQRICAYIRVSTTNGSQLESLENQKQYFENLYSNRDDIDFVGVYHDKGISGSKDNRPNFQAMIENCRKGMIDVIHTKSIARFARNTVTVLEISRELKAIGVDIFFEEQNIHTLSSEGEVMLSVLASIAEDELRSMSGNQRWAFQKKFQRGELVINTKRFLGYDLDENGELIINPEEALIVRQIFALYLEGYGTHRIAKLLNEKGVATVTGAKWHDSTIRQMLSNEKYNGSVLMQKYFHDGVNGPKKLNQGELEQYFIEDNHEAIISMEDWQTVQGKLNSRRWQQGRNKTYKFTGLLKCQHCGSTLKRQVSYKKKIVWCCSKYIKEGKVTCQGMRVPEVDISNWEITSPVTVIERDRNGEKYYSYTGQESADQCSSSGQEENQSSRILPSVHRPRRAAIKL

SEQ ID NO: 5383 - protein, 413 aa, synthetic construct
MSVKKIRVNKQKHKQRICAYIRVSTTNGSQLESLENQKQYFENLYSNRDDIDFVGVYHDRGISGSKDNRPNFQAMIEDCRKGMIDIIHTKSIARFARNTVTVLEISRELKAIGVDIFFEEQNIHTLSSEGEVMLSVLASIAEDELRSMSGNQRWAFQKKFQRGELVINTKRFLGYDLDENGELIINPEEALIVRQIFALYLEGHGTHRIAKLLNEKGVATVTGAKWHDSTIRQMLSNEKYNGSVLLQKYFHDGVNGPKKLNQGELEKYFIEDNHEAIISMEDWQTVQDKLSSRRWQKGRNKTYKFTGLLKCQHCGSTLKRQVSYKKKIVWCCSKYIKEGKVTCQGMRVPEVDISNWEITSPVTVIERDRNGEKYYSYTGQESADQCSSSGQEENQSSRILPSVHRPRRAAIKL

SEQ ID NO: 5384 - protein, 412 aa, synthetic construct
MVVTLIPKQLSPKKKRVCAYIRVSSDSESQAMSLENQKAYFEQLYREDAEFVGIYYDQGISGSKESRPGFQAMLTDCFDGKIDLIHTKTVSRFSRNTELLLETSRKLKNLNVDIYFEEQNIHTLSSEGEVMLSVLASVAEEELASMSSNQRWAYQKKFSRGEVLLNTKRFLGYELSDGGELVINPLEALIVKRIFHLYLSGYGTHRIAKLLNKEGVSTATGANWHSSTVASILRNEKYKGSVLLQKTFRDGVNGPVRRNNGHFQQYLIEDNHPPIISETEWERVQELLNSKSIKGKSYQNRYPFSGLLKCCYCGSTLKRQISYKGKIIWSCSKYISEGKKACQGMRVPESEMKDWVIDKPTIIKEEVKTNGKKHYSYSSQVTGNSSRGQTTEDKGGGLLPSVNRTRRTAIKL

SEQ ID NO: 5385 - protein, 413 aa, synthetic construct
MRYYSDFIQSNPSYELVDIYADEGLSGTSTKKRSEFNRMIEDCKAGKIDRILVKSISRFARNTLDCIRFVRELKELGVGITFEKENIDSLDAKGEVLLTILSSLAQDESRSISENATWGIRKRFERGINRQNTTKFMGYDKDEDGNLIINEEQAKVVRRIFRMFLMGQTPESIARRLNNEEVAGWSGKANWYPSSIQKMLHNERYKGDLLLQKTVTVDFLNKKRTENNGHANQYYVEGNHEPIIEPWIWDATQLEFERREAFKQTHEIKNYAQNIESNPFSSKVFCGVCGSAFARKHWTTTQGKRAVWQCSSRYKKKGVLGCTNSHIDEETLQKAYLMAMHELSVHGQECEMKWQKSIKIGTPLERYKALLLQEALGDNCNEFNPEWMVGLLEKIDVGKVVLVRFVDGTEVTL

SEQ ID NO: 5386 - protein, 506 aa, synthetic construct
MKRAIAYLRFSSLQQVQGDSVRRQKKLIEEWLKQNSEYYLDPVTFEDLGLSAYRGQHAISGAFSEFMEAVQRELIDAGSVLLIESLDRLSREKLGDATERLRAILKAGIDVVTLSDGTHYTRDSLDDPYSIIKAILIAQRANEESEMKSKRQRAVWAEKRKQAAETGKIMTRHCPHWLKVNLLGDGFDVIEEKAEIVRYIFQMRLDGMSFEKISQTLNVQGKENLRGKVAQWNSASIERLVKAKAVIGYLVPSHRITVHDVIEIPDYYPSIINSDDFQRVQRISYEPESRRNLNFNPHLINIFKGLMHCKQCGHAIILTAISAKGYGYYVCSMRRQHRCTTEAVRRDLTDRYLITGVINGASAMNMSFSKETALISMTAKHMELTGKLQNIIKAIELAPDVSELTLRASEISTEISQLKNSMADMQVERDIKTAAALDVLNISDRKEYQALARALFKDIKLDGRSKTCDIYLHNGMRILNYPLTKSTGWASILDAMAFLEQDEVIL

SEQ ID NO: 5387 - protein, 413 aa, synthetic construct
MSVKKIRVNKQKHKKRVCAYIRVSTTNGSQLESLENQKQYFEKLYSNRDDIDFVGVYHDRGISGSKDNRPNFQVMIENCRKGMIDVIHTKSIARFARNTVTVLEISRELKAIGVDIFFEEQNIHTLSSEGEVMLSVLDSIAEDELRSMSGNQRWAFQKKFQRGELVINTKRFLGYDVDENGELIINPEEALIVRQIFAFYLEGYGTHRIAKLLNEKGVATVTGAKWHDTTIRQMLSNEKYNGSVLLQKYFHDGVNGPKKLNQGELEQYFIEDNHEAIISMEDWQTVQAKLNRRRWQQGRNKTYKFTGLLKCQHCGSTLKRQVSYKKKIVWCCSKYIKEGKAACQGMRVPEVDISNWTVTSPVKVIERDRDGEKYYSYSSQESADQRSSSGQEENQSSRILSSVHRPRRTTIKL

SEQ ID NO: 5388 - protein, 430 aa, synthetic construct
MSTDQEEQLSSYENQVNYYREYISKHEDYELVDIYADEGISATNTKKRDAFNRLIQDCRAGKVDRILVKSISRFARNTLDCIKYVRELKELGVGVTFEKENIDSLDSKGEVLLTILSSLAQDESRSISENATWGIRKKFERGEVRVNTTKFMGYDKDENGRLIINPQQAETVKFIYEKFLDGYSPESIAKYLNDNEISGWTGKANWYPSAIQKMLQNEKYKGDALLQKTFTVDFLTKKRVQNDGQVDQYYVENSHEAIIDKDIWELVQLELARRKAYREEHQLKSYIMQNDDNPFTTKVFCKECGSAFGRKNWTTSRGKRKVWQCNNRYRVKGQIGCQNNHIDEETLEKAVVIAVELLSENVDLLHGKWNKILEENRPLEKHYCTKLAEMINKTSWEFDSYEMCQVLDSITISEDGQISVKFLEGTEVDL

SEQ ID NO: 5389 - protein, 507 aa, synthetic construct
MKRVISYIRFSSEKQAKGDSLRRQSKMVTDWLKAHPEYYLDQDLSFRDLGVSGFTGKHLKGGLGDFLTAIEKGLVKAGDTLLIESLDRLSRQDVDQASELLRNILRSGVDVVTLSDGEHYTSESLKDPLALIKSILIMQRAHEESLRKSERIQAAWNRKKELISEGIKISKRCPAWLKLNDDRKSFSVIPEKVETVKRCFQLRLEGKSIWEIVRTLNDEGHQSMSQYKAGKFGQTSVQDLLKNRSVIGYFTPKGCEEISGYYPAIIDETTFYKVQQLSHYRYGRKPVSAKPLSVNLFKGVIRCSECGHALIITGFSDTRSGIYRCPLRNENRCSAKGLSRKQTDGTLLTLLSRLDRFDSDTTNIIDTLKLHREHISSNIEKLVQLSLEIEDLSAITSKLKQLKGELSQVDADIEKETQRLKSIDVGCLSDCDLTTKAGRIEAQLIIKSAVKEVVLNTAKRRCKVTFHNGRAITLPITENPSEDVTEAIQSLSEVTERGLLDVDEVII

SEQ ID NO: 5390 - protein, 627 aa, synthetic construct
MAGIRTENKIYEVGIYCRLSKDDGTDNESASIATQKSILTDYVKRQGWHLAKTYVDDGYSGTNFQRPSFQNMIKDIENGLINCVITKDLSRLGRNYLDCGLYLEVFFPEHNVRYIAVNDGVDTLNKSAMDITPFRNILNEMYSADVSVKIKSAYRARFQQGKFMGTTAPYGYVKDPADHNHLLIDDKVAHVVREIFDLALAGNGIAKIRKHINKQHILRPAAYAVEQGATGYERYFEDNEENRYIWSENSVRGILRSPIYAGNLAGYKRIAANMKSKKRPSKLPEEWEVIPDTHEGIVTQEEFDTVQQLMTSRRREQNAGGFENIFSGVIKCADCGYAMRAASANRRKRPDIIDCVQYTCNNYGRYGNVMCTAHSIEARDLFNAVLADINRFADMAVNDEKAVRAIERRLTETDQSRAKSLEKEKKKLNKRLAELDRLFSSLYEDKVMERITERNFEMMSGKYQKEQLEIEARLKEVTETLNDSYEKSQGVRDFLSLIRNYQGLKELDATIINALIDKILVSEREKLADGTVRQEIKIYYKFIGFVGELHITPTKRWTALKPKNCTVCGVEYVPSSGISKYCPACAKRIQREKSNESKRRSRERNRRACIELSAKNDRLILYSEMVD

SEQ ID NO: 5391 - protein, 530 aa, synthetic construct
MIAAIYSRKSKFTGKGESIENQIQLCMDYAKNLGINEFLVYEDEGFSGKSMDRPKFKEMLKDAKDKKFDYLICYRLDRISRNVSDFSTLIEDLNKLNISFVSIKEQFDTSTPMGRAMMYISSVFAQLERETIAERVRDNMYELARTGRWLGGMPPYGFISTQINYYDENMNQRKMYKLKVDEDTIEIVKLIFDKYLELRSLSKLYKYMYENGIKGTRGGNLDPSALSLILKNPAYVKADKNVVDYLRKSNIDVMGDIDNIHGILTYAKNTDSPIAAVAKHKGVIDSDKWIEAQRLLNANKAKAPRAGTGSKALLSGLLKCSKCGSNMRITYKNSKSGTIYYYICGTKKSLGVSACDCRNIRSDKAESKVIDELKNKNIKSIMSSYKDSKLENSKDRKNIKTEINSINNQIKEKEIYIDNLVMQLAKVTESSASTFIINKLESLNNDLSNLKSQLESLNTMSRENKQVDININMLIDNLNKFNKEIDTSDINKKRLLLSTVVDYMTWDSDTDTIKVNLIGINPGNTIASGK

SEQ ID NO: 5392 - protein, 509 aa, synthetic construct
MKTCIYLRKSRSDEEAEKQGEFETLSRHRSTLLKVAKEQNLNIVEIKEELVSGESIAYRPKMLELLEEVKNGLYDSVLVMDIDRLGRGNMQDQGLILETFKKSNTKIITPRKTYDLNNEWDEEYSEFEAFMARKELKLITRRMQRGRVKSVEEGKFIASKPPYGYKFVFDESGNKSMVIDEDKAEVVRMIFDLYVNKHYGGVKIATHLNSLGLKTTTGRTWYDKGVRDILKNKTYAGYVVWNKVERGKNSSKTRPIDERIEAKGIHEPIIDESIFLEAQSLFKSNFIPSTKQHTTITNPLAGLIVCSECGHKMIAQQSTYKNKEIVKFVKCLNCGKNRGVRLDILEKDIINELADWVDAYNVSIKNLDSNENKNPNLESYYSIIKSLESEYQTLMKQKENLHNLLEQGIYDVDTYLDRSKILTDKIDLNRSSLSQAKKDLENEKESVFSIADIIPQIKKVLELYYQSNDMQERNELLKEVIDYIDYSREPKKRTSRFNIKIYPRLIKNK

SEQ ID NO: 5393 - protein, 525 aa, synthetic construct
MIAAIYSRKSKFTGKGESIENQIQLCMDYAKNLGINEFLVYEDEGFSGKSTDRPKFKEMLKDAKNKKFDYLICYRLDRISRNVSDFSTLIADLNKLNISFVSIKEQFDTSTPMGRAMMYISSVFAQLERETIAERIRDNMYELAKTGRWLGGMPPYGFNSTQINYYDDGMNQKKMYKLQIDKDTMEIVKIIFDKYLELRSLSKLYKYMYENGIKGTRGGNLDPSALSLILKNPAYVKANKNIIDYLKSIDMEVVGDVDDTHGILTYAKNTDNPIAAVGKHEGVIDADKWIEVQNLLSANKSKAPRAGTGSKALLSGLLKCSKCGSNMRITYKNSKKGTIYYYICGTKKSLGVSACDCRNIRSDKAESKVIEKLKNKSVESIISNYKNAQLENTKDSKDIKAQINSIKNQIKEKETYIDNLVMQLAKVTDSSASTFIIRKLEDLNNGLSELKAKLNSLDTISLENKKLDIDINMLIDNIDKFNKEIDTSDINKKRLLLSTIVDSMYWNSDEETIKVNLIGIHSNRN

(The sequence listing continues in the following parts.)

1. An integrase or fragment thereof comprising an amino acid sequence that is at least 80% identical to an amino acid sequence set forth in any one of SEQ ID NOs: 1-16.

2. The integrase of claim 1, wherein the integrase fragment comprises integrase, recombinase, or transposase activity.

3. (canceled)

4. The integrase of claim 1, wherein the integrase binds to nucleic acid attachment sites attB and attP, other recognition site pairs, or any pseudosites in a human genome.

5. (canceled)

6. (canceled)

7. The integrase of claim 6, wherein the attB and/or attP nucleic acid sequence is truncated by 1 to 32 nucleotides from one or both of the 5′ end and 3′ end.

8. The integrase of claim 4, wherein the integrase binds to any one of the attB nucleic acid sequences selected from the group consisting of SEQ ID NOs: 17, 19, 21, 23, 25, 27, 29, 31, 33, 35, 37, 39, 41, 43, 45, and 47, or a nucleic acid sequence with at least 80% identity to any one of the attB nucleic acid sequences selected from the group consisting of SEQ ID NOs: 17, 19, 21, 23, 25, 27, 29, 31, 33, 35, 37, 39, 41, 43, 45, and 47.

9. The integrase of claim 4, wherein the integrase binds to any one of the attP nucleic acid sequences selected from the group consisting of SEQ ID NOs: 18, 20, 22, 24, 26, 28, 30, 32, 34, 36, 38, 40, 42, 44, 46, and 48, or a nucleic acid sequence with at least 80% identity to any one of the attP nucleic acid sequences selected from the group consisting of SEQ ID NOs: 18, 20, 22, 24, 26, 28, 30, 32, 34, 36, 38, 40, 42, 44, 46, and 48.

10. The integrase of claim 4, wherein:
a) the integrase or fragment thereof comprises an amino acid sequence that is at least 80% identical to an amino acid sequence set forth in SEQ ID NO: 1, wherein the integrase binds to the attB nucleic acid set forth in SEQ ID NO: 17 and the attP nucleic acid set forth in SEQ ID NO: 18;
b) the integrase or fragment thereof comprises an amino acid sequence that is at least 80% identical to an amino acid sequence set forth in SEQ ID NO: 2, wherein the integrase binds to the attB nucleic acid set forth in SEQ ID NO: 19 and the attP nucleic acid set forth in SEQ ID NO: 20;
c) the integrase or fragment thereof comprises an amino acid sequence that is at least 80% identical to an amino acid sequence set forth in SEQ ID NO: 3, wherein the integrase binds to the attB nucleic acid set forth in SEQ ID NO: 21 and the attP nucleic acid set forth in SEQ ID NO: 22;
d) the integrase or fragment thereof comprises an amino acid sequence that is at least 80% identical to an amino acid sequence set forth in SEQ ID NO: 4, wherein the integrase binds to the attB nucleic acid set forth in SEQ ID NO: 23 and the attP nucleic acid set forth in SEQ ID NO: 24;
e) the integrase or fragment thereof comprises an amino acid sequence that is at least 80% identical to an amino acid sequence set forth in SEQ ID NO: 5, wherein the integrase binds to the attB nucleic acid set forth in SEQ ID NO: 25 and the attP nucleic acid set forth in SEQ ID NO: 26;
f) the integrase or fragment thereof comprises an amino acid sequence that is at least 80% identical to an amino acid sequence set forth in SEQ ID NO: 6, wherein the integrase binds to the attB nucleic acid set forth in SEQ ID NO: 27 and the attP nucleic acid set forth in SEQ ID NO: 28;
g) the integrase or fragment thereof comprises an amino acid sequence that is at least 80% identical to an amino acid sequence set forth in SEQ ID NO: 7, wherein the integrase binds to the attB nucleic acid set forth in SEQ ID NO: 29 and the attP nucleic acid set forth in SEQ ID NO: 30;
h) the integrase or fragment thereof comprises an amino acid sequence that is at least 80% identical to an amino acid sequence set forth in SEQ ID NO: 8, wherein the integrase binds to the attB nucleic acid set forth in SEQ ID NO: 31 and the attP nucleic acid set forth in SEQ ID NO: 32;
i) the integrase or fragment thereof comprises an amino acid sequence that is at least 80% identical to an amino acid sequence set forth in SEQ ID NO: 9, wherein the integrase binds to the attB nucleic acid set forth in SEQ ID NO: 33 and the attP nucleic acid set forth in SEQ ID NO: 34;
j) the integrase or fragment thereof comprises an amino acid sequence that is at least 80% identical to an amino acid sequence set forth in SEQ ID NO: 10, wherein the integrase binds to the attB nucleic acid set forth in SEQ ID NO: 35 and the attP nucleic acid set forth in SEQ ID NO: 36;
k) the integrase or fragment thereof comprises an amino acid sequence that is at least 80% identical to an amino acid sequence set forth in SEQ ID NO: 11, wherein the integrase binds to the attB nucleic acid set forth in SEQ ID NO: 37 and the attP nucleic acid set forth in SEQ ID NO: 38;
l) the integrase or fragment thereof comprises an amino acid sequence that is at least 80% identical to an amino acid sequence set forth in SEQ ID NO: 12, wherein the integrase binds to the attB nucleic acid set forth in SEQ ID NO: 39 and the attP nucleic acid set forth in SEQ ID NO: 40;
m) the integrase or fragment thereof comprises an amino acid sequence that is at least 80% identical to an amino acid sequence set forth in SEQ ID NO: 13, wherein the integrase binds to the attB nucleic acid set forth in SEQ ID NO: 41 and the attP nucleic acid set forth in SEQ ID NO: 42;
n) the integrase or fragment thereof comprises an amino acid sequence that is at least 80% identical to an amino acid sequence set forth in SEQ ID NO: 14, wherein the integrase binds to the attB nucleic acid set forth in SEQ ID NO: 43 and the attP nucleic acid set forth in SEQ ID NO: 44;
o) the integrase or fragment thereof comprises an amino acid sequence that is at least 80% identical to an amino acid sequence set forth in SEQ ID NO: 15, wherein the integrase binds to the attB nucleic acid set forth in SEQ ID NO: 45 and the attP nucleic acid set forth in SEQ ID NO: 46; or
p) the integrase or fragment thereof comprises an amino acid sequence that is at least 80% identical to an amino acid sequence set forth in SEQ ID NO: 16, wherein the integrase binds to the attB nucleic acid set forth in SEQ ID NO: 47 and the attP nucleic acid set forth in SEQ ID NO: 48.

11. The integrase of claim 4, wherein any one of the attB nucleic acid sequences selected from the group consisting of SEQ ID NOs: 17, 19, 21, 23, 25, 27, 29, 31, 33, 35, 37, 39, 41, 43, 45, and 47 is truncated by 1 to 32 nucleotides from one or both of the 5′ end and 3′ end.

12. The integrase of claim 4, wherein any one of the attP nucleic acid sequences selected from the group consisting of SEQ ID NOs: 18, 20, 22, 24, 26, 28, 30, 32, 34, 36, 38, 40, 42, 44, 46, and 48 is truncated by 1 to 32 nucleotides from one or both of the 5′ end and 3′ end.

13. The integrase of claim 1, wherein the integrase is linked to a DNA binding domain via a linker.

14. The integrase of claim 13, wherein the DNA binding domain is a DNA binding nuclease.

15. The integrase of claim 14, wherein the DNA binding nuclease is selected from the group consisting of a zinc finger nuclease (ZFN), a transcription-activator like effector nuclease (TALEN), an argonaute, and an RNA-guided nuclease.

16. The integrase of claim 15, wherein the RNA-guided nuclease comprises a CRISPR nuclease.

17. The integrase of claim 16, wherein the CRISPR nuclease is Cas9 or Cas12.

18. The integrase of claim 16, wherein the CRISPR nuclease comprises nickase activity.

19. The integrase of claim 16, wherein the CRISPR nuclease is selected from Cas9-D10A, Cas9-H840A, and Cas12a/b nickase.

20. The integrase of claim 14, wherein the DNA binding nuclease and/or the integrase are linked to a reverse transcriptase domain via a linker.

21. The integrase of claim 20, wherein the reverse transcriptase domain is selected from the group consisting of Moloney Murine Leukemia Virus (M-MLV) reverse transcriptase domain, transcription xenopolymerase (RTX), avian myeloblastosis virus reverse transcriptase (AMV-RT), and Eubacterium rectale maturase RT (MarathonRT).

22. (canceled)

23. The integrase of claim 21, wherein the M-MLV reverse transcriptase domain comprises one or more mutations selected from the group consisting of D200N, T306K, W313F, T330P, L603W, and L139P.

24. The integrase of claim 13, wherein the linker is cleavable or non-cleavable.

25. (canceled)

26. The integrase of claim 13, wherein the linker can be replaced by two associating binding domains of the DNA binding nuclease linked to a reverse transcriptase.

27. (canceled)

28. (canceled)

29. (canceled)

30. (canceled)

31. A polynucleotide comprising a nucleic acid sequence encoding the integrase of claim 1.

32. A vector comprising the nucleic acid sequence of claim 31.

33. A host cell comprising the vector of claim 32.

34. A fusion protein comprising DNA binding nuclease, a reverse transcriptase domain, and an integrase or fragment thereof, wherein the DNA binding nuclease is linked to the reverse transcriptase domain and/or the integrase or fragment thereof via a linker,
wherein the integrase or fragment thereof comprises an amino acid sequence that is at least 80% identical to an amino acid sequence set forth in any one of SEQ ID NOs: 1-16.

35. (canceled)

36. (canceled)

37. (canceled)

38. (canceled)

39. (canceled)

40. (canceled)

41. (canceled)

42. (canceled)

43. (canceled)

44. (canceled)

45. (canceled)

46. (canceled)

47. (canceled)

48. (canceled)

49. (canceled)

50. (canceled)

51. (canceled)

52. (canceled)

53. (canceled)

54. (canceled)

55. (canceled)

56. (canceled)

57. (canceled)

58. (canceled)

59. (canceled)

60. (canceled)

61. (canceled)

62. (canceled)

63. (canceled)

64. (canceled)

65. (canceled)

66. A method of site-specific integration of a nucleic acid into a cell genome, the method comprising:
(a) incorporating an integration site at a desired location in the cell genome by introducing into the cell:
i. a DNA binding nuclease linked to a reverse transcriptase domain, wherein the DNA binding nuclease comprises a nickase activity; and
ii. a guide RNA (gRNA) comprising a primer binding sequence linked to an integration sequence, wherein the gRNA interacts with the DNA binding nuclease and targets the desired location in the cell genome, wherein the DNA binding nuclease nicks a strand of the cell genome and the reverse transcriptase domain incorporates the integration sequence of the gRNA into the nicked site, thereby providing the integration site at the desired location of the cell genome; and
(b) integrating the nucleic acid into the cell genome by introducing into the cell:
i. a DNA or RNA strand comprising the nucleic acid linked to a sequence that is complementary or associated to the integration site; and
ii. an integrase or fragment thereof comprising an amino acid sequence that is at least 80% identical to an amino acid sequence set forth in any one of SEQ ID NOs: 1-16, wherein the integrase or fragment thereof incorporates the nucleic acid into the cell genome at the integration site by integration, recombination, or reverse transcription of the sequence that is complementary or associated to the integration site, thereby introducing the nucleic acid into the desired location of the cell genome of the cell.

67. (canceled)

68. (canceled)

69. (canceled)

70. (canceled)

71. (canceled)

72. (canceled)

73. (canceled)

74. (canceled)

75. (canceled)

76. (canceled)

77. (canceled)

78. (canceled)

79. (canceled)

80. (canceled)

81. (canceled)

82. (canceled)

83. (canceled)

84. (canceled)

85. (canceled)

86. (canceled)

87. (canceled)

88. (canceled)

89. (canceled)

90. (canceled)

91. (canceled)

92. (canceled)

93. (canceled)

94. (canceled)

95. (canceled)

96. (canceled)

97. (canceled)

103. (canceled)

104. (canceled)

105. (canceled)

106. (canceled)

107. An integrase or fragment thereof comprising an amino acid sequence that is at least 80% identical to any one of the integrase amino acid sequences set forth in Table 8.

108. (canceled)

109. (canceled)

110. (canceled)

111. (canceled)

112. (canceled)

113. (canceled)

114. (canceled)

115. (canceled)

116. (canceled)

117. (canceled)

118. A fusion protein comprising DNA binding nuclease, a reverse transcriptase domain, and an integrase or fragment thereof, wherein the DNA binding nuclease is linked to the reverse transcriptase domain and/or the integrase or fragment thereof via a linker,
wherein the integrase or fragment thereof comprises an amino acid sequence that is at least 80% identical to any one of the integrase amino acid sequences set forth in Table 8.
